United States Patent Application Publication US 2018/0126003 A1 - sequence listing, part 49

SEQ ID NO: 84817 - DNA, 1884 bp, Artificial Sequence
  derived and/or modified sequence
atgaacctgatcttccacaaggacatcctgttcggcatccccgccaataaagtacctcaggacgagtggacaggttacacaccgcgcggcaaggacgatgaaattccatgccggcggatgaggtcaggctcttacatcaaggcgatgggtgatgaggactccggtgattccgatacaagcccaaaaccttcccccaaggtggctgcccgaagggagagctatcttaaagcaacacagccctccttgacagagctgaccacattaaagatctccaatgagcatagccctaagctccaaatcaggagtcattcttatctgagggcagtcagtgaggtttccataaaccgttcactagatagtctggaccctgccgggcttctgactagccccaagttccgatcacgaaacgagagctatatgagagcaatgagcacaatcagtcaggttagcgagatggaagtcaacggccagttcgaaagcgtctgcgagtctgtcttcagtgagctagagtctcaggcagttgaggcgttggacctccccatgcctgggtgttttagaatgagatctcactcttacgtcagagccatagaaaaggggtgtagtcaggatgacgagtgcgtgtccctgaggagttcgtcgccccctcggacgactaccacagtcaggacaattcagagtagcactgtgagcagctgtatcacaacatataaaaaaaccccaccccctgtgccaccccgcacgactactaagccttttatttcaataaccgctcagagttctaccgagtcagcacaggacgcctacatggatggtcagggccagcggggggatatcatatcacagtccgggctcagcaattcaacagagagtctagatagcatgaaagcgctcacggccgctattgaagccgcgaacgctcaaattcacggtccggccagccagcatatgggtaacaacaccgccactgtaacgactaccacaacgatcgctacagtaactaccgaggaccgaaagaaggaccacttcaagaagaaccgatgcctgagcattgggatccaggtcgatgatgctgaagaaccagacaagacaggcgagaacaaagcgccatccaagtttcagagtgtcggcgttcaagtggaggaggaaaagtgctttcgaaggttcactagatccaacagcgtcaccacggctgtccaagcggacctggatttccacgacaatctcgaaaatagcctggagagtatcgaagataactcttgtccaggacctatggcacgccagttctctcgcgacgcctctacttcaacagtgagcattcagggcagtggcaaccactatcatgcttgcgccgcggacgatgacttcgacacagattttgatccttcaatactcccacctcccgatccttggatagacagcattactgaggaccccttggaggctgttcagagaagtgtttgtcatcgcgacggacactggtttctcaaacttctacaggcagagagagaccgtatggaaggctggtgccaacagatggaaagagaggagcgggagaacaaccttccagaagatatcttaggtaagatcaggactgctgtgggatcagcacaactcctcatggctcagaagttttatcagttccgcgagctgtgcgaggagaatctgaatcctaacgcacacccgaggccgacttcccaggacctggctggattttgggatatgctgcagctcagcattgaaaatataagcatgaaattcgatgagctccaccaattgaaagccaacaattggaagcaaatggatcctctggacaagaaggtggagcagtgtcggttttgcatggttcatctgaaaacatgcaccaacacaggacagtccaagtag

SEQ ID NO: 84818 - DNA, 1884 bp, Artificial Sequence
  derived and/or modified sequence
atgaatcttatttttcataaagacattctgttcggcatccctgctaacaaggtacctcaggacgaatggactgggtatacccctagagggaaggatgatgaaattccctgccgacgcatgcgtagtggttcgtacattaaggcgatgggagatgaggattcaggggacagcgacacttcaccaaaaccgtcacccaaggtggcggctagacgtgaatcatacctaaaagcaacacagccatccttgaccgaactcactactctcaagatttctaacgagcactcacctaaacttcagattaggtctcatagctatctccgcgctgtgagtgaggtgagcattaacaggagtctggacagcttggaccctgccggattgctgacttcccctaaattccggtcccgaaacgaatcatacatgcgagccatgagtactattagccaagtgtcagaaatggaggtgaacggacaattcgaatcggtttgcgaatcagtgttcagtgagctggagagccaggcagttgaggcactcgatctgcctatgcccggatgctttcgaatgcgctcacattcctacgtgcgggctatcgagaaggggtgttcccaggacgacgaatgtgtcagtctacgttcgagctccccgcctcggactactacaactgttcgcactatccagtctagtacggttagctcctgcataactacatacaagaagactccaccacctgttcctcctcgcactacaacaaagcccttcatcagcataacagcccagagcagtacggaaagtgcccaggatgcctacatggacggacagggtcagcgcggagatatcatcagccaaagcgggttgagcaattctaccgagtctcttgactcaatgaaggcactgactgcagccatcgaggcggcaaacgcgcagatccacggacccgcaagtcagcacatgggtaacaatacagccaccgtgacaaccaccacaactattgctacggtcaccactgaggacaggaaaaaggatcattttaaaaagaaccggtgcctgagtatcggaatccaggttgacgacgccgaggagcccgacaaaacaggcgaaaataaagcccctagcaaattccagagcgtcggagtccaggtggaggaagaaaaatgctttcggaggtttactcgaagcaacagcgtgaccacagccgtgcaggccgacctcgattttcacgataatttagaaaattctctggaaagcattgaggataatagctgtcccggtcccatggccagacagttttcacgggatgcctccacaagtaccgtgagtatacagggctcagggaaccactatcacgcatgtgccgctgacgacgattttgacacggatttcgacccatcaatactccccccacctgacccatggattgattccattactgaggaccctcttgaagccgtgcagcgcagcgtctgtcacagggatgggcactggtttctgaaactgcttcaggccgaacgcgatcggatggaaggctggtgtcagcagatggagcgcgaagaacgggagaacaacttacctgaggatatcttagggaagatcagaacagccgtgggctctgcacaactgcttatggcacagaaattctaccagttccgcgaattatgcgaagagaaccttaatcccaatgcacatccaagaccaacatctcaggatctcgccggattttgggatatgttgcaactgagcattgaaaacatttccatgaaattcgatgagttgcaccagctcaaagctaataactggaaacagatggaccccctggataagaaagtagaacagtgcagattctgcatggtacatctgaaaacctgtacaaataccggccagagtaagtag

SEQ ID NO: 84819 - protein, 685 aa, Artificial Sequence
  derived and/or modified sequence
MNLIFHKDILFGIPANKVPQDEWTGYTPRGKDDEIPCRRMRSGSYIKAMGDEDSGDSDTSPKPSPKVAARRESYLKATQPSLTELTTLKISNEHSPKLQIRSHSYLRAVSEVSINRSLDSLDPAGLLTSPKFRSRNESYMRAMSTISQVSEMEVNGQFESVCESVFSELESQAVEALDLPMPGCFRMRSHSYVRAIEKGCSQDDECVSLRSSSPPRTTTTVRTIQSSTGVIKLSSAVEVSSCITTYKKTPPPVPPRTTTKPFISITAQSSTESAQDAYMDGQGQRGDIISQSGLSNSTESLDSMKALTAAIEAANAQIHGPASQHMGNNTATVTTTTTIATVTTEDRKKDHFKKNRCLSIGIQVDDAEEPDKTGENKAPSKFQSVGVQVEEEKCFRRFTRSNSVTTAVQADLDFHDNLENSLESIEDNSCPGPMARQFSRDASTSTVSIQGSGNHYHACAADDDFDTDFDPSILPPPDPWIDSITEDPLEAVQRSVCHRDGHWFLKLLQAERDRMEGWCQQMEREERENNLPEDILGKIRTAVGSAQLLMAQKFYQFRELCEENLNPNAHPRPTSQDLAGFWDMLQLSIENISMKFDELHQLKANNWKQMDPLDKKERRAPPPVPKKPAKGPAPLIRERSLESSQRQEARKRLMAAKRAASVRQNSATESAESIEIYIPEAQTRL

SEQ ID NO: 84820 - DNA, 2058 bp, Artificial Sequence
  derived and/or modified sequence
atgaacctgatcttccacaaggacatcctgttcggcatccccgccaacaaggtgccccaggacgagtggaccggctacacccccagaggcaaggacgacgagatcccctgcagaagaatgagaagcggcagctacatcaaggccatgggcgacgaggacagcggcgacagcgacaccagccccaagcccagccccaaggtggccgccagaagagagagctacctgaaggccacccagcccagcctgaccgagctgaccaccctgaagatcagcaacgagcacagccccaagctgcagatcagaagccacagctacctgagagccgtgagcgaggtgagcatcaacagaagcctggacagcctggaccccgccggcctgctgaccagccccaagttcagaagcagaaacgagagctacatgagagccatgagcaccatcagccaggtgagcgagatggaggtgaacggccagttcgagagcgtgtgcgagagcgtgttcagcgagctggagagccaggccgtggaggccctggacctgcccatgcccggctgcttcagaatgagaagccacagctacgtgagagccatcgagaagggctgcagccaggacgacgagtgcgtgagcctgagaagcagcagcccccccagaaccaccaccaccgtgagaaccatccagagcagcaccggcgtgatcaagctgagcagcgccgtggaggtgagcagctgcatcaccacctacaagaagacccccccccccgtgccccccagaaccaccaccaagcccttcatcagcatcaccgcccagagcagcaccgagagcgcccaggacgcctacatggacggccagggccagagaggcgacatcatcagccagagcggcctgagcaacagcaccgagagcctggacagcatgaaggccctgaccgccgccatcgaggccgccaacgcccagatccacggccccgccagccagcacatgggcaacaacaccgccaccgtgaccaccaccaccaccatcgccaccgtgaccaccgaggacagaaagaaggaccacttcaagaagaacagatgcctgagcatcggcatccaggtggacgacgccgaggagcccgacaagaccggcgagaacaaggcccccagcaagttccagagcgtgggcgtgcaggtggaggaggagaagtgcttcagaagattcaccagaagcaacagcgtgaccaccgccgtgcaggccgacctggacttccacgacaacctggagaacagcctggagagcatcgaggacaacagctgccccggccccatggccagacagttcagcagagacgccagcaccagcaccgtgagcatccagggcagcggcaaccactaccacgcctgcgccgccgacgacgacttcgacaccgacttcgaccccagcatcctgcccccccccgacccctggatcgacagcatcaccgaggaccccctggaggccgtgcagagaagcgtgtgccacagagacggccactggttcctgaagctgctgcaggccgagagagacagaatggagggctggtgccagcagatggagagagaggagagagagaacaacctgcccgaggacatcctgggcaagatcagaaccgccgtgggcagcgcccagctgctgatggcccagaagttctaccagttcagagagctgtgcgaggagaacctgaaccccaacgcccaccccagacccaccagccaggacctggccggcttctgggacatgctgcagctgagcatcgagaacatcagcatgaagttcgacgagctgcaccagctgaaggccaacaactggaagcagatggaccccctggacaagaaggagagaagagcccccccccccgtgcccaagaagcccgccaagggccccgcccccctgatcagagagagaagcctggagagcagccagagacaggaggccagaaagagactgatggccgccaagagagccgccagcgtgagacagaacagcgccaccgagagcgccgagagcatcgagatctacatccccgaggcccagaccagactgtag

SEQ ID NO: 84821 - DNA, 2402 bp, Artificial Sequence
  derived and/or modified sequence
acttagaatcggcaaatcatagagagaagctaaatgctctcagctgcactataccaaatcaaagctgagatgaataatgaacttaattttccataaagacattctgtttggcattccagctaataaggttccacaagatgaatggacagggtacaccccacgaggtaaagatgatgaaattccatgccgaagaatgcggagtggcagttatatcaaggccatgggggatgaagacagtggagactcagacacgagtcctaagccttctccaaaagttgctgcgcggagagaaagctatctcaaggctactcagccatcccttacagaactcaccacactcaaaatctccaatgaacactcacccaaactccagatccggagtcatagttacctgagggcagtgagtgaagtctccatcaaccggagcctggacagcctggaccctgcaggcttgctcacatcaccaaagttccgctccaggaatgagagctacatgcgagccatgagcaccatcagccaggtgagcgagatggaagtgaacgggcagttcgagtccgtgtgcgagtccgtgttcagcgagctggagtcgcaggccgtggaagcgctggacctgcccatgcccggctgcttccgcatgcggagccacagctatgtgcgggccattgagaaaggctgctcccaggacgacgagtgcgtgtccctgaggtcgtcctcgccgccgcgcaccaccaccaccgttaggaccatccagagcagcacgggtgtcataaaactgagttctgcagttgaagtgtcatcttgcattacaacatataagaagacaccacctccagtcccacccagaactaccacgaaacctttcatttctatcacagcccagagtagcacagagtcagcccaggatgcctacatggacggacagggccagcgaggagatattatcagccagtctggactcagcaactccaccgagagcctggacagtatgaaggctctgacagccgccatcgaagctgcaaacgcccagatccatggccctgccagtcaacacatgggcaataacactgccaccgtcaccaccacgactaccatagccaccgtcaccacggaggacaggaagaaggaccactttaagaaaaatcgatgcctgtctatcgggatacaggtggatgatgctgaagaacctgacaaaacaggggagaataaagcacccagtaagttccagtccgtgggagtgcaagtagaagaagagaagtgcttccgcaggttcactcgatccaacagtgtgacgacagcagtacaggccgacctggacttccatgataatctggaaaattctctggaatctatagaggacaattcgtgtcctggccccatggccagacagttctcccgcgatgccagcacctccacagtcagcattcagggctcaggaaaccattaccatgcctgtgccgccgatgatgactttgacacggattttgacccctctattctgcctcctccggacccctggattgactctatcactgaagaccctctggaggccgtgcaaaggtcagtgtgccaccgggatggccactggttcctgaagcttctccaggcagagcgagaccgcatggaggggtggtgtcaacagatggagcgggaagaacgggaaaacaacctgcccgaagacattctaggaaaaatccgaaccgcagtgggcagtgcccaacttctcatggcccagaaattctaccagttcagagaactgtgtgaagaaaacctgaatcctaatgctcatccaagacccacctcccaggatttggcggggttttgggacatgctgcagttgtccatagaaaatattagtatgaaatttgatgaacttcatcagttaaaggccaataattggaaacagatggatcctcttgacaagaaggagagaagggcccctcctccagtgccaaagaagccggcgaagggccccgcgccgctgatccgggagcgctcgctggagagctcgcagcgccaggaggcccgcaagcgcctgatggccgccaagcgcgccgcgtccgtccgccagaactcggccaccgagagcgccgagagcatcgagatctacatccccgaggcgcagacccggctctgagcgccccgcagcccggccgccgccgccaagcatctgtcccctcctcccccggccgctcctctgccggctgcctctccccctccgagcccgtccgctcccgagctcggtgacttccactgtcgcggtgtagttgtccacctcgcaggagccgccccccgggcccccctcagccccccacttcccgtacccgtttgcccatctccttcttcaccgagcttcgccccctgtcctgatgccgtcgccctgcctcatactgagatccaaccct

SEQ ID NO: 84822 - DNA, 2058 bp, Artificial Sequence
  derived and/or modified sequence
atgaacttgatctttcacaaggatatccttttcggaattcccgccaacaaggtacctcaggatgaatggacagggtacaccccccgcgggaaggacgacgagataccctgcagacgaatgcggagcggttcatacatcaaggcgatgggcgatgaagacagtggcgattccgacacatcaccgaaacctagtcccaaggtagccgctagaagagagtcctatcttaaagcaacacaacccagtttgactgagttgactaccctcaagatctcaaatgagcacagcccaaaactgcagatccggtcccatagctatctgagggccgtctccgaagtatccatcaacaggagtctggattccttggatccagctggactgctgacaagccctaagtttcggagtcggaatgaatcatacatgagagcaatgtcgactatttcacaagtaagtgagatggaggttaatggccagttcgagtccgtctgtgaatccgtgttttccgagctggagtctcaagccgtggaggctctggacctaccgatgcctggctgcttccgcatgcgatcacactcctatgtgcgggcaatagagaaaggatgcagtcaggacgatgaatgtgtgtcccttaggagttctagccccccgagaacaaccacaaccgtgcgaaccattcagtcatctacaggggttattaagctgtcttctgccgtggaggtatcatcctgcattaccacatacaagaagacaccacccccagtgccccctcgtacaaccacgaagccatttatttctatcaccgcacagagctcaacagagtccgcccaggacgcctacatggacgggcaggggcaacgtggagacatcatcagccaatccggactgtctaattccactgaaagtctcgatagcatgaaagccctcacagctgcaatcgaagccgcaaacgcccagattcatggtccagcctcacagcatatggggaacaatactgctaccgtgacaacaaccactacaatcgcaactgtcactaccgaggaccggaagaaagaccacttcaaaaaaaacaggtgtctttccatcggaattcaggtggacgacgctgaggaacctgacaagactggagaaaacaaagcacctagcaagttccagagcgtcggcgtgcaggtcgaggaagagaagtgtttcaggcgctttacccggagcaatagcgtcaccacagccgtgcaggccgatttagactttcacgacaacctggaaaatagcctggaatccattgaggacaacagctgccccggacccatggcccgccagttcagcagggacgcctcaacaagcactgttagcatacagggctccggcaaccactaccacgcctgcgcagccgacgatgattttgacaccgattttgacccatctatcctgcctcctcccgatccctggattgacagcattaccgaagatccgcttgaagcagtccagcggagcgtctgccacagagacgggcattggttcttgaaactgttacaggccgaacgcgaccggatggaaggatggtgccaacagatggagcgagaagagcgcgagaataacctgcccgaggacattcttggcaaaattcggacagctgtggggtctgctcagctactgatggcccagaagttttatcagtttcgagagctctgcgaagaaaacctcaacccaaatgcacatcctcgacccacaagccaggatctggctggcttttgggacatgctgcaactgtccatcgaaaacatctccatgaaatttgacgagctccaccagctcaaggccaataattggaagcagatggaccctctggacaagaaggaaagacgggctcctccccctgtgcctaaaaaacctgccaaagggcctgcaccactcatccgagaacggtctttggaatcttcccagagacaggaagcccggaaacgactgatggcggccaagcgtgcagcttccgttaggcagaacagcgccacagagtccgcagagagtattgagatttatatccctgaagcacagacccgcctgtag

SEQ ID NO: 84823 - DNA, 2058 bp, Artificial Sequence
  derived and/or modified sequence
atgaacctgatcttccacaaggacatcctgtttggcatcccagccaacaaggtgccccaggatgagtggacaggctacaccccccggggcaaggatgatgagatcccctgcaggaggatgaggagcggcagctacatcaaggccatgggagatgaggacagcggggacagcgacaccagccccaagcccagccccaaggtggccgcccggcgggagagctacctgaaggccacccagcccagcctgacagagctgaccaccctgaagatcagcaatgagcacagccccaagctgcagatccgcagccacagctacctgcgggctgtgtctgaggtgtccatcaacagaagcctggacagcctggaccctgctggcctgctgaccagccccaagttccgcagcagaaatgaaagctacatgagggccatgagcaccatcagccaggtgtctgagatggaggtgaatggccagtttgagagcgtgtgtgagagcgtcttcagcgagctggagagccaggccgtggaggccctggacctgcccatgcctggctgcttcaggatgaggagccacagctatgtgcgggccatcgagaagggctgcagccaggatgatgaatgtgtgtccctgcggagcagcagcccccccaggaccaccaccaccgtgaggaccatccagagcagcactggagtcatcaagctgagcagcgctgtggaggtgagcagctgcatcaccacctacaagaagaccccacctcctgtgccccccaggaccaccaccaagcccttcatcagcatcacagcccagagcagcacagaaagtgcccaggatgcctacatggatggccagggccagagaggagacatcatcagccagagcggcctgagcaacagcacagagagcctggacagcatgaaggccctgacagctgccattgaagctgccaatgcccagatccacggccctgccagccagcacatgggcaacaacacagccaccgtgaccaccaccaccaccatcgccaccgtgaccacagaggacaggaagaaggaccacttcaagaagaaccgctgcctgagcatcggcatccaggtggatgatgctgaggagccagacaagacaggagagaacaaggcccccagcaagttccagagcgtgggcgtgcaggtggaggaggagaagtgcttccgccgcttcaccaggagcaacagcgtgaccacagctgtgcaggccgacctggacttccatgacaacctggagaacagcctggagagcattgaggacaacagctgccccggccccatggcccggcagttcagcagagatgccagcaccagcacagtgtccatccagggcagcggcaaccactaccacgcctgtgccgcagatgatgactttgacacagactttgaccccagcatcctgcccccaccagacccctggattgacagcatcacagaggaccccctggaggccgtgcagaggtctgtgtgccacagagatggccactggttcctgaagctgctgcaggccgagcgggacaggatggagggctggtgccagcagatggagcgggaggagcgggagaacaacctgcctgaggacatcctgggcaagatcagaacagctgtgggcagcgcccagctgctgatggcccagaagttctaccagttccgggagctgtgtgaggagaacctgaaccccaatgcccacccccggcccaccagccaggacctggccggcttctgggacatgctgcagctgagcattgagaacatctccatgaagtttgatgagctgcaccagctgaaggccaacaactggaagcagatggaccccctggacaagaaggagcggcgggcccctcctcctgtgcccaagaagccagccaagggccctgcccccctcatccgggagaggagcctggagagcagccagaggcaggaggccaggaagaggctgatggccgccaagagagctgcctctgtgcggcagaacagcgccacagagagcgctgagagcattgagatctacatccctgaggcccagacccggctgtag

SEQ ID NO: 84824 - DNA, 2058 bp, Artificial Sequence
  derived and/or modified sequence
atgaacctgatcttccacaaggacatcctgttcggcatccccgccaataaggtaccccaggatgagtggacaggctacacccctagaggtaaagatgacgagatcccttgtcgtcgcatgcgtagtggatcatatataaaggcaatgggagatgaggactctggcgacagcgacacgtccccaaaaccatcacctaaggtggctgctagaagggaaagttacttgaaggctacacagccttcattaactgagcttactaccctgaaaatctctaatgaacacagtcctaagctgcagattagatctcactcctatttgcgagcagtgtctgaggtgagcatcaatcgtagcctggatagcctcgatcccgccgggctactgacttcgccaaagttcagatctagaaatgaaagctacatgagggcaatgtccacaatatctcaggtcagcgagatggaggtgaacggacagtttgagtctgtctgtgagtctgtcttctccgagctggaatcccaggccgtcgaagcccttgacctgcccatgcctggctgtttcaggatgcggtcccactcctacgttcgcgcaattgagaagggttgttctcaggacgatgagtgcgtgagtctgagatcatcatccccccctagaaccaccaccaccgtgaggactatccagtcctcaactggggtaatcaaactcagcagtgccgtggaagtcagtagctgcataactacctataaaaagactcctcctccagtgccaccacgcacaaccaccaagccctttatttctataacagcccagtcctccaccgagtccgctcaagatgcctacatggacggacagggacagagaggcgacataatttcccagtctggcctcagtaacagcacggaatccctcgattctatgaaggcactgactgcagctattgaagcggctaatgcgcagatccatgggcccgccagtcagcatatgggaaataatacggccactgtcacaaccaccaccactatcgccacagtcactaccgaagaccgaaaaaaggatcattttaagaaaaataggtgtctatccataggaatccaggtggatgacgccgaggaaccagacaaaacaggagaaaataaagccccttcgaaattccaatctgtgggggtccaggtcgaagaagagaaatgctttcgccgtttcactcgcagtaacagtgttactacagccgttcaagcagatctggattttcacgataaccttgagaactctctggagtctattgaagataacagttgccccgggcccatggccaggcaattttcacgggacgccagtacctccaccgtctccatccagggttctgggaatcactatcacgcatgcgccgcagacgatgatttcgataccgacttcgaccccagcatcctccctccccctgacccatggatagatagtatcacagaggaccccttggaagcagtccaacggagcgtctgccatagggatggccattggtttttgaaactgctgcaggcagagcgagatagaatggaagggtggtgccaacagatggaaagggaggagcgagaaaataatctgccagaggatattcttgggaagatcaggacggctgtgggttctgcccaattactcatggcacaaaagttctatcagttcagagaactttgcgaggaaaacctgaatcccaatgcgcatccccggccaacgtctcaggacctggccggattctgggacatgctccagctgtctatcgagaatatctcaatgaaatttgacgagctgcaccagctgaaagctaacaactggaagcagatggaccccctggacaagaaggagcggcgagccccacctccagttcccaagaagcccgctaagggccccgccccgcttatacgggaaaggtcgctagagtcctctcagaggcaggaagctaggaagcgtctcatggccgccaaacgcgcagcctccgtgcgccagaactctgctaccgagagtgcggagtctatcgagatctacattccagaagcgcagacccgcctatag

SEQ ID NO: 84825 - DNA, 2058 bp, Artificial Sequence
  derived and/or modified sequence
atgaatcttatctttcataaggacatcttgttcgggatacctgctaataaggtcccacaggacgagtggactggatacacacctagaggcaaagacgatgagattccttgtcgacgaatgaggtccggatcttacattaaggctatgggcgatgaggactcgggtgactccgacaccagtcccaaaccgtctccaaaagtcgctgccagaagagaatcctatttgaaagcgacacagccttctctgactgaactgacaacactcaaaataagcaacgagcactctccaaaactccagattcgctcacactcatacctcagggctgtgagtgaagtgagtatcaataggtctctggactccctggaccctgctggccttttaaccagcccaaagtttcgcagccgtaacgaaagctatatgcgcgcaatgtccacaatcagccaggtgagcgaaatggaggtgaatggccagtttgaatccgtgtgtgagtccgtgtttagtgaacttgaaagccaggccgttgaagccttagacctgcccatgcccggatgcttcagaatgcgtagccactcctatgtaagagcaatcgaaaaaggttgttcacaggacgatgagtgtgtgtctttacggtccagcagcccacccagaaccacaaccaccgtgcgcaccattcagagctcaacgggcgtcattaagctctccagcgccgtcgaggtctctagctgtataacaacctataaaaaaacacccccacccgtgcctccacgtaccacgaccaaaccgtttatcagtatcacagcccagtcctctactgagagtgcccaggatgcctatatggatgggcaaggtcagaggggtgacatcattagtcagagcggcctgagcaattctacagaaagcctcgattcgatgaaggccttgactgctgcaatagaagcggcaaatgcccaaatccacggacccgctagccaacacatggggaacaacaccgccactgttaccaccaccaccacaatcgccactgtgacaacagaggacagaaaaaaagaccatttcaaaaagaatagatgcctaagcatcggcatccaggtggacgacgctgaggagccggacaaaactggagaaaacaaggcaccaagtaaatttcagtctgtgggcgtgcaagtcgaggaagagaaatgttttcgcagatttacacgaagcaacagcgtgactacagcggttcaggctgacctagacttccatgataatcttgagaacagtctcgagagcatcgaggacaactcctgtcccggacctatggccagacagttctcacgcgacgcgtcaacctctacagtgagcatccagggctctggcaaccattaccacgcgtgcgcagctgacgatgacttcgacactgatttcgacccatctatcctccctcccccagatccttggatcgatagtatcacagaagaccctcttgaagcagtccagcgctccgtgtgccaccgggacgggcattggttcctgaaactgctccaggctgaacgtgatagaatggagggttggtgccaacagatggagagagaggagagagaaaacaatctgcccgaagacattctcggaaagatccgcacagcagtagggagtgcacagctcctgatggctcaaaaattctaccaattccgagagctctgcgaggaaaacctaaatcccaatgcacacccacggcctaccagtcaagatctggcaggattttgggatatgttgcagctgtcaatcgagaacatcagcatgaagttcgatgaactccatcaactcaaagccaataattggaagcagatggaccccttggataaaaaggaacggagggcccctccccctgtccctaaaaagccagctaaaggcccagcgcctcttatccgtgagcggagccttgagagcagccaacggcaagaggcacggaagcgactgatggccgctaagcgggcagcatctgtgcgccagaactctgctacggaatctgcggagtccattgaaatctatattccagaagcacagaccaggctgtag

SEQ ID NO: 84826 - protein, 332 aa, Artificial Sequence
  derived and/or modified sequence
  misc_feature (1)..(1): Xaa can be any naturally occurring amino acid
XGREGLLGQRRPQDGQARSSCSPGGRTPAARDSIVREVIQNSKEVLSLLQEKNPAFKPVLAIIQAGDDNLMQEINQNLAEEAGLNITHICLPPDSSEAEIIDEILKINEDTRVHGLALQISENLFSNKVLNALKPEKDVDGVTDINLGKLVRGDAHECFVSPVAKAVIELLEKSVGVNLDGKKILVVGAHGSLEAALQCLFQRKGSMTMSIQWKTRQLQSKLHEADIVVLGSPKPEEIPLTWIQPGTTVLNCSHDFLSGKVGCGSPRIHFGGLIEEDDVILLAAALRIQNMVSSGRRWLREQQHRRWRLHCLKLQPLSPVPSDIEISRGQTP

SEQ ID NO: 84827 - protein, 92 aa, Artificial Sequence
  derived and/or modified sequence
VYGAKDIELSPEAQAKIDRYTQQGFGNLPICMAKTHLSLSHQPDKKGVPRDFILPISDVRASIGAGFIYPLVGTRSSPLALVGESQPKQVHP

SEQ ID NO: 84828 - protein, 275 aa, Artificial Sequence
  derived and/or modified sequence
MGTRLPLVLRQLRRPPQPPGPPRRLRVPCRASSGGGGGGGGGREGLLGQRRPQDGQARSSCSPGGRTPAARDSIVREVIQNSKEVLSLLQEKNPAFKPVLAIIQAGDDNLMQEINQNLAEEAGLNITHICLPPDSSEAEIIDEILKINEDTRVHGLALQISENLFSNKVLNALKPEKDVDGVTDINLGKLVRGDAHECFVSPVAKAVIELLEKSGVNLDGKKILVVGAHGSLEAALQCLFQRKGSMTMSIQWKTRQLQSKTESRSVTRLECRRVI

SEQ ID NO: 84829 - protein, 120 aa, Artificial Sequence
  derived and/or modified sequence
ALQISENLFSNKVLNALKPEKDVDGVTDINLGKLVRGDAHECFVSPVAKAVIELLEKSVGVNLDGKKILVVGAHGSLEAALQCLFQRKGSMTMSIQWKTRQLQSKTESRSVTRLECRRVI

SEQ ID NO: 84830 - protein, 120 aa, Artificial Sequence
  derived and/or modified sequence
LALQISENLFSNKVLNALKPEKDVDGVTDINLGKLVRGDAHECFVSPVAKAVIELLEKSGVNLDGKKILVVGAHGSLEAALQCLFQRKGSMTMSIQWKTRQLQSKTESRSVTRLECRRVI

SEQ ID NO: 84831 - DNA, 828 bp, Artificial Sequence
  derived and/or modified sequence
atgggcaccagactgcccctggtgctgagacagctgagaagacccccccagccccccggcccccccagaagactgagagtgccctgcagagccagcagcggcggcggcggcggcggcggcggcggcagagagggcctgctgggccagagaagaccccaggacggccaggccagaagcagctgcagccccggcggcagaacccccgccgccagagacagcatcgtgagagaggtgatccagaacagcaaggaggtgctgagcctgctgcaggagaagaaccccgccttcaagcccgtgctggccatcatccaggccggcgacgacaacctgatgcaggagatcaaccagaacctggccgaggaggccggcctgaacatcacccacatctgcctgccccccgacagcagcgaggccgagatcatcgacgagatcctgaagatcaacgaggacaccagagtgcacggcctggccctgcagatcagcgagaacctgttcagcaacaaggtgctgaacgccctgaagcccgagaaggacgtggacggcgtgaccgacatcaacctgggcaagctggtgagaggcgacgcccacgagtgcttcgtgagccccgtggccaaggccgtgatcgagctgctggagaagagcggcgtgaacctggacggcaagaagatcctggtggtgggcgcccacggcagcctggaggccgccctgcagtgcctgttccagagaaagggcagcatgaccatgagcatccagtggaagaccagacagctgcagagcaagaccgagagcagaagcgtgaccagactggagtgcagaagagtgatctag

SEQ ID NO: 84832 - DNA, 345 bp, Artificial Sequence
  derived and/or modified sequence
atgcaggagatcaaccagaacctggccgaggaggccggcctgaacatcacccacatctgcctgccccccgacagcagcgaggccgagatcatcgacgagatcctgaagatcaacgaggacaccagagtgcacggcctggccctgcagatcagcgagaacctgttcagcaacaaggtgctgaacgccctgaagcccgagaaggacgtggacggcgtgaccgacatcaacctgggcaagctggtgagaggcgacgcccacgagtgcttcgtgagccccgtggccaaggccgtgatcgagctgctggagaagagcggcgtgaacctggacggcaagaagatcctgtag

SEQ ID NO: 84833 - DNA, 363 bp, Artificial Sequence
  derived and/or modified sequence
gccctgcagatcagcgagaacctgttcagcaacaaggtgctgaacgccctgaagcccgagaaggacgtggacggcgtgaccgacatcaacctgggcaagctggtgagaggcgacgcccacgagtgcttcgtgagccccgtggccaaggccgtgatcgagctgctggagaagagcgtgggcgtgaacctggacggcaagaagatcctggtggtgggcgcccacggcagcctggaggccgccctgcagtgcctgttccagagaaagggcagcatgaccatgagcatccagtggaagaccagacagctgcagagcaagaccgagagcagaagcgtgaccagactggagtgcagaagagtgatctag

SEQ ID NO: 84834 - DNA, 363 bp, Artificial Sequence
  derived and/or modified sequence
ctggccctgcagatcagcgagaacctgttcagcaacaaggtgctgaacgccctgaagcccgagaaggacgtggacggcgtgaccgacatcaacctgggcaagctggtgagaggcgacgcccacgagtgcttcgtgagccccgtggccaaggccgtgatcgagctgctggagaagagcggcgtgaacctggacggcaagaagatcctggtggtgggcgcccacggcagcctggaggccgccctgcagtgcctgttccagagaaagggcagcatgaccatgagcatccagtggaagaccagacagctgcagagcaagaccgagagcagaagcgtgaccagactggagtgcagaagagtgatctag

SEQ ID NO: 84835 - DNA, 828 bp, Artificial Sequence
  derived and/or modified sequence
atgggaacccggctgcccctggtcctccgacaacttaggagaccaccacaaccacctggacccccccgcaggctcagagtaccctgcagggcctcttccggcggcggcggaggcggcggaggcggccgggagggactgctcgggcaaaggcgaccacaagacggtcaggcccgcagcagctgcagccccggcggccgcacgcccgccgcgcgtgatagcattgtgcgtgaggtcatacagaattcgaaggaggtgctctccttgctgcaggagaagaaccctgctttcaagcccgtgctagcaataatccaggctggggatgataacctgatgcaagaaatcaatcagaatcttgccgaggaagccgggttgaatataacccacatttgtcttccccctgactcttcagaggcagaaattatcgatgagatcctgaaaattaacgaagacactagagtgcatggccttgcactacaaatcagcgaaaacttatttagtaacaaagtcctcaacgccctgaagcctgagaaggacgttgatggcgtgaccgacattaatctgggaaagcttgtgcggggcgatgcccatgagtgttttgtcagccctgtagcaaaggccgtcatcgaactgcttgagaagagcggcgtcaatctggatggaaagaagatcttggtagtaggcgcccacggctcactcgaggccgctctgcagtgcctgtttcaacgtaagggttcgatgactatgtccatccagtggaagactcgccagctccagagtaagactgaatcccgatccgtgacacggctggagtgtcgaagagtaatttag

SEQ ID NO: 84836 - DNA, 1096 bp, Artificial Sequence
  derived and/or modified sequence
ccactccgcaccccaccctctgtctggtacagcttaccaaaccaaagtgcccaaagccgtgacatcccggccggcggctcgcaggcccccgccctccgcacgtcacggccgccgggtgcagtgccccctaggggcccctgggacgaggaggaagcgccaggtccttcccgccgccgccgccgccgccgccgcctgctcccctggcacgcgccccgccgccctcggcagccgcagctccgtgtcccctgagaaccagccgtcccgcgccatgggcacgcgtctgccgctcgtcctgcgccagctccgccgcccgccccagcccccgggccctccgcgccgcctccgtgtgccctgtcgcgctagcagcggcggcggcggaggcggcggcggtggccgggagggcctgcttggacagcggcggccgcaggatggccaggcccggagcagctgcagccccggcggccgaacgcccgcggcgcgggactccatcgtcagagaagtcattcagaattcaaaagaagttctaagtttattgcaagaaaaaaaccctgccttcaagccggttcttgcaattatccaggcaggtgacgacaacttgatgcaggaaatcaaccagaatttggctgaggaggctggtctgaacatcactcacatttgcctccctccagatagcagtgaagccgagattatagatgaaatcttaaagatcaatgaagataccagagtacatggccttgcccttcagatctctgagaacttgtttagcaacaaagtcctcaatgccttgaaaccagaaaaagatgtggatggagtaacagacataaacctggggaagctggtgcgaggggatgcccatgaatgttttgtttcacctgttgccaaagctgtaattgaacttcttgaaaaatcaggtgtcaacctagatggaaagaagattttggtagtgggggcccatgggtctttggaagctgctctacaatgcctgttccagagaaaagggtccatgacaatgagcatccagtggaaaacacgccagcttcaaagcaagacggagtctcgttctgtcaccaggctggagtgcaggcgcgtgatctag

SEQ ID NO: 84837 - DNA, 345 bp, Artificial Sequence
  derived and/or modified sequence
atgcaagagattaaccaaaacctggccgaggaggcaggattaaatatcacacacatttgtctgccccctgacagctccgaagccgagattatcgatgagatcctgaaaattaacgaggataccagggttcatggtctcgctctccagatttcagagaatctgttctccaataaggtgttgaacgccctgaaacccgagaaggacgtagacggggtgactgatatcaatcttggtaagctggtccggggcgacgctcacgagtgtttcgtgtcgcctgttgccaaggccgtgattgagctcctggagaagagcggggtcaatttggatgggaagaaaatcctgtag

SEQ ID NO: 84838 - DNA, 363 bp, Artificial Sequence
  derived and/or modified sequence
gcacttcagatatcagagaatttattctctaataaggtactaaatgctctcaagcctgaaaaagacgtggacggggtaactgacatcaacctgggcaagctggtgcgaggcgatgcccacgaatgtttcgtttctccagtggcgaaagccgtgattgagctcttggaaaaatctgtcggggttaatctagacggcaagaagattctagtagttggggcgcatggaagtttagaggcagccctgcagtgcctctttcagagaaaagggtctatgactatgtcaatccagtggaagaccaggcagctccagagcaaaacagagtccaggagtgtgactcgcctggaatgccgacgtgtcatttag

SEQ ID NO: 84839 - DNA, 363 bp, Artificial Sequence
  derived and/or modified sequence
ctggctcttcagattagcgaaaatctgtttagcaataaggtgctgaatgctctcaagcctgaaaaggacgtagacggagtgactgatatcaacctaggaaagttggtaagaggggatgcccacgagtgctttgtgagccccgtggccaaggcagtcattgagctgctcgaaaagtcaggggtgaacctggacggcaagaaaatcctcgtggtgggagcacatgggagcttggaagccgcattgcagtgcttgttccagaggaaagggtctatgaccatgagcatccagtggaagactaggcagcttcagagcaaaaccgagtcaagaagcgtcactaggctggagtgccgtagagtgatctag

SEQ ID NO: 84840 - DNA, 828 bp, Artificial Sequence
  derived and/or modified sequence
atgggcacccggctgcccctggtgctgcggcagctgcggcggcccccccagcccccaggccccccccggcggctgcgggtgccctgccgggccagcagcggcggcggcggcggcggcggcggcggccgggagggcctgctgggccagaggcggccccaggacggccaggcccggagcagctgcagccctgggggccgcaccccagctgcccgggacagcatcgtgcgggaggtgatccagaacagcaaggaggtgctgagcctgctgcaggagaagaacccagccttcaagcctgtgctggccatcatccaggccggagatgacaacctgatgcaggagatcaaccagaacctggccgaggaggccggcctgaacatcacccacatctgcctgcccccagacagcagcgaggccgagatcattgatgagatcctgaagatcaatgaagacaccagggtgcacggcctggccctgcagatcagcgagaacctcttcagcaacaaggtgctgaatgccctgaagccagagaaggatgtggatggagtgacagacatcaacctgggcaagctggtgagaggagatgcccatgaatgttttgtgtcccctgtggccaaggccgtcatcgagctgctggagaagagcggcgtgaacctggatggcaagaagatcctggtggtgggcgcccacggcagcctggaggccgccctgcagtgcctcttccagaggaagggctccatgaccatgagcatccagtggaagacccggcagctgcagagcaagacagagagccgctctgtgacccggctggagtgccggcgggtcatctag

SEQ ID NO: 84841 - DNA, 345 bp, Artificial Sequence
  derived and/or modified sequence
atgcaggagatcaaccagaacctggccgaggaggccggcctgaacatcacccacatctgcctgcccccagacagcagcgaggccgagatcattgatgagatcctgaagatcaatgaagacaccagggtgcacggcctggccctgcagatcagcgagaacctcttcagcaacaaggtgctgaatgccctgaagccagagaaggatgtggatggagtgacagacatcaacctgggcaagctggtgagaggagatgcccatgaatgttttgtgtcccctgtggccaaggccgtcatcgagctgctggagaagagcggcgtgaacctggatggcaagaagatcctgtag

SEQ ID NO: 84842 - DNA, 363 bp, Artificial Sequence
  derived and/or modified sequence
gccctgcagatcagcgagaacctcttcagcaacaaggtgctgaatgccctgaagccagagaaggatgtggatggagtgacagacatcaacctgggcaagctggtgagaggagatgcccatgaatgttttgtgtcccctgtggccaaggccgtcatcgagctgctggagaagtctgtgggcgtgaacctggatggcaagaagatcctggtggtgggcgcccacggcagcctggaggccgccctgcagtgcctcttccagaggaagggctccatgaccatgagcatccagtggaagacccggcagctgcagagcaagacagagagccgctctgtgacccggctggagtgcagaagagtcatctag

SEQ ID NO: 84843 - DNA, 363 bp, Artificial Sequence
  derived and/or modified sequence
ctggccctgcagatcagtgaaaatctcttcagcaacaaggtgctgaatgccctgaagccagagaaggatgtggatggagtgacagacatcaacctgggcaagctggtgagaggagatgcccacgagtgctttgtgtcccctgtggccaaggctgtgattgagctgctggagaagtctggagtgaacctggatggcaagaagatcctggtggtgggcgcccacggcagcctggaggccgccctgcagtgcctcttccagaggaagggctccatgaccatgagcatccagtggaagacccggcagctgcagagcaagacagagagccgctctgtgacccggctggagtgcagaagagtcatctag

SEQ ID NO: 84844 - DNA, 828 bp, Artificial Sequence
  derived and/or modified sequence
atgggcacccggctgcccctggtgctgcggcagctgcggcggcccccccagcccccaggcccaccccggaggcttcgcgttccatgtcgtgcctccagtggcggcggcggcggcggtgggggcggacgtgaaggtttactgggtcagagaagacctcaggacgggcaggcccgatcgtcctgctctcccgggggacggacacccgcggcccgtgatagcattgtccgtgaagtgatacagaatagtaaggaggtactgtccctgctgcaggaaaagaacccggcattcaaaccagttctggccatcattcaggccggagatgataatctgatgcaagaaatcaatcagaatctcgctgaggaggccgggctgaacatcacccacatatgtctcccccctgacagctcggaggcagaaattatagacgaaatccttaaaatcaatgaagacactcgagtgcacggattggccctgcagatttctgagaatttgttctcaaataaagtcctcaacgctttgaaacctgagaaagacgtagacggcgttactgatattaacttaggtaagctggtgcgaggcgatgcccacgaatgttttgtctctcccgtggctaaagctgtcattgaactgctggagaaaagcggtgtaaacttggatggaaaaaaaatactggtcgttggggctcacggtagcttagaagctgccctgcagtgtctgttccaacgcaaggggagcatgacaatgagtatacaatggaagaccagacagctgcaaagcaagacagaatctcgctcagtcacaaggttagagtgccgacgagtgatttag

SEQ ID NO: 84845 - DNA, 345 bp, Artificial Sequence
  derived and/or modified sequence
atgcaggagatcaaccagaacctggccgaggaggccggcctgaacattactcatatctgtttgccacccgattcctccgaagcagagattatcgacgaaattttaaagatcaatgaggacacaagggtgcatggtcttgcactgcaaatcagcgaaaaccttttcagtaacaaagtgctgaatgcattaaaacccgaaaaagacgttgacggcgttacagatattaacctcggtaagctggtgcgtggagacgcacacgaatgtttcgtgtcacccgtcgccaaggctgttatcgagttgttagaaaagagcggggttaacctggacggaaagaagatattgtag

SEQ ID NO: 84846 - DNA, 363 bp, Artificial Sequence
  derived and/or modified sequence
gccctgcagatcagcgagaacctgttcagcaacaaggtgctgaacgctctgaaacccgagaaggatgtggacggagtgaccgacatcaatctgggcaaactggtcaggggagatgcccacgaatgctttgtgtcacccgtggccaaagctgttattgaactcctggaaaagtccgtgggggtgaacttggacgggaaaaaaatcctggtggtcggcgcccacggctctctggaggctgccctgcagtgcctcttccagcgcaaaggctctatgacaatgtccatccaatggaagacccgacagcttcagagcaagacagaatccagatctgtgacacgtctcgaatgcagacgagtgatttag

SEQ ID NO: 84847 - DNA, 363 bp, Artificial Sequence
  derived and/or modified sequence
ctggccctgcagatcagcgagaacctgttcagcaacaaggtgctgaatgccctgaagcctgaaaaggatgttgatggtgttactgacatcaacctgggcaaacttgtccgcggtgacgctcacgagtgtttcgtgtcccccgtggccaaggccgtgatcgaactgctagagaagtcgggagtaaatctagacggtaagaagatactcgtcgtgggagcacacgggtccctcgaggcagccctacagtgcctctttcagcgcaagggcagtatgaccatgtccatccaatggaaaacccggcaactgcagtccaagaccgagagccggtccgtgacacggttggaatgccgaagagttatttag

SEQ ID NO: 84848 - DNA, 828 bp, Artificial Sequence
  derived and/or modified sequence
atgggcactcggctgcctctcgtgctgcggcaactgcggagaccccctcagcccccaggaccgcctaggaggctgagagtgccttgcagagcaagcagcgggggaggcggagggggagggggaggcagggagggcctgctaggccagcgcagacctcaagatggccaggcaaggagtagttgttctcccggtgggaggacaccagccgctcgagattctatcgtaagagaggtgattcagaactcaaaggaggtactgagcctcctccaggagaaaaatcctgctttcaagccagttcttgccataattcaggcaggcgacgacaatctcatgcaggaaattaaccaaaatctggcggaagaagcaggtctgaatatcactcacatttgccttcctcctgattccagcgaggcagaaatcatcgatgagattctgaagatcaacgaggacacccgggttcacggccttgctctccagatttccgaaaatctgttttccaacaaagtattaaacgccctcaaaccagagaaggacgtggatggcgtcaccgacattaacttgggcaagctggtgcgaggtgacgctcatgaatgcttcgtgtccccggttgccaaggccgttatcgagctgctcgagaaatccggcgtaaacctcgacggaaagaagatcttagtggtgggagctcatgggtcgctcgaagccgctctgcagtgtctctttcagagaaagggtagcatgacgatgagtattcaatggaaaacacggcagctgcaaagtaaaactgaatcacggtcggtcacccgtctggagtgccggagagtgatttag

SEQ ID NO: 84849 - DNA, 524 bp, Artificial Sequence
  derived and/or modified sequence
gtgcgcccttccccgcgcgcggcccctcctgctgggctggggtctgtggctgacgtccgcttttcccggaacggcaaagagaagtcattcagaattcaaaagaagttctaagtttattgcaagaaaaaaaccctgccttcaagccggttcttgcaattatccaggcaggtgacgacaacttgatgcaggaaatcaaccagaatttggctgaggaggctggtctgaacatcactcacatttgcctccctccagatagcagtgaagccgagattatagatgaaatcttaaagatcaatgaagataccagagtacatggccttgcccttcagatctctgagaacttgtttagcaacaaagtcctcaatgccttgaaaccagaaaaagatgtggatggagtaacagacataaacctggggaagctggtgcgaggggatgcccatgaatgttttgtttcacctgttgccaaagctgtaattgaacttcttgaaaaatcaggtgtcaacctagatggaaagaagattttg

SEQ ID NO: 84850 - DNA, 456 bp, Artificial Sequence
  derived and/or modified sequence
gcccttcagatctctgagaacttgtttagcaacaaagtcctcaatgccttgaaaccagaaaaagatgtggatggagtaacagacataaacctggggaagctggtgcgaggggatgcccatgaatgttttgtttcacctgttgccaaagctgtaattgaacttcttgaaaaatcagtaggtgtcaacctagatggaaagaagattttggtagtgggggcccatgggtctttggaagctgctctacaatgcctgttccagagaaaagggtccatgacaatgagcatccagtggaaaacacgccagcttcaaagcaagacggagtctcgttctgtcaccaggctggagtgcaggcgcgtgatctaggctcactgcaagctctgcctcccaggttgaagtgattctcctgtgaaagggaattatttttgatgagtcattaaagtatatccattcccagaa

SEQ ID NO: 84851 - DNA, 345 bp, Artificial Sequence
  derived and/or modified sequence
atgcaggagatcaatcagaacttggccgaggaggctggcctgaatatcacacacatttgccttccaccagactcgtccgaggcagaaattattgacgagatattaaagatcaatgaggacactagggtgcatggcctcgctctgcagatatccgaaaatctctttagcaacaaagtgctaaacgcactcaagcctgaaaaagacgttgacggtgtgacagacatcaatctggggaaattagtcaggggagacgcgcatgagtgtttcgtcagccccgtagccaaagccgtgatcgagttgcttgaaaagagtggcgtcaacctcgatggcaagaaaatcttgtag

SEQ ID NO: 84852 - DNA, 363 bp, Artificial Sequence
  derived and/or modified sequence
gcactgcagatctccgagaacctgttctctaataaggttttgaatgcactcaagccggagaaagacgttgatggcgtaactgacataaacttgggcaaactggtgcggggagacgcccatgagtgctttgtgtctccagtggctaaagccgtgatagagctattagagaaatccgtgggggttaatcttgatggaaaaaagatcctggtagtgggcgctcacggcagcctggaggccgctctccaatgtctgttccagagaaagggctccatgacaatgtccattcaatggaaaactcgacagttacaaagcaagactgagagccgatcagtgacaagattggagtgtcgccgagtaatctag

SEQ ID NO: 84853 - DNA, 363 bp, Artificial Sequence
  derived and/or modified sequence
ctggccctccagattagcgaaaatctgttctccaacaaggtgctcaatgcacttaaacccgagaaggacgtggatggggttacagacatcaatctggggaagctcgtaaggggcgatgcccacgaatgctttgtatccccggttgccaaggctgttatagaactgctggaaaagtccggtgtgaacctcgacggcaagaagattctggtggtgggcgctcatgggtccctcgaggcggctctgcagtgcctattccagagaaagggtagcatgacaatgtccattcagtggaaaacccgacagctccagtccaagacggagagccgctctgtaactcgcctggagtgtcggagggtcatctag

SEQ ID NO: 84854 - DNA, 456 bp, Artificial Sequence
  derived and/or modified sequence
cttgcccttcagatctctgagaacttgtttagcaacaaagtcctcaatgccttgaaaccagaaaaagatgtggatggagtaacagacataaacctggggaagctggtgcgaggggatgcccatgaatgttttgtttcacctgttgccaaagctgtaattgaacttcttgaaaaatcaggtgtcaacctagatggaaagaagattttggtagtgggggcccatgggtctttggaagctgctctacaatgcctgttccagagaaaagggtccatgacaatgagcatccagtggaaaacacgccagcttcaaagcaagacggagtctcgttctgtcaccaggctggagtgcaggcgcgtgatctaggctcactgcaagctctgcctcccaggttgaagtgattctcctgtgaaagggaattatttttgatgagtcattaaagtatatccattcccagaa

SEQ ID NO: 84855 - protein, 533 aa, Artificial Sequence
  derived and/or modified sequence
MSSDGTIRHSKVRQKSEVDIVVSEDLNGTVKFSSSLPYPNNLNSVLAERLEKWLQLMLMWHPRQRGTDPTYGPNGCFKALDDILNLKLVHILNMVTGTIHTYPVTEDESLQSLKARIQQDTGIPEEDQELLQEAGLALIPDKPATQCISDGKLNEGHTLDMDLVFLFDNSKITYETQISPRPQPESVSCILQEPKRNLAFFQLRKVWGQVWHSIQTLKEDCNRLQQGQRAAMMNLLRNNSCLSKMKNSMASMSQQLKAKLDFFKTSIQIDLEKYSEQTEFGITSDKLLLAWREMEQAVELCGRENEVKLLVERMMALQTDIVDLQRSPMGRKQGGTLDDLEEQARELYRRLREKPRDQRTEGDSQEMVRLLLQAIQSFEKKVRVIYTQLSKTVVCKQKALELLPKVEEVVSLMNEDEKTVVRLQEKRQKELWNLLKIACSKVRGPVSGSPDSMNASRLSQPGQLMSQPSTASNSLPEPAKKSEELVAEAHNLCTLLENAIQDTVREQDQSFTALDWSWLQTEEEEHSCLEQAS

SEQ ID NO: 84856 - protein, 697 aa, Artificial Sequence
  derived and/or modified sequence
MSSDGTIRLTHPNVVAARDVPEGMQNLAPNDLPLLAMEYCQGGDLRKYLNQFENCCGLREGAILTLLSDIASALRYLHENRIIHRDLKPENIVLQQGEQRLIHKIIDLGYAKELDQGSLCTSFVGTLQYLAPELLEQQKYTVTVDYWSFGTLAFECITGFRPFLPNWQPVQWHSKVRQKSEVDIVVSEDLNGTVKFSSSLPYPNNLNSVLAERLEKWLQLMLMWHPRQRGTDPTYGPNGCFKALDDILNLKLVHILNMVTGTIHTYPVTEDESLQSLKARIQQDTGIPEEDQELLQEAGLALIPDKPATQCISDGKLNEGHTLDMDLVFLFDNSKITYETQISPRPQPESVSCILQEPKRNLAFFQLRKVWGQVWHSIQTLKEDCNRLQQGQRAAMMNLLRNNSCLSKMKNSMASMSQQLKAKLDFFKTSIQIDLEKYSEQTEFGITSDKLLLAWREMEQAVELCGRENEVKLLVERMMALQTDIVDLQRSPMGRKQGGTLDDLEEQARELYRRLREKPRDQRTEGDSQEMVRLLLQAIQSFEKKVRVIYTQLSKTVVCKQKALELLPKVEEVVSLMNEDEKTVVRLQEKRQKELWNLLKIACSKVRGPVSGSPDSMNASRLSQPGQLMSQPSTASNSLPEPAKKSEELVAEAHNLCTLLENAIQDTVREQDQSFTALDWSWLQTEEEEHSCLEQAS

SEQ ID NO: 84857 - DNA, 2094 bp, Artificial Sequence
  derived and/or modified sequence
atgtcttcggacgggacgattcgcctaactcatcccaacgtggtggcagcaagagatgtgcccgaggggatgcagaacttggctcccaatgacttgcccttactggctatggaatactgtcagggaggggacctcaggaagtacttgaaccagttcgagaactgctgcggcctccgcgaaggggccatcttgaccctcctgagcgatatcgccagcgcgctgagatatctccacgagaacaggattatccaccgcgacctcaaaccagaaaacatagttctccaacaaggcgagcaacgcctcatccataaaatcatcgatctggggtacgccaaagaattggatcagggcagcctctgcacctccttcgtaggaactctgcaatacctagctcctgagctgttggagcagcagaaatacaccgtgactgtggattattggtccttcggtacacttgccttcgagtgcatcactggctttagaccctttttacccaactggcagcctgttcagtggcatagtaaagttcggcagaaatctgaagtggacatcgttgtgagcgaggaccttaacgggacagtgaagttcagttcatcgctcccctatcccaacaacttgaatagcgtgctggccgagagattagaaaagtggctgcagctgatgttgatgtggcaccctagacagcgcgggactgatcctacttacggtcctaatggatgcttcaaggctctcgacgacattctcaatctcaagctggtgcacatactcaatatggtcactggcaccatccacacctaccctgtgactgaggatgagagcttacagtctttaaaagcaaggattcagcaggacactggcatccctgaggaggaccaggagttattgcaggaggccggcctggccctgatccccgacaaaccagccacacagtgcataagtgacgggaagctcaatgagggacacactttggacatggaccttgtcttcctgttcgacaattccaagatcacctacgagactcagatatcacctaggccccaaccagaaagcgtcagttgcatcttacaggagccaaagaggaacttggcgtttttccagctgcgtaaggtgtggggccaagtctggcattcaattcagaccctgaaggaggactgtaatagactacagcaaggacaaagagccgctatgatgaacttgctcaggaacaactcttgcctgagtaaaatgaaaaatagcatggccagcatgtcccaacagctaaaggcgaaactcgattttttcaagacatccattcagatcgatctagagaaatacagcgaacaaacagagtttgggataacctctgataagttgctcctcgcctggcgggaaatggaacaagcggttgaactttgcggccgagagaacgaggtgaagctgctggtggagcgaatgatggcgctgcagaccgatatagtggacttgcagaggtcgcccatgggcagaaagcaggggggcacactcgacgacttagaggaacaggcacgggagctgtacagacgcctgcgggagaaaccgagggatcagaggacagaaggggacagccaggagatggtgagactcctcctacaggcaatccagtctttcgaaaagaaagtgcgggtcatctatacccagctttccaagaccgtcgtctgtaagcagaaggctttggagctgctgcccaaggtagaggaggtagtctcactcatgaatgaggatgagaagactgtggttagactgcaggaaaagcgacagaaggagctgtggaacctattgaaaatcgcatgttcaaaagtgagaggacctgtgtcagggagtccagactccatgaacgctagcaggctgagtcagccaggtcagcttatgtcccaaccaagcactgcttcaaattccctgcctgagcctgctaagaagagcgaagaactggtggcggaagcccacaatctttgcaccctgctggaaaacgctatccaggatacggtgcgagaacaggatcagagttttactgccctggactggtcctggctgcagaccgaagaggaagagcattcgtgtctcgaacaggcatcctag

SEQ ID NO: 84858 - DNA, 2501 bp, Artificial Sequence
  derived and/or modified sequence
ggaagtgtttgaggaagtcgcgccgcgctgcccgcgttaagattcccgcattttaatgttttcaggggggtgtcatagccccgggtttggccgccccagccccgccttccccgccccggggagcccgccccctgccccgcgtccctgccgacagagttagcacgacatcagtatgagctggtcaccttccctgacaacgcagacatgtggggcctgggaaatgaaagagcgccttgggacagggggatttggaaatgtcatccgatggcacaatcaggctgacccaccccaatgtggtggctgcccgagatgtccctgaggggatgcagaacttggcgcccaatgacctgcccctgctggccatggagtactgccaaggaggagatctccggaagtacctgaaccagtttgagaactgctgtggtctgcgggaaggtgccatcctcaccttgctgagtgacattgcctctgcgcttagataccttcatgaaaacagaatcatccatcgggatctaaagccagaaaacatcgtcctgcagcaaggagaacagaggttaatacacaaaattattgacctaggatatgccaaggagctggatcagggcagtctttgcacatcattcgtggggaccctgcagtacctggccccagagctactggagcagcagaagtacacagtgaccgtcgactactggagcttcggcaccctggcctttgagtgcatcacgggcttccggcccttcctccccaactggcagcccgtgcagtggcattcaaaagtgcggcagaagagtgaggtggacattgttgttagcgaagacttgaatggaacggtgaagttttcaagctctttaccctaccccaataatcttaacagtgtcctggctgagcgactggagaagtggctgcaactgatgctgatgtggcacccccgacagaggggcacggatcccacgtatgggcccaatggctgcttcaaggccctggatgacatcttaaacttaaagctggttcatatcttgaacatggtcacgggcaccatccacacctaccctgtgacagaggatgagagtctgcagagcttgaaggccagaatccaacaggacacgggcatcccagaggaggaccaggagctgctgcaggaagcgggcctggcgttgatccccgataagcctgccactcagtgtatttcagacggcaagttaaatgagggccacacattggacatggatcttgtttttctctttgacaacagtaaaatcacctatgagactcagatctccccacggccccaacctgaaagtgtcagctgtatccttcaagagcccaagaggaatctcgccttcttccagctgaggaaggtgtggggccaggtctggcacagcatccagaccctgaaggaagattgcaaccggctgcagcagggacagcgagccgccatgatgaatctcctccgaaacaacagctgcctctccaaaatgaagaattccatggcttccatgtctcagcagctcaaggccaagttggatttcttcaaaaccagcatccagattgacctggagaagtacagcgagcaaaccgagtttgggatcacatcagataaactgctgctggcctggagggaaatggagcaggctgtggagctctgtgggcgggagaacgaagtgaaactcctggtagaacggatgatggctctgcagaccgacattgtggacttacagaggagccccatgggccggaagcaggggggaacgctggacgacctagaggagcaagcaagggagctgtacaggagactaagggaaaaacctcgagaccagcgaactgagggtgacagtcaggaaatggtacggctgctgcttcaggcaattcagagcttcgagaagaaagtgcgagtgatctatacgcagctcagtaaaactgtggtttgcaagcagaaggcgctggaactgttgcccaaggtggaagaggtggtgagcttaatgaatgaggatgagaagactgttgtccggctgcaggagaagcggcagaaggagctctggaatctcctgaagattgcttgtagcaaggtccgtggtcctgtcagtggaagcccggatagcatgaatgcctctcgacttagccagcctgggcagctgatgtctcagccctccacggcctccaacagcttacctgagccagccaagaagagtgaagaactggtggctgaagcacataacctctgcaccctgctagaaaatgccatacaggacactgtgagggaacaagaccagagtttcacggccctagactggagctggttacagacggaagaagaagagcacagctgcctggagcaggcctcatgatgtggggggactcgaccccctgacatggggcagcccatagcaggccttgtgcagtggggggactcgaccccctgacatggggctgcctggagcaggccgcgtgacgtggggctgcctggccgcggctctcacatggtggttcctgctgcactg

SEQ ID NO: 84859 - DNA, 2094 bp, Artificial Sequence
  derived and/or modified sequence
atgagcagtgatggcaccatccggctgacccaccccaacgtggtggccgccagagatgtgcctgagggcatgcagaacctggccccaaatgacctgcccctgctggccatggagtactgccagggcggggacctgaggaagtacctgaaccagtttgagaactgctgcggcctgcgggagggcgccatcctgaccctgctgagtgacatcgccagcgccctgcgctacctgcatgaaaatcgcatcatccaccgggacctgaagccagagaacatcgtgctgcagcagggcgagcagaggctcatccacaagatcatcgacctgggctacgccaaggagctggaccagggcagcctgtgcaccagctttgtgggcaccctgcagtacctggcccctgagctgctggagcagcagaagtacacagtgacagtggactactggagctttggcaccctggcctttgagtgcatcaccggcttccggcccttcctgcccaactggcagcctgtgcagtggcacagcaaggtgcggcagaagtctgaggtggacatcgtggtgtctgaggacctgaatggaacagtgaagttcagcagcagcctgccctaccccaacaacctgaacagcgtgctggccgagcggctggagaagtggctgcagctgatgctgatgtggcacccccggcagaggggcacagaccccacctacggccccaacggctgcttcaaggccctggatgacatcctgaacctgaagctggtgcacatcctgaacatggtgacaggcaccatccacacctaccctgtgacagaagatgagagcctgcagagcctgaaggcccgcatccagcaggacaccggcatccctgaggaggaccaggagctgctgcaggaggccggcctggccctgatcccagacaagccagccacccagtgcatcagtgatggcaagctgaatgaaggccacaccctggacatggacctggtgttcctgtttgacaacagcaagatcacctatgagacccagatcagcccccggccccagcctgagagcgtgtcctgcatcctgcaggagcccaagaggaacctggccttcttccagctgaggaaggtgtggggccaggtgtggcacagcatccagaccctgaaggaggactgcaaccggctgcagcagggccagagagctgccatgatgaacctgctgaggaacaacagctgcctgagcaagatgaagaacagcatggcctccatgagccagcagctgaaggccaagctggacttcttcaagaccagcatccagattgacctggagaagtacagcgagcagacagaatttggcatcaccagtgacaagctgctgctggcctggagggagatggagcaggccgtggagctgtgtggccgggagaatgaggtgaagctgctggtggagaggatgatggccctgcagacagacatcgtggacctgcagaggagccccatgggcaggaagcagggcggcaccctggatgacctggaggagcaggcccgggagctgtacagaaggctgcgggagaagccccgggaccagaggacagaaggagacagccaggagatggtgcggctgctgctgcaggccatccagagctttgagaagaaggtgcgggtcatctacacccagctgagcaagacagtggtgtgcaagcagaaggccctggagctgctgcccaaggtggaggaggtggtgtccctgatgaatgaagatgagaagacagtggtgcggctgcaggagaagaggcagaaggagctgtggaacctgctgaagatcgcctgcagcaaggtgcggggccctgtgtctggcagcccagacagcatgaatgccagccggctgagccagcccggccagctgatgagccagcccagcacagccagcaacagcctgcctgagcccgccaagaagtctgaggagctggtggccgaggcccacaacctgtgcaccctgctggagaatgccatccaggacacagtgcgggagcaggaccagagcttcaccgccctggactggagctggctgcagacagaggaggaggagcacagctgcctggagcaggccagctag

SEQ ID NO: 84860 - DNA, 2094 bp, Artificial Sequence
  derived and/or modified sequence
atgagcagcgacggcaccatccggctgacccaccccaacgtggtggccgctagggacgtacccgagggtatgcaaaacctagcacccaacgacctccctctgcttgcaatggagtactgccaggggggcgacctgcggaagtatctaaaccaattcgagaactgttgcgggctgagggaaggtgctattctgaccttgctgagcgacatcgcctccgcgttgcgatatctgcacgaaaaccgtatcatccatcgcgatctgaaacctgaaaatatcgtcctccaacagggggaacagcgcctgatacacaagataattgatttaggttacgccaaggaactggatcagggatcactctgcacctcatttgtgggcacgttgcaatatcttgcccctgagctcctggagcagcagaagtatactgtgacagtagactattggtcttttgggactctggcatttgagtgtataaccggcttcagaccattcctgccaaactggcaacctgtccaatggcactctaaggtgaggcagaagtctgaagtggatatcgtggtgagcgaggatttaaacggcaccgtcaaattctcctcttcgctgccttaccctaacaatctaaattcagtccttgccgagcgacttgaaaagtggctgcaattaatgctgatgtggcacccccgacagcgcgggacagatcccacatatgggccaaacggttgcttcaaggccctggacgacatcctgaatctgaaactcgttcatatcctaaacatggtgactggtactatccacacgtaccctgtcaccgaagacgaaagtctgcagtctcttaaagctcgcatacagcaggatacaggtattccagaggaagaccaagaacttctacaggaagctggccttgctttaatacccgacaaacctgctacacagtgtatctcggacgggaaattaaatgaagggcacaccctggatatggatctagttttcctctttgacaattccaagataacctatgagactcagattagcccaagaccccaaccagaatccgtcagttgtatcctgcaggagcctaaaaggaatttggcattcttccagctgcgcaaggtctggggacaagtgtggcacagtatccagactctcaaggaggattgcaatagacttcagcaaggccaacgggccgctatgatgaatcttcttcgcaacaattcctgtctgagcaaaatgaaaaacagtatggcctctatgtctcaacagctaaaggccaaacttgatttctttaagacaagtattcagattgatctggaaaaatattctgagcagactgagtttgggatcaccagtgataaactactcctggcgtggcgagagatggagcaggcagtggagttatgcggccgggagaacgaggttaagcttcttgtggaacgaatgatggccctgcagaccgatatcgtcgacctacagcggtcccccatggggaggaagcagggagggacacttgacgatcttgaagagcaggcacgcgagctgtataggcgtctgcgggaaaagcccagagaccaaaggaccgagggagatagtcaggagatggtgagattgctgttacaggctatccaaagttttgagaagaaggtgagggtgatttatacccagcttagcaagactgtcgtatgtaagcaaaaggcactggagttattacccaaggtggaagaggttgtgagtttgatgaacgaagatgagaagacagtggtgagactgcaggagaagcggcagaaggaactctggaacctgctcaaaattgcctgctccaaggtgcggggtcctgttagtggcagtccagacagtatgaacgcttctagacttagtcaaccagggcagttgatgagccagccttcaacagcaagtaattccctcccagaacccgccaaaaaatctgaggaactggttgccgaggctcacaacctgtgcaccctgctggagaacgccatccaggacacagttagagagcaagatcaaagttttaccgctcttgattggagttggctgcagaccgaagaggaggaacacagctgtctggagcaggcgtcttag

SEQ ID NO: 84861 - DNA, 2094 bp, Artificial Sequence
  derived and/or modified sequence
atgagttcggacggtaccattcgactgacacatcccaacgttgttgcagccagagacgtaccagaaggtatgcagaatctcgctcctaatgacttgcctttactcgcaatggagtactgtcagggcggagacctcaggaagtatctcaaccagtttgaaaactgctgtggccttagggagggcgctatattaacgttactgagtgatatcgcgtctgccctcaggtacttgcacgagaatcgcatcatccaccgcgacctgaagcccgaaaatatagttctgcaacagggtgaacagcgcttaattcacaagatcattgatctgggctacgccaaggaacttgaccaaggcagcttgtgtacctctttcgttggaactctgcagtatctggcacctgaactcctggagcagcagaagtacacggttaccgtggattattggagtttcgggacactcgccttcgaatgtatcacgggctttcggccatttttgccaaattggcagccagtccaatggcactccaaagtgaggcagaagagcgaggtggacattgtcgtgtccgaggatctgaatggaacagtcaagttttcctcttccctgccttaccccaacaatctgaacagtgttttggccgagcggctggagaaatggttgcaactcatgctcatgtggcaccccaggcaacggggaacagaccctacctatgggcctaatggctgcttcaaagccctcgatgacatcttaaacctgaaacttgtccatattttgaatatggtaaccggaactattcatacttaccccgtgacagaagacgaatctttgcagagcctcaaggctcggatccagcaggacaccgggattccagaggaggaccaagagctgctgcaggaagcgggattggccctaatccccgacaaacccgcaactcagtgtataagtgacggcaaactcaatgagggccataccctggatatggacctggtttttctgttcgacaactccaagattacttacgagacgcaaatttcacccaggcctcagccagagtccgtatcctgcattctgcaagagcccaagcggaacctggctttttttcagctgagaaaggtttgggggcaggtctggcatagcatccaaactctgaaagaagattgtaaccgactgcaacaaggacagagggctgcaatgatgaatctactgaggaataactcttgcctgtctaaaatgaaaaatagcatggcatcgatgagccagcaactgaaagctaagttggatttcttcaaaacatccatccaaatcgacctcgagaagtactccgagcagaccgagtttggaataacaagtgacaaactactgctggcctggcgcgagatggaacaggcagttgagctgtgcggaagagagaatgaggtcaagctgctggtcgagcgcatgatggctttgcagaccgacattgtggacctgcagcgctctcctatgggaaggaagcaaggtggcaccctcgacgatcttgaggagcaggcccgtgaattatatcgccgacttagagaaaaacctagggaccagagaactgagggcgatagtcaagaaatggttagactcctccttcaggccattcagagcttcgaaaagaaagtaagggtgatttacactcagttatccaagacagtcgtctgtaaacagaaggcactggaactactccctaaagtggaagaggtggtctctctgatgaatgaagacgaaaagacggtggtccgccttcaggagaagagacagaaggagctatggaatctcctgaaaatcgcatgttccaaggtgagaggccctgtgagtggctctcctgattccatgaacgcttctcgtctcagtcagcccggtcagttaatgtcacagccctccaccgcctctaactctctccccgaaccggctaaaaaaagtgaggaattagtcgcagaggctcataatctgtgtacccttctcgagaacgccatccaagatacggtaagggagcaggaccagtcatttacggctctcgattggagctggctccagacagaggaggaagagcatagctgtcttgagcaagcctcatag

SEQ ID NO: 84862 - DNA, 2094 bp, Artificial Sequence
  derived and/or modified sequence
atgagcagcgacggcaccatcagactgacccaccccaacgtggtggccgccagagacgtgcccgagggcatgcagaacctggcccccaacgacctgcccctgctggccatggagtactgccagggcggcgacctgagaaagtacctgaaccagttcgagaactgctgcggcctgagagagggcgccatcctgaccctgctgagcgacatcgccagcgccctgagatacctgcacgagaacagaatcatccacagagacctgaagcccgagaacatcgtgctgcagcagggcgagcagagactgatccacaagatcatcgacctgggctacgccaaggagctggaccagggcagcctgtgcaccagcttcgtgggcaccctgcagtacctggcccccgagctgctggagcagcagaagtacaccgtgaccgtggactactggagcttcggcaccctggccttcgagtgcatcaccggcttcagacccttcctgcccaactggcagcccgtgcagtggcacagcaaggtgagacagaagagcgaggtggacatcgtggtgagcgaggacctgaacggcaccgtgaagttcagcagcagcctgccctaccccaacaacctgaacagcgtgctggccgagagactggagaagtggctgcagctgatgctgatgtggcaccccagacagagaggcaccgaccccacctacggccccaacggctgcttcaaggccctggacgacatcctgaacctgaagctggtgcacatcctgaacatggtgaccggcaccatccacacctaccccgtgaccgaggacgagagcctgcagagcctgaaggccagaatccagcaggacaccggcatccccgaggaggaccaggagctgctgcaggaggccggcctggccctgatccccgacaagcccgccacccagtgcatcagcgacggcaagctgaacgagggccacaccctggacatggacctggtgttcctgttcgacaacagcaagatcacctacgagacccagatcagccccagaccccagcccgagagcgtgagctgcatcctgcaggagcccaagagaaacctggccttcttccagctgagaaaggtgtggggccaggtgtggcacagcatccagaccctgaaggaggactgcaacagactgcagcagggccagagagccgccatgatgaacctgctgagaaacaacagctgcctgagcaagatgaagaacagcatggccagcatgagccagcagctgaaggccaagctggacttcttcaagaccagcatccagatcgacctggagaagtacagcgagcagaccgagttcggcatcaccagcgacaagctgctgctggcctggagagagatggagcaggccgtggagctgtgcggcagagagaacgaggtgaagctgctggtggagagaatgatggccctgcagaccgacatcgtggacctgcagagaagccccatgggcagaaagcagggcggcaccctggacgacctggaggagcaggccagagagctgtacagaagactgagagagaagcccagagaccagagaaccgagggcgacagccaggagatggtgagactgctgctgcaggccatccagagcttcgagaagaaggtgagagtgatctacacccagctgagcaagaccgtggtgtgcaagcagaaggccctggagctgctgcccaaggtggaggaggtggtgagcctgatgaacgaggacgagaagaccgtggtgagactgcaggagaagagacagaaggagctgtggaacctgctgaagatcgcctgcagcaaggtgagaggccccgtgagcggcagccccgacagcatgaacgccagcagactgagccagcccggccagctgatgagccagcccagcaccgccagcaacagcctgcccgagcccgccaagaagagcgaggagctggtggccgaggcccacaacctgtgcaccctgctggagaacgccatccaggacaccgtgagagagcaggaccagagcttcaccgccctggactggagctggctgcagaccgaggaggaggagcacagctgcctggagcaggccagctag

SEQ ID NO: 84863 - protein, 584 aa, Artificial Sequence
  derived and/or modified sequence
MAVSRHLTRGRKMAHVIAACLYLVCRTEGTPHMLLDLSDLLQVNVYVLGKTFLLLARELCINAPAIDPCLYIPRFAHLLEFGEKNHEVSMTALRLLQRMKRDWMHTGRRPSGLCGAALLVAARMHDFRRTVKEVISVVKVCESTLRKRLTEFEDTPTSQLTIDEFMKIDLEEECDPPSYTAGQRKLRMKQLEQVLSKKLEEVEGEISSYQDAIEIELENSRPKAKGGLASLAKDGSTEDTASSLCGEEDTEDEELEAAASHLNKDLYRELLGGAPGSSEAAGSPEWGGRPPALGSLLDPLPTAASLGISDSIRECISSQSSDPKDASGDGELDLSGIDDLEIDRRDLSMPRCAKAKSQPHFPVLAQYILNESEARVKAELWMRENAEYLREQREKEARIAKEKELGIYKEHKPKKSCKRREPIQASTAREAIEKMLEQKKISSKINYSVLRGLSSAGGGSPHREDAQPEHSASARKLSRRRTPASRSGADPVTSVGKRLRPLVSTQPAKKVATGEALLPSSPTLGAEPARPQAVLVESGPVSYHADEEADEEEPDEEDGEPCVSALQMMGSNDYGCDGDEDDGY

SEQ ID NO: 84864 - DNA, 1755 bp, Artificial Sequence
  derived and/or modified sequence
atggccgtcagccgccacttgacccgagggcgtaaaatggcccacgtgatcgctgcatgcttatacctggtgtgtcggaccgaggggaccccccacatgcttctagacctctctgaccttttgcaggtcaacgtctacgtgcttggcaaaacatttctgcttcttgcgagggagctgtgcataaacgctccggccatcgacccctgtctttacatcccccggtttgcacacctactcgagttcggagagaagaaccatgaagttagtatgacagctctgcgcctcctgcaaagaatgaagcgcgactggatgcatacgggacgaaggccgtccggactgtgtggcgctgctctcttggtagcggccaggatgcacgacttcaggaggactgtgaaagaagtgatctccgtggtgaaagtgtgcgagagcacactgcgcaaacgattgaccgaatttgaggatactccaactagtcagctgaccatcgacgaatttatgaaaatcgatctggaggaagaatgcgaccccccttcttacactgctggtcagaggaagctacggatgaagcagttagagcaggtcttatccaagaaactggaggaagttgaaggcgagatctcctcttaccaggacgcaattgaaattgaactcgaaaactcgcggcccaaggctaaagggggcttagcaagccttgccaaagacggtagcacggaggacacagctagctcactctgcggcgaggaggacacagaggatgaggaactcgaggctgccgcgagtcatttaaacaaagatctctaccgagagctgctgggcggggcacctggcagcagcgaggctgctggaagccctgagtggggcgggagaccacctgccttaggatcgctacttgaccccctaccgacagccgcctccctcgggatctcagacagcatccgagagtgtatttccagccaaagttcagatcccaaggatgcgtcaggggatggagagctcgatctctctggcattgatgacctggaaattgaccgcagagacctgtctatgccgcgttgcgcaaaagcaaaaagtcaaccacacttccctgttttggcccagtatattctgaacgagagtgaggcgagagtgaaggccgagctgtggatgagagaaaacgcagaataccttcgggagcagagagagaaagaggcaaggatcgctaaagagaaggagctgggaatctataaggaacacaaacctaagaaatcatgtaagagaagggagcctattcaggcctccacagcgcgagaagcgatagaaaaaatgctcgagcagaagaaaatcagcagtaagattaattactcagtgctgcgtgggctgagttcggctggggggggctcccctcatcgcgaggatgcccaacccgaacactcagccagtgctcgaaaactctcaagaaggcggacgcccgcttcacgtagtggggcagatcctgtcacatcagtcggcaagcgactgaggcccctggtgtccactcagcccgccaaaaaggtcgccactggtgaggcgctcttgccgtccagcccaacacttggcgccgagccagcccgtccccaggcagttcttgtcgagtccggccccgtatcatatcatgcggatgaggaggctgacgaggaggagcctgatgaagaggatggggaaccctgtgtgagcgccctgcagatgatggggagcaatgattacggatgtgacggcgacgaagacgacgggtattag

SEQ ID NO: 84865 - DNA, 1755 bp, Artificial Sequence
  derived and/or modified sequence
atggctgtgagccgccacctgacccggggcaggaagatggcccacgtgattgctgcctgcctgtacctggtgtgcaggacagagggcaccccccacatgctgctggacctgagtgacctgctgcaggtgaatgtgtatgtgctgggcaagaccttcctgctgctggcccgggagctgtgcatcaatgccccagccatcgacccctgcctgtacatccccaggtttgcccacctgctggagtttggagagaagaaccacgaggtgtccatgacagccctgcggctgctgcagaggatgaagagggactggatgcacacaggccggcggcccagcggcctgtgtggggccgccctgctggtggccgccaggatgcatgacttccggaggacagtgaaggaggtgatctctgtggtgaaggtgtgtgagagcaccctgaggaagaggctgacagaatttgaggacacccccaccagccagctgaccattgatgagttcatgaagattgacctggaggaggagtgtgacccccccagctacacagctggccagaggaagctgaggatgaagcagctggagcaggtgctgagcaagaagctggaggaggtggagggggagatcagcagctaccaggatgccattgaaattgagctggagaacagccggcccaaggccaagggcggcctggccagcctggccaaggatggcagcacagaggacacagccagcagcctgtgtggggaggaggacacagaagatgaggagctggaggccgccgccagccacctgaacaaggacctgtaccgggagctgctgggcggggcccctggcagcagcgaggccgccggcagccctgagtggggcggccggcccccagccctgggcagcctgctggaccccctgcccacagctgccagcctgggcatcagtgacagcatccgggagtgcatcagcagccagagcagtgaccccaaggatgccagcggagatggagagctggacctgtctggaattgatgacctggagattgaccggcgggacctgtccatgccccgctgtgccaaggccaagagccagccccacttccctgtgctggcccagtacatcctgaatgaaagtgaggcccgggtgaaggccgagctgtggatgagagaaaatgctgagtacctgcgggagcagcgggagaaggaggccagaattgccaaggagaaggagctgggcatctacaaggagcacaagcccaagaagagctgcaagagaagagagcccatccaggccagcacagcccgggaggccatcgagaagatgctggagcagaagaagatcagcagcaagatcaactacagcgtgctgcggggcctgagcagcgctgggggcggcagcccccaccgggaggatgcccagcctgagcacagcgccagcgccaggaagctgagcagaagaaggaccccagccagccgctctggagctgaccctgtgacctctgtgggcaagaggctgcggcccctggtgtccacccagcctgccaagaaggtggccactggagaggccctgctgcccagcagccccaccctgggcgctgagcccgcccggccccaggccgtgctggtggagagcggccctgtgtcctaccacgcagatgaggaggctgatgaggaggagccagatgaagaagatggagagccctgtgtgtctgccctgcagatgatgggcagcaatgactatggctgtgatggagatgaagatgatggctactag

SEQ ID NO: 84866 - DNA, 1755 bp, Artificial Sequence
  derived and/or modified sequence
atggccgtgagccggcacctgacccggggccggaagatggcccacgtcatcgcagcctgtctttacctcgtgtgtcgaaccgaaggaacccctcatatgctactcgacttatccgacctcctgcaagtgaacgtctacgttctgggtaaaacgtttttgctgttggccagagaactttgcataaatgcccctgccattgacccatgtctttatattccacgttttgctcatctgttagagtttggtgaaaaaaatcatgaggtatcgatgaccgccctcaggttgctgcagagaatgaaaagagactggatgcacaccgggaggcgcccttctgggctgtgcggggccgctctgctggtggcagcgaggatgcatgacttcaggagaacagtgaaggaggtcatctctgttgtgaaggtatgcgagtctacgctgcgcaaacgattgaccgagttcgaagatactcccaccagccaactgacgatcgacgaatttatgaaaattgatctcgaggaggagtgtgatcccccttcctacaccgccggtcagcgcaaactccggatgaagcagctggagcaggtgctttcgaagaagttggaggaggtcgaaggtgagatctctagctaccaagatgcaatcgagatcgaattagagaactctagacctaaggcgaaaggcggacttgctagtctggcaaaagatgggagcactgaagataccgcctcctcactctgcggcgaagaggatacggaagacgaggagctggaagcggcagcctcccatctcaacaaagacctctatagggagctcctgggcggtgctcctgggtcctccgaggcagcgggttccccagagtggggagggaggcctccagcccttggatcattgcttgacccattgcccaccgctgcctccctcggaatctccgattcaatccgagagtgcatcagcagccagagttctgaccctaaagacgcgtcaggggatggcgaactggatctgagtgggattgatgacctcgagatcgatcgccgtgacttatccatgccccgatgtgcaaaggcaaagtcccagcctcattttccggtcttggcccagtatatcttgaacgagagcgaagcccgggtgaaggccgaattgtggatgcgcgagaacgccgagtacctgagggagcagcgcgaaaaggaagccaggatagcgaaagaaaaagagctaggaatctataaggaacataaacccaaaaaaagctgtaaaaggcgcgaacccattcaggcctcaacagcgagagaagcaatcgagaagatgttagaacagaaaaagatctcctccaagattaactacagtgtcctaagagggctgtccagcgctggaggcggaagtccgcaccgcgaggacgcacagcctgaacattctgctagcgctcggaagctgagcaggagacgtacacctgcaagtaggagcggtgccgatcccgtgacctcagtgggaaagcgactacgccccctggttagtacccaaccagctaagaaagtggcaaccggagaggctttgctgccaagcagtccaaccttgggggctgaacccgcacgccctcaggccgtgctggtggaatccgggcccgtgagctaccacgccgacgaagaagccgatgaggaggaaccggatgaagaagatggtgaaccttgcgtatcagccttgcagatgatgggctcgaatgattacggctgcgacggggatgaggatgacggctattag

SEQ ID NO: 84867 - DNA, 1755 bp, Artificial Sequence
  derived and/or modified sequence
atggctgtctcacggcatctgaccagagggcgaaagatggcgcacgttattgccgcttgcctataccttgtgtgtagaactgaaggtactcctcacatgctgctggatctgtccgatttgttacaggtgaatgtttatgtcctgggtaagacttttttgctgctcgccagggagctgtgcataaacgcgcctgccatcgatccctgtttgtacatccctaggttcgcacacctactggaattcggagagaaaaatcatgaggtctccatgaccgctctaagactgctgcaacggatgaagagggactggatgcataccggacggagaccgagcggtctttgtggcgcagctctgttggtagcggcaagaatgcatgattttcggagaactgtcaaggaggttatttcagtggttaaagtttgcgagtctacactgaggaagcggctgactgagttcgaggacacgcccactagccagcttaccatcgacgagttcatgaagatcgacctcgaagaggagtgcgaccccccatcatacacagccggacagaggaagttgcgcatgaagcagctggaacaggtgctaagtaaaaagttagaagaggtagaaggtgaaatctcttcataccaagacgctattgagattgagctggaaaattctcgtccaaaagcaaagggtggactggctagcctggctaaagacggaagcacagaggatacggcgtcatcattatgtggagaggaagacacagaggatgaagagctggaagcagcagccagtcatctgaataaagatttatatagggagctactcggtggcgctccgggttcttccgaggcagccggttcacccgaatgggggggaaggcccccagctttgggctcactcctcgatccattaccaaccgccgcaagcctggggatctctgactccatacgcgaatgtatttcttcgcagagttccgacccgaaggacgcatcgggagacggagagcttgacctgagcggcattgatgacctggaaattgataggagagacctctccatgccacgttgtgcgaaggccaagtcgcagccccactttcccgtactggcccagtacatccttaatgaatctgaggccagggtcaaagcagagttgtggatgagggagaatgccgaatatttgcgtgagcagagggaaaaggaagctagaattgctaaagagaaggagctgggaatatataaggagcacaagcccaaaaaatcctgcaaacgcagggaacctatacaagccagcaccgccagagaggccatagagaagatgttggagcagaagaaaatcagttcaaaaattaactactcagttttacggggtctcagtagcgctggagggggatctccccatagagaagatgcccagcccgagcattccgcttcagctcgcaagctttctcgacgacggacccctgcgagccgtagtggcgcagacccagtgacatcagtcggcaagagactgagacccctggtaagcacccagcccgctaaaaaagttgccacaggcgaagccttactgccttcttctcctacactcggtgccgaacctgctcggccacaggccgtgctcgtcgaatctgggcctgtctcataccatgccgacgaagaagcagatgaagaggagcctgatgaagaggacggcgagccttgtgtgtcggctctccagatgatgggtagtaatgattatgggtgtgacggagacgaggatgatggctactag

SEQ ID NO: 84868 - DNA, 1755 bp, Artificial Sequence
  derived and/or modified sequence
atggccgtgagcagacacctgaccagaggcagaaagatggcccacgtgatcgccgcctgcctgtacctggtgtgcagaaccgagggcaccccccacatgctgctggacctgagcgacctgctgcaggtgaacgtgtacgtgctgggcaagaccttcctgctgctggccagagagctgtgcatcaacgcccccgccatcgacccctgcctgtacatccccagattcgcccacctgctggagttcggcgagaagaaccacgaggtgagcatgaccgccctgagactgctgcagagaatgaagagagactggatgcacaccggcagaagacccagcggcctgtgcggcgccgccctgctggtggccgccagaatgcacgacttcagaagaaccgtgaaggaggtgatcagcgtggtgaaggtgtgcgagagcaccctgagaaagagactgaccgagttcgaggacacccccaccagccagctgaccatcgacgagttcatgaagatcgacctggaggaggagtgcgacccccccagctacaccgccggccagagaaagctgagaatgaagcagctggagcaggtgctgagcaagaagctggaggaggtggagggcgagatcagcagctaccaggacgccatcgagatcgagctggagaacagcagacccaaggccaagggcggcctggccagcctggccaaggacggcagcaccgaggacaccgccagcagcctgtgcggcgaggaggacaccgaggacgaggagctggaggccgccgccagccacctgaacaaggacctgtacagagagctgctgggcggcgcccccggcagcagcgaggccgccggcagccccgagtggggcggcagaccccccgccctgggcagcctgctggaccccctgcccaccgccgccagcctgggcatcagcgacagcatcagagagtgcatcagcagccagagcagcgaccccaaggacgccagcggcgacggcgagctggacctgagcggcatcgacgacctggagatcgacagaagagacctgagcatgcccagatgcgccaaggccaagagccagccccacttccccgtgctggcccagtacatcctgaacgagagcgaggccagagtgaaggccgagctgtggatgagagagaacgccgagtacctgagagagcagagagagaaggaggccagaatcgccaaggagaaggagctgggcatctacaaggagcacaagcccaagaagagctgcaagagaagagagcccatccaggccagcaccgccagagaggccatcgagaagatgctggagcagaagaagatcagcagcaagatcaactacagcgtgctgagaggcctgagcagcgccggcggcggcagcccccacagagaggacgcccagcccgagcacagcgccagcgccagaaagctgagcagaagaagaacccccgccagcagaagcggcgccgaccccgtgaccagcgtgggcaagagactgagacccctggtgagcacccagcccgccaagaaggtggccaccggcgaggccctgctgcccagcagccccaccctgggcgccgagcccgccagaccccaggccgtgctggtggagagcggccccgtgagctaccacgccgacgaggaggccgacgaggaggagcccgacgaggaggacggcgagccctgcgtgagcgccctgcagatgatgggcagcaacgactacggctgcgacggcgacgaggacgacggctactag

SEQ ID NO: 84869 - protein, 562 aa, Artificial Sequence
  derived and/or modified sequence
MAVSRHLTRGRKMAHVIAACLYLVCRTEGTPHMLLDLSDLLQVNVYVLGKTFLLLARELCINAPAIDPCLYIPRFAHLLEFGEKNHEVSMTALRLLQRMKRDWMHTGRRPSGLCGAALLVAARMHDFRRTVKEVISVVKVCESTLRKRLTEFEDTPTSQLTIDEFMKIDLEEECDPPSYTAGQRKLRMKQLEQVLSKKLEEVEGEISSYQDAIEIELENSRPKAKGGLASLAKDGSTEDTASSLCGEEDTEDEELEAAASHLNKDLYRELLGGAPGSSEAAGSPEWGGRPPALGSLLDPLPTAASLGISDSIRECISSQSSDPKDASGDGELDLSGIDDLEIDRYILNESEARVKAELWMRENAEYLREQREKEARIAKEKELGIYKEHKPKKSCKRREPIQASTAREAIEKMLEQKKISSKINYSVLRGLSSAGGGSPHREDAQPEHSASARKLSRRRTPASRSGADPVTSVGKRLRPLVSTQPAKKVATGEALLPSSPTLGAEPARPQAVLVESGPVSYHADEEADEEEPDEEDGEPCVSALQMMGSNDYGCDGDEDDGY

SEQ ID NO: 84870 - protein, 650 aa, Artificial Sequence
  derived and/or modified sequence
MTGRVCRGCGGTDIELDAARGDAVCTACGSVLEDNIIVSEVQFVESSGGGSSAVGQFVSLDGRRHIHHLGNQLQLNQHCLDTAFNFFKMAVSRHLTRGRKMAHVIAACLYLVCRTEGTPHMLLDLSDLLQVNVYVLGKTFLLLARELCINAPAIDPCLYIPRFAHLLEFGEKNHEVSMTALRLLQRMKRDWMHTGRRPSGLCGAALLVAARMHDFRRTVKEVISVVKVCESTLRKRLTEFEDTPTSQLTIDEFMKIDLEEECDPPSYTAGQRKLRMKQLEQVLSKKLEEVEGEISSYQDAIEIELENSRPKAKGGLASLAKDGSTEDTASSLCGEEDTEDEELEAAASHLNKDLYRELLGGAPGSSEAAGSPEWGGRPPALGSLLDPLPTAASLGISDSIRECISSQSSDPKDASGDGELDLSGIDDLEIDRYILNESEARVKAELWMRENAEYLREQREKEARIAKEKELGIYKEHKPKKSCKRREPIQASTAREAIEKMLEQKKISSKINYSVLRGLSSAGGGSPHREDAQPEHSASARKLSRRRTPASRSGADPVTSVGKRLRPLVSTQPAKKVATGEALLPSSPTLGAEPARPQAVLVESGPVSYHADEEADEEEPDEEDGEPCVSALQMMGSNDYGCDGDEDDGY

SEQ ID NO: 84871 - DNA, 1953 bp, Artificial Sequence
  derived and/or modified sequence
atgaccggacgtgtgtgtaggggctgcggggggaccgacatcgagctggatgcagctcgcggtgatgcggtgtgcactgcctgcggatccgtgttggaagataacatcatcgtatccgaggtccagttcgtggaaagcagcggtggcggtagttctgccgtcggacaatttgttagcttggatggcaggaggcacatccaccatcttggaaatcaactgcagttgaaccagcactgcctcgacactgctttcaatttcttcaagatggccgttagtcggcacctgaccagaggacggaagatggctcacgtgatagccgcttgtctctacctcgtttgtagaacagagggcacacctcatatgctcctggatctgtctgacctcctgcaggtgaatgtgtatgtgttagggaaaactttccttttactcgctagagaactgtgcataaacgcacctgcaatcgacccctgcctctacattcctcgttttgctcacctgctcgaatttggcgaaaaaaaccatgaggtcagtatgactgctttgcgcctgttgcaaagaatgaagcgggattggatgcacaccggtcgcaggccttccgggctttgtggggcagccttgcttgtcgccgcacgcatgcacgacttccggcggaccgttaaagaagtcatcagtgtagtgaaggtgtgcgagtctactctgagaaagcggttaactgaattcgaggacacgccaacttcccagctcaccatcgatgaattcatgaagatcgatctggaagaagagtgcgaccctccttcctacacagctggccagaggaaactgcggatgaagcagctggaacaggtcttgagtaagaaacttgaagaagtggaaggagagattagtagctatcaagacgccatcgagatcgagctggagaactccagacccaaggccaaggggggcctcgcctcactcgcaaaggatggctccaccgaggataccgccagttctctttgcggagaggaggacacagaggacgaggaacttgaagcagcagcgtctcatctcaacaaggatctgtatcgcgaattactgggcggagccccaggatcatccgaagcggccggctcccctgagtggggcggacgcccacccgcacttggatctctgctggaccctctgcctacagccgcaagtctggggatctctgactcgattagagagtgtatctcctcacagtccagtgatcctaaagatgcatccggcgatggagagctcgaccttagcggcattgacgatctagaaatagatcgctatatccttaacgaatcggaggctcgcgtcaaggcggaactgtggatgcgcgaaaacgcagagtatctgagggagcagagggaaaaggaagctagaatcgctaaggaaaaggagcttggaatctacaaggagcataagcccaagaaaagctgtaaacggcgtgaaccgatccaagccagcactgcacgggaagcaattgaaaagatgctcgagcagaagaagatttcttccaagattaattattctgtgctgcgtggattgagttccgctggaggaggctccccacaccgagaagatgcgcagccagaacactctgctagcgctcggaagctttccagaagacgcaccccggcatcccggagcggcgcagacccggtgacatctgtgggcaaacgtctaagaccactcgtgagtacccagccggcgaaaaaggtggctacaggagaagctctattgccatcaagcccaaccctgggggcggagccggcgcgtccccaagccgtgttggtggaatccggccctgtgtcttatcacgcagacgaggaggccgacgaagaggaacctgacgaggaagacggagagccctgcgtgagcgcgctgcagatgatgggttctaatgactatggttgcgatggagatgaagacgacgggtattag

SEQ ID NO: 84872 - DNA, 1953 bp, Artificial Sequence
  derived and/or modified sequence
atgacaggccgggtgtgccggggctgcggcggcacagacatcgagctggatgctgcccggggagatgctgtgtgcacagcctgtggctctgtgctggaggacaacatcatcgtgtctgaggtgcagtttgtggagagcagcggcggcggcagcagcgctgtgggccagtttgtgtccctggatggaagaagacacatccaccacctgggcaaccagctgcagctgaaccagcactgcctggacacagccttcaacttcttcaagatggctgtgagccgccacctgacccggggcaggaagatggcccacgtgattgctgcctgcctgtacctggtgtgcaggacagagggcaccccccacatgctgctggacctgagtgacctgctgcaggtgaatgtgtatgtgctgggcaagaccttcctgctgctggcccgggagctgtgcatcaatgccccagccatcgacccctgcctgtacatccccaggtttgcccacctgctggagtttggagagaagaaccacgaggtgtccatgacagccctgcggctgctgcagaggatgaagagggactggatgcacacaggccggcggcccagcggcctgtgtggggccgccctgctggtggccgccaggatgcatgacttccggaggacagtgaaggaggtgatctctgtggtgaaggtgtgtgagagcaccctgaggaagaggctgacagaatttgaggacacccccaccagccagctgaccattgatgagttcatgaagattgacctggaggaggagtgtgacccccccagctacacagctggccagaggaagctgaggatgaagcagctggagcaggtgctgagcaagaagctggaggaggtggagggggagatcagcagctaccaggatgccattgaaattgagctggagaacagccggcccaaggccaagggcggcctggccagcctggccaaggatggcagcacagaggacacagccagcagcctgtgtggggaggaggacacagaagatgaggagctggaggccgccgccagccacctgaacaaggacctgtaccgggagctgctgggcggggcccctggcagcagcgaggccgccggcagccctgagtggggcggccggcccccagccctgggcagcctgctggaccccctgcccacagctgccagcctgggcatcagtgacagcatccgggagtgcatcagcagccagagcagtgaccccaaggatgccagcggagatggagagctggacctgtctggaattgatgacctggagattgaccgctacatcctgaatgaaagtgaggcccgggtgaaggccgagctgtggatgagagaaaatgctgagtacctgcgggagcagcgggagaaggaggccagaattgccaaggagaaggagctgggcatctacaaggagcacaagcccaagaagagctgcaagagaagagagcccatccaggccagcacagcccgggaggccatcgagaagatgctggagcagaagaagatcagcagcaagatcaactacagcgtgctgcggggcctgagcagcgctgggggcggcagcccccaccgggaggatgcccagcctgagcacagcgccagcgccaggaagctgagcagaagaaggaccccagccagccgctctggagctgaccctgtgacctctgtgggcaagaggctgcggcccctggtgtccacccagcctgccaagaaggtggccactggagaggccctgctgcccagcagccccaccctgggcgctgagcccgcccggccccaggccgtgctggtggagagcggccctgtgtcctaccacgcagatgaggaggctgatgaggaggagccagatgaagaagatggagagccctgtgtgtctgccctgcagatgatgggcagcaatgactatggctgtgatggagatgaagatgatggctactag

SEQ ID NO: 84873 - DNA, 1953 bp, Artificial Sequence
  derived and/or modified sequence
atgaccggccgggtgtgccggggctgcggcggcaccgacatcgagctggatgccgccagaggcgacgccgtgtgcactgcctgcggatcggtgcttgaagataacatcatcgtaagtgaggtgcaatttgtggagagttctggaggaggatcttctgcagtgggccagtttgtgtccttagacggcaggcgccacattcatcaccttgggaaccagctacagctaaatcaacactgtttggataccgcatttaatttttttaaaatggcagtatccagacatctgacccgcggaagaaagatggcacacgtgatcgcagcctgtctgtacctggtgtgcagaacagagggaacaccacatatgctcctcgatctctctgatttgctccaagtgaacgtttacgttctgggcaagacgttcctgctcctggcaagagaactctgcattaacgctccggcaatcgatccctgcctatatatccccagatttgcccatctgttagagtttggggaaaaaaaccacgaggtaagcatgacagctctccgcctgctccaacggatgaagagggactggatgcatactgggcgtcggccatcagggctgtgtggcgctgcattactcgtggccgcacgaatgcacgactttcgacggaccgtgaaagaagtgatatctgtggtgaaagtttgtgaatccacactgcggaaaagattgacggagttcgaagatacacccacttctcaactgaccatcgatgagttcatgaagatcgatctggaagaggagtgcgacccgccatcttacacggcagggcagcggaagctcaggatgaagcagctggaacaagttctgtctaagaaactcgaggaggtagagggcgaaatatcaagctatcaggacgctatcgagatcgaactggaaaactcacggccaaaggctaaaggcggtctggcctccctcgctaaagatggatcaacagaggacactgccagctcattgtgcggagaggaggatactgaggatgaggagttggaggcagccgcaagccaccttaataaagatctctaccgggaattgctaggcggggctcctggctcttcagaggcggccggctcgccggagtggggaggccgaccacctgcactgggcagcttactagaccctctcccaaccgccgctagcctggggatctccgactctatacgagaatgcatcagttctcagtcttcggaccctaaggacgccagtggggacggcgagctggatctgtctggaatcgatgacctggagatcgatcgctacatcctcaacgaatctgaggctagggtgaaggcagagctttggatgcgggaaaacgccgagtatcttcgtgagcaacgggaaaaggaagccaggatcgcgaaggagaaagaactgggaatctacaaggagcataagccaaagaaatcatgcaagaggagagagccaatccaggcctccaccgcgagggaagccattgagaaaatgttggaacagaagaagatatccagcaagatcaattactccgtgcttagaggtctctcctctgctgggggagggtcaccacaccgggaagatgcccagccagaacacagcgcttcagctagaaaactgtccagaagaaggacacccgctagccgcagcggcgccgacccagttacctcagtggggaaacgtctgagaccgttggtgagcacccagcccgccaaaaaggtcgctactggtgaggccctcctgccaagctcgcctaccttaggcgcggagccggcacgacctcaggccgtgctcgtcgagtctgggcccgtcagctaccacgccgatgaagaggctgacgaggaagagccagacgaggaagatggcgagccctgtgtgtccgccctgcaaatgatgggatccaatgactacggttgcgacggggatgaagatgacggatactag

SEQ ID NO: 84874 - DNA, 1953 bp, Artificial Sequence
  derived and/or modified sequence
atgactgggagggtatgtagaggatgtggaggcacggacatcgaactcgacgcagccaggggagatgccgtctgtaccgcatgcggtagtgtcctggaggataacatcatcgtgagcgaggtgcaattcgtcgagtctagcggagggggaagcagcgccgtgggacagttcgttagtcttgacggcagaaggcatattcaccatctgggtaaccagctccagcttaatcaacactgccttgacaccgcttttaatttctttaaaatggccgtgagccgacatctgacccggggaaggaagatggctcacgtcattgctgcatgcttgtacttagtctgcaggactgaaggcaccccccatatgctgctcgacctttccgatcttctacaggtgaatgtgtacgtcctgggcaagactttcctcttactcgctagagaactatgtattaacgctcctgccatagatccttgcctttacattcccaggttcgcccacctgctggaatttggcgaaaaaaatcacgaagtgagtatgaccgcgctccggctcctgcagcgtatgaagcgcgattggatgcacacaggccgaaggcctagcggtttgtgcggggctgccctccttgtggccgcaaggatgcacgatttccgaagaacggtgaaagaggtcatttcagtggtcaaggtgtgcgaatcaactttacgcaagaggctgacagaatttgaagacactcctacctctcagctgacaatagatgagttcatgaaaatcgacctggaagaggaatgtgaccctcctagttacactgccggacagagaaaactccgaatgaaacaactagaacaagtgctgtcaaaaaagctcgaagaggtggaaggcgagatatctagttaccaggacgccatcgagattgagctcgagaacagtcgacctaaagcgaaggggggacttgctagtctggccaaggacggctctacggaggacaccgcttcttcactgtgcggcgaggaggatacagaagatgaagaactcgaggcagctgccagccatcttaataaggacctgtacagggagctgttgggcggagcccctggcagcagcgaggcggcaggttcacccgaatggggtggcagaccaccagcgctgggcagtcttcttgaccccttacctacagccgcttcactgggaatttccgacagtattagggagtgtattagcagtcaaagttcggacccaaaggacgcatccggggatggggagctggacctgagtggaatcgacgatcttgagatagaccgctacatcttgaacgagagcgaggccagagttaaagccgagttgtggatgcgagaaaacgctgagtatctccgggaacagcgggaaaaggaggctcgtattgccaaagaaaaagaactcggtatttacaaagaacacaaacccaaaaagtcatgcaaaagacgcgagcctattcaagccagcacagcacgagaagcaatcgaaaaaatgctcgagcagaaaaaaatcagcagcaagattaattactctgtcctgagagggctgtccagcgctggcggtggctctccacatcgcgaagacgcccaaccagagcactcagctagcgctcgcaagctgtctcggagaaggactcccgcttcgcgttcaggagccgaccccgtgacctccgtcggaaagcggctaagacccctagtgtccactcagcccgctaaaaaggtcgcaacgggtgaggccttattgccctcttctcccaccctgggcgcagaacctgccaggccccaggctgtcctcgttgaaagcggacccgtatcctatcatgctgatgaggaggccgatgaggaggaacctgatgaggaagacggcgagccatgtgtttccgcactacaaatgatggggagcaacgattatgggtgcgatggtgacgaagatgacggatattag

SEQ ID NO: 84875 - DNA, 3314 bp, Artificial Sequence
  derived and/or modified sequence
gcggctgggcctgggcgggcggcgcgggctgctccggaggctcgggtggcttgagagtcttgggaggctccgggcgctgcccgcgcggtcgccggcatgacgggccgcgtgtgccgcggttgcggcggcacggacatcgagctggacgcggcgcgcggggacgcggtgtgcaccgcctgcggctcagtgctggaggacaacatcatcgtgtccgaggtgcagttcgtggagagcagcggcggcggctcctcggccgtgggccagttcgtgtccctggacgggaggcgccacatccaccacctggggaaccagctgcagctgaaccagcactgcctggacaccgccttcaacttcttcaagatggccgtgagcaggcacctgacccgcggccggaagatggcccacgtgattgctgcctgcctctacctggtctgccgtacggagggcacgccgcacatgctcctggacctcagcgacctgctccaggtgaatgtgtacgtgcttggaaagacgtttcttctcttggcaagagagctctgcatcaatgcgccggccatagacccgtgcctgtatattccacgctttgcgcacctgctggaattcggggagaagaaccacgaggtgtccatgactgccctgaggctcctacagaggatgaagcgggactggatgcacacaggccggcgcccctcgggcctctgcggagcagcgctcctggttgcagccagaatgcatgacttcaggaggactgtgaaggaggtcatcagtgtggtcaaagtgtgtgagtccacgctgcggaagaggctcacggaatttgaagacacccccaccagtcagttgaccattgatgagttcatgaagatcgacctggaggaggagtgcgaccccccctcgtacacagctgggcagaggaagctgcggatgaagcagcttgaacaagtcctgtcaaaaaaactggaggaggttgaaggtgaaatatccagttaccaggatgcaattgagattgaactagaaaacagccggccaaaggccaaggggggcctggccagcctggcaaaagatggctccaccgaggacaccgcgtccagcttgtgtggcgaggaggacacagaggacgaggagctggaagccgcggccagccacctgaacaaagacttataccgggagctccttggtggtgcccccggcagctcggaagcagcaggaagccccgagtggggcggcagacctccggccctggggtccctgctggaccccctccccactgcagccagcctgggcatctcagactccatccgcgaatgcatctcctctcagagcagcgaccccaaagatgcttcaggagacggtgagctggacctcagtggcattgatgacctggagattgacaggtacatcctgaatgagtcggaagcccgcgtgaaggccgagctgtggatgagggagaacgccgagtacctgcgggaacagagggaaaaagaagcaagaatagcgaaagagaaggagctcggcatctacaaggaacacaagcccaagaagtcttgcaagcgacgggagccaattcaggccagtaccgccagggaggccatcgagaagatgctggagcagaagaagatctccagcaagatcaattatagcgtgctccggggcctcagcagcgccggcgggggcagtccgcacagggaggatgcacagcccgagcatagcgccagtgccaggaagctgtcacgaaggaggacgccggccagcagaagtggggctgaccctgtgaccagtgtggggaaaaggttgaggcctctggtgtctacgcagccagcaaagaaggtggccacgggagaggctttgctcccaagctctcccaccctcggagctgagcctgccaggccccaggcggtgctggtggagagcgggcccgtgtcataccacgccgacgaggaggctgacgaggaggagcctgacgaggaggacggggagccctgcgtcagtgccctgcagatgatgggcagcaacgactatggctgtgatggcgatgaggacgacggctactgaagtgtggcctccaggcaggtgatgtcctggcagggggcctcgcgggtctcctcagcatcagacgggcttccaggaccgcagcaggcaggccccagcgccgagactcctggtgacaggtggcacctgtcccacagccctcgtcccatgtggaacttaccattgggattgtgtttctattcagcaagggaaaccggaccaagcgtctgcatgtgtgtgatcagatgtgggccgggtgtgtgcagggctgggtcccgctgcctgccgtcgactcatccaaggaccctccaaggctggcagtgtggtgttgctactattaaggaaacaggcttggggcagccccactgctggtccaagtgtgtggagggctgagtgtgctggccctgtgactcaggaccagctctggagtctccagcccaccctccgcaccgtcccctcctgagcagcactcggcgccagcagcctctgccagagtggaagccagagccctgcaggtgtccggcgcagccgtgggagctgaggatctggcacttgagaggcagcagctccttgaaggtcctctgcctccagctgtggccctgcatccagatacctgcctcgtccgaggcagacacccccacccctgcctcctccagacccccctccccgctgcctgcaccgcctggagcagcatgggggtcagacccctgctccagggccacttgagttgtgggcccaggagccctgcggctgccggcaggtgaactgagtgcccgacagctgagaccggcgcccacccgtcctgagcatagctctgtaggcagtgcgggcatagcctgcatagtgtcctggcgctgggagttccccgtggacagagccagagggcagtggcgctccctgtcagagctggatcaggccccccatcgaggagggagggcagacggaggcccgagagcctccccaggcctcttcgtgggaaggccccagtaccactcgtaggaggtctcagctctggcatggctgccccggatgtggccgagggggcttcaccctgtgtccttaggagggggtggccttgaggcagagccgtgcctcactgacccccaggggcctcatcctccccatggaatgggctgtatgtcctgccccaacttggcccgcagcaggccagacccccctacccccgcccagagctcagtagccagcctgggtcctgccagggcttctcgagggcttgggggaagaatagatttagtaaagcaggaagatctgttgttacttaacagaaa

SEQ ID NO: 84876 - DNA, 1953 bp, Artificial Sequence
  derived and/or modified sequence
atgaccggcagagtgtgcagaggctgcggcggcaccgacatcgagctggacgccgccagaggcgacgccgtgtgcaccgcctgcggcagcgtgctggaggacaacatcatcgtgagcgaggtgcagttcgtggagagcagcggcggcggcagcagcgccgtgggccagttcgtgagcctggacggcagaagacacatccaccacctgggcaaccagctgcagctgaaccagcactgcctggacaccgccttcaacttcttcaagatggccgtgagcagacacctgaccagaggcagaaagatggcccacgtgatcgccgcctgcctgtacctggtgtgcagaaccgagggcaccccccacatgctgctggacctgagcgacctgctgcaggtgaacgtgtacgtgctgggcaagaccttcctgctgctggccagagagctgtgcatcaacgcccccgccatcgacccctgcctgtacatccccagattcgcccacctgctggagttcggcgagaagaaccacgaggtgagcatgaccgccctgagactgctgcagagaatgaagagagactggatgcacaccggcagaagacccagcggcctgtgcggcgccgccctgctggtggccgccagaatgcacgacttcagaagaaccgtgaaggaggtgatcagcgtggtgaaggtgtgcgagagcaccctgagaaagagactgaccgagttcgaggacacccccaccagccagctgaccatcgacgagttcatgaagatcgacctggaggaggagtgcgacccccccagctacaccgccggccagagaaagctgagaatgaagcagctggagcaggtgctgagcaagaagctggaggaggtggagggcgagatcagcagctaccaggacgccatcgagatcgagctggagaacagcagacccaaggccaagggcggcctggccagcctggccaaggacggcagcaccgaggacaccgccagcagcctgtgcggcgaggaggacaccgaggacgaggagctggaggccgccgccagccacctgaacaaggacctgtacagagagctgctgggcggcgcccccggcagcagcgaggccgccggcagccccgagtggggcggcagaccccccgccctgggcagcctgctggaccccctgcccaccgccgccagcctgggcatcagcgacagcatcagagagtgcatcagcagccagagcagcgaccccaaggacgccagcggcgacggcgagctggacctgagcggcatcgacgacctggagatcgacagatacatcctgaacgagagcgaggccagagtgaaggccgagctgtggatgagagagaacgccgagtacctgagagagcagagagagaaggaggccagaatcgccaaggagaaggagctgggcatctacaaggagcacaagcccaagaagagctgcaagagaagagagcccatccaggccagcaccgccagagaggccatcgagaagatgctggagcagaagaagatcagcagcaagatcaactacagcgtgctgagaggcctgagcagcgccggcggcggcagcccccacagagaggacgcccagcccgagcacagcgccagcgccagaaagctgagcagaagaagaacccccgccagcagaagcggcgccgaccccgtgaccagcgtgggcaagagactgagacccctggtgagcacccagcccgccaagaaggtggccaccggcgaggccctgctgcccagcagccccaccctgggcgccgagcccgccagaccccaggccgtgctggtggagagcggccccgtgagctaccacgccgacgaggaggccgacgaggaggagcccgacgaggaggacggcgagccctgcgtgagcgccctgcagatgatgggcagcaacgactacggctgcgacggcgacgaggacgacggctactag

SEQ ID NO: 84877 - DNA, 1320 bp, Artificial Sequence
  derived and/or modified sequence
atgcacgattttagaaggaccgtgaaggaggtgatctccgtggtaaaagtttgcgaatcgacactccgcaagagactgacggaatttgaagatactccgacaagtcaactgacaatcgacgagtttatgaagattgatctggaggaggagtgtgatccacccagctatacagcaggacagagaaagttgcgcatgaaacagcttgaacaagtgctgagtaagaagctcgaggaggttgagggagaaatatcttcctaccaagatgccatcgagatcgaactcgagaattctagacccaaagccaagggcgggctggctagcctggccaaggacggttctacggaagacactgcgagttctctgtgcggggaagaggacactgaggatgaagaattggaagctgcagcctctcacttaaacaaagatctgtacagagagttactgggcggggctccaggatctagtgaagcggcagggagccccgagtgggggggacgccccccagctctgggctccttgttggaccctctacccacggcagctagccttgggattagtgactccatcagagaatgtatatcgtcccaaagctcagaccccaaagacgcatccggggatggagaactcgacttatcaggcattgacgacctcgaaatcgacaggtacatacttaacgagagcgaagcgcgagtaaaagcagaattgtggatgcgcgaaaacgccgaatacctgcgggagcagcgggagaaggaagcccgcatcgcaaaagagaaagagctgggcatctacaaagaacataaacctaagaagagctgcaaacggagagaacctatccaagcctccacggcccgcgaagcaattgaaaagatgctggaacagaagaagatcagcagcaaaatcaattacagtgtgctgagggggctgtcctccgctggcggggggagcccccaccgcgaggatgctcagcccgagcactccgcaagcgcaagaaagctctctagacggcgaaccccagcgtcccggtccggcgctgatccagtcacgagcgttgggaagagacttcgtcctctggtaagcacacagcccgccaagaaagttgccacaggggaagctctgctgccttcatctcccaccttaggggccgaacccgctagacctcaggcggtgctggtggaatctggacctgtgtcatatcacgcagatgaagaagcagatgaggaggagcctgacgaagaagacggggagccttgtgtgagcgctctgcagatgatgggctctaatgattacggatgtgatggtgatgaagacgacgggtattag

SEQ ID NO: 84878 - DNA, 612 bp, Artificial Sequence
  derived and/or modified sequence
atgagggaaaatgccgaatacctccgagaacagcgcgagaaggaggctcgcatcgctaaggagaaagagctgggaatttataaggaacacaaaccaaagaagagctgcaagcggcgcgagcccatccaagccagcacagcacgggaggccatcgaaaagatgctggaacaaaagaagatctcgtccaagatcaactactctgtcctgcgcggtctctcctccgccggtggggggagtccccatcgggaggatgcgcagccagaacattccgccagcgcgcgcaagctgtcacggcgacgcaccccagcgtccaggagcggtgccgatcccgtgacttcagtgggaaagcgattgcggcctctcgtctcaacacaacctgctaagaaggtagccacaggggaggcactgctcccaagcagccctacgttgggcgccgaacccgccaggccacaggctgtgcttgtggaatccggaccagtgagttatcacgctgatgaagaagcggacgaggaagagcccgacgaggaggacggcgaaccatgcgtgagcgccctccagatgatgggcagcaacgactacgggtgtgatggggacgaagacgatggatactag

SEQ ID NO: 84879 - DNA, 1320 bp, Artificial Sequence
  derived and/or modified sequence
atgcatgacttcagaagaacagtgaaggaggtgatctctgtggtgaaggtgtgtgagagcaccctgaggaagaggctgacagaatttgaggacacccccaccagccagctgaccattgatgagttcatgaagattgacctggaggaggagtgtgaccccccatcctacacagctggccagaggaagctgaggatgaagcagctggagcaggtgctgagcaagaagctggaggaggtggagggggagatcagcagctaccaggatgccatcgagattgagctggagaacagccggcccaaggccaagggcggcctggccagcctggccaaggatggcagcacagaggacacagccagcagcctgtgtggggaggaggacacagaagatgaggagctggaggccgccgccagccacctgaacaaggacctgtaccgggagctgctgggcggggcccctggcagcagcgaggccgccggcagccctgagtggggcggccggcccccagccctgggcagcctgctggaccccctgcccacagctgccagcctgggcatcagtgacagcatccgggagtgcatcagcagccagagcagtgaccccaaggatgccagcggagatggagagctggacctgagcggcattgatgacctggagattgaccgctacatcctgaatgaaagtgaggcccgggtgaaggccgagctgtggatgagagaaaatgctgagtacctgcgggagcagcgggagaaggaggcccgcatcgccaaggagaaggagctgggcatctacaaggagcacaagcccaagaagagctgcaagaggcgggagcccatccaggccagcacagcccgggaggccatcgagaagatgctggagcagaagaagatcagcagcaagatcaactacagcgtgctgcggggcctgagcagcgctgggggcggcagcccccacagagaagatgcccagcctgagcacagcgccagcgccaggaagctgagcagaagaaggaccccagccagccgcagcggggctgaccctgtgacctctgtgggcaagaggctgcggcccctggtgtccacccagcctgccaagaaggtggccaccggggaggccctgctgcccagcagccccaccctgggcgctgagcccgcccggccccaggccgtgctggtggagagcggccctgtgtcctaccacgcagatgaggaggctgatgaggaggagccagatgaggaggatggagagccctgtgtgtctgccctgcagatgatgggcagcaatgactatggctgtgatggagatgaagatgatggctactag

SEQ ID NO: 84880 - DNA, 612 bp, Artificial Sequence
  derived and/or modified sequence
atgagagaaaatgctgagtacctgcgggagcagcgggagaaggaggcccgcatcgccaaggagaaggagctgggcatctacaaggagcacaagcccaagaagagctgcaagaggcgggagcccatccaggccagcacagcccgggaggccatcgagaagatgctggagcagaagaagatcagcagcaagatcaactacagcgtgctgcggggcctgagcagcgctgggggcggcagcccccacagagaagatgcccagcctgagcacagcgccagcgccaggaagctgagcagaagaaggaccccagccagccgcagcggggctgaccctgtgacctctgtgggcaagaggctgcggcccctggtgtccacccagcctgccaagaaggtggccaccggggaggccctgctgcccagcagccccaccctgggcgctgagcccgcccggccccaggccgtgctggtggagagcggccctgtgtcctaccacgcagatgaggaggctgatgaggaggagccagatgaggaggatggagagccctgtgtgtctgccctgcagatgatgggcagcaatgactatggctgtgatggagatgaagatgatggctactag

SEQ ID NO: 84881 - DNA, 1320 bp, Artificial Sequence
  derived and/or modified sequence
atgcacgacttccggcggaccgtgaaggaggtgatcagcgtggtgaaagtctgtgagtcgaccctccgcaaacggctgaccgaatttgaggacactccaacaagccagctaacgatcgacgagttcatgaagattgaccttgaagaggaatgtgatcccccttcatacactgccggccagaggaaactgcgcatgaagcagcttgaacaggtgctgtcaaagaagctggaggaggtggaaggggaaatttctagctaccaagacgccatcgagatcgagctagaaaattcccgacccaaggcaaagggcggacttgcatccttggctaaagatggatccacagaagatacagctagcagcttatgtggagaggaggatacagaggatgaggaacttgaggccgcggcctcacatttgaacaaagatttatatagagagttgcttggcggcgcaccgggaagctctgaggccgcaggctcccctgagtggggcggcaggccaccagccctgggttctctcctggatccactccctacggcagcatctcttggtatcagcgattctatccgggaatgtatctcttcccagtcatccgatccaaaggatgccagcggagatggcgaactggacctgtctggcattgacgatctcgaaatcgatcggtacatcctgaatgaatcagaggccagagtcaaggccgaactttggatgcgggaaaacgctgagtatttgcgcgagcaacgcgagaaggaggcgagaattgctaaggagaaggagctgggaatatataaagaacataaacctaagaagagttgtaaaaggagggagcccatccaggcatctaccgcacgggaggccattgagaagatgctcgagcaaaagaagatctcctctaagatcaactacagtgtgctgagaggactcagctcggccggaggggggagtccacatagggaagatgctcagcccgagcatagcgcatccgcgcggaagttgtcccggagacgaaccccagcttcgcgatctggtgccgaccctgtgacctcagtgggcaagcgcctccgaccgttagtgtctactcaacctgccaagaaagtggcaaccggagaagcactgttgccatcttcgccgacccttggagccgaaccagcaagaccccaagccgtcctggttgagagtgggccagtatcctaccacgcagatgaagaggctgatgaggaggagcctgacgaagaagatggagaaccgtgtgtgtccgcactgcagatgatgggatctaatgattacggctgcgacggggatgaagacgatggttactag

SEQ ID NO: 84882 - DNA, 612 bp, Artificial Sequence
  derived and/or modified sequence
atgcgggagaacgccgagtacctgcgggagcagcgggagaaggaggctagaatcgctaaggaaaaggagctggggatttataaggagcacaagccgaagaagagctgcaagcggcgcgagcctattcaggccagcaccgccagggaggcgatcgagaagatgctcgagcagaagaaaatatcatccaaaatcaattattccgtgctgagaggcctgagctcggcaggcggcggtagtccccatcgtgaggatgcacagcccgagcacagcgcctctgcaaggaagctgagccggcggagaaccccggcttctcggtccggagccgatccagtgactagcgtgggaaagaggctgcgaccactcgtctctactcagcctgcgaagaaggtcgctaccggtgaagcgcttctgcccagtagcccgacgctaggcgcggaacccgcgcggccccaagctgttctcgtcgaaagcggaccggtgagctaccacgccgacgaggaggccgatgaagaggagccggacgaagaggacggcgaaccatgcgtaagcgctctgcagatgatgggatccaacgattatggctgtgacggcgatgaggacgatggctactag

SEQ ID NO: 84883 - DNA, 1320 bp, Artificial Sequence
  derived and/or modified sequence
atgcacgatttccggagaactgtcaaggaagtgatctccgttgttaaggtctgcgagtctaccctcagaaaacgattaactgaattcgaggacactccaacttctcagcttaccatagatgaattcatgaaaattgatctcgaggaggagtgtgatcctcctagctatacagctggacagaggaagctccgcatgaaacagttagaacaggtgctgtccaaaaagctggaggaggttgagggcgaaatttctagctatcaagacgccatcgagatagagttagagaacagcagaccaaaagcaaagggcggactggctagcctggctaaagatgggtccacagaggacacggcaagcagcctttgtggggaagaggatacagaggatgaggagttggaggccgctgcaagtcatcttaacaaggatctgtacagggagttactgggaggtgcaccgggaagttccgaagcagcaggcagcccggagtggggcggtaggcccccagcgctcgggtctctgctcgatcctcttccaaccgctgcatcactgggaatctcggactccatacgggagtgcatttctagtcagtcctctgacccaaaagatgcctccggagacggcgagctggacctgtctggcattgatgatctggaaatcgatagatatatccttaacgaaagcgaggccagagttaaagccgaactgtggatgcgcgagaacgcagaatatctgcgggagcaaagagaaaaagaagcaaggattgccaaagagaaagaattaggtatatataaggagcacaaacccaaaaagtcctgcaaaagacgggagcctattcaagcaagcactgccagagaggcaatcgagaagatgcttgagcaaaaaaagatctcttctaaaattaactatagcgtgctgcggggtcttagcagtgccggagggggttcacctcacagagaagatgcccaaccagagcactccgctagtgctaggaagctctctaggaggaggacaccagcctcccgctctggcgctgaccccgtgacctccgtaggcaaacggttgcggcctctggtctcgacgcagcctgcaaagaaggtcgctactggtgaagcgctattgccaagcagccccacgctgggggcagaacctgccagacctcaggcagtgttagtggaaagcggccctgtttcttatcacgccgacgaggaggcggatgaggaagagcctgatgaggaggacggagaaccttgtgtgtccgcacttcagatgatgggtagcaatgattacgggtgtgacggtgacgaggacgacgggtattag

SEQ ID NO: 84884 - DNA, 612 bp, Artificial Sequence
  derived and/or modified sequence
atgagggaaaacgctgagtacctgcgagaacaaagggagaaggaagctagaatcgccaaggagaaggagcttggcatttataaagaacataagcccaaaaaaagctgcaagcgacgcgagcctattcaagcatcaaccgccagggaggccatcgaaaagatgttggaacagaagaaaatttcgtcgaaaatcaattattctgttttacgaggcctgtcttctgccggtggcggtagcccgcatagggaggacgcccaaccagagcactcagccagcgctcgcaaactgtcacggagacgaacgcccgcaagcagaagcggcgctgaccctgtaacttctgtcggtaagcgcctgcgtccattggttagtacacagccggcaaagaaggtcgccactggcgaagctctgctgccaagtagccctaccctcggggctgagcccgctaggccccaggcagtgttagtagagtccggtcctgtatcctatcatgccgacgaggaagcagacgaggaggagcccgacgaggaggacggcgaaccctgcgtgagcgccctgcaaatgatgggctcaaatgactacgggtgtgacggcgacgaagatgatggctactag

SEQ ID NO: 84885 - DNA, 2876 bp, Artificial Sequence
  derived and/or modified sequence
tttcttttcagggctagacattctgatggttgtgaaggaggagcttggggtggtttcatttgcatttccttcaggactggaggtctttgtatatgttcatttacaccaatatgtcgtcttcgccggagtgttcagatctttttccattttttaattgggttgtgttttcttgtgaagttttgggaattcttcatctgttctagatttaagtcctttatcagttacgagatttgcagataagcctgtgggctgtcttcattgtcttaacgatgtctttcaaagggcagttcttaattttttggaaatccgttttatcagtgttttatggattctgcttttagaaccattagaaatgtttgccttatccaaggtcacaaagtttttcttttacgtttttgtctgaaatgtctgtactttaactctccccctaggtctgtgatctgctttgagctaacttccgcgtgcagtgcgaggtgtgggctgaggctcgttctttggcacctgaccgccaggcaccgtgcactgacagccgttctatgggttacctggcagcttggtagcattgttttttgtcacaaaagcgggcaccctggccctctgcctggttaacaggtggattgtgtacacctaggctccaccgaggacaccgcgtccagcttgtgtggcgaggaggacacagaggacgaggagctggaagccgcggccagccacctgaacaaagacttataccgggagctccttggtggtgcccccggcagctcggaagcagcaggaagccccgagtggggcggcagacctccggccctggggtccctgctggaccccctccccactgcagccagcctgggcatctcagactccatccgcgaatgcatctcctctcagagcagcgaccccaatgcttcaggagacggtgagctggacctcagtggcattgatgacctggagattgacaggtacatcctgaatgagtcggaagcccgcgtgaaggccgagctgtggatgagggagaacgccgagtacctgcgggaacagagggaaaaagaagcaagaatagcgaaagagaaggagctcggcatctacaaggaacacaagcccaagaagtcttgcaagcgacgggagccaattcaggccagtaccgccagggaggccatcgagaagatgctggagcagaagaagatctccagcaagatcaattatagcgtgctccggggcctcagcagcgccggcgggggcagtccgcacagggaggatgcacagcccgagcatagcgccagtgccaggaagctgtcacgaaggaggacgccggccagcagaagtggggctgaccctgtgaccagtgtggggaaaaggttgaggcctctggtgtctacgcagccagcaaagaaggtggccacgggagaggctttgctcccaagctctcccaccctcggagctgagcctgccaggccccaggcggtgctggtggagagcgggcccgtgtcataccacgccgacgaggaggctgacgaggaggagcctgacgaggaggacggggagccctgcgtcagtgccctgcagatgatgggcagcaacgactatggctgtgatggcgatgaggacgacggctactgaagtgtggcctccaggcaggtgatgtcctggcagggggcctcgcgggtctcctcagcatcagacgggcttccaggaccgcagcaggcaggccccagcgccgagactcctggtgacaggtggcacctgtcccacagccctcgtcccatgtggaacttaccattgggattgtgtttctattcagcaagggaaaccggaccaagcgtctgcatgtgtgtgatcagatgtgggccgggtgtgtgcagggctgggtcccgctgcctgccgtcgactcatccaaggaccctccaaggctggcagtgtggtgttgctactattaaggaaacaggcttggggcagccccactgctggtccaagtgtgtggagggctgagtgtgctggccctgtgactcaggaccagctctggagtctccagcccaccctccgcaccgtcccctcctgagcagcactcggcgccagcagcctctgccagagtggaagccagagccctgcaggtgtccggcgcagccgtgggagctgaggatctggcacttgagaggcagcagctccttgaaggtcctctgcctccagctgtggccctgcatccagatacctgcctcgtccgaggcagacacccccacccctgcctcctccagacccccctccccgctgcctgcaccgcctggagcagcatgggggtcagacccctgctccagggccacttgagttgtgggcccaggagccctgcggctgccggcaggtgaactgagtgcccgacagctgagaccggcgcccacccgtcctgagcatagctctgtaggcagtgcgggcatagcctgcatagtgtcctggcgctgggagttccccgtggacagagccagagggcagtggcgctccctgtcagagctggatcaggccccccatcgaggagggagggcagacggaggcccgagagcctccccaggcctcttcgtgggaaggccccagtaccactcgtaggaggtctcagctctggcatggctgccccggatgtggccgagggggcttcaccctgtgtccttaggagggggtggccttgaggcagagccgtgcctcactgacccccaggggcctcatcctccccatggaatgggctgtatgtcctgccccaacttggcccgcagcaggccagacccccctacccccgcccagagctcagtagccagcctgggtcctgccagggcttctcgagggcttgggggaagaatagatttagtaaagcaggaagatctgttgttacttaacag

SEQ ID NO: 84886 - DNA, 1320 bp, Artificial Sequence
  derived and/or modified sequence
atgcacgacttcagaagaaccgtgaaggaggtgatcagcgtggtgaaggtgtgcgagagcaccctgagaaagagactgaccgagttcgaggacacccccaccagccagctgaccatcgacgagttcatgaagatcgacctggaggaggagtgcgacccccccagctacaccgccggccagagaaagctgagaatgaagcagctggagcaggtgctgagcaagaagctggaggaggtggagggcgagatcagcagctaccaggacgccatcgagatcgagctggagaacagcagacccaaggccaagggcggcctggccagcctggccaaggacggcagcaccgaggacaccgccagcagcctgtgcggcgaggaggacaccgaggacgaggagctggaggccgccgccagccacctgaacaaggacctgtacagagagctgctgggcggcgcccccggcagcagcgaggccgccggcagccccgagtggggcggcagaccccccgccctgggcagcctgctggaccccctgcccaccgccgccagcctgggcatcagcgacagcatcagagagtgcatcagcagccagagcagcgaccccaaggacgccagcggcgacggcgagctggacctgagcggcatcgacgacctggagatcgacagatacatcctgaacgagagcgaggccagagtgaaggccgagctgtggatgagagagaacgccgagtacctgagagagcagagagagaaggaggccagaatcgccaaggagaaggagctgggcatctacaaggagcacaagcccaagaagagctgcaagagaagagagcccatccaggccagcaccgccagagaggccatcgagaagatgctggagcagaagaagatcagcagcaagatcaactacagcgtgctgagaggcctgagcagcgccggcggcggcagcccccacagagaggacgcccagcccgagcacagcgccagcgccagaaagctgagcagaagaagaacccccgccagcagaagcggcgccgaccccgtgaccagcgtgggcaagagactgagacccctggtgagcacccagcccgccaagaaggtggccaccggcgaggccctgctgcccagcagccccaccctgggcgccgagcccgccagaccccaggccgtgctggtggagagcggccccgtgagctaccacgccgacgaggaggccgacgaggaggagcccgacgaggaggacggcgagccctgcgtgagcgccctgcagatgatgggcagcaacgactacggctgcgacggcgacgaggacgacggctactag

SEQ ID NO: 84887 - DNA, 612 bp, Artificial Sequence
  derived and/or modified sequence
atgagagagaacgccgagtacctgagagagcagagagagaaggaggccagaatcgccaaggagaaggagctgggcatctacaaggagcacaagcccaagaagagctgcaagagaagagagcccatccaggccagcaccgccagagaggccatcgagaagatgctggagcagaagaagatcagcagcaagatcaactacagcgtgctgagaggcctgagcagcgccggcggcggcagcccccacagagaggacgcccagcccgagcacagcgccagcgccagaaagctgagcagaagaagaacccccgccagcagaagcggcgccgaccccgtgaccagcgtgggcaagagactgagacccctggtgagcacccagcccgccaagaaggtggccaccggcgaggccctgctgcccagcagccccaccctgggcgccgagcccgccagaccccaggccgtgctggtggagagcggccccgtgagctaccacgccgacgaggaggccgacgaggaggagcccgacgaggaggacggcgagccctgcgtgagcgccctgcagatgatgggcagcaacgactacggctgcgacggcgacgaggacgacggctactag

SEQ ID NO: 84888 - protein, 208 aa, Artificial Sequence
  derived and/or modified sequence
MTGRVCRGCGGTDIELDAARGDAVCTACGSVLEDNIIVSEVQFVESSGGGSSAVGQFVSLDGAGKTPTLGGGFHVNLGKESRAQTLQNGRRHIHHLGNQLQLNQHCLDTAFNFFKMAVSRHLTRGRKMAHVIAACLYLVCRTEGTPHMLLDLSDLLQVDSLRPASFPTWGCDLGVVTRVVTGVYPRCLHASQWPVCAACPVRKFWSVG

SEQ ID NO: 84889 - protein, 240 aa, Artificial Sequence
  derived and/or modified sequence
MTGRVCRGCGGTDIELDAARGDAVCTACGSVLEDNIIVSEVQFVESSGGGSSAVGQFVSLDGAGKTPTLGGGFHVNLGKESRAQTLQNGRRHIHHLGNQLQLNQHCLDTAFNFFKMAVSRHLTRGRKMAHVIAACLYLVCRTEGTPHMLLDLSDLLQVDSLRPASFPTWGCDLGVVTRVVTGVYPRCPRISVAGLCCLPSQEVLVCRMRGLHDMGVTVRDLWECGSPWQEHLPMLGTVGC

SEQ ID NO: 84890 - DNA, 627 bp, Artificial Sequence
  derived and/or modified sequence
atgacaggccgagtatgtcgcgggtgcggtggtacagacatagaactggatgccgccagaggtgatgctgtttgcacagcatgcggcagtgtcttggaggataacataatcgtcagtgaagttcagtttgtcgagtcctcgggaggtggatcaagcgccgtggggcagttcgtgtctctggacggggctggcaaaacgcctacattgggaggggggtttcatgtgaaccttggtaaggagagccgagctcaaactctccagaatggccgacggcacattcatcacctgggaaatcagctccagctgaaccaacactgcctggacacggcgtttaacttcttcaagatggccgtttcccggcacctaactcgaggtaggaagatggctcatgtgattgccgcatgtctgtatctagtgtgcaggaccgaaggaacacctcacatgttgctggatctctcagatttgctgcaggtcgactccctgagacctgcgtcattccccacatggggctgtgacttgggcgttgtaacccgcgttgtgactggggtatacccccgctgcttgcacgcatctcagtggccagtctgtgcagcgtgtcccgtaagaaagttctggagcgttggttag

SEQ ID NO: 84891 - DNA, 723 bp, Artificial Sequence
  derived and/or modified sequence
atgacagggcgtgtgtgtcgcgggtgcggcgggacagacatcgagctggatgcagctcggggtgacgctgtttgtactgcctgcggctccgtcctggaggataacatcattgtctccgaagtccagttcgtagagtcgagcggcgggggttcatcagcagtcgggcagtttgtcagcttggacggcgcaggtaagactcccaccttggggggaggcttccatgtgaacctgggaaaagaaagccgtgctcaaaccctgcagaatggacgtaggcacatccaccacttgggaaaccagctccagctaaatcagcattgtctcgacactgctttcaacttttttaagatggcagtgagccggcacttgacaaggggtcgcaaaatggcccatgtcatcgccgcatgcctttatttagtatgcagaacagagggcacgccacatatgctgctggatctttccgacctcctgcaggtggactccctgcggcccgcttctttccccacatggggctgcgatttgggcgtcgtgaccagagtggtcaccggcgtgtatcctagatgccctagaatcagtgttgcaggcctgtgttgtctcccttcacaggaggtcctggtgtgtagaatgcgaggactgcatgacatgggcgtgaccgtgagagatttatgggagtgcggaagcccatggcaggaacatctgccaatgttaggcacagtcggatgctag

SEQ ID NO: 84892 - DNA, 627 bp, Artificial Sequence
  derived and/or modified sequence
atgacaggccgggtgtgccggggctgcggcggcacagacatcgagctggatgctgcccggggagatgctgtgtgcacagcctgtggctctgtgctggaggacaacatcatcgtgtctgaggtgcagtttgtggagagcagcggcggcggcagcagcgctgtgggccagtttgtgtccctggatggagctgggaagacccccaccctgggcggcggcttccacgtgaacctgggcaaggagagccgggcccagaccctgcagaatggccgccgccacatccaccacctgggcaaccagctgcagctgaaccagcactgcctggacacagccttcaacttcttcaagatggctgtgagccgccacctgacccggggcaggaagatggcccacgtgattgctgcctgcctgtacctggtgtgcaggacagagggcaccccccacatgctgctggacctgagtgacctgctgcaggtggacagcctgcggcctgccagcttccccacctggggctgtgacctgggcgtggtgaccagggtggtgactggagtgtacccccgctgcctgcacgccagccagtggcctgtgtgtgccgcctgccctgtgaggaagttctggagcgtgggctag

SEQ ID NO: 84893 - DNA, 723 bp, Artificial Sequence
  derived and/or modified sequence
atgacaggccgggtgtgccggggctgcggcggcacagacatcgagctggatgctgcccggggagatgctgtgtgcacagcctgtggctctgtgctggaggacaacatcatcgtgtctgaggtgcagtttgtggagagcagcggcggcggcagcagcgctgtgggccagtttgtgtccctggatggagctgggaagacccccaccctgggcggcggcttccacgtgaacctgggcaaggagagccgggcccagaccctgcagaatggccgccgccacatccaccacctgggcaaccagctgcagctgaaccagcactgcctggacacagccttcaacttcttcaagatggctgtgagccgccacctgacccggggcaggaagatggcccacgtgattgctgcctgcctgtacctggtgtgcaggacagagggcaccccccacatgctgctggacctgagtgacctgctgcaggtggacagcctgcggcctgccagcttccccacctggggctgtgacctgggcgtggtgaccagggtggtgactggagtgtacccccgctgcccccgcatctctgtggccggcctgtgctgcctgcccagccaggaggtgctggtgtgcaggatgaggggcctgcatgacatgggcgtgacagtgcgggacctgtgggagtgtggcagcccctggcaggagcacctgcccatgctgggcaccgtgggctgctag

SEQ ID NO: 84894 - DNA, 627 bp, Artificial Sequence
  derived and/or modified sequence
atgaccggccgggtgtgccggggctgcggcggcaccgacatcgagttggatgcagctaggggcgacgcggtgtgcacggcctgtggatccgtgctcgaagacaacattattgtctcagaagtgcaatttgtcgaatcaagcggcggtggaagctcagctgtgggacaattcgtctctctcgatggcgccggtaagactcccaccctgggaggtggcttccatgttaatctgggaaaggagagcagggcgcaaaccttacaaaatggccggagacacatacatcatttgggtaatcaactccaactgaaccagcactgccttgacacagctttcaatttctttaagatggccgtgtcccgtcaccttactcgaggcagaaaaatggcacacgtcattgccgcctgcctgtatctagtttgtcgcaccgaggggaccccacatatgctgcttgatttgtctgacctcctgcaggttgactccctgcgccctgcttcttttccgacctggggctgcgacctaggcgtggtgaccagggtcgttaccggagtatatcccagatgcctgcatgcctctcaatggccggtttgtgcggcttgccctgtcaggaaattctggtctgtgggatag

SEQ ID NO: 84895 - DNA, 723 bp, Artificial Sequence
  derived and/or modified sequence
atgaccggccgggtgtgccggggctgcggcggcaccgacatcgagttagatgccgccagaggtgatgctgtctgcaccgcctgcgggtccgtgttagaggataacatcattgtgtcagaggtacagttcgtggaatctagtggcggtggatcatcagctgtggggcagttcgtgtcgcttgatggagccggtaagacaccaacccttggtggggggttccatgtgaatttgggcaaggaatcacgcgcccagactctccagaatggaaggcgtcatatccatcacttgggcaatcagctgcagctcaatcaacattgtcttgacactgctttcaacttcttcaagatggccgtgtccagacacctgactcggggaaggaaaatggctcatgtcatcgcagcctgtttatacctggtgtgccggaccgaaggtacgccacacatgttactagacctaagcgacctgctccaggtggatagcctcagaccggcatcctttcccacatggggctgtgatctgggagtcgtgactcgagtagtgaccggcgtgtacccaagatgtcctcggatttcggtggccggcctttgctgcctgcccagtcaggaggtgctagtctgcagaatgcgaggcctgcacgatatgggagtcaccgttagggatctgtgggaatgtggcagtccctggcaagaacacttacctatgctgggcactgttggttgttag

SEQ ID NO: 84896 - DNA, 627 bp, Artificial Sequence
  derived and/or modified sequence
atgactggccgagtgtgcagagggtgcgggggaacagatattgaactggacgctgcccgaggtgacgcagtgtgcaccgcctgcggatcagtgctggaggacaacatcattgtgtctgaggtccagttcgtggagagcagcggcggaggatcttccgccgtcggccagttcgtctccctggacggagccggtaagactccaacgctggggggaggatttcatgttaatttgggcaaggaaagccgggctcagacactgcaaaacggcaggcgtcacatccaccacctcggcaatcagctccagctcaaccagcactgccttgacactgctttcaacttttttaaaatggccgtttcccgacatctcacccggggtcggaagatggcccatgtgatcgccgcatgcctgtatttggtctgtaggactgagggcactccccatatgctgttagatttgtcagacctgctgcaggttgattctctcagaccagcttcgttccccacctggggctgcgacctgggtgtggtcactagggtggtcacaggagtttatccaaggtgcctacacgcaagccaatggcccgtgtgtgccgcttgtcctgtcaggaaattctggtctgtaggatag

SEQ ID NO: 84897 - DNA, 723 bp, Artificial Sequence
  derived and/or modified sequence
atgacaggcagggtttgtaggggatgcggtgggactgacattgagcttgacgcagccaggggcgacgccgtctgtacagcctgcggatcagttttagaggacaatattattgtcagtgaggtgcaatttgttgagtcttctggaggcggatcttccgctgtggggcaatttgttagcctcgatggcgctggaaaaacacccaccctggggggtggattccacgtgaatctcggtaaagaatccagggcccagacactccagaacggaagacggcacatccatcatctgggcaatcagcttcagctaaaccagcattgcctcgacacagcttttaatttctttaagatggccgtatcacgccatctcactcgtgggagaaaaatggcacatgtcatagctgcctgtctctacctggtctgccgcaccgagggaactccacacatgctgctagatttgtcagacctcctgcaggtggactcactgagacctgcatcctttcctacttggggttgcgacttgggggttgtaactcgtgtggtgactggtgtgtatccccgatgcccaagaatttccgtcgccggactttgttgcctgccgtcccaggaggtgctagtgtgtaggatgagaggactgcatgacatgggcgtgacagtcagagatctgtgggagtgtgggtccccttggcaagagcatctgcctatgctgggcactgttgggtgctag

SEQ ID NO: 84898 - DNA, 1450 bp, Artificial Sequence
  derived and/or modified sequence
gctcgccgctggagaccgcgctcactatccgaggaggaccctcctctgccccgcgtccagctttagtccccgactgcgttcatcgccaagggcccgcccactgccttaggtcgcgtcgccagccttgggtcccgtcgccagccttgggtcccgtccccggctgcactcaccgcgaggccccacccttagctctagtccccggtgtcgcccaccgacgaggccccgccccaaactccagtcccgggctgcgctcaccgccgtggccccgcccccaagcgccagtcctcggctgcgctcaccggtaggccccgctcgggttccgccgaagcccagcccccgcaggtcgcccctccgacgccggcgcgccgcaagggaggccagctcgctcgcagtggggaggtcgcggctccagtcctcgcgtccccgccgtggtcccggtgcctgtcccatcccgcgggcgcggccgttgcgggcggcgcggcccgggcgcgcgcggcgaatctgcggctgcgaatcggctggagcggggcctcgcgagagcggcgaggcctgggcggctgggcctgggcgggcggcgcgggctgctccggaggctcgggtggcttgagagtcttgggaggctccgggcgctgcccgcgcggtcgccggcatgacgggccgcgtgtgccgcggttgcggcggcacggacatcgagctggacgcggcgcgcggggacgcggtgtgcaccgcctgcggctcagtgctggaggacaacatcatcgtgtccgaggtgcagttcgtggagagcagcggcggcggctcctcggccgtgggccagttcgtgtccctggacggtgctggcaaaaccccgactctgggtggcggcttccacgtgaatctggggaaggagtcgagagcgcagaccctgcagaatgggaggcgccacatccaccacctggggaaccagctgcagctgaaccagcactgcctggacaccgccttcaacttcttcaagatggccgtgagcaggcacctgacccgcggccggaagatggcccacgtgattgctgcctgcctctacctggtctgccgtacggagggcacgccgcacatgctcctggacctcagcgacctgctccaggtagacagcctccgtcctgcatctttccccacctggggttgtgacctgggggttgtgaccagggttgtgaccggggtgtaccccaggtgcctccacgcatctcagtggccggtctgtgctgcctgcccagtcaggaagttttggtctgtaggatgaggggccttcatgacatgggggtcacagtccgagacttgtgggagtgtgggtctccatggcaggagggcacctgccaatgctgggcacggttgggtgttagctaggcctgggtgaacagtgaacttttgtcctacacaaaggagattattttcaattaaaaaatttttttgtgag

SEQ ID NO: 84899 - DNA, 1086 bp, Artificial Sequence
  derived and/or modified sequence
cggctgcgctcaccggtaggccccgctcgggttccgccgaagcccagcccccgcaggtcgcccctccgacgccggcgcgccgcaagggaggccagctcgctcgcagtggggaggtcgcggctccagtcctcgcgtccccgccgtggtcccggtgcctgtcccatcccgcgggcgcggccgttgcgggcggcgcggcccgggcgcgcgcggcgaatctgcggctgcgaatcggctggagcggggcctcgcgagagcggcgaggcctgggcggctgggcctgggcgggcggcgcgggctgctccggaggctcgggtggcttgagagtcttgggaggctccgggcgctgcccgcgcggtcgccggcatgacgggccgcgtgtgccgcggttgcggcggcacggacatcgagctggacgcggcgcgcggggacgcggtgtgcaccgcctgcggctcagtgctggaggacaacatcatcgtgtccgaggtgcagttcgtggagagcagcggcggcggctcctcggccgtgggccagttcgtgtccctggacggtgctggcaaaaccccgactctgggtggcggcttccacgtgaatctggggaaggagtcgagagcgcagaccctgcagaatgggaggcgccacatccaccacctggggaaccagctgcagctgaaccagcactgcctggacaccgccttcaacttcttcaagatggccgtgagcaggcacctgacccgcggccggaagatggcccacgtgattgctgcctgcctctacctggtctgccgtacggagggcacgccgcacatgctcctggacctcagcgacctgctccaggtagacagcctccgtcctgcatctttccccacctggggttgtgacctgggggttgtgaccagggttgtgaccggggtgtaccccaggtgcccacgcatctcagtggccggtctgtgctgcctgcccagtcaggaagttttggtctgtaggatgaggggccttcatgacatgggggtcacagtccgagacttgtgggagtgtgggtctccatggcaggagcacctgccaatgctgggcacggttgggtgttag

SEQ ID NO: 84900 - DNA, 627 bp, Artificial Sequence
  derived and/or modified sequence
atgaccggcagagtgtgcagaggctgcggcggcaccgacatcgagctggacgccgccagaggcgacgccgtgtgcaccgcctgcggcagcgtgctggaggacaacatcatcgtgagcgaggtgcagttcgtggagagcagcggcggcggcagcagcgccgtgggccagttcgtgagcctggacggcgccggcaagacccccaccctgggcggcggcttccacgtgaacctgggcaaggagagcagagcccagaccctgcagaacggcagaagacacatccaccacctgggcaaccagctgcagctgaaccagcactgcctggacaccgccttcaacttcttcaagatggccgtgagcagacacctgaccagaggcagaaagatggcccacgtgatcgccgcctgcctgtacctggtgtgcagaaccgagggcaccccccacatgctgctggacctgagcgacctgctgcaggtggacagcctgagacccgccagcttccccacctggggctgcgacctgggcgtggtgaccagagtggtgaccggcgtgtaccccagatgcctgcacgccagccagtggcccgtgtgcgccgcctgccccgtgagaaagttctggagcgtgggctag

SEQ ID NO: 84901 - DNA, 723 bp, Artificial Sequence
  derived and/or modified sequence
atgaccggcagagtgtgcagaggctgcggcggcaccgacatcgagctggacgccgccagaggcgacgccgtgtgcaccgcctgcggcagcgtgctggaggacaacatcatcgtgagcgaggtgcagttcgtggagagcagcggcggcggcagcagcgccgtgggccagttcgtgagcctggacggcgccggcaagacccccaccctgggcggcggcttccacgtgaacctgggcaaggagagcagagcccagaccctgcagaacggcagaagacacatccaccacctgggcaaccagctgcagctgaaccagcactgcctggacaccgccttcaacttcttcaagatggccgtgagcagacacctgaccagaggcagaaagatggcccacgtgatcgccgcctgcctgtacctggtgtgcagaaccgagggcaccccccacatgctgctggacctgagcgacctgctgcaggtggacagcctgagacccgccagcttccccacctggggctgcgacctgggcgtggtgaccagagtggtgaccggcgtgtaccccagatgccccagaatcagcgtggccggcctgtgctgcctgcccagccaggaggtgctggtgtgcagaatgagaggcctgcacgacatgggcgtgaccgtgagagacctgtgggagtgcggcagcccctggcaggagcacctgcccatgctgggcaccgtgggctgctag

SEQ ID NO: 84902 - protein, 907 aa, Artificial Sequence
  derived and/or modified sequence
MSGQTLTDRIAAAQYSVTGSAVARAVCKATTHEVMGPKKKHLDYLIQATNETNVNIPQMADTLFERATNSSWVVVFKALVTTHHLMVHGNERFIQYLASRNTLFNLSNFLDKSGSHGYDMSTFIRRYSRYLNEKAFSYRQMAFDFARVKKGADGVMRTMAPEKLLKSMPILQGQIDALLEFDVHPNELTNGVINAAFMLLFKDLIKLFACYNDGVINLLEKFFEMKKGQCKDALEIYKRFLTRMTRVSEFLKVAEQVGIDKGDIPDLTQAPSSLMETLEQHLNTLEGKKPGNNEGSGAPSPLSKSSPATTVTSPNSTPAKTIDTSPPVDLFATASAAVPVSTSKPSSDLLDLQPDFSSGGAAAAAAPAPPPPAGGATAWGDLLGEDSLAALSSVPSEAQISDPFAPEPTPPTTTAEIATASASASTTTTVTAVTAEVDLFGDAFAASPGEAPAASEGAAAPATPTPVAAALDACSGNDPFAPSEGSAEAAPELDLFAMKPPETSVPVVTPTASTAPPVPATAPSPAPAVAAAAAATTAATAAATTTTTTSAATATTAPPALDIFGDLFESTPEVAAAPKPDAAPSIDLFSTDAFSSPPQGASPVPESSLTADLLSVDAFAAPSPATTASPAKVDSSGVIDLFGDAFGSSASEPQPASQAASSSSASADLLAGFGGSFMAPSPSPVTPAQNNLLQPNFEAAFGTTPSTSSSSSFDPSVFDGLGDLLMPTMAPAGQPAPVSMVPPSPAMAASKALGSDLDSSLASLVGNLGISGTTTKKGDLQWNAGEKKLTGGANWQPKVAPATWSAGVPPSAPLQGAVPPTSSVPPVAGAPSVGQPGAGFGMPPAGTGMPMMPQQPVMFAQPMMRPPFGAAAVPGTQLSPSPTPASQSPKKPPAKDPLADLNIKDFL

SEQ ID NO: 84903 - protein, 907 aa, Artificial Sequence
  derived and/or modified sequence
MSGQTLTDRIAAAQYSVTGSAVARAVCKATTHEVMGPKKKHLDYLIQATNETNVNIPQMADTLFERATNSSWVVVFKALVTTHHLMVHGNERFIQYLASRNTLFNLSNFLDKSGSHGYDMSTFIRRYSRYLNEKAFSYRQMAFDFARVKKGADGVMRTMAPEKLLKSMPILQGQIDALLEFDVHPNELTNGVINAAFMLLFKDLIKLFACYNDGVINLLEKFFEMKKGQCKDALEIYKRFLTRMTRVSEFLKVAEQVGIDKGDIPDLTQAPSSLMETLEQHLNTLEGKKPGNNKISGAPSPLSKSSPATTVTSPNSTPAKTIDTSPPVDLFATASAAVPVSTSKPSSDLLDLQPDFSSGGAAAAAAPAPPPPAGGATAWGDLLGEDSLAALSSVPSEAQISDPFAPEPTPPTTTAEIATASASASTTTTVTAVTAEVDLFGDAFAASPGEAPAASEGAAAPATPTPVAAALDACSGNDPFAPSEGSAEAAPELDLFAMKPPETSVPVVTPTASTAPPVPATAPSPAPAVAAAAAATTAATAAATTTTTTSAATATTAPPALDIFGDLFESTPEVAAAPKPDAAPSIDLFSTDAFSSPPQGASPVPESSLTADLLSVDAFAAPSPATTASPAKVDSSGVIDLFGDAFGSSASEPQPASQAASSSSASADLLAGFGGSFMAPSPSPVTPAQNNLLQPNFEAAFGTTPSTSSSSSFDPSVFDGLGDLLMPTMAPAGQPAPVSMVPPSPAMAASKALGSDLDSSLASLVGNLGISGTTTKKGDLQWNAGEKKLTGGANWQPKVAPATWSAGVPPSAPLQGAVPPTSSVPPVAGAPSVGQPGAGFGMPPAGTGMPMMPQQPVMFAQPMMRPPFGAAAVPGTQLSPSPTPASQSPKKPPAKDPLADLNIKDFL

SEQ ID NO: 84904 - DNA, 2724 bp, Artificial Sequence
  derived and/or modified sequence
atgagcggccagaccctgaccgacagaatcgccgccgcccagtacagcgtgaccggcagcgccgtggccagagccgtgtgcaaggccaccacccacgaggtgatgggccccaagaagaagcacctggactacctgatccaggccaccaacgagaccaacgtgaacatcccccagatggccgacaccctgttcgagagagccaccaacagcagctgggtggtggtgttcaaggccctggtgaccacccaccacctgatggtgcacggcaacgagagattcatccagtacctggccagcagaaacaccctgttcaacctgagcaacttcctggacaagagcggcagccacggctacgacatgagcaccttcatcagaagatacagcagatacctgaacgagaaggccttcagctacagacagatggccttcgacttcgccagagtgaagaagggcgccgacggcgtgatgagaaccatggcccccgagaagctgctgaagagcatgcccatcctgcagggccagatcgacgccctgctggagttcgacgtgcaccccaacgagctgaccaacggcgtgatcaacgccgccttcatgctgctgttcaaggacctgatcaagctgttcgcctgctacaacgacggcgtgatcaacctgctggagaagttcttcgagatgaagaagggccagtgcaaggacgccctggagatctacaagagattcctgaccagaatgaccagagtgagcgagttcctgaaggtggccgagcaggtgggcatcgacaagggcgacatccccgacctgacccaggcccccagcagcctgatggagaccctggagcagcacctgaacaccctggagggcaagaagcccggcaacaacgagggcagcggcgcccccagccccctgagcaagagcagccccgccaccaccgtgaccagccccaacagcacccccgccaagaccatcgacaccagcccccccgtggacctgttcgccaccgccagcgccgccgtgcccgtgagcaccagcaagcccagcagcgacctgctggacctgcagcccgacttcagcagcggcggcgccgccgccgccgccgcccccgccccccccccccccgccggcggcgccaccgcctggggcgacctgctgggcgaggacagcctggccgccctgagcagcgtgcccagcgaggcccagatcagcgaccccttcgcccccgagcccaccccccccaccaccaccgccgagatcgccaccgccagcgccagcgccagcaccaccaccaccgtgaccgccgtgaccgccgaggtggacctgttcggcgacgccttcgccgccagccccggcgaggcccccgccgccagcgagggcgccgccgcccccgccacccccacccccgtggccgccgccctggacgcctgcagcggcaacgaccccttcgcccccagcgagggcagcgccgaggccgcccccgagctggacctgttcgccatgaagccccccgagaccagcgtgcccgtggtgacccccaccgccagcaccgccccccccgtgcccgccaccgcccccagccccgcccccgccgtggccgccgccgccgccgccaccaccgccgccaccgccgccgccaccaccaccaccaccaccagcgccgccaccgccaccaccgccccccccgccctggacatcttcggcgacctgttcgagagcacccccgaggtggccgccgcccccaagcccgacgccgcccccagcatcgacctgttcagcaccgacgccttcagcagccccccccagggcgccagccccgtgcccgagagcagcctgaccgccgacctgctgagcgtggacgccttcgccgcccccagccccgccaccaccgccagccccgccaaggtggacagcagcggcgtgatcgacctgttcggcgacgccttcggcagcagcgccagcgagccccagcccgccagccaggccgccagcagcagcagcgccagcgccgacctgctggccggcttcggcggcagcttcatggcccccagccccagccccgtgacccccgcccagaacaacctgctgcagcccaacttcgaggccgccttcggcaccacccccagcaccagcagcagcagcagcttcgaccccagcgtgttcgacggcctgggcgacctgctgatgcccaccatggcccccgccggccagcccgcccccgtgagcatggtgccccccagccccgccatggccgccagcaaggccctgggcagcgacctggacagcagcctggccagcctggtgggcaacctgggcatcagcggcaccaccaccaagaagggcgacctgcagtggaacgccggcgagaagaagctgaccggcggcgccaactggcagcccaaggtggcccccgccacctggagcgccggcgtgccccccagcgcccccctgcagggcgccgtgccccccaccagcagcgtgccccccgtggccggcgcccccagcgtgggccagcccggcgccggcttcggcatgccccccgccggcaccggcatgcccatgatgccccagcagcccgtgatgttcgcccagcccatgatgagaccccccttcggcgccgccgccgtgcccggcacccagctgagccccagccccacccccgccagccagagccccaagaagccccccgccaaggaccccctggccgacctgaacatcaaggacttcctgtag

SEQ ID NO: 84905 - DNA, 2724 bp, Artificial Sequence
  derived and/or modified sequence
atgagcggccagaccctgaccgacagaatcgccgccgcccagtacagcgtgaccggcagcgccgtggccagagccgtgtgcaaggccaccacccacgaggtgatgggccccaagaagaagcacctggactacctgatccaggccaccaacgagaccaacgtgaacatcccccagatggccgacaccctgttcgagagagccaccaacagcagctgggtggtggtgttcaaggccctggtgaccacccaccacctgatggtgcacggcaacgagagattcatccagtacctggccagcagaaacaccctgttcaacctgagcaacttcctggacaagagcggcagccacggctacgacatgagcaccttcatcagaagatacagcagatacctgaacgagaaggccttcagctacagacagatggccttcgacttcgccagagtgaagaagggcgccgacggcgtgatgagaaccatggcccccgagaagctgctgaagagcatgcccatcctgcagggccagatcgacgccctgctggagttcgacgtgcaccccaacgagctgaccaacggcgtgatcaacgccgccttcatgctgctgttcaaggacctgatcaagctgttcgcctgctacaacgacggcgtgatcaacctgctggagaagttcttcgagatgaagaagggccagtgcaaggacgccctggagatctacaagagattcctgaccagaatgaccagagtgagcgagttcctgaaggtggccgagcaggtgggcatcgacaagggcgacatccccgacctgacccaggcccccagcagcctgatggagaccctggagcagcacctgaacaccctggagggcaagaagcccggcaacaacaagatcagcggcgcccccagccccctgagcaagagcagccccgccaccaccgtgaccagccccaacagcacccccgccaagaccatcgacaccagcccccccgtggacctgttcgccaccgccagcgccgccgtgcccgtgagcaccagcaagcccagcagcgacctgctggacctgcagcccgacttcagcagcggcggcgccgccgccgccgccgcccccgccccccccccccccgccggcggcgccaccgcctggggcgacctgctgggcgaggacagcctggccgccctgagcagcgtgcccagcgaggcccagatcagcgaccccttcgcccccgagcccaccccccccaccaccaccgccgagatcgccaccgccagcgccagcgccagcaccaccaccaccgtgaccgccgtgaccgccgaggtggacctgttcggcgacgccttcgccgccagccccggcgaggcccccgccgccagcgagggcgccgccgcccccgccacccccacccccgtggccgccgccctggacgcctgcagcggcaacgaccccttcgcccccagcgagggcagcgccgaggccgcccccgagctggacctgttcgccatgaagccccccgagaccagcgtgcccgtggtgacccccaccgccagcaccgccccccccgtgcccgccaccgcccccagccccgcccccgccgtggccgccgccgccgccgccaccaccgccgccaccgccgccgccaccaccaccaccaccaccagcgccgccaccgccaccaccgccccccccgccctggacatcttcggcgacctgttcgagagcacccccgaggtggccgccgcccccaagcccgacgccgcccccagcatcgacctgttcagcaccgacgccttcagcagccccccccagggcgccagccccgtgcccgagagcagcctgaccgccgacctgctgagcgtggacgccttcgccgcccccagccccgccaccaccgccagccccgccaaggtggacagcagcggcgtgatcgacctgttcggcgacgccttcggcagcagcgccagcgagccccagcccgccagccaggccgccagcagcagcagcgccagcgccgacctgctggccggcttcggcggcagcttcatggcccccagccccagccccgtgacccccgcccagaacaacctgctgcagcccaacttcgaggccgccttcggcaccacccccagcaccagcagcagcagcagcttcgaccccagcgtgttcgacggcctgggcgacctgctgatgcccaccatggcccccgccggccagcccgcccccgtgagcatggtgccccccagccccgccatggccgccagcaaggccctgggcagcgacctggacagcagcctggccagcctggtgggcaacctgggcatcagcggcaccaccaccaagaagggcgacctgcagtggaacgccggcgagaagaagctgaccggcggcgccaactggcagcccaaggtggcccccgccacctggagcgccggcgtgccccccagcgcccccctgcagggcgccgtgccccccaccagcagcgtgccccccgtggccggcgcccccagcgtgggccagcccggcgccggcttcggcatgccccccgccggcaccggcatgcccatgatgccccagcagcccgtgatgttcgcccagcccatgatgagaccccccttcggcgccgccgccgtgcccggcacccagctgagccccagccccacccccgccagccagagccccaagaagccccccgccaaggaccccctggccgacctgaacatcaaggacttcctgtag

SEQ ID NO: 84906 - DNA, 2724 bp, Artificial Sequence
  derived and/or modified sequence
atgtcaggtcagacactgactgatcggatcgccgcagctcagtacagcgtaactggttccgccgtggccagagccgtgtgtaaagctacaacacacgaggtgatggggccgaagaagaagcatcttgattatctgatccaggctaccaatgagaccaatgtgaacatcccccagatggctgatactctcttcgaacgcgctacaaattcctcttgggtcgtagtgttcaaagccctcgtgaccacacaccatctgatggtgcatggtaatgagagatttattcaatatcttgctagccgaaacacccttttcaacctctctaacttcctggacaaatctggcagtcatgggtacgatatgtcaaccttcattagacggtatagcaggtatctcaatgaaaaagcattttcatacaggcaaatggcgtttgacttcgcccgcgtgaagaaaggagcagatggcgtcatgcggacgatggcaccggagaaactgttaaagagcatgccaatcctgcaaggtcaaattgatgccttattagagtttgacgttcaccccaacgaactgacaaatggcgtgatcaatgccgcttttatgctgctgtttaaggaccttatcaagctttttgcatgctataacgacggggtcattaatctgctcgaaaagttcttcgagatgaagaaaggacagtgtaaggatgccctggagatctacaaaaggtttctcactaggatgaccagagtgtctgagttcctcaaagtagcagaacaggtcggtatcgacaaaggggatataccagatctgacacaggcccccagcagcctaatggaaacactggaacagcatttaaacaccctggagggcaagaagcctggtaataatgaggggtcaggagctcccagtccactgtcaaaaagctcccccgccaccaccgttacctccccaaatagtactccggctaaaacaattgataccagtccacccgtcgatctttttgccactgccagtgctgctgtcccggtctccacctcgaagcctagcagtgatctcctggacctccagccggatttcagctccggcggagccgccgcagctgccgcgcctgcaccccctcctccagctggcggcgcaaccgcatggggcgatctcctcggtgaagactcgttggctgcactctcttcggtgccatccgaggcccagatctcggaccccttcgccccagagcctaccccaccgaccacaacggctgaaatagcaaccgccagtgccagcgcttccacaaccactacagttaccgccgtaacagcagaagtggacctcttcggcgacgcctttgctgcctcaccgggggaggcacccgctgcctctgaaggtgcagcagcaccagccactcctactcctgtcgctgctgcactggatgcttgcagtggcaatgatcccttcgcgcccagcgaagggagtgcggaggccgcccctgaactggacttattcgcaatgaaacctcctgagacgtcagtccccgtcgtgactccaactgcctctactgcaccgcctgtgcctgctaccgcccccagcccagcacctgccgttgcagccgccgctgctgctacaactgcggccacagcagcagccaccacgactaccacgacgtcggccgctacagccacaaccgccccacccgcactagatatcttcggagatctgttcgaatccaccccagaagtggccgcagccccgaaacctgatgcagcaccatccatcgacctgtttagcaccgatgccttttccagtcctccccagggcgccagccctgtaccggagagtagtctgaccgcagatttgctctcagtggatgccttcgctgccccctcccctgccactaccgcatcccccgcgaaggtagactcctctggggtgatcgatttgttcggagacgccttcggatcttctgcttccgagccccagcctgcatctcaggctgcatcatcaagcagtgcgagcgctgacctgctggcgggctttggtggctcttttatggcaccgagtccgtcccctgtgacaccagcccaaaacaaccttctgcagcccaacttcgaagcggcatttggcacaacaccttcaacgtcttcctcatcctcttttgacccatccgtgtttgatggtctgggagatttactaatgcccacaatggcgcctgctggacagccagcccctgtgtccatggtgccaccatctccagccatggcggcatctaaggctctcggctccgacttggactcctccctcgcaagcctagtgggaaatctgggcatcagcgggactaccacaaaaaagggagacctgcaatggaatgccggagaaaaaaagcttactggcggagctaactggcaaccaaaggtagccccggccacgtggtcagctggagtcccgccttcagcccccctacagggcgcggtgccccctacgagctccgtaccgccagtggccggggccccctccgttggccagccgggcgctgggtttggcatgccacccgcaggcacaggtatgcccatgatgccacaacagcctgtaatgttcgcccaaccaatgatgagacctcccttcggagctgccgccgtgccaggcacgcagctttccccgagccctactccagccagtcagtcaccaaagaagccaccagcaaaggatccactggctgatctcaatataaaagacttcctttag

SEQ ID NO: 84907 - DNA, 2724 bp, Artificial Sequence
  derived and/or modified sequence
atgtccggacagaccctgaccgacagaattgcagccgcccaatattcagttactggaagcgcagtggccagagctgtatgcaaggctacgacacatgaagtgatgggacccaaaaaaaagcacttggattacctgatacaggctaccaacgaaactaatgtcaacattccccagatggcagacacactcttcgaacgcgcaactaacagctcatgggtcgtggttttcaaagccctagtgactacccatcatctgatggtccatggaaatgagcgatttatccaatacctggcctctcgcaatactctgttcaacttaagtaatttccttgataagagtggatcgcacggctatgacatgtccacttttattagacgctattcgaggtatctcaatgaaaaggccttcagctaccgccagatggcttttgatttcgcccgcgtcaaaaagggcgcagatggcgtcatgcgcaccatggcacctgagaaactgctgaagagtatgccaatcctgcaggggcaaattgacgctctcctggagtttgatgtgcatcccaatgagctaactaatggtgttataaacgccgctttcatgttgctgtttaaggatcttataaaactgtttgcgtgctacaacgatggtgttattaacctactagaaaagttctttgagatgaagaaaggtcagtgcaaagacgctcttgagatctataaaaggttcctgactaggatgactcgggtttccgagtttttaaaggtggctgagcaggtcggtatagataaaggtgacattcccgatctgactcaagccccttctagcctgatggaaactctggaacagcacctcaacacactagagggaaagaagcccggaaacaataagatctctggagcaccctcacctttgagcaagagcagccctgccacaaccgtaactagtccgaactccacccctgccaagaccattgacacatccccaccggtggatctctttgccaccgcctccgctgcagtgccagtctccactagcaaacctagttcagacctccttgacctacagccagacttctcaagcggcggagctgctgccgcggctgcacccgcgccacccccgcccgccggaggggctaccgcctggggcgacttacttggagaagattctctggccgccctttctagtgtgcctagcgaagctcagatcagcgatccttttgcgccagagcctacacctcccaccactactgcagaaatcgccacggccagtgcctccgcatccactacgaccacagtcacagccgtgactgctgaggtcgacctatttggcgatgccttcgccgcctctccaggagaggcccctgctgcatctgaaggcgccgccgcaccagctactccaaccccagtggcggccgccttagatgcttgctcaggcaatgacccctttgccccttcagaaggaagtgccgaggcagcacccgagctcgacctttttgcgatgaagcctcctgaaacctctgtgccggtcgttactccaaccgcttccaccgcccccccggttcccgccacagctcctagtcccgcccccgcagtggccgcagctgccgcggcgactacggctgccacggctgccgctacaaccactactaccacaagcgccgctaccgctacgactgcccctcccgcgttagatattttcggggacctttttgagtccacacccgaagtcgcagccgcccccaagcccgacgcagccccatccatagacctgttttctactgacgccttctcttcaccaccccagggcgcctcacctgtgcctgaatcatccctgacggccgacctgctttccgtggatgcattcgctgcaccttcccccgccaccacagcctcacccgcaaaagtggattctagtggggtaatagaccttttcggggatgcattcgggagctcagcctcggaacctcaaccagcctcacaggcggcctcatctagctccgcctcagcagatctgttagcagggttcggtggttcattcatggcaccctcaccaagtcccgtgacacccgcccagaataatttgctgcagccaaattttgaggccgccttcggaacaacacccagcacctctagctcttcttcatttgatccttccgtatttgatggcttaggggacctcctgatgcccaccatggcacctgccggacagcccgcaccagtgtcaatggtaccacccagcccagctatggccgcatccaaggctctgggttcggatctggacagttctctggccagtcttgtggggaacctgggtatttcgggcacaaccactaaaaaaggcgatctccagtggaacgcaggtgagaagaagctgaccggtggggccaattggcagcccaaggtagctccagctacctggtccgcaggcgtgcccccatccgcccccctgcagggcgcagttccgccgacaagtagcgttccccctgtcgcaggcgcgccctctgtgggtcagccaggtgcgggttttggtatgcccccagccggcacgggaatgcctatgatgccccagcaaccagtgatgtttgctcagccaatgatgcggcctcctttcggggcagcggctgtgcctggaacccagctatcaccctcgcctacgcccgcctcgcagtccccaaagaagccccctgcaaaggatccacttgccgatctgaacataaaagacttcctctag

SEQ ID NO: 84908 - DNA, 2724 bp, Artificial Sequence
  derived and/or modified sequence
atgtctggtcagaccctgactgacaggattgccgcggcccaatactccgtgactgggagcgccgtggcccgggccgtgtgcaaggccacaacccacgaagtgatgggtccaaagaagaagcatctcgactacctcatccaagccactaacgagaccaacgtcaatattcctcagatggccgataccttgttcgagcgtgccactaactcaagttgggttgtggtgtttaaggccctggtgaccacacatcatctgatggtgcacgggaatgaaaggttcatccaatacctggcctcacggaatactctgttcaatctatctaatttcctggataaatctggaagccacggctacgatatgtctactttcatccgcagatattccaggtaccttaacgaaaaggctttcagctatcggcaaatggcgttcgacttcgctcgcgtgaaaaagggagccgacggcgtgatgcgcaccatggcgccagagaagctacttaagtctatgccgatcctgcagggacagattgacgccctgttggagttcgatgtacatcctaacgaactaacaaacggcgtcattaacgccgcctttatgctcctcttcaaggacctgatcaagctgttcgcctgctacaacgacggtgttataaacctgcttgagaagttcttcgaaatgaaaaagggacaatgtaaagatgcgctcgaaatctataagagatttcttaccaggatgacaagagtctcggagtttctgaaggtggccgagcaggtgggcatagacaaaggcgatatccctgacctcacacaagctccatcttcactgatggagactcttgagcaacaccttaatactctagagggcaagaagcccggaaataacgaaggaagcggcgccccctctcccttaagcaaatcctctccagccaccacggtgacaagtcccaactctacacccgctaagaccatcgacacatcaccacctgttgatctgttcgccaccgcatcagcagctgtacccgtgtccacgagtaaaccctcctctgatttgctggacttgcagcccgactttagttcaggcggcgccgcggccgccgccgcccccgcccctccacctcccgcaggaggggcaaccgcttggggcgatttgttgggggaagatagtctcgcggccctctccagtgtgcctagtgaggcccagatttcagatccatttgcgcctgaacctacaccacccacaactacggcagagattgccactgcctccgcgtcagcgtctactaccactacggtcaccgcagtcacggcagaggtggatttgttcggagatgcctttgccgccagccccggggaggctcctgccgcctcggaaggcgctgccgctccagccacgcctacaccagtggcggcagccctcgacgcgtgcagcggcaatgatccgttcgccccctcagagggatctgctgaggctgcacccgaactcgatcttttcgccatgaagcctcccgagacatctgtcccagtcgttactccaaccgcatcaacagctcctcctgtcccagccaccgccccaagcccagcaccagccgttgcagccgccgccgccgctactactgccgccaccgccgccgcaacaaccactaccactacctctgcagctaccgctacgaccgccccgcccgctctggacatctttggagatctgtttgagagcacacccgaagttgccgcagccccaaaacctgatgccgctccttctatcgacctgttttcaacagatgctttctcgtccccaccgcagggtgccagtccagtcccagagagcagcctcaccgctgatctccttagcgtcgatgcgttcgcggccccaagcccagccacgaccgcaagcccggccaaggtggattccagtggggtgattgacctctttggcgacgccttcggcagttccgcttccgagccacagcccgccagccaggccgcatcttccagctctgcctccgctgacctattggccgggttcgggggcagctttatggcaccctccccgagcccggtcaccccagcccagaataatctgcttcagccaaatttcgaggctgcatttgggactaccccttctacttcaagcagctcaagtttcgacccttccgtcttcgacgggctgggcgatctgctgatgcccaccatggcccctgccggacaacccgctccggtgtcaatggttccaccctcccccgccatggccgcctcaaaggcgctcggaagtgatctggacagctcactggcctccctggtcgggaacctcggaatctctggaactaccaccaaaaagggggacctgcagtggaacgccggggaaaagaagctaactggtggagcgaactggcagccaaaagtcgctcccgcaacctggtcggctggagtgcccccaagcgcccccctgcagggagctgtccctcccacgtcctctgtgccccctgtcgcaggagccccatccgtaggccaaccaggggccggctttggcatgcctccagcaggaaccggcatgcccatgatgccccaacagcctgtcatgtttgctcagccaatgatgagacctcccttcggagccgcggccgttccggggactcagttaagtccgtcaccaacgcccgcctctcagtctcctaagaaaccgccggcaaaggatcccctggctgatcttaacatcaaggactttctttag

SEQ ID NO: 84909 - DNA, 2724 bp, Artificial Sequence
  derived and/or modified sequence
atgagcggacagactttaactgataggatagcggccgctcagtattccgtgaccggatcagctgtagcccgggccgtgtgtaaagccaccactcatgaagtgatgggccccaagaagaagcatctagactatttaatccaggccaccaacgagacaaatgtaaacataccacaaatggccgatactttgttcgagcgcgcgaccaactccagctgggtggtggttttcaaagctctcgtgaccacacatcatctgatggtccacgggaatgagcgcttcattcagtacttagccagtcgaaacacactctttaacttatccaactttctggataagagcggctcccacgggtacgacatgtccacgtttatccgccgctatagccgataccttaacgagaaagcgttcagctatcggcagatggcgttcgatttcgcacgggtcaaaaagggtgcagacggcgtgatgcgaactatggccccggaaaaactgctgaaatctatgccaattctccaaggccaaatcgacgcccttttggagttcgatgtccaccccaatgaactaaccaatggagttatcaacgctgctttcatgttgctctttaaggatctgataaagctcttcgcctgttataacgacggcgtcataaatctgttagaaaaattcttcgagatgaaaaaggggcaatgtaaggacgcgctggagatttataagcggtttctgactaggatgactagagtgtcggagtttctgaaggtcgcggaacaggtaggtatcgataagggagatatccccgacctgacacaggccccgtcgagcttgatggaaactcttgagcagcacctcaatacacttgagggtaagaagcccggcaataatgagggcagtggtgccccgtcccctctgtctaagagcagtcctgctactaccgtcacttcgccaaatagcacccccgcaaaaactatcgacactagtccaccagtggatttgttcgccacagcaagtgccgccgtccccgtctctacctcaaagccctccagcgatcttttggacctacagcccgacttcagttccggaggcgctgccgcagctgcagcacctgcacctccaccaccggccgggggcgccaccgcatggggagatttactcggggaagactcgttggccgcactctcttccgtgcctagtgaggcacaaatctcagatccttttgcccccgaaccgactccgccaaccaccactgctgagatcgcaacagctagtgctagcgctagcacaacaacaactgttactgctgttaccgccgaagtcgatctgtttggggatgcattcgccgctagtccaggcgaagctcctgccgcatcagaaggggcagcagcacctgccacgccgactccggtcgccgccgccttggatgcctgctcagggaacgaccctttcgccccttccgaagggagcgctgaagcagcacctgagctggacctctttgcaatgaagccccctgagactagtgtacccgtcgtgacccctaccgcaagcactgccccccccgtaccggcaactgccccctctccagctccagctgtggccgctgcggcggcagccaccacagccgcaaccgctgctgcaacaaccactaccaccacatcagccgccaccgcgactaccgccccccctgccctggacatatttggtgatctcttcgagagcactcccgaggttgcagcggctcccaaacctgacgccgctccttcgattgatttgttctctaccgacgctttttcgagtcccccacagggggccagccctgtgccggagagcagtctgacggcagacctcttatccgtggatgcctttgcggccccaagccctgctacaacggccagtccagctaaggtggattcttccggagtgatcgacctgttcggggatgctttcggaagttctgcctcagaacctcagcctgccagtcaggccgcttccagctcctccgccagcgccgatctcctcgccggctttggaggaagctttatggcaccgtcaccctcacccgtaacaccagctcagaacaatctgctgcaaccaaatttcgaggcagccttcgggacgacaccatcgacctcgagcagcagtagcttcgatccaagcgtgttcgacgggcttggcgacttgctgatgcctaccatggctcccgctggccagcccgcaccggtgtcaatggtccctcccagtccagcaatggccgccagtaaagccctcggcagtgacctcgattcttccttggcctctttggtgggaaacctcggcatttccgggactaccactaaaaagggcgacttgcaatggaacgccggggaaaagaagctgacagggggtgcaaactggcaacccaaggtggcaccagctacctggagtgccggggtgcctccaagcgctcccctgcagggcgctgtcccacccacctcaagtgtgcccccagtagcgggtgccccctcagtgggacagcctggtgccggtttcggcatgcctcccgccggcactgggatgcccatgatgcctcagcagccagttatgttcgcccagcccatgatgagaccacctttcggcgccgcagccgtgccagggacacaattgtctccttccccgactcccgcttctcagtcccctaagaaacctcccgcgaaagacccgctggctgatctgaacatcaaggactttctctag

SEQ ID NO: 84910 - DNA, 2724 bp, Artificial Sequence
  derived and/or modified sequence
atgagcggccagaccctgacagacagaattgctgctgcccagtacagcgtgacaggcagcgctgtggcccgggctgtgtgcaaggccaccacccatgaggtgatgggccccaagaagaagcacctggactacctgatccaggccaccaatgagaccaacgtgaacatcccccagatggctgacaccctgtttgagcgggccaccaacagctcctgggtggtggtgttcaaggccctggtgaccacccaccacctgatggtgcacggcaatgaacgcttcatccagtacctggccagcaggaacaccctcttcaacctgagcaacttcctggacaagagcggcagccacggctatgacatgagcaccttcatccgccgctacagccgctacctgaatgagaaggccttctcctaccggcagatggcctttgattttgcccgggtgaagaagggagcagatggagtgatgaggaccatggcccctgagaagctgctgaagtccatgcccatcctgcagggccagattgatgccctgctggagtttgatgtgcaccccaatgagctgaccaacggggtcatcaatgctgccttcatgctgctcttcaaggacctgatcaagctgtttgcctgctacaatgatggagtcatcaacctgctggagaagttctttgagatgaagaagggccagtgcaaggatgccctggagatctacaagcgcttcctgaccaggatgaccagggtgtctgagttcctgaaggtggccgagcaggtgggcatcgacaagggggacatcccagacctgacccaggcccccagcagcctgatggagaccctggagcagcacctgaacaccctggagggcaagaagccaggcaacaatgaaggcagcggggcccccagccccctgagcaagagcagccctgccaccaccgtgaccagccccaacagcaccccagccaagaccatcgacaccagcccccctgtggacctgtttgccacagccagcgctgctgtgcctgtgtccaccagcaagcccagcagtgacctgctggacctgcagcctgacttcagcagcggcggcgctgctgctgctgctgccccagcccctcctcctcctgctggaggagccacagcctggggagacctgctgggggaggacagcctggccgccctgagctctgtgcccagcgaggcccagatcagtgacccctttgcccctgagcccaccccacccaccaccacagctgagatcgccacagccagcgccagcgccagcaccaccaccaccgtgacagctgtgacagctgaggtggacctgtttggagatgcctttgctgccagccctggagaggccccagctgccagcgagggcgctgctgccccagccacccccacccctgtggccgccgccctggatgcctgcagcggaaatgacccctttgcccccagcgagggcagcgctgaggccgcccctgagctggacctgtttgccatgaagcccccagagacctctgtgcctgtggtgacccccacagccagcacagcccctcctgtgcctgccacagcccccagccctgccccagctgtggccgctgctgctgctgccaccacagctgccacagctgctgccaccaccaccaccaccaccagcgctgccacagccaccacagcccccccagccctggacatctttggagacctgtttgagagcaccccagaggtggccgccgcccccaagccagatgctgcccccagcattgacctcttcagcacagatgccttcagcagccccccccagggcgccagccctgtgcctgagagcagcctgacagctgacctgctgtctgtggatgcctttgctgcccccagccctgccaccacagccagccctgccaaggtggacagcagcggcgtgattgacctgtttggagatgccttcggcagcagcgccagcgagccccagcctgccagccaggccgccagcagcagcagcgccagcgctgacctgctggccggctttggaggcagcttcatggcccccagccccagccctgtgaccccagcccagaacaacctgctgcagcccaactttgaagctgccttcggcaccacccccagcaccagcagcagcagcagctttgaccccagcgtgtttgatggcctgggggacctgctgatgcccaccatggccccagctggccagcctgcccctgtgtccatggtgccccccagccctgccatggccgccagcaaggccctgggcagtgacctggacagcagcctggccagcctggtgggcaacctgggcatcagcggcaccaccaccaagaagggggacctgcagtggaatgctggggagaagaagctgaccggcggggccaactggcagcccaaggtggccccagccacctggagcgctggggtgcccccatctgcccccctgcagggcgctgtgccccccaccagctctgtgccccctgtggccggggcccccagcgtgggccagcccggggccggcttcggcatgcctcctgctggcaccggcatgcccatgatgccccagcagcctgtgatgtttgcccagcccatgatgaggcccccatttggagctgctgctgtgcccggcacccagctgagccccagccccaccccagccagccagagccccaagaagcccccagccaaggaccccctggccgacctgaacatcaaggacttcctgtag

SEQ ID NO: 84911 - DNA, 2724 bp, Artificial Sequence
  derived and/or modified sequence
atgagcggccagaccctgacagacagaattgctgctgcccagtacagcgtgacaggcagcgctgtggcccgggctgtgtgcaaggccaccacccatgaggtgatgggccccaagaagaagcacctggactacctgatccaggccaccaatgagaccaacgtgaacatcccccagatggctgacaccctgtttgagcgggccaccaacagctcctgggtggtggtgttcaaggccctggtgaccacccaccacctgatggtgcacggcaatgaacgcttcatccagtacctggccagcaggaacaccctcttcaacctgagcaacttcctggacaagagcggcagccacggctatgacatgagcaccttcatccgccgctacagccgctacctgaatgagaaggccttctcctaccggcagatggcctttgattttgcccgggtgaagaagggagcagatggagtgatgaggaccatggcccctgagaagctgctgaagtccatgcccatcctgcagggccagattgatgccctgctggagtttgatgtgcaccccaatgagctgaccaacggggtcatcaatgctgccttcatgctgctcttcaaggacctgatcaagctgtttgcctgctacaatgatggagtcatcaacctgctggagaagttctttgagatgaagaagggccagtgcaaggatgccctggagatctacaagcgcttcctgaccaggatgaccagggtgtctgagttcctgaaggtggccgagcaggtgggcatcgacaagggggacatcccagacctgacccaggcccccagcagcctgatggagaccctggagcagcacctgaacaccctggagggcaagaagccaggcaacaacaagatcagcggggcccccagccccctgagcaagagcagccctgccaccaccgtgaccagccccaacagcaccccagccaagaccatcgacaccagcccccctgtggacctgtttgccacagccagcgctgctgtgcctgtgtccaccagcaagcccagcagtgacctgctggacctgcagcctgacttcagcagcggcggcgctgctgctgctgctgccccagcccctcctcctcctgctggaggagccacagcctggggagacctgctgggggaggacagcctggccgccctgagctctgtgcccagcgaggcccagatcagtgacccctttgcccctgagcccaccccacccaccaccacagctgagatcgccacagccagcgccagcgccagcaccaccaccaccgtgacagctgtgacagctgaggtggacctgtttggagatgcctttgctgccagccctggagaggccccagctgccagcgagggcgctgctgccccagccacccccacccctgtggccgccgccctggatgcctgcagcggaaatgacccctttgcccccagcgagggcagcgctgaggccgcccctgagctggacctgtttgccatgaagcccccagagacctctgtgcctgtggtgacccccacagccagcacagcccctcctgtgcctgccacagcccccagccctgccccagctgtggccgctgctgctgctgccaccacagctgccacagctgctgccaccaccaccaccaccaccagcgctgccacagccaccacagcccccccagccctggacatctttggagacctgtttgagagcaccccagaggtggccgccgcccccaagccagatgctgcccccagcattgacctcttcagcacagatgccttcagcagccccccccagggcgccagccctgtgcctgagagcagcctgacagctgacctgctgtctgtggatgcctttgctgcccccagccctgccaccacagccagccctgccaaggtggacagcagcggcgtgattgacctgtttggagatgccttcggcagcagcgccagcgagccccagcctgccagccaggccgccagcagcagcagcgccagcgctgacctgctggccggctttggaggcagcttcatggcccccagccccagccctgtgaccccagcccagaacaacctgctgcagcccaactttgaagctgccttcggcaccacccccagcaccagcagcagcagcagctttgaccccagcgtgtttgatggcctgggggacctgctgatgcccaccatggccccagctggccagcctgcccctgtgtccatggtgccccccagccctgccatggccgccagcaaggccctgggcagtgacctggacagcagcctggccagcctggtgggcaacctgggcatcagcggcaccaccaccaagaagggggacctgcagtggaatgctggggagaagaagctgaccggcggggccaactggcagcccaaggtggccccagccacctggagcgctggggtgcccccatctgcccccctgcagggcgctgtgccccccaccagctctgtgccccctgtggccggggcccccagcgtgggccagcccggggccggcttcggcatgcctcctgctggcaccggcatgcccatgatgccccagcagcctgtgatgtttgcccagcccatgatgaggcccccatttggagctgctgctgtgcccggcacccagctgagccccagccccaccccagccagccagagccccaagaagcccccagccaaggaccccctggccgacctgaacatcaaggacttcctgtag

SEQ ID NO: 84912 - DNA, 2724 bp, Artificial Sequence
  derived and/or modified sequence
atgagcggccagaccctgaccgaccggatcgccgccgcccagtactccgtgactggatccgccgtggctagggccgtttgcaaggcaactactcatgaggtcatgggccctaagaagaagcatctggactatttgattcaagccactaacgaaaccaacgtgaatattcctcaaatggcagatactctttttgagcgggcaacaaactctagttgggtcgtggtatttaaagctctggtcacgacgcaccacctcatggtccacggtaatgaaaggttcatccagtacttagcttcgcgcaacaccctctttaacctgtctaatttcttagacaagagcgggagtcatggatacgacatgagcactttcattagacgatattccagatatctgaatgaaaaagccttcagctatcgccagatggcttttgactttgcaagagtaaagaaaggagccgatggggtgatgcggaccatggccccggagaaactcttgaaatcgatgccgatcctgcagggccaaatcgatgctctgctcgaatttgacgtgcaccccaatgagttgacaaacggcgtgatcaacgccgcttttatgctcctgttcaaggacttgatcaagctatttgcctgctacaacgacggcgttataaatctgctggagaagttttttgagatgaagaagggccagtgtaaagacgccctcgagatctacaaaagattcctgacacggatgacacgggtgagcgaattcttaaaggtcgcagagcaggttggcattgataagggagacatccctgacctcactcaggctccttcttcattgatggaaactcttgaacagcacttaaatacccttgagggcaagaaacctggtaacaacgagggctcaggtgccccatctcccctgtctaagtccagtcctgctacaaccgtcacaagcccaaacagtacccccgctaagacaatcgatactagccctcccgttgatctcttcgccaccgcctctgccgctgtgcccgttagtacatcgaagccatcgtctgatttgttagatttgcagccagatttttccagcggaggagccgccgcagccgccgcccccgccccacctccaccagctggcggagccacagcctggggggatcttctgggggaagacagtctcgcagccctgtcctcagtcccctccgaggcccagatctctgatccattcgcacctgaacccacacccccgacaaccacagccgagattgctactgcatctgcaagtgcttctacgactacaactgtcactgccgtgaccgcagaggtggacctgtttggcgatgcatttgctgcatcgccaggggaagctccggccgcctctgaaggcgccgccgctcccgctactccgactccagttgcagccgcgctcgacgcctgctcggggaatgatccttttgcgccatctgaggggtccgcagaagcagcaccagagctggatctatttgccatgaagccgccagagacatcagttccagtcgtgactccgacagcttccactgcaccaccagtacccgccaccgcaccatctccggcccctgctgtggccgctgctgctgccgccaccactgctgccactgctgcagccacaacgactacgaccacaagcgcggccacagccacgactgccccccccgcgctagatattttcggtgacttatttgaaagtacccccgaagtcgccgcagccccaaagcccgatgccgcaccgagcatcgatcttttttccaccgatgccttctcatcaccgccacagggggctagccccgttccagaatccagcctaacagcggacttgctctcagtggatgccttcgccgctccctctcctgccacaaccgcaagtcccgccaaggtggatagctccggggtaatagacctgttcggggacgctttcggaagcagcgcatccgaaccgcagcctgcaagccaggccgccagtagctcaagcgctagcgctgacctgctggctggtttcggcggctcatttatggcacccagccccagcccagtcacaccagcacaaaataacctccttcagcccaacttcgaggccgcctttggcactaccccatctacaagctcctcaagcagctttgaccctagcgtgtttgatgggctgggggaccttctcatgcctaccatggcacctgcgggacagcccgccccagtttcaatggttcccccttcccctgccatggcagcctccaaagctctcggatccgacctggattcaagcctagcctcgttagtggggaacctgggcatatctgggactacgactaaaaaaggcgacctccagtggaatgccggagagaagaagctaactggaggtgctaactggcagccgaaggttgctcccgcaacctggtcagctggagtcccaccatccgcccccctgcagggagccgtgcctccaacgtccagtgtgccccccgttgcgggggccccttccgtggggcagcctggggcagggtttggtatgccaccagctgggaccggtatgccaatgatgccccaacagcctgtgatgtttgcgcagccaatgatgaggcccccattcggcgccgccgcagtccctgggactcaacttagcccctcccctactccagcctctcaatcccctaagaagccacctgcaaaagacccgctggcggatctcaatattaaggacttcttgtag

SEQ ID NO: 84913 - DNA, 2724 bp, Artificial Sequence
  derived and/or modified sequence
atgagcggccagaccctgaccgaccggatcgccgccgcccagtactcagtcaccgggagtgcagtggcaagagcagtgtgcaaggcaaccacacacgaagtgatgggcccaaagaaaaagcacctggattatctgattcaggctaccaacgagacaaatgttaacatccctcagatggccgataccctgttcgaacgagccaccaattcgagctgggtggtcgtgttcaaggcactggtaactactcatcatttgatggtgcatggcaacgagagattcatccagtacctggcttcaaggaatacactcttcaacctgagtaacttccttgataagagcggaagccacggttacgatatgtctacctttatccgacgctattctcgctacttgaacgaaaaggcattctcctatcggcaaatggcctttgatttcgctagggttaaaaagggggccgatggcgtaatgcgcacgatggctcccgagaaactgttaaaaagtatgccaattctgcagggccagatcgacgctttgcttgagttcgatgtacatccaaatgagctgacgaatggggttatcaatgccgcgttcatgctgctgttcaaagacctgatcaaattgtttgcctgttacaatgacggggttatcaatctattggagaagttttttgaaatgaagaagggccagtgcaaggatgctttggagatttacaagagattcctaacccgcatgacacgggtctccgagttcctgaaggtggctgagcaggtgggaatcgataaaggtgacatccctgatctaacacaggcgccttcctcactgatggagacgttggagcaacacctcaacacactggagggtaagaagcccggaaacaacaagatcagtggtgccccaagcccgttgtccaagagttcgcccgcaacaaccgtaacctcccccaacagcacccccgcgaagactattgatacttcaccccccgtagatttattcgcaaccgcgtctgctgctgtccccgtgtccactagcaagccttcaagtgatctccttgatctgcaaccagacttctcaagtggaggagcagcggcagcagctgcgccggcgccgcccccccccgctgggggcgctactgcttggggcgatttgctgggagaagattccctcgctgcactctcttccgtgccaagcgaggcacaaatttcagatccattcgctcctgagccgactcctcctaccacaacggcggaaattgcgactgcaagcgcgagtgcatccacaacaaccaccgtgacggccgtcacagccgaagttgatctcttcggagatgccttcgccgcatcaccaggcgaggctccagctgctagcgaaggcgctgcagccccagccacacctactccagtcgcagccgcactcgacgcctgctcggggaatgaccccttcgccccaagcgaaggctctgcagaagccgctcctgaactggacctatttgctatgaaacccccagaaaccagcgtgcccgtggtgacccccaccgcttcaaccgccccacctgtgccagctaccgcgcccagccctgcacctgcagtcgctgctgccgccgcagctactacagccgcaactgccgctgctactactacaacaactacctccgctgctaccgccaccactgctccccccgccctcgatatcttcggtgacttattcgagtccacacccgaggtcgcagcagctcccaagccagacgctgctcccagtatcgatctcttctccactgacgcattttcctctcctccacagggagctagccccgtaccagaatcatccctgactgccgacctgttatcagtggatgcattcgctgccccctcgccagccacaaccgcttctccggcaaaagtggattcctccggtgtcatagatctctttggcgacgcattcgggtcatctgcctctgagccccaaccagcaagtcaggcagcctctagttccagtgccagcgcagatctgttagccggcttcgggggttcttttatggctccatccccctctccagtcacacctgcccagaataatctcttgcaacccaacttcgaggccgcattcggaactactcctagcacgtccagttcttcttcattcgatcccagcgtgttcgatggtcttggagatctgctcatgcctaccatggctcccgccggtcagccagcccctgtgtcgatggtgccccccagccctgcaatggcagctagtaaggctctaggctcagaccttgactcaagccttgcctcgctcgtgggcaatctcggaatatctgggacgactacgaagaagggtgacttacaatggaacgcaggcgaaaaaaaactgactggcggggccaattggcaaccaaaagttgcccccgctacttggtcagcaggcgtgcctccaagcgcacctttgcaaggcgccgttccgcccacatcaagtgtgccccccgttgctggcgctccttccgtaggccagcccggggccgggttcggcatgccccccgccggtacagggatgcctatgatgccccagcaaccggtcatgttcgcacagcccatgatgagacctcctttcggagccgctgctgtcccgggaacacaactttctcctagtcccacgcccgctagccagtcaccgaaaaagcctcctgctaaagacccgttggcagacttaaacattaaagatttcctttag

SEQ ID NO: 84914 - DNA, 2724 bp, Artificial Sequence
  derived and/or modified sequence
atgagcggccagaccctgaccgaccggatcgccgccgcccagtactccgttacaggttcggccgtggccagagctgtttgcaaggctaccacccatgaagtcatgggtccaaagaaaaaacacttggactatctgattcaagctactaacgagactaacgtaaacatcccacagatggcagacacactcttcgagcgagcaaccaactccagctgggttgtggttttcaaagcactggtcacaacccaccacttaatggtgcacggcaatgaacggtttattcagtacctcgcatcgcgcaataccctcttcaatttgtcgaattttctcgataagagcgggtcccatgggtacgacatgtcgacattcatacgaagatattcccgctacttgaatgaaaaggctttttcctaccggcagatggccttcgattttgccagggtgaagaagggcgctgacggggtgatgagaactatggccccggaaaagctgctcaagagtatgcctatcttacagggccagattgacgccttgctcgagttcgatgtgcaccccaacgagctaacgaatggggtgattaacgctgcatttatgcttctcttcaaggatctaattaagctcttcgcgtgttacaacgatggtgtcatcaacctcttggaaaaattctttgaaatgaaaaaggggcagtgcaaggacgctctggagatttacaaaagattcctcaccaggatgactagagtgtctgaatttctgaaagtggccgagcaggtgggtattgacaagggagacataccagatcttacgcaggcaccatcctctctgatggaaacactggaacagcatctcaacacacttgagggaaaaaagccaggcaacaacgaagggtcgggggcaccatctcctttaagcaagagcagtcccgctactacagtgaccagccccaactccacccctgcaaagactatcgatacaagcccaccagttgacttatttgccaccgcttcagccgccgtaccagtgagcacaagcaaaccttcctctgatctgctagatctgcaaccggatttcagcagcgggggcgccgctgccgccgcggctccagctcccccgccacccgctggaggcgctaccgcttggggcgatctactgggagaggattctctggctgccttgagctccgtgccctctgaggctcagatctccgaccccttcgcgccggaacccacgccgcctacgaccaccgcagagatagcaaccgctagtgcctccgccagcacaaccacaacggtgacggcagtcacggctgaggtcgatcttttcggcgatgcctttgcggcatcccctggggaggctcctgccgcttccgagggagccgccgcccccgctacgcccacacctgtcgccgctgccctggatgcctgcagcggtaacgacccctttgcaccctcagaaggcagcgccgaggctgcccctgaattagatctgttcgccatgaaacctcctgaaactagcgtgcctgtggtgacccccactgcttcaaccgcccctcccgtgcctgccaccgcaccctcgcctgctccagctgtggctgcagcagctgccgctaccacagcagcgactgcagccgcgacaactacaactactactagcgcagcgactgcaaccacggccccgcccgccctggatatttttggggatctatttgagtcaacgcctgaggtggccgccgcccccaaaccagatgccgcgccttcgatcgatttattctccacagacgcgttcagctcgccccctcagggagctagtcccgtgccggaatcatctctgactgctgaccttctgagcgtggatgcctttgcagctccatctcccgcgaccacagcctctccagcgaaagttgattcctctggcgtaatcgacctgtttggcgacgcttttgggagctccgcctctgagccccagcccgccagccaggccgcctcttctagctctgcatccgcggatctactagccggcttcggggggagctttatggccccttcccctagcccagtgactcctgcacagaacaatcttttgcagcccaactttgaggccgcttttggaacgacacccagtacaagctcctcgtcgagtttcgatccttcagtatttgatggtctaggcgatctgctgatgcccactatggccccagccggacagccggcccccgtctctatggtcccacccagtccagctatggccgcatccaaagccctgggctccgatctggactccagtctggcgtctctggtcggtaacctaggcatatccggcaccactaccaaaaagggcgacctacagtggaacgctggagagaagaagcttacaggcggtgctaattggcagcctaaggttgcccccgcaacctggtccgcaggcgttcctccgtctgccccacttcagggcgcggtccctcccacatccagtgtgcctcctgtcgctggcgcaccatcggtgggccagcccggtgccggctttgggatgccccctgccggcactggaatgcctatgatgccccagcaaccagtcatgttcgctcaacccatgatgagacctccattcggagccgcggccgtgccaggtactcagctttcccctagtcccacacctgcttctcaaagcccgaagaagcctcccgcaaaggaccctctcgcagatttaaatattaaagattttctgtag

SEQ ID NO: 84915 - DNA, 2724 bp, Artificial Sequence
  derived and/or modified sequence
atgagcggccagaccctgaccgaccggatcgccgccgcccagtacagcgtgacaggatccgccgtcgcccgggctgtgtgcaaagcaactacgcacgaagtgatgggcccaaaaaagaaacacttggattatcttatccaggcaacaaacgaaactaacgtgaacatcccccagatggccgacaccttgttcgagcgagcgaccaatagctcctgggtggtcgtatttaaagctctggtcactacccaccacctcatggttcatggaaacgagcgtttcatccagtaccttgcgtctcggaacactctgttcaacctgtccaatttcctcgataaatcaggaagccacgggtacgacatgtctaccttcattagacgctattccaggtacctcaacgaaaaggcattcagctatagacaaatggcatttgatttcgcccgagtgaaaaagggcgcagatggggttatgcggacaatggcacccgagaaacttctgaagagcatgcctatcctgcaaggacaaatcgatgccctgctggagttcgatgtgcaccctaacgaactgaccaatggagttatcaacgcagcattcatgttactgtttaaagatctcattaaattgtttgcgtgctataacgatggagtgataaacctgctggagaaatttttcgaaatgaagaaggggcagtgtaaggatgctctggaaatctacaagcggttcttgacacggatgactcgcgtgtccgaatttctgaaggtagccgagcaggtagggatcgataagggagacatccccgatttgacccaggctccaagctctctgatggagacactcgagcagcacctcaacaccttagaagggaaaaaacccggaaataatgagggctctggagcgccctccccactgtctaaaagctctcctgccacaactgtgacaagcccgaacagcacccccgcgaaaactattgataccagccctcccgtggatttgtttgccacagctagcgcagctgtccctgtctccacctctaagccatcaagcgatttgttggatctgcaacctgatttctcttctgggggcgccgccgccgcagccgccccagctccgcctcccccagcggggggcgcgacggcttggggtgacctcctgggagaagacagtttggctgctctctccagcgtgcccagcgaagctcagatatctgaccctttcgcccccgaaccaactccacccaccacaaccgccgagatcgctaccgccagcgctagcgccagcaccactacaacagtgactgccgtcactgcagaggttgacctatttggagacgcttttgcagcctcgcccggcgaggcaccagccgccagcgaaggtgccgctgcaccagcaacccctacaccagtggcggcggccctggacgcctgctcggggaacgatcctttcgctccttctgagggaagcgcagaggcagcccccgaactggacctattcgctatgaaaccaccagaaaccagtgtgccagtcgttacccctacagcgtcaacagccccacctgtcccagctacagctccctcccctgctcccgccgtcgcagcagctgcagctgccactactgccgccaccgctgccgcaactactaccacgaccacctctgctgcaaccgcaaccaccgcccctcccgctctagatatatttggcgacctgtttgagtccacaccggaagttgccgcagcgccaaagcccgatgcagccccttccattgacctcttctcaacagacgctttttcatccccaccacagggcgccagcccagtgccggaatcatcccttactgcagatctcttgtccgtggacgcttttgcagcccccagcccagcaacaaccgcatctccagcgaaggtggacagcagcggggtgatcgacttgttcggcgacgcttttggatcctccgcatccgaaccccaacctgccagccaagctgctagctcaagctctgcctccgccgacctgcttgcgggatttgggggtagctttatggcgccgtcaccgtctcctgtcacaccggctcaaaataatttgcttcagccaaatttcgaagctgctttcggtactactccctctacgagttctagctcctcctttgacccctccgttttcgatggtctgggagatttgctgatgcctaccatggcccctgctggtcagcctgctcccgtgagcatggttcccccgtctccggctatggccgccagcaaggcactggggtcagatcttgattcaagcctggcctccctggtcggaaacctgggaatttcaggtaccacgacaaagaaaggggatctgcaatggaatgcgggtgaaaagaagctgaccggtggtgctaactggcagcctaaggttgccccagccacatggtctgccggcgtgccaccctctgctccattgcagggtgctgtgccccctacttctagcgtgccccctgtcgccggagctccatctgtaggccagcctggagctggttttggcatgccgccagccggcactggcatgccaatgatgcctcagcaacccgtgatgttcgcacagcccatgatgaggccaccctttggagcagctgcagtgcccgggactcagcttagtccttcaccaaccccagcctcccagagtcctaaaaaaccacccgccaaggatccactcgcagacctgaacattaaagattttttgtag

SEQ ID NO: 84916 - DNA, 2724 bp, Artificial Sequence
  derived and/or modified sequence
atgagcggtcagacgttgacggacaggattgctgcggcacagtacagtgtgacgggctccgcagtggcgagggcagtgtgcaaagctactacccacgaggtgatgggacccaaaaaaaaacatttggactaccttatccaggcaaccaacgagacaaacgtcaacattcctcagatggcagacaccttgtttgagcgggcaacaaatagctcctgggtggtggtgtttaaagctctcgtgacgacacatcacctcatggtgcacggtaacgagcgcttcattcaatatctggcctcaaggaatacactgtttaacttatcgaactttctggacaaaagcgggagccacgggtacgacatgtcgacatttatccgccgttattccaggtatctgaatgagaaggcattttcgtaccgccagatggcctttgacttcgccagggtgaagaaaggggctgacggagtcatgcgaaccatggcgcctgaaaagcttttgaagtcaatgcccattctgcagggccagattgacgctctgctagagtttgatgtgcatccaaatgagttgaccaatggagtgataaacgccgctttcatgctgctgtttaaagacttaatcaagctcttcgcctgttacaacgacggagtgataaacctcctcgagaaatttttcgagatgaagaagggccagtgcaaagacgccttggagatctacaagaggtttctcactcggatgacacgcgtgagcgaattcctaaaagtggcggaacaggtagggattgacaagggtgacatcccagatctgactcaggccccaagtagcctcatggagacacttgagcaacacttaaacacactagaagggaaaaaacccggtaataatgagggctctggagctccctcacccttgagtaaatcctctcccgctaccactgtgaccagtcctaactctactcctgccaagaccatcgatacctcccctcctgtagacctgttcgctaccgcctctgcagcggttccagtctccacttcaaagccatcctctgatttgcttgatctgcagcccgacttctcatcaggcggagcggcagcggctgcagctcccgcacccccaccccctgctggcggagccaccgcctggggggatctgttgggcgaggacagtctcgccgcactgtccagtgtacctagcgaggcccaaatttccgacccgtttgcccctgaaccaacaccccctacaacaactgccgaaatcgccactgcttccgccagcgctagcaccacaaccactgtgactgctgtgactgctgaagtggacctgttcggagacgcttttgcagcgagccccggtgaggcacctgcagcttcagagggggcagccgctcccgcaacccccactccagtggcagcggctctcgatgcttgcagcggaaacgacccatttgccccaagcgagggctcagctgaggccgctccagagctcgacctatttgctatgaagcccccagagacctctgtccccgtggtgacgcccactgcctcaacagccccacctgtgccggctactgcaccctcacctgcacctgccgtggctgctgctgctgctgccactactgccgctacagccgctgccacaacgacaaccaccacttcagccgcaactgcaaccaccgccccaccagctctggatattttcggggacttatttgaaagcactccagaagtggccgcagctccaaagccagacgccgctccctccatcgatttatttagcactgacgcatttagttcacctccacaaggtgcctcccctgtgcctgaaagttctttgacggccgatctattatccgtggacgccttcgccgcaccctctcctgccaccacggcctctcccgctaaggtggactcaagtggcgttattgacctgttcggagacgcgttcgggtcaagcgcctctgagccccaaccggcttctcaggcggcaagcagttccagtgcttctgccgacctattggctggttttggaggatcgttcatggcaccctccccaagtcccgtgacacccgcacaaaacaatctgctccagccaaactttgaagccgcattcggcaccactcccagtacctcttcctcctccagctttgacccaagcgtgtttgacgggttgggcgacctgctgatgcccacaatggcaccggctggtcagccagcacccgtgtccatggtgcctccgtctccagcgatggctgcatccaaggccctcggatctgatttagattcaagcttggcatccctggtaggcaacctcggtataagcggaacaacaaccaagaaaggcgatctccagtggaatgccggagaaaagaaactgaccggcggtgctaactggcagccaaaagtggccccagctacttggagtgctggcgtgccgcctagcgccccactgcagggcgctgttccgccaacctcaagcgtgccacccgtggccggagctccatccgtggggcagccaggagccggttttggtatgcctcccgctggcactggcatgcccatgatgccgcaacagcctgtcatgttcgcccaaccgatgatgaggccacccttcggagccgctgccgttcccggtacgcagctcagcccatctccgactcctgcctcacagtcaccaaagaaaccaccagccaaggatcctctggcggacctgaacataaaagacttcctctag

SEQ ID NO: 84917 - DNA, 2724 bp, Artificial Sequence
  derived and/or modified sequence
atgagtggacagacccttacagaccggatcgccgctgctcagtatagcgttacaggttccgcagtcgcccgtgcagtgtgcaaagccaccacacatgaagtgatgggccctaaaaaaaaacatctggactacctgattcaggccaccaacgagaccaacgtcaacattccgcagatggcagatacattattcgagagagcaaccaacagcagctgggtggtggtatttaaggcactggtcacgacccatcacctgatggtccatggcaatgaaaggttcatccagtatttagccagtaggaacacgctgttcaatctgtccaatttcctggacaaatcgggatctcacggctacgatatgtctacattcattaggagatattcccgctaccttaacgaaaaagcattttcttatcggcagatggcatttgacttcgccagagtgaaaaaaggagccgacggggtgatgaggactatggcacctgagaagctgctaaagtccatgcctatactgcagggacagatcgacgctctcctggaatttgacgtgcaccccaacgagcttacaaacggggtcataaacgcagcattcatgctgctctttaaggacctgataaaactatttgcctgctacaacgatggggtgattaatctacttgaaaagttctttgagatgaaaaaaggtcagtgcaaagatgcgctggaaatctataagcgcttcttgacacggatgactcgggtgtctgaattccttaaggtggcagagcaggttggtatagacaagggcgacatcccagacttgactcaggcaccgtcgtcactaatggagacactggaacaacatcttaacacacttgagggtaaaaaaccgggtaacaataagatcagcggcgcaccgtcaccattgagtaagtcgagtccagcgacaactgtcactagccctaatagcactccggcaaagaccatagacacatcccccccagtagacctgttcgcaacagcttctgccgcagtgcctgtgagcacatcaaaaccttcctcagacctgttagatcttcagcctgacttcagttccggtggggctgctgctgctgcagccccagcccctccccctccagccggaggggctacagcatggggggacttgttgggagaggatagcctggccgcactttcgtcagtgccttctgaagctcaaatctcagatccatttgcccctgaacctactcctcctactacaactgctgagatcgcaaccgcaagcgcatctgctagtactactacaaccgtgactgccgtgacagcagaggtggacctgttcggagatgcatttgctgcatctccaggtgaggctccagcagcatcagaaggcgctgccgcacctgcaactccaactcctgtcgctgctgcactggatgcttgtagcggtaacgacccgttcgcacctagtgaaggcagtgcagaagccgcaccagagctcgatctgtttgccatgaagccgcctgaaacgtccgtgcccgtggtgacgcctaccgccagtacagcccctcccgtccctgccactgccccttctccggcacctgccgtggctgccgcagccgctgccactacagcagctactgccgctgccacaacaaccaccacaacctccgccgcaacagctaccacagcacctcccgcactcgacatcttcggggacctcttcgagtcaacacctgaagtcgcagcggctcccaaaccggacgcagccccttctattgatctattttccacagatgctttcagctccccaccccaaggagctagtcctgttcctgaaagtagtttgactgccgacctgctgtcggtggacgcctttgctgcgccttcaccggcaaccaccgccagtccagcaaaggtggacagttccggtgtgatagatctgttcggagatgcctttggctcctccgcttccgagccccagccggcaagccaggcagccagttcgagctctgcatccgccgatttgctggcaggcttcggcggatcgtttatggcaccgtccccctcacccgtcactccagctcagaacaatctcctccagccaaatttcgaggccgctttcggcactaccccatcaaccagctcttcaagttcattcgatccaagtgtgttcgacggactgggcgacctgctcatgcccaccatggcccctgctgggcagcctgctccggtgtcgatggtacctccatcaccggcaatggccgcatccaaggctctgggaagtgacctcgattcttcccttgctagtttggtgggaaacctagggatctcagggaccaccactaagaaaggggatctgcaatggaacgctggcgagaaaaagttgaccggcggagccaactggcaacccaaagttgctcctgcgacttggagcgccggagtgcccccatcagccccactgcagggtgctgttccaccaaccagctcggtaccgcctgtggcgggtgcaccctcagtggggcagccaggtgccggtttcggcatgcctcccgcaggaacggggatgcccatgatgccccagcaaccagtgatgttcgcccagcctatgatgcggccacctttcggcgcagcggctgtgccgggtacccagctgagcccttctcccactcctgccagccagtccccgaaaaaacctccagccaaagacccgctggctgatctcaacatcaaggattttctgtag

SEQ ID NO: 84918 - DNA, 2724 bp, Artificial Sequence
  derived and/or modified sequence
atgtctggtcaaacactcactgacagaatagccgcagcccagtattctgtcacgggcagtgcagttgcccgagctgtttgtaaagctaccacacatgaggtgatgggaccaaagaagaagcacctcgattatctgatccaggccaccaatgaaacaaacgttaacatcccgcaaatggctgatacactgtttgagcgggcaaccaactccagctgggtcgtggtattcaaggctttagtaaccacccaccatcttatggtccatggcaatgaacgcttcattcagtacctcgcctccaggaacactctattcaatctttcaaattttctggataaatcgggctcacatgggtatgacatgtctaccttcattcggaggtacagcagatacttaaatgaaaaggctttttcatacaggcaaatggcctttgactttgccagagtgaaaaaaggagcggacggtgttatgagaactatggccccagagaaactgctcaaatctatgcccatcttgcaaggacagatagacgccttactcgaattcgacgttcatcctaacgagctgaccaatggcgtaattaatgccgcttttatgctgttgtttaaagatctgattaaactttttgcatgctataatgacggggtgatcaacctgctggagaaattttttgagatgaaaaaaggacaatgtaaggacgcactggaaatctacaagaggtttctcaccaggatgacgcgggtaagcgagtttctgaaggtggccgagcaggtgggtatagacaagggcgacattccagacttgacccaggcaccctctagcctgatggaaactctggaacaacatcttaacactctggagggcaagaagcccggtaacaatgaaggatcaggcgcaccttcacccctgagcaagtctagccccgctaccaccgtgacctcccctaacagcaccccggcaaaaactatcgacacaagtcctcctgtcgatctttttgccacagcctctgcagcagtcccggtgtccacaagtaaaccatcaagcgatcttctagacctgcagccggattttagcagtggaggtgccgctgccgcagcagcaccagcgcctccgcctccagccggaggagcgacggcctggggagatctgttgggggaagattcactggcagctctctcttctgtcccaagcgaagcacagatttcagatcccttcgcgcctgaacccactccccctactactaccgccgaaattgccacagcgagcgcatctgccagcactacaactactgtgacagcagtgactgccgaagtggacctgttcggcgatgcatttgcggctagccctggcgaggccccagctgcctctgaaggcgctgccgctccagccacacccaccccagtggctgctgcactggacgcctgctcaggaaacgacccgtttgctccgagcgagggctccgccgaggccgctcccgagcttgatctatttgccatgaagcccccagagacgtcagtcccagttgttactcctaccgcatccacagctccgccagtgcccgctacagctccaagccctgctcccgctgtggcagccgctgctgctgctacaactgccgcaaccgccgcagctactaccactactactacaagtgcagccaccgcgaccacggcccctcccgctctggacattttcggagatctgttcgaatctactcccgaggtagccgctgcccctaagccagacgccgctccctccatcgacctgttctccacagacgctttcagtagtccaccacagggcgcatctcccgtgcctgaatctagccttaccgccgacctgctctccgttgacgcctttgctgctccatctccagctaccaccgcctctcccgcaaaagtggattccagcggcgtgattgatcttttcggggatgcttttgggagctctgcctctgagccccagccagcaagccaggctgcttcttctagttcagcttccgccgatttgttagccggattcggcggttctttcatggcaccgagcccatccccagtgactccggctcagaataatcttctgcagccaaactttgaagccgctttcggcaccacacccagcacgtcctcgtctagttcatttgacccatcagtattcgatgggctgggagacctcctaatgccaaccatggcccctgctggacaaccagctccagtttctatggttccaccctcccctgctatggccgcttccaaagcactcgggagcgacttagactcgagtctggctagtctggtggggaacctgggcataagtgggaccactactaagaagggagacctgcagtggaatgccggtgaaaaaaaattgaccggcggtgctaattggcagcccaaagtggctccagctacgtggagtgccggtgtgcctccaagtgcaccactgcaaggggcagtccccccaacatcctcggtcccgcctgtggccggtgctccaagcgttggtcagcccggtgcgggatttggaatgccccctgccggaactggtatgccaatgatgccccagcagccagtgatgtttgctcagcctatgatgagacccccattcggggcagcagccgtgcctggcactcagttgagcccctcccctactccagccagccagtctccaaaaaagccgcctgctaaagaccccctggccgatctcaacatcaaagatttcctatag

SEQ ID NO: 84919 - DNA, 2724 bp, Artificial Sequence
  derived and/or modified sequence
atgagcggtcaaactctgacagatcgtattgccgctgcacagtattccgtcacaggatcggccgtcgctagggctgtgtgtaaggctacaacacacgaagtcatgggtccaaagaagaaacacctggactacttgatccaggctacaaatgaaacaaacgtgaatattccccagatggctgacactctgtttgagagagcaactaattcctcatgggtcgtggtttttaaggcattggtgaccacccatcacttgatggtccatggaaacgagagattcatccaatatttagcatcacgcaacacactgtttaatctgtctaatttcctggataagtccggctcccacggctacgacatgtccacatttataagaaggtatagccgctacctgaacgagaaagccttttcctacagacaaatggccttcgacttcgctcgggttaaaaaaggagctgatggtgtgatgaggaccatggccccagaaaaacttctgaagtctatgcccatccttcagggacaaattgacgctttgctggaattcgacgtgcacccgaacgagctgaccaacggcgtgatcaatgccgctttcatgctattgttcaaggatctcattaaactctttgcctgttataatgatggcgtgataaacctcctggaaaaattctttgagatgaagaagggccagtgcaaagacgctctcgaaatttacaaaaggtttctgacgaggatgacgcgtgtatccgagtttcttaaggtagctgagcaggtgggcatcgacaagggagacataccggaccttacccaagcaccctcaagcctcatggaaacactggagcagcacctcaacaccctggaaggaaaaaaaccaggcaataacgaaggaagcggcgcaccttctcctctaagtaagtccagtcctgctaccacagtgacctcacccaatagcacacctgcaaagaccattgatacctcacctccagttgatctgtttgcgacagccagcgcagccgtgcctgtgtccaccagcaagcctagctcggacctgctcgatctccagcccgacttcagctcaggcggagctgctgcagccgctgcacccgcacctccacctccagcaggcggtgctacggcatggggagacctcctgggggaggacagtctcgccgctctatcttctgtgccctccgaggctcagattagcgatccgtttgcacccgagcccacacccccaactactacagctgagatagcaaccgcttctgcttctgctagtaccactactacagttacagcggtgacggccgaggtcgacctatttggcgatgcctttgccgctagccctggagaagcgcctgctgccagtgaaggcgcagccgctccggctacaccaaccccagtggcagcagctctggacgcttgttctggaaacgacccctttgcaccctcggaggggtccgcggaggctgcaccagagcttgacctgttcgccatgaaaccacctgagactagcgttcccgtcgtgactccaacagcgtccacagcgccaccagtacctgcaacagccccatctccagctcctgccgtggctgccgctgcggctgccaccaccgcagctactgccgcagcgacgaccacaactaccaccagcgccgcaacggccacaaccgcgccaccagccctggatatttttggcgatttatttgaaagtaccccagaggtggctgcagctcccaaacccgacgccgctccctcaattgatttgttctctaccgacgcattttcatcacctccacagggggcatcaccagtgcctgaatcttcccttacagctgatttactctcagtcgacgctttcgccgcaccctcccccgctacaactgcttcccctgccaaggtcgactcaagcggggtcattgatctgttcggtgatgcttttggttcatccgcgagtgagccacaaccagcttcccaggcggctagttcctcatcagcaagcgctgacctgctagccggtttcggcggatctttcatggcacccagcccctcccccgtgacacccgcacagaacaacctgctgcagcccaatttcgaagccgcattcgggaccacaccgtctacttcttcatcctcatctttcgacccgagcgtattcgatggcctgggagaccttctgatgcctaccatggctccagccggtcagccagcacccgtttcaatggttccaccttcgccagctatggctgcttcgaaagcccttggtagcgacttagattcttcactggcctctctcgtgggcaacttgggcatctctggaacgacaacaaaaaaaggggatctccagtggaatgccggtgaaaagaagttaacagggggagcaaactggcagccgaaggtggccccagccacttggtctgccggtgtaccccctagcgcccctctgcagggagccgtgcccccaacttcatctgtcccccctgtggccggagccccttctgtaggccagccgggtgccggatttgggatgcctcccgcaggcacaggaatgccaatgatgcctcagcaacctgtcatgttcgcgcagcccatgatgcgaccaccattcggcgctgcagcagtgcccggaacccagctcagtcctagccctacaccagcgtcacaaagccctaaaaagccccctgcaaaagatcccctagctgacctgaatatcaaggattttctgtag

SEQ ID NO: 84920 - DNA, 4449 bp, Artificial Sequence
  derived and/or modified sequence
agctgaggtgggggcggggatggggacgcagctcggagcgctagagagacgcggcggcgctggcagaagaggcggcggcgggcgggtactggcttctggggccaggggccaggggcggtgggcgccgggaccgcggagctgaggagcggggcccggccagggctggagactttgcgcccgggggcaccggggctacgcgcggtcgcacacatccaccggcgcggcttccctcggcggcccgggctccgctcatcctgcggcgggcggcgccgctcaggggcgggaagaggaggcggtagacgcgaccacagaagatgtcgggccaaacgctcacggatcggatcgccgccgctcagtacagcgttacaggctctgctgtagcaagagcggtctgcaaagccactactcatgaagtaatgggccccaagaaaaagcacctggactatttgatccaggctaccaacgagaccaatgttaatattcctcagatggccgacactctctttgagcgggcaacaaacagtagctgggtggttgtgtttaaggctttagtgacaacacatcatctcatggtgcatggaaatgagagatttattcaatatttggcttctagaaatacactattcaatctcagcaattttttggacaaaagtggatcccatggttatgatatgtctaccttcataaggcgctatagtagatatttgaatgaaaaggctttttcttacagacagatggcctttgattttgccagggtgaagaaaggggccgatggtgtaatgaggacaatggctcccgaaaagctgctaaagagtatgccaatactacagggacaaattgatgcactgcttgaatttgatgtgcatccaaatgaactaacaaatggtgtcataaatgcagcatttatgcttcttttcaaagatcttatcaaactttttgcttgctacaatgatggtgttattaacttactcgaaaagttttttgaaatgaagaaaggacaatgtaaagatgctctagaaatttacaaacgatttctaactagaatgacacgagtgtctgaatttctcaaggttgcagagcaagttggtattgataaaggtgacattcctgacctcacacaggctcccagcagtcttatggagacgcttgaacagcatctaaatacattagaaggaaagaaacctggaaacaatgaaggatctggtgctccctctccattaagtaagtcttctccagccacaactgttacgtctcctaattctacaccagctaaaactattgacacatccccaccggttgatttatttgcaactgcatctgcggctgtcccagtcagcacttctaaaccatctagtgatctcctggacctccagccagacttttcctctggaggggcagcagcagccgcagcaccagcaccaccaccacctgctggaggagccactgcatggggagaccttttgggagaggattctttggctgcactttcctctgttccctctgaagcacagatttcagatccatttgcaccagaacctacccctcctactacaactgctgaaattgcaactgcctcagcttctgcctccactactacaactgttactgctgtcactgctgaagtggatctctttggagatgcctttgcagcttctcctggggaggcccctgcagcatccgaaggggccgccgcaccagctaccccaacccctgtagcagcagcacttgatgcatgttcaggaaatgacccctttgccccgtctgaaggtagtgcagaggctgcacctgagctggacctctttgcaatgaagccacctgagaccagtgttcctgtagttacccctacagctagcacagcccctccagttcccgcaactgctccttctcctgctcctgccgttgcagctgctgctgctgccactactgctgccaccgccgctgccaccaccactaccaccacctccgctgccaccgccaccactgctcctcctgctctagatatctttggtgatttatttgagtccactcctgaagttgctgcagcgcctaagccagatgctgctcctagcatagacctgtttagtacagatgctttctcctctccaccacaaggggcctctcctgtgcctgagagttctctcactgctgacctcttatctgtggatgcatttgcagcaccatctcctgcaaccactgcctcgccagcaaaggtggattcttcaggtgtcatagacctttttggggatgcatttggaagtagtgcttctgaaccccaacctgcatctcaggctgcttctagttcatcagcatcggcagacctactagctggatttgggggttctttcatggcgccttccccatctccagtgactccagctcagaataacctgctacagcccaattttgaggcagcttttgggacaacgccttcaacttccagcagcagctcctttgatccatcagtgtttgatggtctaggtgatcttttgatgccaaccatggcaccagctgggcagcctgcacctgtctcaatggtaccacccagtcctgcaatggcagccagcaaagcccttggaagtgatcttgattcatctcttgccagcttagtaggcaatcttggaatttctggtaccacaacaaaaaagggagatcttcagtggaatgctggagagaaaaagttgactggtggagccaactggcagcctaaagtagctccagcaacctggtcagcaggcgttccaccaagtgcacctttgcaaggagctgtacctccaaccagttcagttcctcctgttgccggggccccatcggttggacaacctggagcaggatttggaatgcctcctgctgggacaggcatgcccatgatgcctcagcagccggtcatgtttgcacagcccatgatgaggcccccctttggagctgccgctgtacctggcacgcagctttctccaagccctacacctgccagtcagagtcccaagaaacctccagcaaaggacccattagcggatcttaacatcaaggatttcttgtaaacaatttaagctgcaatatttgtgactgaataggaaaataaatgagtttggagacttcaaataagattgatgctgagtttcaaagggagccaccagtaccaaacccaatacttactcataacttctcttccaaaatgtgtaacacagccgtgaaagtgaacattaggaatatgtactaccttagctgttatccctactcttgaaattgtagtgtatttggattatttgtgtattgtacgatgtaaacaatgaatggatgttactgatgccgttagtgcttttttggacttcacctgaggacagatgatgcagctgttgtgtggcgagctatttggaaagacgtctgtgtttttgaaggtttcaatgtacatataacttttgaacaaaccccaaactcttcccataaattatcttttcttctgtatctctgttacaagcgtagtgtgataataccagataataaggaaaacactcataaatatacaaaactttttcagtgtggagtacatttttccaatcacaggaacttcaactgttgtgagaaatgtttatttttgtggcactgtatatgttaagaaattttattttaaaaaatataaaggttaacgtccataataaatacttctctttgaagctaccttatcaagaacgaaaaatcgtatgggaagaatcccctatttatcactgctatattaaaatatatatattttaattatatttgacaggttttgcatctaaattgacctatttattcattcttgattaaatgcactgaaaagtaaagggtctgtttgtgtcatgttcatgaaaatgcggttagagaggtgctattcaagtgattctgaaggcaccccaaggtatatctgtaatttaaagattactgcaaatatctttactttactgtgggtttttagtacatctgttaatttagtgtttctttgtgtgttttgtagactagtgttcttccatccttcaactgagctcaaagtaggttttgttgtaacattgtgattaggatttaaactaattcagagaattgtatcttttactgtacatactgtattctttaagttttaatttgttgtcatactgtctgtgctgatggcttggcttaagattttgatgcataaatgaggtcactgttgatcagtgttgctagtagcttggcagctcttcataaaagcatattgggttggaaaggtgtttgcctatttttcaaattatttaatagatgtatggtaccatttaaaagtggttgtatctgaatttactgtggggataacatacactgtaatggggaaaaattacctaaaaccaatttcaaaatggctttctttgtatttcagtttaaaaacccagtgcatgtacgccctctgagatgcaataaacaccttgaacaaagaaatgcaaa

SEQ ID NO: 84921 - DNA, 4726 bp, Artificial Sequence
  derived and/or modified sequence
gtggtgcgcgagcccagtgcgtgccgggtgcggcgccagcagcggaggggcggcccggcgcccagcggagagccgctggctgggtgggtgtcggcctccccgcctccttcttctccccgccggcttgccggggatgcttgcgcgaggcgccccctcgcctttaagctcccggccccggggggcggtgtgtgtgagtagctgggagggggccgcgaggcgctccgccgagggctcgtccgggtttgtccgccgccgtcacctgactcgtcggaggagccacagctgaggtgggggcggggatggggacgcagctcggagcgctagagagacgcggcggcgctggcagaagaggcggcggcgggcgggtactggcttctggggccaggggccaggggcggtgggcgccgggaccgcggagctgaggagcggggcccggccagggctggagactttgcgcccgggggcaccggggctacgcgcggtcgcacacatccaccggcgcggcttccctcggcggcccgggctccgctcatcctgcggcgggcggcgccgctcaggggcgggaagaggaggcggtagacgcgaccacagaagatgtcgggccaaacgctcacggatcggatcgccgccgctcagtacagcgttacaggctctgctgtagcaagagcggtctgcaaagccactactcatgaagtaatgggccccaagaaaaagcacctggactatttgatccaggctaccaacgagaccaatgttaatattcctcagatggccgacactctctttgagcgggcaacaaacagtagctgggtggttgtgtttaaggctttagtgacaacacatcatctcatggtgcatggaaatgagagatttattcaatatttggcttctagaaatacactattcaatctcagcaattttttggacaaaagtggatcccatggttatgatatgtctaccttcataaggcgctatagtagatatttgaatgaaaaggctttttcttacagacagatggcctttgattttgccagggtgaagaaaggggccgatggtgtaatgaggacaatggctcccgaaaagctgctaaagagtatgccaatactacagggacaaattgatgcactgcttgaatttgatgtgcatccaaatgaactaacaaatggtgtcataaatgcagcatttatgcttcttttcaaagatcttatcaaactttttgcttgctacaatgatggtgttattaacttactcgaaaagttttttgaaatgaagaaaggacaatgtaaagatgctctagaaatttacaaacgatttctaactagaatgacacgagtgtctgaatttctcaaggttgcagagcaagttggtattgataaaggtgacattcctgacctcacacaggctcccagcagtcttatggagacgcttgaacagcatctaaatacattagaaggaaagaaacctggaaacaataaaatatctggtgctccctctccattaagtaagtcttctccagccacaactgttacgtctcctaattctacaccagctaaaactattgacacatccccaccggttgatttatttgcaactgcatctgcggctgtcccagtcagcacttctaaaccatctagtgatctcctggacctccagccagacttttcctctggaggggcagcagcagccgcagcaccagcaccaccaccacctgctggaggagccactgcatggggagaccttttgggagaggattctttggctgcactttcctctgttccctctgaagcacagatttcagatccatttgcaccagaacctacccctcctactacaactgctgaaattgcaactgcctcagcttctgcctccactactacaactgttactgctgtcactgctgaagtggatctctttggagatgcctttgcagcttctcctggggaggcccctgcagcatccgaaggggccgccgcaccagctaccccaacccctgtagcagcagcacttgatgcatgttcaggaaatgacccctttgccccgtctgaaggtagtgcagaggctgcacctgagctggacctctttgcaatgaagccacctgagaccagtgttcctgtagttacccctacagctagcacagcccctccagttcccgcaactgctccttctcctgctcctgccgttgcagctgctgctgctgccactactgctgccaccgccgctgccaccaccactaccaccacctccgctgccaccgccaccactgctcctcctgctctagatatctttggtgatttatttgagtccactcctgaagttgctgcagcgcctaagccagatgctgctcctagcatagacctgtttagtacagatgctttctcctctccaccacaaggggcctctcctgtgcctgagagttctctcactgctgacctcttatctgtggatgcatttgcagcaccatctcctgcaaccactgcctcgccagcaaaggtggattcttcaggtgtcatagacctttttggggatgcatttggaagtagtgcttctgaaccccaacctgcatctcaggctgcttctagttcatcagcatcggcagacctactagctggatttgggggttctttcatggcgccttccccatctccagtgactccagctcagaataacctgctacagcccaattttgaggcagcttttgggacaacgccttcaacttccagcagcagctcctttgatccatcagtgtttgatggtctaggtgatcttttgatgccaaccatggcaccagctgggcagcctgcacctgtctcaatggtaccacccagtcctgcaatggcagccagcaaagcccttggaagtgatcttgattcatctcttgccagcttagtaggcaatcttggaatttctggtaccacaacaaaaaagggagatcttcagtggaatgctggagagaaaaagttgactggtggagccaactggcagcctaaagtagctccagcaacctggtcagcaggcgttccaccaagtgcacctttgcaaggagctgtacctccaaccagttcagttcctcctgttgccggggccccatcggttggacaacctggagcaggatttggaatgcctcctgctgggacaggcatgcccatgatgcctcagcagccggtcatgtttgcacagcccatgatgaggcccccctttggagctgccgctgtacctggcacgcagctttctccaagccctacacctgccagtcagagtcccaagaaacctccagcaaaggacccattagcggatcttaacatcaaggatttcttgtaaacaatttaagctgcaatatttgtgactgaataggaaaataaatgagtttggagacttcaaataagattgatgctgagtttcaaagggagccaccagtaccaaacccaatacttactcataacttctcttccaaaatgtgtaacacagccgtgaaagtgaacattaggaatatgtactaccttagctgttatccctactcttgaaattgtagtgtatttggattatttgtgtattgtacgatgtaaacaatgaatggatgttactgatgccgttagtgcttttttggacttcacctgaggacagatgatgcagctgttgtgtggcgagctatttggaaagacgtctgtgtttttgaaggtttcaatgtacatataacttttgaacaaaccccaaactcttcccataaattatcttttcttctgtatctctgttacaagcgtagtgtgataataccagataataaggaaaacactcataaatatacaaaactttttcagtgtggagtacatttttccaatcacaggaacttcaactgttgtgagaaatgtttatttttgtggcactgtatatgttaagaaattttattttaaaaaatataaaggttaacgtccataataaatacttctctttgaagctaccttatcaagaacgaaaaatcgtatgggaagaatcccctatttatcactgctatattaaaatatatatattttaattatatttgacaggttttgcatctaaattgacctatttattcattcttgattaaatgcactgaaaagtaaagggtctgtttgtgtcatgttcatgaaaatgcggttagagaggtgctattcaagtgattctgaaggcaccccaaggtatatctgtaatttaaagattactgcaaatatctttactttactgtgggtttttagtacatctgttaatttagtgtttctttgtgtgttttgtagactagtgttcttccatccttcaactgagctcaaagtaggttttgttgtaacattgtgattaggatttaaactaattcagagaattgtatcttttactgtacatactgtattctttaagttttaatttgttgtcatactgtctgtgctgatggcttggcttaagattttgatgcataaatgaggtcactgttgatcagtgttgctagtagcttggcagctcttcataaaagcatattgggttggaaaggtgtttgcctatttttcaaattatttaatagatgtatggtaccatttaaaagtggttgtatctgaatttactgtggggataacatacactgtaatggggaaaaattacctaaaaccaatttcaaaatggctttctttgtatttcagtttaaaaacccagtgcatgtacgccctctgagatgcaataaacaccttgaacaaagaaatgc

SEQ ID NO: 84922 - DNA, 4452 bp, Artificial Sequence
  derived and/or modified sequence
gtggtgcgcgagcccagtgcgtgccgggtgcggcgccagcagcggaggggcggcccggcgcccagcggagagccgctggctgggtgggtgtcggcctccccgcctccttcttctccccgccggcttgccggggatgcttgcgcgaggcgccccctcgcctttaagctcccggccccggggggcggtgtgtgtgagtagctgggagggggccgcgaggcgctccgccgagggctcgtccgggtttgtccgccgccgtcacctgactcgtcggaggagccacagctgagaagaggaggcggtagacgcgaccacagaagatgtcgggccaaacgctcacggatcggatcgccgccgctcagtacagcgttacaggctctgctgtagcaagagcggtctgcaaagccactactcatgaagtaatgggccccaagaaaaagcacctggactatttgatccaggctaccaacgagaccaatgttaatattcctcagatggccgacactctctttgagcgggcaacaaacagtagctgggtggttgtgtttaaggctttagtgacaacacatcatctcatggtgcatggaaatgagagatttattcaatatttggcttctagaaatacactattcaatctcagcaattttttggacaaaagtggatcccatggttatgatatgtctaccttcataaggcgctatagtagatatttgaatgaaaaggctttttcttacagacagatggcctttgattttgccagggtgaagaaaggggccgatggtgtaatgaggacaatggctcccgaaaagctgctaaagagtatgccaatactacagggacaaattgatgcactgcttgaatttgatgtgcatccaaatgaactaacaaatggtgtcataaatgcagcatttatgcttcttttcaaagatcttatcaaactttttgcttgctacaatgatggtgttattaacttactcgaaaagttttttgaaatgaagaaaggacaatgtaaagatgctctagaaatttacaaacgatttctaactagaatgacacgagtgtctgaatttctcaaggttgcagagcaagttggtattgataaaggtgacattcctgacctcacacaggctcccagcagtcttatggagacgcttgaacagcatctaaatacattagaaggaaagaaacctggaaacaatgaaggatctggtgctccctctccattaagtaagtcttctccagccacaactgttacgtctcctaattctacaccagctaaaactattgacacatccccaccggttgatttatttgcaactgcatctgcggctgtcccagtcagcacttctaaaccatctagtgatctcctggacctccagccagacttttcctctggaggggcagcagcagccgcagcaccagcaccaccaccacctgctggaggagccactgcatggggagaccttttgggagaggattctttggctgcactttcctctgttccctctgaagcacagatttcagatccatttgcaccagaacctacccctcctactacaactgctgaaattgcaactgcctcagcttctgcctccactactacaactgttactgctgtcactgctgaagtggatctctttggagatgcctttgcagcttctcctggggaggcccctgcagcatccgaaggggccgccgcaccagctaccccaacccctgtagcagcagcacttgatgcatgttcaggaaatgacccctttgccccgtctgaaggtagtgcagaggctgcacctgagctggacctctttgcaatgaagccacctgagaccagtgttcctgtagttacccctacagctagcacagcccctccagttcccgcaactgctccttctcctgctcctgccgttgcagctgctgctgctgccactactgctgccaccgccgctgccaccaccactaccaccacctccgctgccaccgccaccactgctcctcctgctctagatatctttggtgatttatttgagtccactcctgaagttgctgcagcgcctaagccagatgctgctcctagcatagacctgtttagtacagatgctttctcctctccaccacaaggggcctctcctgtgcctgagagttctctcactgctgacctcttatctgtggatgcatttgcagcaccatctcctgcaaccactgcctcgccagcaaaggtggattcttcaggtgtcatagacctttttggggatgcatttggaagtagtgcttctgaaccccaacctgcatctcaggctgcttctagttcatcagcatcggcagacctactagctggatttgggggttctttcatggcgccttccccatctccagtgactccagctcagaataacctgctacagcccaattttgaggcagcttttgggacaacgccttcaacttccagcagcagctcctttgatccatcagtgtttgatggtctaggtgatcttttgatgccaaccatggcaccagctgggcagcctgcacctgtctcaatggtaccacccagtcctgcaatggcagccagcaaagcccttggaagtgatcttgattcatctcttgccagcttagtaggcaatcttggaatttctggtaccacaacaaaaaagggagatcttcagtggaatgctggagagaaaaagttgactggtggagccaactggcagcctaaagtagctccagcaacctggtcagcaggcgttccaccaagtgcacctttgcaaggagctgtacctccaaccagttcagttcctcctgttgccggggccccatcggttggacaacctggagcaggatttggaatgcctcctgctgggacaggcatgcccatgatgcctcagcagccggtcatgtttgcacagcccatgatgaggcccccctttggagctgccgctgtacctggcacgcagctttctccaagccctacacctgccagtcagagtcccaagaaacctccagcaaaggacccattagcggatcttaacatcaaggatttcttgtaaacaatttaagctgcaatatttgtgactgaataggaaaataaatgagtttggagacttcaaataagattgatgctgagtttcaaagggagccaccagtaccaaacccaatacttactcataacttctcttccaaaatgtgtaacacagccgtgaaagtgaacattaggaatatgtactaccttagctgttatccctactcttgaaattgtagtgtatttggattatttgtgtattgtacgatgtaaacaatgaatggatgttactgatgccgttagtgcttttttggacttcacctgaggacagatgatgcagctgttgtgtggcgagctatttggaaagacgtctgtgtttttgaaggtttcaatgtacatataacttttgaacaaaccccaaactcttcccataaattatcttttcttctgtatctctgttacaagcgtagtgtgataataccagataataaggaaaacactcataaatatacaaaactttttcagtgtggagtacatttttccaatcacaggaacttcaactgttgtgagaaatgtttatttttgtggcactgtatatgttaagaaattttattttaaaaaatataaaggttaacgtccataataaatacttctctttgaagctaccttatcaagaacgaaaaatcgtatgggaagaatcccctatttatcactgctatattaaaatatatatattttaattatatttgacaggttttgcatctaaattgacctatttattcattcttgattaaatgcactgaaaagtaaagggtctgtttgtgtcatgttcatgaaaatgcggttagagaggtgctattcaagtgattctgaaggcaccccaaggtatatctgtaatttaaagattactgcaaatatctttactttactgtgggtttttagtacatctgttaatttagtgtttctttgtgtgttttgtagactagtgttcttccatccttcaactgagctcaaagtaggttttgttgtaacattgtgattaggatttaaactaattcagagaattgtatcttttactgtacatactgtattctttaagttttaatttgttgtcatactgtctgtgctgatggcttggcttaagattttgatgcataaatgaggtcactgttgatcagtgttgctagtagcttggcagctcttcataaaagcatattgggttggaaaggtgtttgcctatttttcaaattatttaatagatgtatggtaccatttaaaagtggttgtatctgaatttactgtggggataacatacactgtaatggggaaaaattacctaaaaccaatttcaaaatggctttctttgtatttcagtttaaaaacccagtgcatgtacgccctctgagatgcaataaacaccttgaacaaagaaatgcaaa

SEQ ID NO: 84923 - DNA, 4263 bp, Artificial Sequence
  derived and/or modified sequence
gactcgtcggaggagccacagctgaggtgggggcggggatggggacgcagctcggagcgctagagagacgcggcggcgctggcagaagaggcggcggcgggcggaagaggaggcggtagacgcgaccacagaagatgtcgggccaaacgctcacggatcggatcgccgccgctcagtacagcgttacaggctctgctgtagcaagagcggtctgcaaagccactactcatgaagtaatgggccccaagaaaaagcacctggactatttgatccaggctaccaacgagaccaatgttaatattcctcagatggccgacactctctttgagcgggcaacaaacagtagctgggtggttgtgtttaaggctttagtgacaacacatcatctcatggtgcatggaaatgagagatttattcaatatttggcttctagaaatacactattcaatctcagcaattttttggacaaaagtggatcccatggttatgatatgtctaccttcataaggcgctatagtagatatttgaatgaaaaggctttttcttacagacagatggcctttgattttgccagggtgaagaaaggggccgatggtgtaatgaggacaatggctcccgaaaagctgctaaagagtatgccaatactacagggacaaattgatgcactgcttgaatttgatgtgcatccaaatgaactaacaaatggtgtcataaatgcagcatttatgcttcttttcaaagatcttatcaaactttttgcttgctacaatgatggtgttattaacttactcgaaaagttttttgaaatgaagaaaggacaatgtaaagatgctctagaaatttacaaacgatttctaactagaatgacacgagtgtctgaatttctcaaggttgcagagcaagttggtattgataaaggtgacattcctgacctcacacaggctcccagcagtcttatggagacgcttgaacagcatctaaatacattagaaggaaagaaacctggaaacaatgaaggatctggtgctccctctccattaagtaagtcttctccagccacaactgttacgtctcctaattctacaccagctaaaactattgacacatccccaccggttgatttatttgcaactgcatctgcggctgtcccagtcagcacttctaaaccatctagtgatctcctggacctccagccagacttttcctctggaggggcagcagcagccgcagcaccagcaccaccaccacctgctggaggagccactgcatggggagaccttttgggagaggattctttggctgcactttcctctgttccctctgaagcacagatttcagatccatttgcaccagaacctacccctcctactacaactgctgaaattgcaactgcctcagcttctgcctccactactacaactgttactgctgtcactgctgaagtggatctctttggagatgcctttgcagcttctcctggggaggcccctgcagcatccgaaggggccgccgcaccagctaccccaacccctgtagcagcagcacttgatgcatgttcaggaaatgacccctttgccccgtctgaaggtagtgcagaggctgcacctgagctggacctctttgcaatgaagccacctgagaccagtgttcctgtagttacccctacagctagcacagcccctccagttcccgcaactgctccttctcctgctcctgccgttgcagctgctgctgctgccactactgctgccaccgccgctgccaccaccactaccaccacctccgctgccaccgccaccactgctcctcctgctctagatatctttggtgatttatttgagtccactcctgaagttgctgcagcgcctaagccagatgctgctcctagcatagacctgtttagtacagatgctttctcctctccaccacaaggggcctctcctgtgcctgagagttctctcactgctgacctcttatctgtggatgcatttgcagcaccatctcctgcaaccactgcctcgccagcaaaggtggattcttcaggtgtcatagacctttttggggatgcatttggaagtagtgcttctgaaccccaacctgcatctcaggctgcttctagttcatcagcatcggcagacctactagctggatttgggggttctttcatggcgccttccccatctccagtgactccagctcagaataacctgctacagcccaattttgaggcagcttttgggacaacgccttcaacttccagcagcagctcctttgatccatcagtgtttgatggtctaggtgatcttttgatgccaaccatggcaccagctgggcagcctgcacctgtctcaatggtaccacccagtcctgcaatggcagccagcaaagcccttggaagtgatcttgattcatctcttgccagcttagtaggcaatcttggaatttctggtaccacaacaaaaaagggagatcttcagtggaatgctggagagaaaaagttgactggtggagccaactggcagcctaaagtagctccagcaacctggtcagcaggcgttccaccaagtgcacctttgcaaggagctgtacctccaaccagttcagttcctcctgttgccggggccccatcggttggacaacctggagcaggatttggaatgcctcctgctgggacaggcatgcccatgatgcctcagcagccggtcatgtttgcacagcccatgatgaggcccccctttggagctgccgctgtacctggcacgcagctttctccaagccctacacctgccagtcagagtcccaagaaacctccagcaaaggacccattagcggatcttaacatcaaggatttcttgtaaacaatttaagctgcaatatttgtgactgaataggaaaataaatgagtttggagacttcaaataagattgatgctgagtttcaaagggagccaccagtaccaaacccaatacttactcataacttctcttccaaaatgtgtaacacagccgtgaaagtgaacattaggaatatgtactaccttagctgttatccctactcttgaaattgtagtgtatttggattatttgtgtattgtacgatgtaaacaatgaatggatgttactgatgccgttagtgcttttttggacttcacctgaggacagatgatgcagctgttgtgtggcgagctatttggaaagacgtctgtgtttttgaaggtttcaatgtacatataacttttgaacaaaccccaaactcttcccataaattatcttttcttctgtatctctgttacaagcgtagtgtgataataccagataataaggaaaacactcataaatatacaaaactttttcagtgtggagtacatttttccaatcacaggaacttcaactgttgtgagaaatgtttatttttgtggcactgtatatgttaagaaattttattttaaaaaatataaaggttaacgtccataataaatacttctctttgaagctaccttatcaagaacgaaaaatcgtatgggaagaatcccctatttatcactgctatattaaaatatatatattttaattatatttgacaggttttgcatctaaattgacctatttattcattcttgattaaatgcactgaaaagtaaagggtctgtttgtgtcatgttcatgaaaatgcggttagagaggtgctattcaagtgattctgaaggcaccccaaggtatatctgtaatttaaagattactgcaaatatctttactttactgtgggtttttagtacatctgttaatttagtgtttctttgtgtgttttgtagactagtgttcttccatccttcaactgagctcaaagtaggttttgttgtaacattgtgattaggatttaaactaattcagagaattgtatcttttactgtacatactgtattctttaagttttaatttgttgtcatactgtctgtgctgatggcttggcttaagattttgatgcataaatgaggtcactgttgatcagtgttgctagtagcttggcagctcttcataaaagcatattgggttggaaaggtgtttgcctatttttcaaattatttaatagatgtatggtaccatttaaaagtggttgtatctgaatttactgtggggataacatacactgtaatggggaaaaattacctaaaaccaatttcaaaatggctttctttgtatttcagtttaaaaacccagtgcatgtacgccctctgagatgcaataaacaccttgaacaaagaaa

SEQ ID NO: 84924 - protein, 877 aa, Artificial Sequence
  derived and/or modified sequence
MSGQTLTDRIAAAQYSVTGSAVARAVCKATTHEVMGPKKKHLDYLIQATNETNVNIPQMADTLFERATNSSWVVVFKALVTTHHLMVHGNERFIQYLASRNTLFNLSNFLDKSGSHGYDMSTFIRRYSRYLNEKAFSYRQMAFDFARVKKGADGVMRTMAPEKLLKSMPILQGQIDALLEFDVHPNELTNGVINAAFMLLFKDLIKLFACYNDGVINLLEKFFEMKKGQCKDALEIYKRFLTRMTRVSEFLKVAEQVGIDKGDIPDLTQAPSSLMETLEQHLNTLEGKKPGNKSGAPSPLSKSSPATTVTSPNSTPAKTIDTSPPVDLFATASAAVPVSTSKPSSDLLDLQPDFSSGGAAAAAAPAPPPPAGGATAWGDLLGEDSLAALSSVPSEAQISDPFAPEPTPPTTTAEIATASASASTTTTVTAVTAEVDLFGDAFAASPGEAPAASEGAAAPATPTPVAAALDACSGNDPFAPSEGSAEAAPELDLFAMKPPETSVPVVTPTASTAPPVPATAPSPAPAVAAAAAATTAATAAATTTTTTSAATATTAPPALDIFGDLFESTPEVAAAPKPDAAPSIDLFSTDAFSSPPQGASPVPESSLTADLLSDAFGSSASEPQPASQAASSSSASADLLAGFGGSFMAPSPSPVTPAQNNLLQPNFEAAFGTTPSTSSSSSFDPSVFDGLGDLLMPTMAPAGQPAPVSMVPPSPAMAASKALGSDLDSSLASLVGNLGISGTTTKKGDLQWNAGEKKLTGGANWQPKVAPATWSAGVPPSAPLQGAVPPTSSVPPVAGAPSVGQPGAGFGMPPAGTGMPMMPQQPVMFAQPMMRPPFGAAAVPGTQLSPSPTPASQSPKKPPAKDPLADLNIKDFL

SEQ ID NO: 84925 - DNA, 2634 bp, Artificial Sequence
  derived and/or modified sequence
atgagcggccagaccctgaccgacagaatcgccgccgcccagtacagcgtgaccggcagcgccgtggccagagccgtgtgcaaggccaccacccacgaggtgatgggccccaagaagaagcacctggactacctgatccaggccaccaacgagaccaacgtgaacatcccccagatggccgacaccctgttcgagagagccaccaacagcagctgggtggtggtgttcaaggccctggtgaccacccaccacctgatggtgcacggcaacgagagattcatccagtacctggccagcagaaacaccctgttcaacctgagcaacttcctggacaagagcggcagccacggctacgacatgagcaccttcatcagaagatacagcagatacctgaacgagaaggccttcagctacagacagatggccttcgacttcgccagagtgaagaagggcgccgacggcgtgatgagaaccatggcccccgagaagctgctgaagagcatgcccatcctgcagggccagatcgacgccctgctggagttcgacgtgcaccccaacgagctgaccaacggcgtgatcaacgccgccttcatgctgctgttcaaggacctgatcaagctgttcgcctgctacaacgacggcgtgatcaacctgctggagaagttcttcgagatgaagaagggccagtgcaaggacgccctggagatctacaagagattcctgaccagaatgaccagagtgagcgagttcctgaaggtggccgagcaggtgggcatcgacaagggcgacatccccgacctgacccaggcccccagcagcctgatggagaccctggagcagcacctgaacaccctggagggcaagaagcccggcaacaagagcggcgcccccagccccctgagcaagagcagccccgccaccaccgtgaccagccccaacagcacccccgccaagaccatcgacaccagcccccccgtggacctgttcgccaccgccagcgccgccgtgcccgtgagcaccagcaagcccagcagcgacctgctggacctgcagcccgacttcagcagcggcggcgccgccgccgccgccgcccccgccccccccccccccgccggcggcgccaccgcctggggcgacctgctgggcgaggacagcctggccgccctgagcagcgtgcccagcgaggcccagatcagcgaccccttcgcccccgagcccaccccccccaccaccaccgccgagatcgccaccgccagcgccagcgccagcaccaccaccaccgtgaccgccgtgaccgccgaggtggacctgttcggcgacgccttcgccgccagccccggcgaggcccccgccgccagcgagggcgccgccgcccccgccacccccacccccgtggccgccgccctggacgcctgcagcggcaacgaccccttcgcccccagcgagggcagcgccgaggccgcccccgagctggacctgttcgccatgaagccccccgagaccagcgtgcccgtggtgacccccaccgccagcaccgccccccccgtgcccgccaccgcccccagccccgcccccgccgtggccgccgccgccgccgccaccaccgccgccaccgccgccgccaccaccaccaccaccaccagcgccgccaccgccaccaccgccccccccgccctggacatcttcggcgacctgttcgagagcacccccgaggtggccgccgcccccaagcccgacgccgcccccagcatcgacctgttcagcaccgacgccttcagcagccccccccagggcgccagccccgtgcccgagagcagcctgaccgccgacctgctgagcgacgccttcggcagcagcgccagcgagccccagcccgccagccaggccgccagcagcagcagcgccagcgccgacctgctggccggcttcggcggcagcttcatggcccccagccccagccccgtgacccccgcccagaacaacctgctgcagcccaacttcgaggccgccttcggcaccacccccagcaccagcagcagcagcagcttcgaccccagcgtgttcgacggcctgggcgacctgctgatgcccaccatggcccccgccggccagcccgcccccgtgagcatggtgccccccagccccgccatggccgccagcaaggccctgggcagcgacctggacagcagcctggccagcctggtgggcaacctgggcatcagcggcaccaccaccaagaagggcgacctgcagtggaacgccggcgagaagaagctgaccggcggcgccaactggcagcccaaggtggcccccgccacctggagcgccggcgtgccccccagcgcccccctgcagggcgccgtgccccccaccagcagcgtgccccccgtggccggcgcccccagcgtgggccagcccggcgccggcttcggcatgccccccgccggcaccggcatgcccatgatgccccagcagcccgtgatgttcgcccagcccatgatgagaccccccttcggcgccgccgccgtgcccggcacccagctgagccccagccccacccccgccagccagagccccaagaagccccccgccaaggaccccctggccgacctgaacatcaaggacttcctgtag

SEQ ID NO: 84926 - DNA, 2634 bp, Artificial Sequence
  derived and/or modified sequence
atgagtgggcaaactctgacggatagaattgcagccgctcagtacagtgtgaccgggtcagccgtcgctagagcggtgtgtaaggccaccacgcacgaggtcatgggccctaagaagaaacacttagactaccttatacaggctacaaatgagacaaacgtgaatatcccacagatggcggacaccctttttgaacgggctactaacagcagctgggtggtggtgtttaaggccctagtgaccacacaccatctgatggtgcacggcaatgagcgtttcatccagtaccttgctagtagaaatactctctttaatctctccaacttccttgacaaaagtggctcgcatggctatgatatgtcgacattcatacgacggtatagtcgatacctgaacgagaaggcgttcagctaccgccaaatggcatttgattttgctcgagtgaagaagggcgccgacggagtcatgaggacaatggcacctgagaagcttttgaagagtatgccgatactgcaaggtcagatcgacgcactgctcgagttcgatgtgcatcccaatgagctcacaaatggggttataaatgctgcttttatgttactgtttaaggatctgatcaaacttttcgcctgttataatgatggcgtgattaacttactcgagaagtttttcgagatgaaaaaggggcaatgcaaagacgcccttgagatctataaacgtttcctcaccagaatgacccgtgtgtctgaattcctgaaggtggccgagcaggtgggaatcgacaaaggcgacattcctgacctaacgcaggccccctcaagcctgatggagaccctggaacagcacctcaacactctggagggaaagaaaccaggaaacaagagcggcgctccatccccactgtccaaatcgagtccggccactacggtgacatctcccaactcaacgcctgcgaaaacaatcgatactagcccccctgtggaccttttcgcaacagccagtgcagctgtccctgtgtctacgagcaaaccgagcagtgatctcttagatctacaaccagacttcagctctggcggggctgcagcagccgcagcccccgcaccaccgccccccgctgggggagctacagcatggggggatctcttgggcgaagattccctggcagcacttagcagtgtgccatctgaggctcagatcagtgatccttttgccccggagccaacccccccgacgactaccgccgaaatagctacggccagcgctagcgcctctaccacaacgacagttacagccgtgaccgccgaagtggacctgttcggggacgccttcgctgcatctcctggggaggccccagctgcgagcgagggggcagccgcccctgcgaccccaacacctgtggctgcagctctggacgcttgttctgggaacgatcctttcgcccccagcgagggctctgcggaggctgctccagagctggatctgttcgcaatgaagcccccagaaaccagtgtgccagtggtgacacccaccgccagtaccgccccacccgttccggctaccgcacccagccctgcacccgctgtggccgcagccgcggctgctaccaccgctgcaacagccgctgccaccaccacaactactacatctgcagctacagcaaccaccgctcccccagcattggatatttttggggacctctttgaatctacccccgaagtcgcagcagctccaaagcctgatgccgccccctccatcgacttattttccacagacgcattttccagccctccccaaggtgcctcacccgtccctgagtcttcactcaccgccgatctactctcggatgcgtttgggtcatcggctagcgaaccccagccagcctctcaggcagccagttccagttccgcctccgccgatctgctggccgggtttggaggatctttcatggccccaagtccctcacccgtcaccccggcccagaataacctactgcagcccaattttgaggctgccttcggcactacaccgtcgacttcatcaagttcctcattcgaccccagcgtgtttgacggtctgggcgatctgctcatgcctacaatggctccagcaggacagcctgcccctgtgtcaatggtccctccgtcccccgcgatggcagcttccaaggcccttggttccgaccttgattcatctctcgctagcctcgtcggcaacctggggatttccggcactaccacaaaaaaaggcgacttacagtggaacgcgggcgagaagaaactgacaggcggagccaattggcagccaaaagtggccccagccacatggtctgccggggtgccccccagcgccccactgcagggagcagtacctccgacctcctcagtgccgcccgttgcaggggcgccatctgtgggacagccgggagccgggtttggtatgccccccgctggaaccgggatgccaatgatgccacagcagcctgttatgttcgcccagcccatgatgcggcccccatttggcgctgccgccgtacccggaacccaactgagtcccagtcctacccccgccagccagtcccccaaaaagccccctgctaaggatccactggccgatttgaacatcaaagatttcttgtag

SEQ ID NO: 84927 - DNA, 2634 bp, Artificial Sequence
  derived and/or modified sequence
atgagcggccagaccctgacagacagaattgctgctgcccagtacagcgtgacaggcagcgctgtggcccgggctgtgtgcaaggccaccacccatgaggtgatgggccccaagaagaagcacctggactacctgatccaggccaccaatgagaccaacgtgaacatcccccagatggctgacaccctgtttgagcgggccaccaacagctcctgggtggtggtgttcaaggccctggtgaccacccaccacctgatggtgcacggcaatgaacgcttcatccagtacctggccagcaggaacaccctcttcaacctgagcaacttcctggacaagagcggcagccacggctatgacatgagcaccttcatccgccgctacagccgctacctgaatgagaaggccttctcctaccggcagatggcctttgattttgcccgggtgaagaagggagcagatggagtgatgaggaccatggcccctgagaagctgctgaagtccatgcccatcctgcagggccagattgatgccctgctggagtttgatgtgcaccccaatgagctgaccaacggggtcatcaatgctgccttcatgctgctcttcaaggacctgatcaagctgtttgcctgctacaatgatggagtcatcaacctgctggagaagttctttgagatgaagaagggccagtgcaaggatgccctggagatctacaagcgcttcctgaccaggatgaccagggtgtctgagttcctgaaggtggccgagcaggtgggcatcgacaagggggacatcccagacctgacccaggcccccagcagcctgatggagaccctggagcagcacctgaacaccctggagggcaagaagccaggcaacaagagcggggcccccagccccctgagcaagagcagccctgccaccaccgtgaccagccccaacagcaccccagccaagaccatcgacaccagcccccctgtggacctgtttgccacagccagcgctgctgtgcctgtgtccaccagcaagcccagcagtgacctgctggacctgcagcctgacttcagcagcggcggcgctgctgctgctgctgccccagcccctcctcctcctgctggaggagccacagcctggggagacctgctgggggaggacagcctggccgccctgagctctgtgcccagcgaggcccagatcagtgacccctttgcccctgagcccaccccacccaccaccacagctgagatcgccacagccagcgccagcgccagcaccaccaccaccgtgacagctgtgacagctgaggtggacctgtttggagatgcctttgctgccagccctggagaggccccagctgccagcgagggcgctgctgccccagccacccccacccctgtggccgccgccctggatgcctgcagcggaaatgacccctttgcccccagcgagggcagcgctgaggccgcccctgagctggacctgtttgccatgaagcccccagagacctctgtgcctgtggtgacccccacagccagcacagcccctcctgtgcctgccacagcccccagccctgccccagctgtggccgctgctgctgctgccaccacagctgccacagctgctgccaccaccaccaccaccaccagcgctgccacagccaccacagcccccccagccctggacatctttggagacctgtttgagagcaccccagaggtggccgccgcccccaagccagatgctgcccccagcattgacctcttcagcacagatgccttcagcagccccccccagggcgccagccctgtgcctgagagcagcctgacagctgacctgctgagtgatgccttcggcagcagcgccagcgagccccagcctgccagccaggccgccagcagcagcagcgccagcgctgacctgctggccggctttggaggcagcttcatggcccccagccccagccctgtgaccccagcccagaacaacctgctgcagcccaactttgaagctgccttcggcaccacccccagcaccagcagcagcagcagctttgaccccagcgtgtttgatggcctgggggacctgctgatgcccaccatggccccagctggccagcctgcccctgtgtccatggtgccccccagccctgccatggccgccagcaaggccctgggcagtgacctggacagcagcctggccagcctggtgggcaacctgggcatcagcggcaccaccaccaagaagggggacctgcagtggaatgctggggagaagaagctgaccggcggggccaactggcagcccaaggtggccccagccacctggagcgctggggtgcccccatctgcccccctgcagggcgctgtgccccccaccagctctgtgccccctgtggccggggcccccagcgtgggccagcccggggccggcttcggcatgcctcctgctggcaccggcatgcccatgatgccccagcagcctgtgatgtttgcccagcccatgatgaggcccccatttggagctgctgctgtgcccggcacccagctgagccccagccccaccccagccagccagagccccaagaagcccccagccaaggaccccctggccgacctgaacatcaaggacttcctgtag

SEQ ID NO: 84928 - DNA, 2634 bp, Artificial Sequence
  derived and/or modified sequence
atgagcggccagaccctgaccgaccggatcgccgccgcccagtactctgtgaccggcagcgctgttgccagggcggtctgcaaagcaaccacccacgaggttatgggacctaagaaaaagcaccttgattacttgatacaggccacaaacgaaaccaatgtgaatattccacaaatggcagatacattattcgaaagagcgactaacagcagctgggtcgtagtcttcaaagccctggtcactacacatcacctgatggtgcatggaaacgagcgattcatccaatacctggccagtcggaacacattgttcaatctgagcaactttctggacaagtcaggatcgcacgggtacgacatgtcgacattcataagaagatattcacgatacctgaatgaaaaggcgttttcctataggcagatggctttcgactttgcacgcgtcaaaaaaggtgctgatggtgtcatgcggactatggctcccgaaaaactgctgaaatccatgcctattctccagggccagatcgatgctctgctggagttcgacgtgcacccaaatgagttgacgaatggagttataaatgccgcattcatgctccttttcaaagacctcattaagctcttcgcctgttacaacgacggtgtcatcaatctgctggagaaatttttcgagatgaagaagggacaatgtaaggacgccctcgaaatctacaaaagatttctgaccaggatgactagagtgagcgaattcctcaaggttgctgaacaggtcggaattgataagggcgacattccggatctcacgcaggcaccgagtagtttgatggaaaccctcgagcaacacttaaacaccctcgagggaaaaaaaccgggcaacaaatctggggcccctagtcctctaagcaagtcatcgcccgctacaaccgtgacctcacccaatagcacgcctgctaaaacaatagatacctcccctcctgtggatttattcgctacagccagcgccgccgttccagtctctacctcaaagccatcctctgacctgctggatctccaacctgatttttccagcggtggagcagcagccgcagcagcccctgctcctccaccaccagcaggaggcgcgacggcatggggcgaccttctgggggaagattctctggcggcactgtcttccgtgccatcggaagctcagatatccgatccttttgccccagaaccaactccacctactacgacagccgaaatcgccaccgcatctgcttccgcttccactacaactacagtgaccgccgtgacagcagaagtcgacctattcggcgatgccttcgccgcctcacctggtgaagcacctgcagctagtgaaggtgccgctgctcctgcgacaccaacgcctgtggctgcagcattagacgcttgttccggaaacgacccattcgctcccagcgagggatcggctgaagccgcccccgagttggatctgtttgctatgaaacctccagagacctccgtacccgtcgtgactccgacggcttccactgctccccctgttcctgctaccgccccatccccggcgcctgcggtcgcggccgctgcagcggctacaaccgccgctaccgccgccgctactaccactaccaccacttccgccgccaccgccaccacggctccacctgctctcgacatctttggtgatctatttgagagtacacctgaggtcgcagcggcccccaagccagatgctgccccatcaattgacttattttccacagatgccttctcttcgcccccacagggggcatcccctgtccctgaatcgtcccttactgcggacctgttaagtgacgctttcggaagctccgcttctgaacctcagccagcgtcccaagccgccagctcgtcatcggcctccgcggatctgctcgctgggttcggtggatcgttcatggcgccatccccatccccagtgacccctgctcagaataatttattacagccaaatttcgaagccgcatttggcacaacaccatcgaccagctcttcctcttcctttgatccaagtgtatttgatgggttaggggacctgctcatgcctactatggctcctgccgggcagccggcccctgttagcatggtccccccgagcccagctatggcggcttccaaagcactgggctcggacctggacagctctcttgccagtctagtgggtaatctcggcatttcgggaaccacgacaaagaaaggtgacctgcaatggaatgcgggcgaaaagaagctcacaggcggcgccaactggcaacctaaggttgcgcccgccacatggtcggccggcgtccccccatccgcgcccctgcagggcgcagtccctcccacaagtagcgttcctcctgttgcaggcgcgccctccgtgggtcagcccggggccggcttcgggatgcctccagctggcacaggaatgccgatgatgccgcagcaaccagtgatgtttgctcaaccaatgatgcgcccacctttcggggctgctgccgtgcccgggacccagctgtcccctagccctactcccgcctcacagtcccctaaaaagcctcccgcaaaggatcccctggctgacctaaatatcaaggatttcttgtag

SEQ ID NO: 84929 - DNA, 2634 bp, Artificial Sequence
  derived and/or modified sequence
atgagcggacaaacactcacagatcgcattgcagccgcacagtatagtgtcaccggatctgcagttgcgagagccgtgtgtaaagccaccacccacgaagtgatggggcctaagaaaaagcatttggattatctgattcaggcaaccaatgaaacaaatgtcaacataccccagatggcagatacactcttcgaacgcgctactaattccagttgggtcgttgtgttcaaagcactggtcactacacatcacttgatggtccatggaaacgagcgtttcatacagtatttggcctcacgcaataccctctttaacctctctaatttcctggacaagtcaggaagccatggctatgatatgtcgacctttatacgtcggtatagtagatacctcaatgaaaaggcatttagttaccgtcagatggcgtttgatttcgccagggtgaagaaaggagccgatggtgtgatgcgcactatggctccagagaagctgcttaagtctatgcccattcttcagggccagattgacgcgttgctggaattcgatgtacaccctaacgaacttacaaacggcgtaatcaatgctgcttttatgctgctctttaaagatctgattaaactgttcgcatgttacaatgatggagtgattaatcttctggagaagttttttgaaatgaaaaagggccagtgtaaggatgccttggagatttataagcgattcctgacgcgtatgacaagggtatctgagttcctgaaagtcgctgagcaagtgggcattgataaaggggatatcccagacctaacccaggccccttcatccctgatggaaacgctggagcagcacttaaacacattggagggcaagaaaccagggaataagagcggcgcaccaagcccactgagtaaatcctcccctgctactaccgtgaccagcccaaatagcacgcccgcaaaaaccatagataccagcccgccagtggacctgtttgccactgcttccgcggctgtgcctgtaagtacaagcaagcccagttcggatctcttagacctgcagcccgactttagctccggcggtgcggctgctgcagccgcaccagctccacccccaccggcaggaggagcgacagcctggggcgacctgctgggggaggacagcctggccgcacttagcagcgtccctagtgaagctcagatcagcgaccccttcgcgcctgaacccactcccccaaccacaaccgccgagatagccactgcatcggcatcagcatccacgacaactactgtaacggctgtgactgctgaagtggacctgttcggggatgcatttgccgctagccctggcgaggctccagccgctagtgagggggctgccgcaccagcaactcccactcctgtagccgcagcactggatgcatgctccgggaatgacccctttgcaccctcagaaggctctgcagaggccgcaccagagctggacctattcgccatgaagcctcctgaaacatcagtccctgtcgtgacaccaaccgcctccacggcacccccagtccccgctactgccccttcccctgcacccgctgttgctgccgctgcagccgcaacaaccgccgctaccgctgccgcaacaacaacaaccacaacctcagccgctacagctaccaccgcgcctcctgcactggatatctttggtgacctgttcgagtcaacaccggaggtcgcagcagctcccaagccggatgcggcacccagcattgacctgttttctacagacgcattttcaagcccacctcagggcgcatctcctgtgcccgagtcgtctctcacagcagaccttctgagcgacgccttcgggagcagcgcctccgagccgcaacctgcgtcgcaggccgcttcaagttcttccgccagtgcggaccttctcgctgggttcgggggaagtttcatggcaccaagtcccagtcctgtgacccccgctcaaaacaatctactccagcccaacttcgaagctgcgtttggaacgacccccagcacctcctccagttcatcatttgacccctctgtgttcgacggcctaggggatttgctgatgccaaccatggccccagctgggcagcctgcccctgtgtctatggttcctcctagtcccgctatggctgcctccaaggctctgggaagtgatcttgattcatcacttgcctcccttgtgggtaacctgggcatcagtgggactactaccaagaaaggggatctgcaatggaacgccggagagaagaaactcacaggcggtgctaattggcagcctaaggtagctccagccacttggtccgccggagtgcctcctagcgcacccctgcagggggctgtgcctccaacctcgagcgtgcctccggtcgcgggagcacctagtgtggggcaacccggagctggattcgggatgcccccagctggtacagggatgccgatgatgcctcaacagccagttatgttcgcccagcccatgatgcgccctccattcggggctgccgcagttccaggtacacagctgtcaccctcccccacccccgctagccagagccctaagaaacctccagccaaagatcccctcgccgacctgaacatcaaggattttctttag

SEQ ID NO: 84930 - DNA, 4136 bp, Artificial Sequence
  derived and/or modified sequence
gtgcgtgccgggtgcggcgccagcagcggaggggcggcccggcgcccagcggagagccgctggctggaagaggaggcggtagacgcgaccacagaagatgtcgggccaaacgctcacggatcggatcgccgccgctcagtacagcgttacaggctctgctgtagcaagagcggtctgcaaagccactactcatgaagtaatgggccccaagaaaaagcacctggactatttgatccaggctaccaacgagaccaatgttaatattcctcagatggccgacactctctttgagcgggcaacaaacagtagctgggtggttgtgtttaaggctttagtgacaacacatcatctcatggtgcatggaaatgagagatttattcaatatttggcttctagaaatacactattcaatctcagcaattttttggacaaaagtggatcccatggttatgatatgtctaccttcataaggcgctatagtagatatttgaatgaaaaggctttttcttacagacagatggcctttgattttgccagggtgaagaaaggggccgatggtgtaatgaggacaatggctcccgaaaagctgctaaagagtatgccaatactacagggacaaattgatgcactgcttgaatttgatgtgcatccaaatgaactaacaaatggtgtcataaatgcagcatttatgcttcttttcaaagatcttatcaaactttttgcttgctacaatgatggtgttattaacttactcgaaaagttttttgaaatgaagaaaggacaatgtaaagatgctctagaaatttacaaacgatttctaactagaatgacacgagtgtctgaatttctcaaggttgcagagcaagttggtattgataaaggtgacattcctgacctcacacaggctcccagcagtcttatggagacgcttgaacagcatctaaatacattagaaggaaagaaacctggaaacaaatctggtgctccctctccattaagtaagtcttctccagccacaactgttacgtctcctaattctacaccagctaaaactattgacacatccccaccggttgatttatttgcaactgcatctgcggctgtcccagtcagcacttctaaaccatctagtgatctcctggacctccagccagacttttcctctggaggggcagcagcagccgcagcaccagcaccaccaccacctgctggaggagccactgcatggggagaccttttgggagaggattctttggctgcactttcctctgttccctctgaagcacagatttcagatccatttgcaccagaacctacccctcctactacaactgctgaaattgcaactgcctcagcttctgcctccactactacaactgttactgctgtcactgctgaagtggatctctttggagatgcctttgcagcttctcctggggaggcccctgcagcatccgaaggggccgccgcaccagctaccccaacccctgtagcagcagcacttgatgcatgttcaggaaatgacccctttgccccgtctgaaggtagtgcagaggctgcacctgagctggacctctttgcaatgaagccacctgagaccagtgttcctgtagttacccctacagctagcacagcccctccagttcccgcaactgctccttctcctgctcctgccgttgcagctgctgctgctgccactactgctgccaccgccgctgccaccaccactaccaccacctccgctgccaccgccaccactgctcctcctgctctagatatctttggtgatttatttgagtccactcctgaagttgctgcagcgcctaagccagatgctgctcctagcatagacctgtttagtacagatgctttctcctctccaccacaaggggcctctcctgtgcctgagagttctctcactgctgacctcttatctgatgcatttggaagtagtgcttctgaaccccaacctgcatctcaggctgcttctagttcatcagcatcggcagacctactagctggatttgggggttctttcatggcgccttccccatctccagtgactccagctcagaataacctgctacagcccaattttgaggcagcttttgggacaacgccttcaacttccagcagcagctcctttgatccatcagtgtttgatggtctaggtgatcttttgatgccaaccatggcaccagctgggcagcctgcacctgtctcaatggtaccacccagtcctgcaatggcagccagcaaagcccttggaagtgatcttgattcatctcttgccagcttagtaggcaatcttggaatttctggtaccacaacaaaaaagggagatcttcagtggaatgctggagagaaaaagttgactggtggagccaactggcagcctaaagtagctccagcaacctggtcagcaggcgttccaccaagtgcacctttgcaaggagctgtacctccaaccagttcagttcctcctgttgccggggccccatcggttggacaacctggagcaggatttggaatgcctcctgctgggacaggcatgcccatgatgcctcagcagccggtcatgtttgcacagcccatgatgaggcccccctttggagctgccgctgtacctggcacgcagctttctccaagccctacacctgccagtcagagtcccaagaaacctccagcaaaggacccattagcggatcttaacatcaaggatttcttgtaaacaatttaagctgcaatatttgtgactgaataggaaaataaatgagtttggagacttcaaataagattgatgctgagtttcaaagggagccaccagtaccaaacccaatacttactcataacttctcttccaaaatgtgtaacacagccgtgaaagtgaacattaggaatatgtactaccttagctgttatccctactcttgaaattgtagtgtatttggattatttgtgtattgtacgatgtaaacaatgaatggatgttactgatgccgttagtgcttttttggacttcacctgaggacagatgatgcagctgttgtgtggcgagctatttggaaagacgtctgtgtttttgaaggtttcaatgtacatataacttttgaacaaaccccaaactcttcccataaattatcttttcttctgtatctctgttacaagcgtagtgtgataataccagataataaggaaaacactcataaatatacaaaactttttcagtgtggagtacatttttccaatcacaggaacttcaactgttgtgagaaatgtttatttttgtggcactgtatatgttaagaaattttattttaaaaaatataaaggttaacgtccataataaatacttctctttgaagctaccttatcaagaacgaaaaatcgtatgggaagaatcccctatttatcactgctatattaaaatatatatattttaattatatttgacaggttttgcatctaaattgacctatttattcattcttgattaaatgcactgaaaagtaaagggtctgtttgtgtcatgttcatgaaaatgcggttagagaggtgctattcaagtgattctgaaggcaccccaaggtatatctgtaatttaaagattactgcaaatatctttactttactgtgggtttttagtacatctgttaatttagtgtttctttgtgtgttttgtagactagtgttcttccatccttcaactgagctcaaagtaggttttgttgtaacattgtgattaggatttaaactaattcagagaattgtatcttttactgtacatactgtattctttaagttttaatttgttgtcatactgtctgtgctgatggcttggcttaagattttgatgcataaatgaggtcactgttgatcagtgttgctagtagcttggcagctcttcataaaagcatattgggttggaaaggtgtttgcctatttttcaaattatttaatagatgtatggtaccatttaaaagtggttgtatctgaatttactgtggggataacatacactgtaatggggaaaaattacctaaaaccaatttcaaaatggctttctttgtatttcagtttaaaaacccagtgcatgtacgccctctgagatgcaataaacaccttgaacaaagaaa

SEQ ID NO: 84931 - protein, 149 aa, Artificial Sequence
  derived and/or modified sequence
MSGQTLTDRIAAAQYSVTGSAVARAVCKATTHEVMGPKKKHLDYLIQATNETNVNIPQMADTLFERATNSSWVVVFKALVTTHHLMVHGNERFIQYLASRNTLFNLSNFLDKSGSHGYDMSTFIRRYSRYLNEKAFSYRQMAFDFARVK

SEQ ID NO: 84932 - protein, 600 aa, Artificial Sequence
  derived and/or modified sequence
MSGQTLTDRIAAAQYSVTGSAVARAVCKATTHEVMGPKKKHLDYLIQATNETNVNIPQMADTLFERATNSSWVVVFKALVTTHHLMVHGNERFIQYLASRNTLFNLSNFLDKSGSHGYDMSTFIRRYSRYLNEKAFSYRQMAFDFARVKKGADGVMRTMAPEKLLKSMPILQGQIDALLEFDVHPNELTNGVINAAFMLLFKDLIKLFACYNDGVINLLEKFFEMKKGQCKDALEIYKRFLTRMTRVSEFLKVAEAPSSLMETLEQHLNTLEGKKPGNKSGAPSPLSKSSPATTVTSPNSTPAKTIDTSPPVDLFATASAAVPVSTSKPSSDLLDLQPDFSSGGAAAAAAPAPPPPAGGATAWGGFGGSFMAPSPSPVTPAQNNLLQPNFEAAFGTTPSTSSSSSFDPSVFDGLGDLLMPTMAPAGQPAPVSMVPPSPAMAASKALGSDLDSSLASLVGNLGISGTTTKKGDLQWNAGEKKLTGGANWQPKVAPATWSAGVPPSAPLQGAVPPTSSVPPVAGAPSVGQPGAGFGMPPAGTGMPMMPQQPVMFAQPMMRPPFGAAAVPGTQLSPSPTPASQSPKKPPAKDPLADLNIKDFL

SEQ ID NO: 84933 - DNA, 177 bp, Artificial Sequence
  derived and/or modified sequence
atgagcggccagaccctgaccgacagaatcgccgccgcccagtacagcgtgaccggcagcgccgtggccagagccgtgtgcaaggccaccacccacgaggtgatgggccccaagaagaagcacctggactacctgcagaccttcttccagcaggtgctgcccaacttcgagatctag

SEQ ID NO: 84934 - DNA, 450 bp, Artificial Sequence
  derived and/or modified sequence
atgagcggccagaccctgaccgacagaatcgccgccgcccagtacagcgtgaccggcagcgccgtggccagagccgtgtgcaaggccaccacccacgaggtgatgggccccaagaagaagcacctggactacctgatccaggccaccaacgagaccaacgtgaacatcccccagatggccgacaccctgttcgagagagccaccaacagcagctgggtggtggtgttcaaggccctggtgaccacccaccacctgatggtgcacggcaacgagagattcatccagtacctggccagcagaaacaccctgttcaacctgagcaacttcctggacaagagcggcagccacggctacgacatgagcaccttcatcagaagatacagcagatacctgaacgagaaggccttcagctacagacagatggccttcgacttcgccagagtgaagtag

SEQ ID NO: 84935 - DNA, 1803 bp, Artificial Sequence
  derived and/or modified sequence
atgagcggccagaccctgaccgacagaatcgccgccgcccagtacagcgtgaccggcagcgccgtggccagagccgtgtgcaaggccaccacccacgaggtgatgggccccaagaagaagcacctggactacctgatccaggccaccaacgagaccaacgtgaacatcccccagatggccgacaccctgttcgagagagccaccaacagcagctgggtggtggtgttcaaggccctggtgaccacccaccacctgatggtgcacggcaacgagagattcatccagtacctggccagcagaaacaccctgttcaacctgagcaacttcctggacaagagcggcagccacggctacgacatgagcaccttcatcagaagatacagcagatacctgaacgagaaggccttcagctacagacagatggccttcgacttcgccagagtgaagaagggcgccgacggcgtgatgagaaccatggcccccgagaagctgctgaagagcatgcccatcctgcagggccagatcgacgccctgctggagttcgacgtgcaccccaacgagctgaccaacggcgtgatcaacgccgccttcatgctgctgttcaaggacctgatcaagctgttcgcctgctacaacgacggcgtgatcaacctgctggagaagttcttcgagatgaagaagggccagtgcaaggacgccctggagatctacaagagattcctgaccagaatgaccagagtgagcgagttcctgaaggtggccgaggcccccagcagcctgatggagaccctggagcagcacctgaacaccctggagggcaagaagcccggcaacaagagcggcgcccccagccccctgagcaagagcagccccgccaccaccgtgaccagccccaacagcacccccgccaagaccatcgacaccagcccccccgtggacctgttcgccaccgccagcgccgccgtgcccgtgagcaccagcaagcccagcagcgacctgctggacctgcagcccgacttcagcagcggcggcgccgccgccgccgccgcccccgccccccccccccccgccggcggcgccaccgcctggggcggcttcggcggcagcttcatggcccccagccccagccccgtgacccccgcccagaacaacctgctgcagcccaacttcgaggccgccttcggcaccacccccagcaccagcagcagcagcagcttcgaccccagcgtgttcgacggcctgggcgacctgctgatgcccaccatggcccccgccggccagcccgcccccgtgagcatggtgccccccagccccgccatggccgccagcaaggccctgggcagcgacctggacagcagcctggccagcctggtgggcaacctgggcatcagcggcaccaccaccaagaagggcgacctgcagtggaacgccggcgagaagaagctgaccggcggcgccaactggcagcccaaggtggcccccgccacctggagcgccggcgtgccccccagcgcccccctgcagggcgccgtgccccccaccagcagcgtgccccccgtggccggcgcccccagcgtgggccagcccggcgccggcttcggcatgccccccgccggcaccggcatgcccatgatgccccagcagcccgtgatgttcgcccagcccatgatgagaccccccttcggcgccgccgccgtgcccggcacccagctgagccccagccccacccccgccagccagagccccaagaagccccccgccaaggaccccctggccgacctgaacatcaaggacttcctgtag

SEQ ID NO: 84936 - DNA, 456 bp, Artificial Sequence
  derived and/or modified sequence
atgagcggccagaccctgaccgacagaatcgccgccgcccagtacagcgtgaccggcagcgccgtggccagagccgtgtgcaaggccaccacccacgaggtgatgggccccaagaagaagcacctggactacctgatccaggccaccaacgagaccaacgtgaacatcccccagatggccgacaccctgttcgagagagccaccaacagcagctgggtggtggtgttcaaggccctggtgaccacccaccacctgatggtgcacggcaacgagagattcatccagtacctggccagcagaaacaccctgttcaacctgagcaacttcctggacaagagcggcagccacggctacgacatgagcaccttcatcagaagatacagcagatacctgaacgagaaggccttcagctacagacagatggccttcgacttcgccagagtgaagaagggctag

SEQ ID NO: 84937 - DNA, 459 bp, Artificial Sequence
  derived and/or modified sequence
atgagcggccagaccctgaccgacagaatcgccgccgcccagtacagcgtgaccggcagcgccgtggccagagccgtgtgcaaggccaccacccacgaggtgatgggccccaagaagaagcacctggactacctgatccaggccaccaacgagaccaacgtgaacatcccccagatggccgacaccctgttcgagagagccaccaacagcagctgggtggtggtgttcaaggccctggtgaccacccaccacctgatggtgcacggcaacgagagattcatccagtacctggccagcagaaacaccctgttcaacctgagcaacttcctggacaagagcggcagccacggctacgacatgagcaccttcatcagaagatacagcagatacctgaacgagaaggccttcagctacagacagatggccttcgacttcgccagagtgaagaagggcgcctag

SEQ ID NO: 84938 - DNA, 201 bp, Artificial Sequence
  derived and/or modified sequence
atgagcggccagaccctgaccgacagaatcgccgccgcccagtacagcgtgaccggcagcgccgtggccagagccgtgtgcaaggccaccacccacgaggtgatgggccccaagaagaagcacctggactacctgatccaggccaccaacgagaccaacgtgaacatcccccagatggccgacaccctgttcgagagatag

SEQ ID NO: 84939 - DNA, 354 bp, Artificial Sequence
  derived and/or modified sequence
atgagcggccagaccctgaccgacagaatcgccgccgcccagtacagcgtgaccggcagcgccgtggccagagccgtgtgcaaggccaccacccacgaggtgatgggccccaagaagaagcacctggactacctgatccaggccaccaacgagaccaacgtgaacatcccccagatggccgacaccctgttcgagagagccaccaacagcagctgggtggtggtgttcaaggccctggtgaccacccaccacctgatggtgcacggcaacgagagattcatccagtacctggccagcagaaacaccctgttcaacctgagcaacttcctggacaagagcggcagccacggctag

SEQ ID NO: 84940 - DNA, 177 bp, Artificial Sequence
  derived and/or modified sequence
atgtctggacagacgctcactgatcgaatcgcagcagcacaatattccgtcactggttccgccgttgctagagcagtgtgcaaagctacaactcatgaggtaatgggcccaaaaaagaagcacttggactacttgcagaccttctttcagcaagtgctgccgaattttgagatttag

SEQ ID NO: 84941 - DNA, 450 bp, Artificial Sequence
  derived and/or modified sequence
atgtctggtcagaccttaacagatagaattgccgctgcacaatattcagtgaccggaagtgcagtggctcgagctgtgtgtaaggcaactacacacgaggtgatgggaccgaagaagaaacatcttgactacctgatccaggccaccaatgaaacaaacgtaaatatcccacagatggcagacactctgtttgagcgggctacaaactcctcttgggtagtggtgttcaaggcccttgtaacaactcatcatctgatggtgcacggaaatgagcggtttattcaatacctcgcttctagaaacactctgttcaatttatcgaatttccttgacaaatctggcagccatggctacgatatgagcacattcatccggcggtactctcgatacctgaatgagaaggcatttagttacaggcagatggcattcgacttcgcacgggtgaaatag

SEQ ID NO: 84942 - DNA, 1803 bp, Artificial Sequence
  derived and/or modified sequence
atgagtgggcagacgctgaccgaccggatcgcggccgcccaatattccgtaaccggttccgcagtggcaagggccgtctgcaaggctacaacacacgaggtgatgggacccaaaaaaaaacacctggactaccttattcaagcgactaatgaaacgaatgtgaatatacctcaaatggccgacaccctgtttgaacgcgcaactaactcgtcatgggtagtcgtgtttaaagcactcgtgactacgcaccaccttatggtccacggtaatgaacgttttatccagtacctcgcctctcgcaatacattattcaacctgtccaatttcttggataaatcgggttcacatgggtatgatatgagcactttcattagacgctactcccgttacctgaatgaaaaagcgtttagttacaggcagatggcattcgactttgcccgagtcaaaaagggcgcagacggtgttatgagaacaatggcacccgagaagctgcttaaaagcatgcccatcttgcagggacagattgatgcccttctggaattcgacgtgcatccaaatgaattgaccaacggcgtgataaacgcagcttttatgctgctctttaaggatctgatcaaactgtttgcctgctacaacgatggagtaatcaatcttctggaaaagttttttgaaatgaagaagggacagtgcaaagacgctttggaaatctataaacggttcctcaccagaatgacacgcgtgtccgagtttcttaaagtggccgaagccccatcctcgctgatggaaaccttagagcagcacttaaacactctcgaggggaaaaagcccggcaacaaaagcggtgccccttcacctctaagcaaatcctcaccagccactaccgtcacctcgccaaatagtacaccagccaagacgatagatacatcaccacccgtcgacctctttgccacagcttctgccgccgtgcccgtgtctacgtccaagccctcctcagacctgctggatctacaaccagacttttcttctgggggagcagcggctgctgctgcccctgcccccccccccccggcaggtggagcaacggcatggggtggttttggaggctcatttatggcaccatccccgagcccggtgacacctgcacagaacaatctgttacagccaaatttcgaggccgcttttggtaccaccccaagcacctcctccagctccagcttcgaccccagtgtgtttgacggcctgggggatctgctgatgccaaccatggcgcccgcagggcagccagctcctgtgtccatggtgcccccaagtcccgccatggccgcatctaaggcactaggtagcgatctggactcttccctggcatctctggttggaaacctcgggattagtggaaccaccactaagaagggagatttacaatggaacgccggagaaaagaagctgaccggcggggccaattggcagcctaaggtcgccccagctacttggtctgccggcgtgccgccatcagctccacttcagggcgccgttccacctactagttctgtcccgccagtggctggggccccgtctgtgggacagccaggcgccggctttggtatgccgcccgctggaactggcatgcccatgatgccccagcaaccggtgatgtttgcccaaccaatgatgagacctcctttcggcgccgccgctgtcccagggacacagctgagcccgagtcctacacctgcgtctcagagcccaaagaagccaccagccaaggacccactcgctgatctgaacattaaggattttctatag

SEQ ID NO: 84943 - DNA, 456 bp, Artificial Sequence
  derived and/or modified sequence
atgtccggtcagactctgacggataggatcgctgccgcccagtattcagtgactggtagcgccgtcgctcgcgcagtgtgtaaggctacaacccacgaagtcatggggcccaagaaaaaacatctggactacctcatccaggcaacaaatgaaactaacgttaacatcccccagatggcagacaccttattcgagagggcaaccaacagttcgtgggtggtggtgttcaaagcattagtaaccacacatcacctcatggtgcacgggaacgagcgtttcatccagtacctagctagtcggaacacactgttcaatttaagcaatttcctggacaaatccgggagtcacggttatgacatgagtacgtttatccgcagatactccaggtacctgaacgaaaaggctttcagttacaggcaaatggcctttgattttgctagagttaagaagggctag

SEQ ID NO: 84944 - DNA, 459 bp, Artificial Sequence
  derived and/or modified sequence
atgtcgggtcagacactgacggacaggattgccgccgcccaatactccgttactggctcagcagtagctcgcgcagtatgtaaagcaaccactcacgaggtgatgggtcccaaaaaaaaacatctggactatctaattcaggccaccaatgagacaaatgtgaacatcccgcaaatggccgatactctcttcgagagggctacgaatagcagttgggtggtagttttcaaagcactcgtcacaacccaccatctcatggtccatggcaatgagcggtttattcagtatcttgcctcccgcaatacactgttcaacctgagcaacttcctcgacaaaagcgggtcccatgggtacgatatgtctacctttatcagacgttacagcaggtatcttaacgagaaggcattctcataccgtcaaatggccttcgacttcgcgagggtcaagaaaggggcgtag

SEQ ID NO: 84945 - DNA, 201 bp, Artificial Sequence
  derived and/or modified sequence
atgtccggccagactctgaccgataggattgctgccgcgcagtactctgtgacaggatccgcagtagcccgcgcagtttgcaaagctaccacccacgaagtgatgggcccaaaaaagaaacacctggactacttgatccaggcaaccaatgaaactaatgttaatatcccccagatggctgacaccctctttgagcgttag

SEQ ID NO: 84946 - DNA, 1803 bp, Artificial Sequence
  derived and/or modified sequence
atgtcggggcagaccctgaccgaccggatcgctgctgcacaatacagtgtgaccggatctgctgtggctcgagctgtgtgtaaggccacaacccacgaggtgatggggcctaaaaaaaaacacttggactatcttattcaggctactaatgaaacaaatgtgaacataccacaaatggcggacactcttttcgagagagcaaccaactcatcatgggttgtggtttttaaggccctggtgactactcatcacctgatggttcatgggaatgaaaggtttatccagtacctcgcttctagaaacacactgtttaatctgagtaacttccttgacaaatccggcagccatgggtacgacatgagtaccttcatacggcgttacagtaggtatctgaatgagaaggcgttttcataccgccagatggcctttgatttcgcccgtgtcaaaaagggcgctgacggcgttatgagaactatggcaccagagaagctgttgaagtccatgcctatactgcaagggcagattgatgcactgctggagttcgatgtacaccccaacgaactgacaaatggcgtaatcaacgctgccttcatgttactcttcaaagacctgataaagctgtttgcttgttataatgatggggtgatcaacctgctggagaagtttttcgaaatgaaaaagggacaatgtaaagatgctctggagatctacaaacggttcttgaccaggatgacacgcgttagcgagttcctgaaagtcgctgaggcgccgtcttcactgatggagaccctagagcagcacctcaataccttagagggaaagaagccagggaacaaaagcggagcccctagccccctgagcaaatctagtccagcgacaaccgtgactagcccaaacagtacaccagccaaaaccatcgataccagccctcctgttgacttgttcgctacagcgagcgcggcggtccccgtcagtaccagcaagccatcgtccgacttgttagatcttcagcctgacttctccagcggcggcgctgctgccgcagcggcccctgcccctccaccacctgcaggaggtgcaacagcgtggggaggctttggtggctcctttatggcgccatctccgagtcccgtcacacccgcccaaaacaatttgctccagcccaatttcgaggccgctttcgggacaactcctagcaccagcagcagcagctcttttgacccatccgtttttgatggtctgggcgatcttttgatgccgacaatggctcctgctggacaacctgcccctgtctctatggtgcctccatcacctgctatggccgcctcaaaagctcttggcagcgatctagatagtagtctcgcctcactggtaggcaatcttggaatatcaggaactaccaccaaaaagggagaccttcaatggaatgcaggtgagaagaagcttaccggaggggccaattggcagccaaaggtggctcccgcgacctggtccgccggcgtgccacccagcgcccctctgcaaggcgctgtgcctccaacctcctctgttccacctgtggccggcgcccctagcgtcgggcagccaggtgcaggcttcggcatgccaccggccggaaccggcatgccgatgatgccgcaacagcctgtgatgtttgcacagccaatgatgcggccacctttcggcgccgccgctgtgcctgggacacagctttctccaagtccaacacccgcctcacagagccctaagaagccccccgctaaggaccccctagcggacttgaacatcaaagatttcctgtag

SEQ ID NO: 84947 - DNA, 354 bp, Artificial Sequence
  derived and/or modified sequence
atgagcgggcaaacattaaccgaccggatcgcagctgcacaatactccgtgacggggtctgccgtagcaagagctgtgtgtaaagccacaacacacgaagtaatgggtcccaagaagaaacacctggactatctgattcaggctacaaacgaaactaacgttaatatcccccagatggccgatacactgttcgaacgggcaaccaattccagctgggtagtggtatttaaagctctcgtcaccacacatcaccttatggtgcacggaaacgaacggttcatccaatatttggcctctaggaataccttattcaatctatctaatttcctcgacaagtctggcagccacggctag

SEQ ID NO: 84948 - DNA, 177 bp, Artificial Sequence
  derived and/or modified sequence
atgagcggccagaccctgacagacagaattgctgctgcccagtacagcgtgacaggcagcgctgtggcccgggctgtgtgcaaggccaccacccatgaggtgatgggccccaagaagaagcacctggactacctgcagaccttcttccagcaggtgctgcccaactttgagatctag

SEQ ID NO: 84949 - DNA, 450 bp, Artificial Sequence
  derived and/or modified sequence
atgagcggccagaccctgacagacagaattgctgctgcccagtacagcgtgacaggcagcgctgtggcccgggctgtgtgcaaggccaccacccatgaggtgatgggccccaagaagaagcacctggactacctgatccaggccaccaatgagaccaacgtgaacatcccccagatggctgacaccctgtttgagcgggccaccaacagctcctgggtggtggtgttcaaggccctggtgaccacccaccacctgatggtgcacggcaatgaacgcttcatccagtacctggccagcaggaacaccctcttcaacctgagcaacttcctggacaagagcggcagccacggctatgacatgagcaccttcatccgccgctacagccgctacctgaatgagaaggccttctcctaccggcagatggcctttgattttgcccgggtgaagtag

SEQ ID NO: 84950 - DNA, 1803 bp, Artificial Sequence
  derived and/or modified sequence
atgagcggccagaccctgacagacagaattgctgctgcccagtacagcgtgacaggcagcgctgtggcccgggctgtgtgcaaggccaccacccatgaggtgatgggccccaagaagaagcacctggactacctgatccaggccaccaatgagaccaacgtgaacatcccccagatggctgacaccctgtttgagcgggccaccaacagctcctgggtggtggtgttcaaggccctggtgaccacccaccacctgatggtgcacggcaatgaacgcttcatccagtacctggccagcaggaacaccctcttcaacctgagcaacttcctggacaagagcggcagccacggctatgacatgagcaccttcatccgccgctacagccgctacctgaatgagaaggccttctcctaccggcagatggcctttgattttgcccgggtgaagaagggagcagatggagtgatgaggaccatggcccctgagaagctgctgaagtccatgcccatcctgcagggccagattgatgccctgctggagtttgatgtgcaccccaatgagctgaccaacggggtcatcaatgctgccttcatgctgctcttcaaggacctgatcaagctgtttgcctgctacaatgatggagtcatcaacctgctggagaagttctttgagatgaagaagggccagtgcaaggatgccctggagatctacaagcgcttcctgaccaggatgaccagggtgtctgagttcctgaaggtggccgaggcccccagcagcctgatggagaccctggagcagcacctgaacaccctggagggcaagaagccaggcaacaagagcggggcccccagccccctgagcaagagcagccctgccaccaccgtgaccagccccaacagcaccccagccaagaccatcgacaccagcccccctgtggacctgtttgccacagccagcgctgctgtgcctgtgtccaccagcaagcccagcagtgacctgctggacctgcagcctgacttcagcagcggcggcgctgctgctgctgctgccccagcccctcctcctcctgctggaggagccacagcctggggcggctttggaggcagcttcatggcccccagccccagccctgtgaccccagcccagaacaacctgctgcagcccaactttgaggccgccttcggcaccacccccagcaccagcagcagcagcagctttgaccccagcgtgtttgatggcctgggggacctgctgatgcccaccatggccccagctggccagcctgcccctgtgtccatggtgccccccagccctgccatggccgccagcaaggccctgggcagtgacctggacagcagcctggccagcctggtgggcaacctgggcatcagcggcaccaccaccaagaagggggacctgcagtggaatgctggggagaagaagctgactggaggagccaactggcagcccaaggtggccccagccacctggagcgctggggtgccccccagcgcccccctgcagggcgctgtgccccccaccagctctgtgccccctgtggccggggcccccagcgtgggccagcctggagctggcttcggcatgcccccagctggcaccggcatgcccatgatgccccagcagcctgtgatgtttgcccagcccatgatgaggcccccatttggagctgctgctgtgcccggcacccagctgagccccagccccaccccagccagccagagccccaagaagcccccagccaaggaccccctggccgacctgaacatcaaggacttcctgtag

SEQ ID NO: 84951 - DNA, 456 bp, Artificial Sequence
  derived and/or modified sequence
atgagcggccagaccctgacagacagaattgctgctgcccagtacagcgtgacaggcagcgctgtggcccgggctgtgtgcaaggccaccacccatgaggtgatgggccccaagaagaagcacctggactacctgatccaggccaccaatgagaccaacgtgaacatcccccagatggctgacaccctgtttgagcgggccaccaacagctcctgggtggtggtgttcaaggccctggtgaccacccaccacctgatggtgcacggcaatgaacgcttcatccagtacctggccagcaggaacaccctcttcaacctgagcaacttcctggacaagagcggcagccacggctatgacatgagcaccttcatccgccgctacagccgctacctgaatgagaaggccttctcctaccggcagatggcctttgattttgcccgggtgaagaagggctag

SEQ ID NO: 84952 - DNA, 459 bp, Artificial Sequence
  derived and/or modified sequence
atgagcggccagaccctgacagacagaattgctgctgcccagtacagcgtgacaggcagcgctgtggcccgggctgtgtgcaaggccaccacccatgaggtgatgggccccaagaagaagcacctggactacctgatccaggccaccaatgagaccaacgtgaacatcccccagatggctgacaccctgtttgagcgggccaccaacagctcctgggtggtggtgttcaaggccctggtgaccacccaccacctgatggtgcacggcaatgaacgcttcatccagtacctggccagcaggaacaccctcttcaacctgagcaacttcctggacaagagcggcagccacggctatgacatgagcaccttcatccgccgctacagccgctacctgaatgagaaggccttctcctaccggcagatggcctttgattttgcccgggtgaagaagggggcctag

SEQ ID NO: 84953 - DNA, 201 bp, Artificial Sequence
  derived and/or modified sequence
atgagcggccagaccctgacagacagaattgctgctgcccagtacagcgtgacaggcagcgctgtggcccgggctgtgtgcaaggccaccacccatgaggtgatgggccccaagaagaagcacctggactacctgatccaggccaccaatgagaccaacgtgaacatcccccagatggctgacaccctgtttgagaggtag

SEQ ID NO: 84954 - DNA, 354 bp, Artificial Sequence
  derived and/or modified sequence
atgagcggccagaccctgacagacagaattgctgctgcccagtacagcgtgacaggcagcgctgtggcccgggctgtgtgcaaggccaccacccatgaggtgatgggccccaagaagaagcacctggactacctgatccaggccaccaatgagaccaacgtgaacatcccccagatggctgacaccctgtttgagcgggccaccaacagctcctgggtggtggtgttcaaggccctggtgaccacccaccacctgatggtgcacggcaatgaacgcttcatccagtacctggccagcaggaacaccctcttcaacctgagcaacttcctggacaagagcggcagccacggctag

SEQ ID NO: 84955 - DNA, 177 bp, Artificial Sequence
  derived and/or modified sequence
atgagcggccagaccctgaccgaccggatcgccgccgcccagtactccgtgacagggagcgccgtggcgcgcgcagtgtgcaaagccacaactcacgaggtgatgggacccaagaaaaagcaccttgattacttgcagactttttttcaacaggtgctcccgaatttcgagatttag

SEQ ID NO: 84956 - DNA, 450 bp, Artificial Sequence
  derived and/or modified sequence
atgagcggccagaccctgaccgaccggatcgccgccgcccagtactccgtaacaggtagtgccgtggcccgggccgtctgtaaagcgacaacccacgaggttatgggtcccaagaagaagcatctcgactacttgatacaggcaacgaatgaaacaaacgtgaatataccccaaatggccgacaccctgttcgagcgggcgacgaattccagttgggtggtcgtgttcaaagcactcgtgacaacccaccacctaatggtacatggcaatgaaagattcatacagtacctagctagccgcaacactcttttcaacctgtccaatttcctcgacaagtcagggagccatggctacgacatgagtacatttattagaagatatagtcgttaccttaatgagaaagcttttagttatagacagatggcattcgatttcgccagagttaaatag

SEQ ID NO: 84957 - DNA, 1803 bp, Artificial Sequence
  derived and/or modified sequence
atgagcggccagaccctgaccgaccggatcgccgccgcccagtactccgttaccgggtcggccgtggctcgagccgtgtgcaaagcgactacccacgaggtcatgggtcccaaaaagaagcaccttgattacctgatacaggctaccaacgaaacaaacgttaatatccctcagatggctgatactctgttcgaacgtgctaccaattcaagttgggtggttgtcttcaaggccctggttactacccaccatttgatggtacatggcaacgaacggttcattcagtacctggccagtcgcaataccttattcaacctatcaaactttctggataagagtgggtctcacggatatgacatgagcacattcatcagacgttattctcggtacctaaatgagaaggctttcagctatcggcagatggcgtttgatttcgcgcgcgtgaagaagggcgctgacggggtcatgaggactatggcacccgaaaagctgttgaaaagcatgcccatcctccagggacagatcgacgcacttctcgagtttgacgtgcaccccaatgagttaactaacggagttattaatgccgccttcatgctgttgtttaaggatctgatcaaactgttcgcttgttataatgacggcgttatcaacctgctggagaaattcttcgaaatgaagaaagggcagtgcaaggatgcgctagagatttataaacggttcctcacccggatgacccgcgtgtccgagttcctgaaggttgctgaagcccccagcagcctgatggaaaccctggagcagcatctgaatacattagaaggtaagaaacccggaaacaagtcaggagctccctccccgttgtctaagtcctcccctgcaacaacggtgacgtcccctaatagtacccctgccaaaacgatcgatacttctcccccagtcgacctgttcgccaccgcctccgcggcagtcccagtatccacttccaaacccagctctgatttattggatcttcagcctgacttttctagcgggggcgctgccgccgccgctgcgcccgctcctcctcccccagctgggggagccaccgcatggggggggtttggcggctcatttatggcacctagtccatctcccgtgacacccgctcaaaacaatttattgcaaccaaactttgaggccgcgtttggtacaacgccaagcacctcaagttctagttcatttgatccttccgtatttgacggccttggcgatttactcatgccgactatggcacctgcaggacagccagcaccggtcagcatggttccccctagtcctgcaatggccgcttccaaggcactcggatcagatctggatagctctctggcatctctggtaggaaatttgggcataagcggaaccaccacaaagaaaggggatctgcagtggaatgcaggcgagaagaaactgacagggggcgccaactggcagcccaaggtggcacctgcgacatggagtgcgggcgtccccccttctgcacccttgcagggcgctgtgccaccgaccagttctgtcccaccggtggcgggagccccatcagtggggcaacccggagccggctttggtatgccccccgccggcactggcatgcctatgatgccccaacagcctgtcatgtttgcccaacctatgatgagacccccattcggtgcggctgctgttcccggaactcagttatctccttctccgactccagctagtcaaagccccaaaaaacctccggctaaagaccctctggccgaccttaacatcaaagattttctatag

SEQ ID NO: 84958 - DNA, 456 bp, Artificial Sequence
  derived and/or modified sequence
atgagcggccagaccctgaccgaccggatcgccgccgcccagtactctgtgactgggagtgccgtggcccgagctgtatgcaaagctacaacacatgaggtgatgggacccaaaaaaaaacatctggattacctgattcaggcaaccaacgaaaccaatgtgaacatccctcagatggcggacacattgttcgaaagagctactaactcaagttgggtcgtagtgttcaaagccctcgtcacaacccaccacctgatggtgcacggcaatgagcgatttattcagtatctggcatcccggaacaccctcttcaatctcagcaatttcttggacaaaagcggctcccatggttacgatatgtcaactttcatcagaaggtactctcgttacctcaacgaaaaagcgttctcatatcggcagatggcctttgatttcgctagagtcaagaaggggtag

SEQ ID NO: 84959 - DNA, 459 bp, Artificial Sequence
  derived and/or modified sequence
atgagcggccagaccctgaccgaccggatcgccgccgcccagtactccgtgaccggcagcgccgtggctcgcgccgtctgcaaagctactacccatgaggtgatgggtccaaagaaaaagcatctggattatcttatacaggctacaaatgagaccaacgttaatatcccccagatggcggatacattatttgagagggcaacgaactcatcttgggtggtcgtgtttaaagccctcgtgacaacacatcacctgatggtccatggaaacgagcgatttattcagtatctggcgtctaggaacacactgtttaatctgtcaaatttcttagataagagcggatctcacggatatgacatgagtacctttatacggcggtattctcgctatctgaacgagaaggcattcagttaccgtcaaatggcatttgactttgcaagggttaagaaaggagcctag

SEQ ID NO: 84960 - DNA, 201 bp, Artificial Sequence
  derived and/or modified sequence
atgagcggccagaccctgaccgaccggatcgccgccgcccagtacagcgtcactgggtcggcggttgcgcgggccgtttgtaaagccacaacacacgaagtcatgggccctaagaagaagcatctggactacttgattcaagcgaccaacgagaccaatgtgaatatcccccaaatggccgacaccctgttcgaaagatag

SEQ ID NO: 84961 - DNA, 1803 bp, Artificial Sequence
  derived and/or modified sequence
atgagcggccagaccctgaccgaccggatcgccgccgcccagtacagtgttactggcagtgctgtcgctagggcagtgtgtaaagccactacacatgaggttatgggcccaaaaaagaaacatttggactatctgattcaagccacaaatgagactaacgtgaacatacctcagatggctgacactctcttcgagagagccaccaatagtagctgggtcgtggtcttcaaggccctggtgacaacccatcacttaatggtgcacggcaatgaacgttttatccagtatctggcctcacggaacacactttttaatctttcaaatttcctggacaagtctgggtcacacgggtacgatatgtctaccttcattaggaggtacagccggtatctgaatgaaaaggccttcagctaccgacagatggcattcgattttgccagggtgaagaaaggagcggatggagtgatgaggactatggctcctgaaaagctgctcaagtctatgccaattctccaaggccagatagatgcgcttctggagtttgacgtacatcctaatgagttgaccaatggagttatcaacgctgcgttcatgttgttgtttaaggatctgattaaactgtttgcatgttataatgacggcgtcatcaatcttctggaaaagttctttgagatgaaaaaggggcagtgtaaggatgctctggagatctacaaacgcttcctcacacgcatgactcgggtttccgaatttctgaaggtcgcagaagcaccatcatcgctgatggagacactggaacagcacctcaacactctggaaggtaagaaaccgggaaataaatccggcgcgccgagcccactgtccaagtcttcacctgcgactaccgtgacaagcccaaacagcactcctgcgaaaaccatcgatacctctccccccgtcgacctgttcgccaccgcctccgccgcggttcccgtatccacctctaagccatccagtgatctcctggacctccaaccagattttagcagcggtggagcagctgccgccgccgcaccagctccacctcctcccgccggcggggctaccgcctggggcggattcggtggctcttttatggctccttctccttctcccgtgacacccgcgcagaataatcttctacagcccaactttgaagccgcctttggaaccacaccctcgactagctcctcttcctcctttgacccctccgtcttcgatgggctgggcgatctgcttatgcccaccatggccccagccggacagccagcccccgtcagtatggtacctcccagccccgccatggcagcttcaaaggctctgggatctgatctggactcttcgctcgccagcctcgtgggaaatctgggtatctcaggtacgactacaaagaagggggatctccagtggaatgcgggcgagaaaaaactcacaggaggggctaactggcaacccaaggtcgcccccgcaacttggtccgccggcgtgccgccgtctgccccattgcaaggggccgtgccaccaacaagctccgtccctcccgtggcgggagcaccaagcgtgggccagcctggggccggcttcggtatgccaccggctgggactggaatgcccatgatgcctcaacagcccgtcatgtttgcacagccaatgatgaggccaccctttggcgccgccgccgtccccgggactcagctctcccccagtccaacccctgcaagccagtcacccaagaaaccgcccgccaaggacccactcgctgacctgaacatcaaagattttctatag

SEQ ID NO: 84962 - DNA, 354 bp, Artificial Sequence
  derived and/or modified sequence
atgagcggccagaccctgaccgaccggatcgccgccgcccagtactcagtgactggttccgctgtggcccgggccgtatgtaaagcaaccacacacgaggttatgggaccaaaaaaaaagcacctggactatctgatacaggctactaatgagacaaatgtgaacattccccaaatggccgacacactgtttgagcgggctaccaattccagctgggtggtggttttcaaagcactagtgaccacccatcacctgatggtgcatggaaatgagcggttcattcagtatctggcctcgaggaacactctgttcaacctcagcaactttctcgataagtccggcagtcacggctag

SEQ ID NO: 84963 - DNA, 177 bp, Artificial Sequence
  derived and/or modified sequence
atgtcaggtcagacgctgactgacaggatagcagccgcacaatattctgtcacagggtccgcagtagccagggcagtgtgtaaggctactacgcatgaggtgatgggaccaaagaaaaaacatctggactacctgcagacattttttcagcaggtcctgccgaatttcgagatctag

SEQ ID NO: 84964 - DNA, 450 bp, Artificial Sequence
  derived and/or modified sequence
atgtctggacaaacactgactgacagaatcgcagctgctcagtatagcgtgacagggtccgccgtcgcccgagcagtctgcaaggcaaccacacatgaggtcatgggccctaagaaaaagcaccttgactaccttatccaagctacaaacgagacaaatgtcaacattccccagatggctgacacgctctttgagagggcaactaactcctcgtgggtcgtcgtgtttaaagccctggtcacaacgcatcatttgatggttcatggtaatgagaggttcatccaataccttgcgtctcggaatactttgtttaacttatcaaattttcttgacaagtctggttctcatggctacgatatgtcaaccttcataaggagatacagcagatatctcaacgagaaggccttttcttaccgccagatggccttcgactttgctcgcgtgaagtag

SEQ ID NO: 84965 - DNA, 1803 bp, Artificial Sequence
  derived and/or modified sequence
atgagcggccagaccctcacagacagaatcgctgccgctcagtatagtgtgaccggttcagccgtcgcacgggctgtctgtaaggccaccacacatgaggtgatggggccaaagaaaaaacacctggattacctaattcaggccaccaatgagacaaatgtgaatattccacagatggctgacaccttgtttgagcgggctacaaatagttcctgggtcgttgttttcaaagccctcgtaacaacgcaccacctgatggtgcatggtaatgaacgattcatccagtatctggctagccgtaacaccctgtttaatctgagcaatttcttggataagtccggctctcatggatatgatatgagcaccttcatcaggcgatactcccggtatctcaatgaaaaggccttttcttaccgccagatggcttttgattttgcacgcgtgaaaaagggcgcagatggggtgatgagaaccatggcaccggagaagctgctgaaatcaatgccaattctgcagggccaaattgacgctctgctggagtttgacgtacatccaaacgagcttacaaatggcgttatcaacgccgctttcatgctgctgtttaaagatctgattaaattgtttgcatgctataacgatggggtcatcaacctcctagagaaatttttcgaaatgaaaaaagggcagtgcaaggacgcccttgagatatataagcgttttctgactcgcatgacaagagtgtcagagttccttaaagtcgccgaggctcctagtagtttgatggagacacttgagcaacatctcaacaccctggagggaaagaaaccaggcaacaagtccggtgccccatctcccctgtccaaaagctccccagccactacagtgacctctccgaactcgacccccgctaagaccattgatacatcaccccctgtggacctctttgcgaccgcctcagccgcagtccccgtatctacgtctaagccctcaagcgatctcctagatctgcagccagatttctccagcggcggagccgcagcggcagccgctccagctcctcctcctccagccggaggggcaacagcttggggcggattcggcggtagctttatggcaccaagcccatctccggtaacaccggcacagaataacttactacaacctaacttcgaagccgcttttgggactacacccagtacttcttcaagctcaagctttgacccgagcgttttcgatgggctgggtgatctgttgatgccgacgatggcgccagctggacagccggctcctgtaagcatggtccctcctagtcctgctatggctgcatccaaagcactcgggtctgacttagatagttccctggcatccctggtggggaacctcggcatctccggcaccaccactaagaagggtgacctccaatggaatgcaggcgagaagaagctaactgggggagcaaactggcagcccaaggttgcgcctgccacatggtccgccggagttcctccgtcagcccctctgcagggtgccgtcccgcctacctctagtgtgccccctgtagccggtgccccatctgttggccagcccggagcaggctttgggatgcccccagccggaaccggaatgcctatgatgccacagcagcctgtcatgttcgctcagcctatgatgcgaccccctttcggtgctgccgcagtgcccggtactcagctttcaccctcccccacccctgctagtcaaagccctaagaagcccccagccaaggaccccctggccgacttgaacattaaagactttttatag

SEQ ID NO: 84966 - DNA, 456 bp, Artificial Sequence
  derived and/or modified sequence
atgagcgggcagacacttacagataggatcgctgcagcccagtacagtgtcacagggagcgccgtagctcgggcagtatgcaaagctactactcatgaagtgatgggaccaaagaagaaacacttggattatcttatacaagccacgaatgagacaaacgtgaacatcccccagatggccgatactttatttgagcgtgcgactaactctagctgggttgtggtcttcaaagctctcgtcaccactcatcatctgatggttcacggaaatgagcgatttattcagtacctcgctagtcgcaacaccctattcaacctttccaatttccttgataagtccggaagccatggctacgatatgtccactttcatcaggcggtactccagatatctaaatgagaaggctttctcatatcggcaaatggcgtttgatttcgcacgcgtgaagaaggggtag

SEQ ID NO: 84967 - DNA, 459 bp, Artificial Sequence
  derived and/or modified sequence
atgagcggccagacattaacagaccggattgccgcagcacaatattctgtcacgggttctgctgtggcccgtgcggtctgtaaagccaccacccacgaagttatggggccaaagaagaagcatctggactatctcatacaggcgactaacgaaactaatgtgaacattccgcagatggccgacactctcttcgagcgcgcaactaactccagttgggttgttgttttcaaggccctcgtgactacacatcatttaatggttcatgggaatgaacggttcatccaatacctggcaagccgtaatacccttttcaacctttctaactttcttgacaagagcggctcccatggatatgacatgtctacctttatcaggcggtacagccgctacctgaacgagaaagcctttagttatagacagatggccttcgattttgccagggtcaagaagggcgcttag

SEQ ID NO: 84968 - DNA, 201 bp, Artificial Sequence
  derived and/or modified sequence
atgagcggccagaccttgactgatcgaatcgctgccgctcagtactctgtgacagggagtgccgtcgctcgggctgtttgcaaggccactactcacgaggtgatggggccaaaaaagaagcacttggattatctaattcaggccacaaatgagacaaacgttaacataccccagatggctgatacattgttcgagagatag

SEQ ID NO: 84969 - DNA, 1803 bp, Artificial Sequence
  derived and/or modified sequence
atgagtggccagactctgaccgatcggatcgccgcagcacagtatagcgtaaccggttcagcggtggcgagggctgtgtgcaaggccacgacccatgaggtgatgggaccaaagaaaaagcatctagactatctgatccaggccaccaacgagactaacgtcaatatcccacagatggccgacacgctgtttgagcgagctaccaatagcagctgggtggtcgtatttaaggccctggtgaccacacaccatctcatggtgcatggaaacgagcggtttattcagtacctggcatcaagaaatacactcttcaacctcagcaattttctggacaaatccggaagccacggctacgacatgagcacctttatcaggaggtacagccggtacctgaatgaaaaagcattctcttaccgtcagatggcctttgacttcgcaagggtgaagaagggcgcagatggcgtgatgcgcaccatggcacccgaaaaactcctgaagagtatgccgatcctgcagggtcaaatcgatgctttgctggaattcgacgttcaccctaacgagctgactaatggagttattaacgccgctttcatgcttctgtttaaagatctcattaaactgttcgcctgttataacgacggtgtcataaatttgctcgaaaaattttttgaaatgaaaaaaggtcaatgcaaggatgcccttgagatctacaaacggtttctcacccggatgacccgggtctccgaattcttaaaagtggctgaagctccatcctcgctgatggagactctggaacaacacctcaatactctggagggaaagaagcctggtaacaagagcggggcacctagtccattatccaagtcttcacccgcaactactgtgaccagtcctaacagcacccccgcaaagaccatcgacacatccccaccagtcgacctgtttgccactgctagtgccgctgtgccagtgtccactagtaagccaagtagcgacctcctggacctacagcccgatttcagctccggcggagcagctgctgccgcagcccctgctcccccaccaccagcgggtggggcaaccgcttgggggggatttgggggatcctttatggccccttctccttctcctgtgacacctgcacaaaataaccttctgcagcccaacttcgaggcagcgtttggcaccacaccctcaacgtccagttctagctccttcgacccgagtgtgttcgatgggctcggcgacctcctgatgcctactatggcgccagctgggcagcctgcgcctgtttccatggtcccacccagtcccgctatggccgcttctaaagcattggggtctgatctggatagctccctggcttctctggtaggcaacttggggatctcgggaactaccacaaagaagggcgacctgcagtggaatgctggcgaaaaaaagctcacagggggtgcgaactggcagcccaaggtcgccccagccacatggtccgcaggcgtcccaccatctgccccactgcagggcgcagttccccctacttcttcggtgcccccagttgcaggtgcaccaagcgttggtcagcctggggctggttttggaatgcccccagctgggactggcatgcccatgatgccacaacaacccgtaatgtttgcccagccaatgatgcgcccacccttcggggcagccgcagtgcctggaactcaactgagcccctcccccacaccagccagtcaatcgccaaaaaaaccccctgctaaggaccctctggcagaccttaacattaaggactttctgtag

SEQ ID NO: 84970 - DNA, 354 bp, Artificial Sequence
  derived and/or modified sequence
atgagtggacagacccttacggatcgcatcgccgctgcccagtactccgtaacagggtctgctgttgcccgtgccgtctgtaaggccactacccatgaggtaatgggacctaagaaaaagcatttggactacttaatccaagctacgaacgagacaaacgtcaacatcccccagatggcagataccctgtttgaacgggctacgaacagctcatgggtggttgtattcaaagctctcgtgaccactcaccacctgatggttcacggcaacgagcgatttatacagtacttggcatcacgcaacactctatttaacctcagtaacttcctagacaaatccggttctcacggctag

SEQ ID NO: 84971 - DNA, 546 bp, Artificial Sequence
  derived and/or modified sequence
atccgatgcattccccgaagcctgcgggctgctaggaggaaagtctgctgaggtgggagatgggcaccgaagaggaggcggtagacgcgaccacagaagatgtcgggccaaacgctcacggatcggatcgccgccgctcagtacagcgttacaggctctgctgtagcaagagcggtctgcaaagccactactcatgaagtaatgggccccaagaaaaagcacctggactatttgatccaggctaccaacgagaccaatgttaatattcctcagatggccgacactctctttgagcgggcaacaaacagtagctgggtggttgtgtttaaggctttagtgacaacacatcatctcatggtgcatggaaatgagagatttattcaatatttggcttctagaaatacactattcaatctcagcaattttttggacaaaagtggatcccatggttatgatatgtctaccttcataaggcgctatagtagatatttgaatgaaaaggctttttcttacagacagatggcctttgattttgccagggtgaag

SEQ ID NO: 84972 - DNA, 3805 bp, Artificial Sequence
  derived and/or modified sequence
gtggtgcgcgagcccagtgcgtgccgggtgcggcgccagcagcggaggggcggcccggcgcccagcggagagccgctggctgggtgggtgtcggcctccccgcctccttcttctccccgccggcttgccggggatgcttgcgcgaggcgccccctcgcctttaagctcccggccccggggggcggtgtgtgtgagtagctgggagggggccgcgaggcgctccgccgagggctcgtccgggtttgtccgccgccgtcacctgactcgtcggaggagccacagctgaggtgggggcggggatggggacgcagctcggagcgctagagagacgcggcggcgctggcagaagaggcggcggcgggcgggtactggcttctggggccaggggccaggggcggtgggcgccgggaccgcggagctgaggagcggggcccggccagggctggagactttgcgcccgggggcaccggggctacgcgcggtcgcacacatccaccggcgcggcttccctcggcggcccgggctccgctcatcctgcggcgggcggcgccgctcaggggcgggaagaggaggcggtagacgcgaccacagaagatgtcgggccaaacgctcacggatcggatcgccgccgctcagtacagcgttacaggctctgctgtagcaagagcggtctgcaaagccactactcatgaagtaatgggccccaagaaaaagcacctggactatttgatccaggctaccaacgagaccaatgttaatattcctcagatggccgacactctctttgagcgggcaacaaacagtagctgggtggttgtgtttaaggctttagtgacaacacatcatctcatggtgcatggaaatgagagatttattcaatatttggcttctagaaatacactattcaatctcagcaattttttggacaaaagtggatcccatggttatgatatgtctaccttcataaggcgctatagtagatatttgaatgaaaaggctttttcttacagacagatggcctttgattttgccagggtgaagaaaggggccgatggtgtaatgaggacaatggctcccgaaaagctgctaaagagtatgccaatactacagggacaaattgatgcactgcttgaatttgatgtgcatccaaatgaactaacaaatggtgtcataaatgcagcatttatgcttcttttcaaagatcttatcaaactttttgcttgctacaatgatggtgttattaacttactcgaaaagttttttgaaatgaagaaaggacaatgtaaagatgctctagaaatttacaaacgatttctaactagaatgacacgagtgtctgaatttctcaaggttgcagaggctcccagcagtcttatggagacgcttgaacagcatctaaatacattagaaggaaagaaacctggaaacaaatctggtgctccctctccattaagtaagtcttctccagccacaactgttacgtctcctaattctacaccagctaaaactattgacacatccccaccggttgatttatttgcaactgcatctgcggctgtcccagtcagcacttctaaaccatctagtgatctcctggacctccagccagacttttcctctggaggggcagcagcagccgcagcaccagcaccaccaccacctgctggaggagccactgcatggggaggatttgggggttctttcatggcgccttccccatctccagtgactccagctcagaataacctgctacagcccaattttgaggcagcttttgggacaacgccttcaacttccagcagcagctcctttgatccatcagtgtttgatggtctaggtgatcttttgatgccaaccatggcaccagctgggcagcctgcacctgtctcaatggtaccacccagtcctgcaatggcagccagcaaagcccttggaagtgatcttgattcatctcttgccagcttagtaggcaatcttggaatttctggtaccacaacaaaaaagggagatcttcagtggaatgctggagagaaaaagttgactggtggagccaactggcagcctaaagtagctccagcaacctggtcagcaggcgttccaccaagtgcacctttgcaaggagctgtacctccaaccagttcagttcctcctgttgccggggccccatcggttggacaacctggagcaggatttggaatgcctcctgctgggacaggcatgcccatgatgcctcagcagccggtcatgtttgcacagcccatgatgaggcccccctttggagctgccgctgtacctggcacgcagctttctccaagccctacacctgccagtcagagtcccaagaaacctccagcaaaggacccattagcggatcttaacatcaaggatttcttgtaaacaatttaagctgcaatatttgtgactgaataggaaaataaatgagtttggagacttcaaataagattgatgctgagtttcaaagggagccaccagtaccaaacccaatacttactcataacttctcttccaaaatgtgtaacacagccgtgaaagtgaacattaggaatatgtactaccttagctgttatccctactcttgaaattgtagtgtatttggattatttgtgtattgtacgatgtaaacaatgaatggatgttactgatgccgttagtgcttttttggacttcacctgaggacagatgatgcagctgttgtgtggcgagctatttggaaagacgtctgtgtttttgaaggtttcaatgtacatataacttttgaacaaaccccaaactcttcccataaattatcttttcttctgtatctctgttacaagcgtagtgtgataataccagataataaggaaaacactcataaatatacaaaactttttcagtgtggagtacatttttccaatcacaggaacttcaactgttgtgagaaatgtttatttttgtggcactgtatatgttaagaaattttattttaaaaaatataaaggttaacgtccataataaatacttctctttgaagctaccttatcaagaacgaaaaatcgtatgggaagaatcccctatttatcactgctatattaaaatatatatattttaattatatttgacaggttttgcatctaaattgacctatttattcattcttgattaaatgcactgaaaagtaaagggtctgtttgtgtcatgttcatgaaaatgcggttagagaggtgctattcaagtgattctgaaggcaccccaaggtatatctgtaatttaaagattactgcaaatatctttactttactgtgggtttttagtacatctgttaatttagtgtttctttgtgtgttttgtagactagtgttcttccatccttcaactgagctcaaagtaggttttgttgtaacattgtgattaggatttaaactaattcagagaattgtatcttttactgtacatactgtattctttaagttttaatttgttgtcatactgtctgtgctgatggcttggcttaagattttgatgcataaatgaggtcactgttgatcagtgttgctagtagcttggcagctcttcataaaagcatattgggttggaaaggtgtttgcctatttttcaaattatttaatagatgtatggtaccatttaaaagtggttgtatctgaatttactgtggggataacatacactgtaatggggaaaaattacctaaaaccaatttcaaaatggctttctttgtatttcagtttaaaaacccagtgcatgtacgccctctgagatgcaataaacaccttgaacaaagaaatgc

SEQ ID NO: 84973 - DNA, 592 bp, Artificial Sequence
  derived and/or modified sequence
atgctgcgactggagcccacgctggggttccgtgacggccctactcacggccaagactccctggaccgcatcgcaggagcggggcttggcgcgttgctggctccgagagaagaggaggcggtagacgcgaccacagaagatgtcgggccaaacgctcacggatcggatcgccgccgctcagtacagcgttacaggctctgctgtagcaagagcggtctgcaaagccactactcatgaagtaatgggccccaagaaaaagcacctggactatttgatccaggctaccaacgagaccaatgttaatattcctcagatggccgacactctctttgagcgggcaacaaacagtagctgggtggttgtgtttaaggctttagtgacaacacatcatctcatggtgcatggaaatgagagatttattcaatatttggcttctagaaatacactattcaatctcagcaattttttggacaaaagtggatcccatggttatgatatgtctaccttcataaggcgctatagtagatatttgaatgaaaaggctttttcttacagacagatggcctttgattttgccagggtgaagaaaggg

SEQ ID NO: 84974 - DNA, 842 bp, Artificial Sequence
  derived and/or modified sequence
caggggcggtgggcgccgggaccgcggagctgaggagcggggcccggccagggctggagactttgcgcccgggggcaccggggctacgcgcggtcgcacacatccaccggcgcggcttccctcggcggcccgggctccgctcatcctgcggcgggcggcgccgctcaggggcggggtgagtacccgcggccgtactcggccccctccccgcgccagggtctcgcggggatccgcagaggataatcccagggtgcggagaagggcagcggccgagtgacagctccgcggagcgctccagggcgggcgggggactgggcttcgctgtcagcccggctcctctccaaagccaggaaggaagaggaggcggtagacgcgaccacagaagatgtcgggccaaacgctcacggatcggatcgccgccgctcagtacagcgttacaggctctgctgtagcaagagcggtctgcaaagccactactcatgaagtaatgggccccaagaaaaagcacctggactatttgatccaggctaccaacgagaccaatgttaatattcctcagatggccgacactctctttgagcgggcaacaaacagtagctgggtggttgtgtttaaggctttagtgacaacacatcatctcatggtgcatggaaatgagagatttattcaatatttggcttctagaaatacactattcaatctcagcaattttttggacaaaagtggatcccatggttatgatatgtctaccttcataaggcgctatagtagatatttgaatgaaaaggctttttcttacagacagatggcctttgattttgccagggtgaagaaaggggccg

SEQ ID NO: 84975 - DNA, 525 bp, Artificial Sequence
  derived and/or modified sequence
ggggactgggcttcgctgtcagcccggctcctctccaaagccaggaagggtgaggcgccccaagactccggcgcctccgcagagctcccgggcggcccctgcggcagggatttggaaccggggggaaggggcccgggcgatgggcctcggcgaggctttggagccggcggcgaggaaggaaggggaggcgagggcataacatggcgcaacgctaggataatctccttcgcgactgagggaggacgagccctttgctgcagcagcgcgaggaggaggagggaggcagccagggcttggaagaggaggcggtagacgcgaccacagaagatgtcgggccaaacgctcacggatcggatcgccgccgctcagtacagcgttacaggctctgctgtagcaagagcggtctgcaaagccactactcatgaagtaatgggccccaagaaaaagcacctggactatttgatccaggctaccaacgagaccaatgttaatattcctcagatggccgacactctctttgagcgg

SEQ ID NO: 84976 - DNA, 2168 bp, Artificial Sequence
  derived and/or modified sequence
agtgcgtgccgggtgcggcgccagcagcggaggggcggcccggcgcccagcggagagccgctggctggaagaggaggcggtagacgcgaccacagaagatgtcgggccaaacgctcacggatcggatcgccgccgctcagtacagcgttacaggctctgctgtagcaagagcggtctgcaaagccactactcatgaagtaatgggccccaagaaaaagcacctggactatttgatccaggctaccaacgagaccaatgttaatattcctcagatggccgacactctctttgagcgggcaacaaacagtagctgggtggttgtgtttaaggctttagtgacaacacatcatctcatggtgcatggaaatgagagatttattcaatatttggcttctagaaatacactattcaatctcagcaattttttggacaaaagtggatcccatggttatgatatgtctaccttcataaggcgctatagtagatatttgaatgaaaaggctttttcttacagacagatggcctttgattttgccagggtgaagaaaggggccgatggtgtaatgaggacaatggctcccgaaaagctgctaaagagtatgccaatactacagggacaaattgatgcactgcttgaatttgatgtgcatccaaatgaactaacaaatggtgtcataaatgcagcatttatgcttcttttcaaagatcttatcaaactttttgcttgctacaatgatggtgttattaacttactcgaaaagttttttgaaatgaagaaaggacaatgtaaagatgctctagaaatttacaaacgatttctaactagaatgacacgagtgtctgaatttctcaaggttgcagaggctcccagcagtcttatggagacgcttgaacagcatctaaatacattagaaggaaagaaacctggaaacaaatctggtgctccctctccattaagtaagtcttctccagccacaactgttacgtctcctaattctacaccagctaaaactattgacacatccccaccggttgatttatttgcaactgcatctgcggctgtcccagtcagcacttctaaaccatctagtgatctcctggacctccagccagacttttcctctggaggggcagcagcagccgcagcaccagcaccaccaccacctgctggaggagccactgcatggggaggatttgggggttctttcatggcgccttccccatctccagtgactccagctcagaataacctgctacagcccaattttgaggcagcttttgggacaacgccttcaacttccagcagcagctcctttgatccatcagtgtttgatggtctaggtgatcttttgatgccaaccatggcaccagctgggcagcctgcacctgtctcaatggtaccacccagtcctgcaatggcagccagcaaagcccttggaagtgatcttgattcatctcttgccagcttagtaggcaatcttggaatttctggtaccacaacaaaaaagggagatcttcagtggaatgctggagagaaaaagttgactggtggagccaactggcagcctaaagtagctccagcaacctggtcagcaggcgttccaccaagtgcacctttgcaaggagctgtacctccaaccagttcagttcctcctgttgccggggccccatcggttggacaacctggagcaggatttggaatgcctcctgctgggacaggcatgcccatgatgcctcagcagccggtcatgtttgcacagcccatgatgaggcccccctttggagctgccgctgtacctggcacgcagctttctccaagccctacacctgccagtcagagtcccaagaaacctccagcaaaggacccattagcggatcttaacatcaaggatttcttgtaaacaatttaagctgcaatatttgtgactgaataggaaaataaatgagtttggagacttcaaataagattgatgctgagtttcaaagggagccaccagtaccaaacccaatacttactcataacttctcttccaaaatgtgtaacacagccgtgaaagtgaacattaggaatatgtactaccttagctgttatccctactcttgaaattgtagtgtatttggattatttgtgtattgtacgatgtaaacaatgaatggatgttactgat

SEQ ID NO: 84977 - DNA, 736 bp, Artificial Sequence
  derived and/or modified sequence
gggcgggggactgggcttcgctgtcagcccggctcctctccaaagccaggaagggtgaggcgccccaagactccggcgcctccgcagagctcccgggcggcccctgcggcagggatttggaaccggggggaaggggcccgggcgatgggcctcggcgaggctttggagccggcggcgaggaaggaaggggaggcgagggcataacatggcgcaacgctaggataatctccttcgcgactgagggaggacgagccctttgctgcagcagcgcgaggaggaggagggaggcagccagggcttgggtatccgatgcattccccgaagcctgcgggctgctaggaggaaagtctgctgagaagaggaggcggtagacgcgaccacagaagatgtcgggccaaacgctcacggatcggatcgccgccgctcagtacagcgttacaggctctgctgtagcaagagcggtctgcaaagccactactcatgaagtaatgggccccaagaaaaagcacctggactatttgatccaggctaccaacgagaccaatgttaatattcctcagatggccgacactctctttgagcgggcaacaaacagtagctgggtggttgtgtttaaggctttagtgacaacacatcatctcatggtgcatggaaatgagagatttattcaatatttggcttctagaaatacactattcaatctcagcaattttttggacaaaagtggatcccatgg

SEQ ID NO: 84978 - DNA, 384 bp, Artificial Sequence
  derived and/or modified sequence
atgatctatccgttagacctgttccggaacatcccctggaaacaggggaagtgtttcgcatctctctctcctgaaggggagcgtgccttcgacggaatggagcccctgtgccagccgggagctaggccagcgctccgcgggctgcagcacgcctccgactgctacaggctgttgagtcctccaggcagtggccttgtgggtactaatccatccgtcccggccccttccccacactgcggatgctgtcaggcatggtcaatttcttctttcaccttcaccggacctacgccatttaagataaattcagaccaagctacgccctgtcatctgagatctccagagactatatttcggcagcgggagatctcgaatgaagccttttag

SEQ ID NO: 84979 - protein, 402 aa, Artificial Sequence [sequence omitted]

SEQ ID NO: 84980 - protein, 402 aa, Artificial Sequence
  derived and/or modified sequence
MYTSEEKCNQRTQKRKIYNVCPRKGKKIFIHMHEIIQIDGHIYQCLECKQNFCENLALIMCERTHTGEKPYKCDMCEKTFVQSSDLTSHQRIHNYEKPYKCSKCEKSFWHHLALSGHQRTHAGKKFYTCDICGKNFGQSSDLLVHQRSHTGEKPYLCSECDKCFSRSTNLIRHRRTHTGEKPFKCLECEKAFSGKSDLISHQRTHTGERPYKCNKCEKSYRHRSAFIVHKRVHTGEKPYKCGACEKCFGQKSDLIVHQRVHTGEKPYKCLECMRSFTRSANLIRHQATHTHTFKCLEYEKSFNCSSDLIVHQRIHMEEKPHQWSACESGFLLGMDFVAQQKMRTQTEELHYKYTVCDKSFHQSSALLQHQTVHIGEKPFVCNVSEKGLELSPPHASEASQMS

SEQ ID NO: 84981 - protein, 26 aa, Artificial Sequence
  derived and/or modified sequence
MYTSEEKCNQRTQKRKIYNVCPRKGK

SEQ ID NO: 84982 - DNA, 4800 bp, Artificial Sequence
  derived and/or modified sequence
ggcctcttcccagccagcttgaaagggtttgcgtagccggccttgtgggcccttgaagcgctctgttaaagcgctctgtgggcggcctggccccaactcctctagtctaggcgcacgaagggagttgctcctaggtcttgtccgtgccgggttcgcttttctttccttcccgaagcctggcccttagatctactatcgcagagtctgcggccgccaggaagcccagattcgagtgtccggagagtaaccggaagtgctgtccccaggcctaggggcggcgccggcggctgccagggagaggcaagaattgagtgttgtgaatagttctgaactagagaccttttgaaaccaaaaggaagatggtcttgagtctttcttgttacgaatgctatcttctttgagaagtcaaattgtcaggatcaggaatgtatgttttcttccatctggattctagggttggaaataccaagtaaggaattaacatatatgatgctggaaacttgtagaggctcatgattgaaaggcctgaaacagatgtatcttccaagttcttatcaagaaaatgactgtgagggcaacgatgggtcaagaagaccagcggaaaactccctaggagagagccatagaaaatgtacacttcagaagagaaatgtaatcagagaactcaaaaaaggaaaatatataatgtatgccctcggaagggtaaaaagatttttattcatatgcatgagattattcagatagatggtcatatataccagtgccttgaatgcaagcaaaacttctgtgaaaacttagctcttattatgtgtgagagaacccatactggggagaaaccttataaatgtgatatgtgtgagaaaacctttgtccaaagctcagatcttacttcacaccagaggatccacaattacgagaaaccttataaatgtagcaaatgtgagaagagcttttggcatcacttagcgctttcaggacatcagagaacacatgcaggtaaaaaattctatacatgtgacatttgtggcaagaattttggtcagagttctgatctgcttgtccaccagcgaagccatactggcgagaaaccatatctatgtagtgagtgtgacaaatgcttcagtagaagtacaaacctcataaggcatcgaagaactcacacaggtgagaaaccatttaagtgtctcgagtgtgaaaaagcttttagtgggaaatcagatcttattagccaccagagaactcacactggggaaaggccctacaaatgtaataagtgtgagaaaagttaccgacaccgttcagccttcattgtacataaaagagttcatactggggagaagccctataagtgtggtgcctgtgaaaaatgctttggccagaaatcagaccttatcgtgcaccagagagtccacacaggtgagaagccgtataaatgcctggaatgtatgagaagttttactcggagtgccaacctaattaggcaccaggcaactcacactcacacttttaaatgccttgaatatgaaaaaagctttaactgtagctcagatcttattgtacatcagagaattcacatggaagagaaaccacatcagtggtctgcgtgtgagagtggcttcctcctaggaatggactttgttgcccaacagaaaatgagaactcaaacagaggagctacactataaatacactgtatgtgataaaagcttccaccagagttcagcccttcttcaacatcagacagtacacattggtgaaaaaccgtttgtctgtaatgtgagtgaaaaaggtcttgagcttagccctccccatgcgtcagaagcctcacagatgtcttgaccaggcgagaagctgtaataccaatattaaaaattatttatgtatcagagaactcattaagatgaggacaaatctcagactttgctcagagctcagaattcagtggggaccagagagcctgcaattggaaatatgagaaattctttgcccagagagctgccctaacagaacacttcatcctcactccaacgagaaatctacagatgcccagaggttttgaaaacttaccgtctgagctcaaatttgatcactcacaagaggattcatacaagtgggaaaccttagaaatgcactgagtgtgagagagctttctactaatgctcagcccttctcgttgtaagagaattcacaccggagaacaactttttaaatgccttcagtgtcagttgtgctgcagacagtatgaacatctcattggacctcagaaaacccaccctggggagaagccccagcaagtgtgaaaaaagcttctaacaaaactctgacttacccatcagagaagccatactggtgaaaaattgtatatttgtcttaagtatggcaaaagcattcgttggagagccttacttgggtttgcacccaaaaaaaaaaacccaatctgaggaaagactgcaagtgtctgaatgaagagtgcttgtcaatgatcaactcttgtggtacatcagggaactcacataggtgaaaaaacccatacttaccttgagtctgagaaaacctttggtagaagctcctgtcttatcaggccccaaaaaacctgttctgcagtgagagatttaattgtgggtgagaatctatgtacatataatatgtatgagaagactgttctcatagttagttgactcatatggtagagaggactttacatgaaatcagtatgaaaatagttttttagatacccagaagcttgttctgggagaagctagggtgggtcagagtagacctgatgggtaactcaggtaaagatgcttttcttttatctgaactacttaatgattgctttacttttactttttaaaaaattcagaaatccaataaaggaaaggacggtaaccttatgatagaaggtgtggcatgtgttactgttgggggaaaggagtatattgactttgccttggttgatatttttatgcttgtctaggatgggactagagtgttgatagtaacatggcagccttttgctggcagtgaaatgaacttaagaagctagggagtagctatcctagatcaaaactctcctaatagtttttcctttgcaggaccaatcttataaagaaacagcatactcagctttttacttagtgtcagttgaggcatactctcaaaagttttttcccctaaaatatctttcaagttattactggtatttgaaatttcaagtttagaaattcatttctttttaactcaaagtgcaaatttcatataatgattatgatggttttagtgtccatatttttgtggcttcacttatcatctctttcagcagtagctacccacagtcagctcctagtaaaatggctacaggaaaactgaaagaaaagtttaagcctgagtaggcatagagtaaaaaatgcataatgatgcattattaatataagagtaaggctttttttattttgagtatcctaactccaaacctagtgttcttttcactccattatcctgctgtttatagcaaatcaagacccataatgatacgtctttcatttatttcagttctgccaaggaaagagaaaataccttttaatcccagggaaaggattgcaatcaccacattataaggtatatggcgtggaatgcagaattctaaatactagaagggaaaagtagttggcagattcatcagaggcttaaggataagtacttgtttccaatttaaaagtataattaggattgtctttaatgttctctagaaatactataattaatctagagatctatcaatggtcacatctcagtttttttcttccctgagattcaaagacgtgtaataccaatacttcagattcctatagtatttgggactttgtagactagtgaatagatactttgttgctagtccaaatcctctgattttggtttgatttgtcctagcagatccctgaacttcagagagtattgccatttggattcatggagttggcgaactgctacactgctaccttgtgtatggctctaagctttgatcctaatgactggttgatgatcatgataatattagggccagtgaatatagctcatagtgataataaggattctagggtatttttttttcttttagaaaaagatcctggaagtttatttgatctgacatgtttttgtaatatttagaaatagctcttgtatcataaaaagttgcccagtataagacacacaagatgtattttttttctctggtgaaaatcatgcctatcactagtatatgtttgacatttgtagtatacttaaaatagtattgggtgtgaggcatggtggtgatgaaaagtagtccttacggctacttgttagtcattagagagaacatggagaaggggtcaaagttggtatcattaacagggcaatgacttgacccttctttcaactgatcttactggtagttgtctctagtttttaagtaaattaatgatggaccatcccccaaacagagaactatgggggtatgaaacaaggctgaaggcttttaaccatgggagaaaaaggtgttggtattattcatatagcataacctgaggttggagaggaccacttgggagcctgtaaccaaaactagaaggtaacttctgggatggacggaggttcccttgaagcagtgccaacctaaatctacctcaggtaagtagttagattaactttttcaagatttcagaccaaacaagacaacttgtattcagttgatgtattcctatgctttaatgtttttgtttgcccttaattattaaataaacatttgttctgaaaaactcca

SEQ ID NO: 84983 - DNA, 1209 bp, Artificial Sequence
  derived and/or modified sequence
atgtacaccagcgaggagaagtgcaaccagagaacccagaagagaaagatctacaacgtgtgccccagaaagggcaagaagatcttcatccacatgcacgagatcatccagatcgacggccacatctaccagtgcctggagtgcaagcagaacctgtgcgagaacctggccctgatcatgtgcgagagaacccacaccggcgagaagccctacaagtgcgacatgtgcgagaagaccttcgtgcagagcagcgacctgaccagccaccagagaatccacaactacgagaagccctacaagtgcagcaagtgcgagaagagcttctggcaccacctggtgctgagcggccaccagagaacccacgccggcaagaagttctacacctgcgacatctgcggcaagaacttcggccagagcagcgacctgctggtgcaccagagaagccacaccggcgagaagccctacctgtgcagcgagtgcgacaagtgcttcagcagaagcaccaacctgatcagacacagaagaacccacaccggcgagaagcccttcaagtgcctggagtgcgagaaggccttcagcggcaagagcgacctgatcagccaccagagaacccacaccggcgagagaccctacaagtgcaacaagtgcgagaagagctacagacacagaagcgccttcatcgtgcacaagagagtgcacaccggcgagaagccctacaagtgcggcgcctgcgagaagtgcttcggccagaagagcgacctgatcgtgcaccagagagtgcacaccggcgagaagccctacaagtgcctggagtgcatgagaagcttcaccagaagcgccaacctgatcagacaccaggccacccacacccacaccttcaagtgcctggagtacgagaagagcttcaactgcagcagcgacctgatcgtgcaccagagaatccacatggaggagaagccccaccagtggagcgcctgcgagagcggcttcctgctgggcatggacttcgtggcccagcagaagatgagaacccagaccgaggagctgcactacaagtacaccgtgtgcgacaagagcttccaccagagcagcgccctgctgcagcaccagaccgtgagaatcggcgagaagcccttcgtgtgcaacgtgagcgagaagggcctggagctgagccccccccacgccagcgaggccagccagatgagctag

SEQ ID NO: 84984 - DNA, 1209 bp, Artificial Sequence
  derived and/or modified sequence
atgtacacttcggaggagaagtgcaaccagcgaacccaaaagaggaaaatatacaatgtgtgtccccgcaaaggcaagaagatctttatccatatgcacgaaatcattcagattgatggccacatttatcagtgtttggagtgcaagcagaatctctgcgaaaacctggccctgatcatgtgtgagcgaacccacacaggggaaaaaccatataagtgtgacatgtgcgagaaaaccttcgttcagtcaagcgacctgacatcccaccagaggatccataactatgagaagccatacaaatgttctaaatgcgaaaagtccttttggcaccatttggtgctctcaggacatcagagaactcacgcgggaaagaaattttatacttgcgacatctgtggcaagaacttcggtcaatctagtgatctcttagttcatcaaaggagccacactggggagaaaccttacctatgcagcgaatgtgacaagtgtttttcacggtccaccaacttgattcgccacagacggacccacaccggcgagaaaccattcaaatgtttggaatgcgagaaggcttttagcgggaaatccgatttgatcagtcaccagaggacccacacaggtgaacggccctataagtgtaacaagtgcgaaaagagctaccgacaccggtccgcttttatagtgcacaagagggttcacacaggcgaaaaaccatacaaatgcggggcttgcgaaaaatgcttcggccagaagtctgatttgattgtccaccagcgagttcataccggggaaaaaccttataagtgtttggaatgtatgcggagctttacccggtcagcaaacctgatccgccaccaagctacgcatacgcacacatttaagtgtctcgaatatgagaaaagcttcaattgcagtagtgatttgatcgtgcaccaaagaattcatatggaggaaaagcctcatcaatggagtgcttgcgaatcaggctttctgttggggatggactttgtggcacagcaaaagatgagaacccagaccgaagaacttcactataaatacacggtgtgtgataagtccttccatcagagcagcgctcttctgcaacatcagaccgtgcgcatcggggagaagccattcgtgtgtaatgttagcgagaagggtctggaattaagtcctccacacgcctccgaggcaagccagatgtcttag

SEQ ID NO: 84985 - DNA, 1209 bp, Artificial Sequence
  derived and/or modified sequence
atgtacaccagcgaggagaagtgcaaccagaggacccagaagaggaagatctacaacgtgtgccccaggaagggcaagaagatcttcatccacatgcatgagatcatccagattgatggccacatctaccagtgcctggagtgcaagcagaacctgtgtgagaacctggccctgatcatgtgtgagaggacccacactggagagaagccctacaagtgtgacatgtgtgagaagacctttgtgcagagcagtgacctgaccagccaccagaggatccacaactatgagaagccctacaagtgcagcaaatgtgagaagagcttctggcaccacctggtgctgagcggccaccagaggacccacgccggcaagaagttctacacctgtgacatctgtgggaagaactttggccagagcagtgacctgctggtgcaccagaggagccacactggagagaagccctacctgtgcagtgaatgtgacaagtgcttcagccgcagcaccaacctgatccgccacaggaggacccacactggagagaagcccttcaagtgcctggagtgtgagaaggccttcagcggcaagagtgacctgatcagccaccagaggacccacactggagagcggccctacaagtgcaacaagtgtgagaagagctaccgccacaggtctgccttcatcgtgcacaagagggtgcacactggagagaagccctacaagtgtggggcctgtgagaagtgcttcggccagaagagtgacctgattgtgcaccagagggtgcacactggagagaagccctacaagtgcctggagtgcatgaggagcttcaccaggtctgccaacctgatccgccaccaggccacccacacccacaccttcaagtgcctggagtatgagaagagcttcaactgcagcagtgacctgattgtgcaccagaggatccacatggaggagaagccccaccagtggagcgcctgtgagagcggcttcctgctgggcatggactttgtggcccagcagaagatgaggacccagacagaggagctgcactacaagtacacagtgtgtgacaagagcttccaccagagcagcgccctgctgcagcaccagacagtgcgcatcggggagaagccctttgtgtgcaatgtgtctgagaagggcctggagctgagccccccccacgccagcgaggccagccagatgtcctag

SEQ ID NO: 84986 - DNA, 1209 bp, Artificial Sequence
  derived and/or modified sequence
atgtacaccagcgaggagaagtgcaaccagcggacccagaagcggaaaatctacaatgtgtgcccccgaaaggggaagaagatcttcatccatatgcacgaaattatacaaatcgacggacacatctaccagtgcctagagtgcaagcagaacctgtgcgagaatctcgccctaatcatgtgcgagcgcacccacacaggggaaaaaccatacaaatgcgatatgtgtgagaaaacttttgtccaaagcagcgatttgacctcccaccaacgaatacataactatgaaaaaccgtacaagtgttctaaatgcgagaagtccttctggcaccatctggtgttgtctgggcaccagcggacccatgccggaaagaagttctatacttgcgatatctgcggaaaaaactttgggcagtccagcgatctgctagtgcaccagagaagccatactggcgagaaaccgtatctgtgtagcgagtgtgataagtgcttctctaggtctactaacctgatccgccaccgccgaacccacaccggggaaaaaccctttaaatgtttggaatgcgaaaaggctttcagcggcaaaagcgaccttatttcacatcagcgcactcataccggagagcgcccgtataaatgcaacaagtgtgaaaagagctatagacacaggtcggcttttattgtgcataaacgagttcataccggggaaaagccatacaagtgtggcgcatgcgagaaatgctttggtcagaagagtgacttgattgtccaccaaagggtacacaccggcgagaaaccctacaagtgcctagagtgtatgcggagttttacacggagcgcaaatctgatacggcatcaggctacccacacccacactttcaagtgtttagaatatgagaagagctttaactgttcatcagacttgatagtccaccaacgcatccacatggaagaaaaaccacaccaatggtctgcatgtgagagcggtttcctcctcggtatggactttgtggctcagcagaagatgaggactcagaccgaagagctgcattataaatatacagtgtgtgacaaatctttccatcagtcttccgcgctgctgcagcatcaaaccgtccgcatcggtgagaaacctttcgtgtgtaacgtatccgagaagggactggaattgtctccacctcacgccagcgaggctagtcagatgtcttag

SEQ ID NO: 84987 - DNA, 1209 bp, Artificial Sequence
  derived and/or modified sequence
atgtacaccagtgaagaaaagtgtaaccaacgcacacagaaacgcaaaatttacaatgtatgtcctaggaaaggtaaaaagattttcatccacatgcatgagattatccaaattgatggacacatctatcagtgtctggagtgcaagcagaatctttgtgagaacctggctttgatcatgtgtgaacgtactcacacgggcgagaaaccctacaagtgcgatatgtgcgaaaagacctttgtgcaatctagtgacttaacgagccatcagagaattcataattatgagaagccttacaaatgctcaaagtgtgagaagagcttctggcaccatctggtgctcagtggtcatcagcggacccacgctggcaaaaaattttatacatgtgacatatgcgggaagaacttcggtcagtcctctgatctgttagtacatcagcggagtcatactggtgagaagccctacctttgttctgaatgtgataagtgcttttcaagaagcactaacctcatcaggcacaggaggacacacaccggggagaagccctttaagtgcctggagtgcgaaaaagctttctctggcaagtcagatctgatttctcaccagcggacccacactggcgaacggccttacaagtgcaataagtgtgaaaagagctatcgtcatagatctgccttcattgtgcacaagcgagttcacactggagagaagccctataagtgtggcgcatgtgagaaatgttttggccagaagagcgacctgatcgttcatcagcgtgtgcacactggtgagaaaccgtataaatgtctggagtgtatgcgatccttcacaagatccgccaatctgattcgccaccaggctactcacactcatacatttaaatgtctggagtatgaaaaatcttttaactgctcctctgatctgattgtacatcaacgaatccacatggaggagaagcctcaccagtggagtgcttgcgagtcgggctttctactaggcatggattttgtggcccagcagaagatgcggacccagaccgaggaattacattacaagtacacagtgtgtgataagtcatttcaccagtcttccgctttgttgcagcatcagactgtgcggataggagagaagccttttgtgtgtaacgtgtctgaaaagggattagaactgtccccgcctcacgccagtgaggcatcccagatgtcctag

SEQ ID NO: 84988 - DNA, 2374 bp, Artificial Sequence
  derived and/or modified sequence
atgattgaaaggcctgaaacagatgtatcttccaagttcttatcaagaaaatgactgtgagggcaacgatgggtcaagaagaccagcggaaaactccctaggagagagccatagaaaatgtacacttcagaagagaaatgtaatcagagaactcaaaaaaggaaaatatataatgtatgccctcggaagggtaaaaagatttttattcatatgcatgagattattcagatagatggtcatatataccagtgccttgaatgcaagcaaaacttgtgtgaaaacttagctcttattatgtgtgagagaacccatactggggagaaaccttataaatgtgatatgtgtgagaaaacctttgtccaaagctcagatcttacttcacaccagaggatccacaattacgagaaaccttataaatgtagcaaatgtgagaagagcttttggcatcacttagtgctttcaggacatcagagaacacatgcaggtaaaaaattctatacatgtgacatttgtggcaagaattttggtcagagttctgatctgcttgtccaccagcgaagccatactggcgagaaaccatatctatgtagtgagtgtgacaaatgcttcagtagaagtacaaacctcataaggcatcgaagaactcacacaggtgagaaaccatttaagtgtctcgagtgtgaaaaagcttttagtgggaaatcagatcttattagccaccagagaactcacactggggaaaggccctacaaatgtaataagtgtgagaaaagttaccgacaccgttcagccttcattgtacataaaagagttcatactggggagaagccctataagtgtggtgcctgtgaaaaatgctttggccagaaatcagaccttatcgtgcaccagagagtccacacaggtgagaagccgtataaatgcctggaatgtatgagaagttttactcggagtgccaacctaattaggcaccaggcaactcacactcacacttttaaatgccttgaatatgaaaaaagctttaactgtagctcagatcttattgtacatcagagaattcacatggaagagaaaccacatcagtggtctgcgtgtgagagtggcttcctcctaggaatggactttgttgcccaacagaaaatgagaactcaaacagaggagctacactataaatacactgtatgtgataaaagcttccaccagagttcagcccttcttcaacatcagacagtacgcattggtgaaaaaccgtttgtctgtaatgtgagtgaaaaaggtcttgagcttagccctccccatgcgtcagaagcctcacagatgtcttgaccaggcgagaagctgtaataccaatattaaaaattatttatgtatcagagaactcattaagatgaggacaaatctcagactttgctcagagctcagaattcagtggggaccagagagcctgcaattggaaatatgagaaattctttgcccagagagctgccctaacagaacacttcatcctcactccaacgagaaatctacagatgcccagaggttttgaaaacttaccgtctgagctcaaatttgatcactcacaagaggattcatacaagtgggaaaccttagaaatgcactgagtgtgagagagctttctactaatgctcagcccttctcgttgtaagagaattcacaccggagaacaactttttaaatgccttcagtgtcagttgtgctgcagacagtatgaacatctcattggacctcagaaaacccaccctggggagaagccccagcaagtgtgaaaaaagcttctaacaaaactctgacttacccatcagagaagccatactggtgaaaaattgtatatttgtcttacgtatggcaaaagcattcattggagagccttacttgggtttgcacccaaaaaaaaaaacccaatctgaggaaagactgcaagtgtctgaatgaagagtgcttgtcaatgatcaactcttgtggtacatcagggaactcacataggtgaaaaaacccatacttaccttgagtctgagaaaacctttggtagaagctcctgtcttatcaggccccaaaaaacctgttctgcagtgagagatttaattgtgggtgagaatctatgtacatatgtatgagaagactgttctcatagttagttgactcatatggtagagaggactttacatgaaatcagtatgaaaatagttttttagatacccagaagcttgttctgggagaagctagggcgggtcagagtagacctgatgggtaactcaggtaaagatgcttttcttttatctgaactacttaatgattgctttacttttactttttaaaaaattcagaaatccaataaaggaaaggacggtaacct

SEQ ID NO: 84989 - DNA, 1209 bp, Artificial Sequence
  derived and/or modified sequence
atgtacaccagcgaggagaagtgcaaccagagaacccagaagagaaagatctacaacgtgtgccccagaaagggcaagaagatcttcatccacatgcacgagatcatccagatcgacggccacatctaccagtgcctggagtgcaagcagaacttctgcgagaacctggccctgatcatgtgcgagagaacccacaccggcgagaagccctacaagtgcgacatgtgcgagaagaccttcgtgcagagcagcgacctgaccagccaccagagaatccacaactacgagaagccctacaagtgcagcaagtgcgagaagagcttctggcaccacctggccctgagcggccaccagagaacccacgccggcaagaagttctacacctgcgacatctgcggcaagaacttcggccagagcagcgacctgctggtgcaccagagaagccacaccggcgagaagccctacctgtgcagcgagtgcgacaagtgcttcagcagaagcaccaacctgatcagacacagaagaacccacaccggcgagaagcccttcaagtgcctggagtgcgagaaggccttcagcggcaagagcgacctgatcagccaccagagaacccacaccggcgagagaccctacaagtgcaacaagtgcgagaagagctacagacacagaagcgccttcatcgtgcacaagagagtgcacaccggcgagaagccctacaagtgcggcgcctgcgagaagtgcttcggccagaagagcgacctgatcgtgcaccagagagtgcacaccggcgagaagccctacaagtgcctggagtgcatgagaagcttcaccagaagcgccaacctgatcagacaccaggccacccacacccacaccttcaagtgcctggagtacgagaagagcttcaactgcagcagcgacctgatcgtgcaccagagaatccacatggaggagaagccccaccagtggagcgcctgcgagagcggcttcctgctgggcatggacttcgtggcccagcagaagatgagaacccagaccgaggagctgcactacaagtacaccgtgtgcgacaagagcttccaccagagcagcgccctgctgcagcaccagaccgtgcacatcggcgagaagcccttcgtgtgcaacgtgagcgagaagggcctggagctgagccccccccacgccagcgaggccagccagatgagctag

SEQ ID NO: 84990 - DNA, 1209 bp, Artificial Sequence
  derived and/or modified sequence
atgtacacatcagaagagaaatgcaaccagagaacacagaagcgaaaaatttacaacgtctgcccccgtaagggcaaaaaaatcttcattcacatgcacgagattatccagattgacggtcacatatatcaatgtctggagtgtaagcaaaacttttgtgagaacctagccctgataatgtgtgagcgaacacatactggggaaaaaccgtataagtgtgacatgtgcgagaaaacatttgtacagtctagcgatctaacttctcatcaaaggattcacaattacgaaaagccatacaagtgcagcaagtgcgaaaagtctttttggcaccacttggcactatctggccaccagcggacccacgctggtaagaaattctatacttgtgacatatgcgggaaaaattttggccagtcctcggatctattggtacatcagcgaagccacaccggagagaaaccatacttgtgtagcgagtgcgacaagtgcttcagccgaagcacaaacctgattagacaccggagaacccacaccggagagaagccctttaaatgtcttgagtgcgaaaaggcattttccgggaaatccgatttgatctctcatcagaggactcacacaggcgagcgcccttacaaatgtaacaaatgcgagaagtcatacaggcatcgatccgcatttatagtgcacaagcgggtgcatactggcgagaagccatataagtgcggagcttgtgagaaatgctttggtcagaaaagcgatctgatagttcatcagcgcgtccatactggcgagaagccttacaagtgtttagagtgtatgcggtccttcacaaggtccgcaaacctcatccgtcaccaagccacccacactcacacctttaagtgtctagagtacgaaaagagctttaactgttcatctgatctgatagtgcaccagagaattcacatggaggagaaaccccatcagtggtctgcatgtgaatcgggattcctcctcggtatggatttcgtggcgcaacagaagatgagaactcaaacggaggagttacactacaaatacaccgtgtgcgataagtctttccaccagtccagtgccctgctgcagcaccaaacagtgcacattggtgaaaaaccgttcgtgtgcaatgtctccgagaagggcctcgaactgtcacccccccacgcttccgaagccagccaaatgtcttag

SEQ ID NO: 84991 - DNA, 1209 bp, Artificial Sequence
  derived and/or modified sequence
atgtacaccagcgaggagaagtgcaaccagaggacccagaagaggaagatctacaacgtgtgccccaggaagggcaagaagatcttcatccacatgcatgagatcatccagattgatggccacatctaccagtgcctggagtgcaagcagaacttctgtgagaacctggccctgatcatgtgtgagaggacccacactggagagaagccctacaagtgtgacatgtgtgagaagacctttgtgcagagcagtgacctgaccagccaccagaggatccacaactatgagaagccctacaagtgcagcaaatgtgagaagagcttctggcaccacctggccctgagcggccaccagaggacccacgccggcaagaagttctacacctgtgacatctgtgggaagaactttggccagagcagtgacctgctggtgcaccagaggagccacactggagagaagccctacctgtgcagtgaatgtgacaagtgcttcagccgcagcaccaacctgatccgccacaggaggacccacactggagagaagcccttcaagtgcctggagtgtgagaaggccttcagcggcaagagtgacctgatcagccaccagaggacccacactggagagcggccctacaagtgcaacaagtgtgagaagagctaccgccacaggtctgccttcatcgtgcacaagagggtgcacactggagagaagccctacaagtgtggggcctgtgagaagtgcttcggccagaagagtgacctgattgtgcaccagagggtgcacactggagagaagccctacaagtgcctggagtgcatgaggagcttcaccaggtctgccaacctgatccgccaccaggccacccacacccacaccttcaagtgcctggagtatgagaagagcttcaactgcagcagtgacctgattgtgcaccagaggatccacatggaggagaagccccaccagtggagcgcctgtgagagcggcttcctgctgggcatggactttgtggcccagcagaagatgaggacccagacagaggagctgcactacaagtacacagtgtgtgacaagagcttccaccagagcagcgccctgctgcagcaccagacagtgcacatcggggagaagccctttgtgtgcaatgtgtctgagaagggcctggagctgagccccccccacgccagcgaggccagccagatgtcctag

SEQ ID NO: 84992 - DNA, 1209 bp, Artificial Sequence
  derived and/or modified sequence
atgtacaccagcgaggagaagtgcaaccagcggacccagaagcggaagatttacaacgtgtgccctcgcaagggcaagaagatattcatccatatgcacgagatcattcagatcgacggtcacatctaccagtgcctggagtgtaaacagaatttttgtgaaaacctggccctgattatgtgcgagcgcacgcacaccggcgagaaaccttataagtgcgatatgtgcgagaagacatttgttcagtcctcagatctgacctcccaccagaggatccataattacgaaaagccctataaatgttctaaatgtgaaaaaagtttctggcatcatctggccctaagcggtcaccaacgaacacacgctggcaagaagttctacacatgtgacatatgtggcaaaaatttcggacagagctcagatctgctggtccatcagcggtctcacaccggtgaaaagccgtatctgtgctccgagtgtgataagtgcttctcgcggtctacaaacttaatcagacaccgacgcactcacacaggggagaagccatttaagtgtcttgagtgcgagaaggctttcagcgggaaatctgatctcatctcacaccagcgaacccatacgggggaaaggccgtataaatgtaataaatgcgaaaaatcgtatcggcatcgctcagccttcatcgtacacaagagggtgcatacaggagagaaaccatataaatgtggggcctgcgagaaatgcttcggccagaaatctgatctcattgttcaccagagagtgcacaccggtgagaaaccctacaagtgcctagagtgcatgcgctccttcacaagaagtgcaaaccttatcaggcatcaagcaacgcacactcatacgtttaagtgtctggagtacgaaaagtctttcaactgttcctctgatctaatagttcaccaacggattcacatggaggaaaagccccatcagtggtcagcatgcgagtcaggcttcctgctcgggatggattttgtcgcccagcagaaaatgcggacccagactgaggaactccattacaagtataccgtatgtgataagtctttccatcaatcctcagccctgttacagcatcaaacggtgcacatcggtgaaaagccatttgtatgtaatgttagtgaaaagggtttagaattgagcccgcctcatgcaagcgaggcctcccagatgtcatag

SEQ ID NO: 84993 - DNA, 1209 bp, Artificial Sequence
  derived and/or modified sequence
atgtacacttcggaagaaaagtgcaaccagagaacgcagaagcgcaagatctacaatgtttgtccaaggaaaggcaaaaaaatttttattcatatgcacgagatcatccagattgatggacacatctatcagtgcctcgagtgcaagcagaacttttgtgagaatttggcactcatcatgtgtgaaaggacccacactggagagaaaccatataaatgcgatatgtgtgagaagacatttgttcagagctcagatttaacctcccaccagagaatccacaattatgagaagccttacaagtgtagtaaatgcgagaaatcattctggcaccatctcgccctgtctgggcatcaacgcacccacgcagggaagaagttttacacatgtgacatctgcgggaaaaatttcggacagtctagtgacctgctggttcaccaacgcagtcatacaggcgaaaaaccgtacctctgtagcgaatgtgataaatgctttagtaggagcacaaatctcatacggcaccggcgaactcataccggcgagaaacccttcaagtgtctcgagtgtgaaaaagcctttagtggcaaatcggacctcatctcgcatcaaaggactcacaccggagaacggccatacaagtgcaacaagtgcgaaaaatcttaccgacatcggtctgcttttatagttcataaacgggtccacacgggggagaagccctataagtgtggggcttgcgaaaagtgctttggtcagaaaagtgatcttatcgtccatcagagggttcatactggcgaaaaaccctacaagtgtttagagtgtatgaggagtttcacccgctccgctaatctcatccgtcaccaggccacacatacacacacctttaaatgtctagaatatgaaaaatccttcaattgttcatctgatcttattgtgcatcagcgcattcacatggaagagaaaccccaccagtggtccgcctgcgagtccggattcctcctgggcatggactttgttgctcagcagaaaatgaggacccagaccgaggagctgcattataagtacacagtatgtgataaaagctttcaccagtcctcagctctcctgcagcaccagacggtgcatataggagaaaagccgtttgtttgcaacgtatctgagaaaggattggagctcagtccaccacatgcctctgaagcatcccaaatgtcttag

SEQ ID NO: 84994 - DNA, 2910 bp, Artificial Sequence
  derived and/or modified sequence
gggggtggggctgcgccggcctcttcccagccagcttgaaagggtttgcgtagccggccttgtgggcccttgaagcgctctgttaaagcgctctgtgggcggcctggccccaactcctctagtctaggcgcacgaagggagttgctcctaggtcttgtccgtgccgggttcgcttttctttccttcccgaagcctggcccttagatctactatcgcagagtctgcggccgccaggaagcccagattcgagtgtccggagagtaaccggaagtgctgtccccaggcctaggggcggcgccggcggctgccagggagaggcaagaattgagtgttgtgaatagttctgaactagagaccttttgaaaccaaaaggaagatggtcttgagtctttcttgttacgaatgctatcttctttgagaagtcaaattgtcaggatcaggaatgtatgttttcttccatctggattctagggttggaaataccaagtaaggaattaacatatatgatgctggaaacttgtagaggctcatgattgaaaggcctgaaacagatgtatcttccaagttcttatcaagaaaatgactgtgagggcaacgatgggtcaagaagaccagcggaaaactccctaggagagagccatagaaaatgtacacttcagaagagaaatgtaatcagagaactcaaaaaaggaaaatatataatgtatgccctcggaagggtaaaaagatttttattcatatgcatgagattattcagatagatggtcatatataccagtgccttgaatgcaagcaaaacttctgtgaaaacttagctcttattatgtgtgagagaacccatactggggagaaaccttataaatgtgatatgtgtgagaaaacctttgtccaaagctcagatcttacttcacaccagaggatccacaattacgagaaaccttataaatgtagcaaatgtgagaagagcttttggcatcacttagcgctttcaggacatcagagaacacatgcaggtaaaaaattctatacatgtgacatttgtggcaagaattttggtcagagttctgatctgcttgtccaccagcgaagccatactggcgagaaaccatatctatgtagtgagtgtgacaaatgcttcagtagaagtacaaacctcataaggcatcgaagaactcacacaggtgagaaaccatttaagtgtctcgagtgtgaaaaagcttttagtgggaaatcagatcttattagccaccagagaactcacactggggaaaggccctacaaatgtaataagtgtgagaaaagttaccgacaccgttcagccttcattgtacataaaagagttcatactggggagaagccctataagtgtggtgcctgtgaaaaatgctttggccagaaatcagaccttatcgtgcaccagagagtccacacaggtgagaagccgtataaatgcctggaatgtatgagaagttttactcggagtgccaacctaattaggcaccaggcaactcacactcacacttttaaatgccttgaatatgaaaaaagctttaactgtagctcagatcttattgtacatcagagaattcacatggaagagaaaccacatcagtggtctgcgtgtgagagtggcttcctcctaggaatggactttgttgcccaacagaaaatgagaactcaaacagaggagctacactataaatacactgtatgtgataaaagcttccaccagagttcagcccttcttcaacatcagacagtacacattggtgaaaaaccgtttgtctgtaatgtgagtgaaaaaggtcttgagcttagccctccccatgcgtcagaagcctcacagatgtcttgaccaggcgagaagctgtaataccaatattaaaaattatttatgtatcagagaactcattaagatgaggacaaatctcagactttgctcagagctcagaattcagtggggaccagagagcctgcaattggaaatatgagaaattctttgcccagagagctgccctaacagaacacttcatcctcactccaacgagaaatctacagatgcccagaggttttgaaaacttaccgtctgagctcaaatttgatcactcacaagaggattcatacaagtgggaaaccttagaaatgcactgagtgtgagagagctttctactaatgctcagcccttctcgttgtaagagaattcacaccggagaacaactttttaaatgccttcagtgtcagttgtgctgcagacagtatgaacatctcattggacctcagaaaacccaccctggggagaagccccagcaagtgtgaaaaaagcttctaacaaaactctgacttacccatcagagaagccatactggtgaaaaattgtatatttgtcttaagtatggcaaaagcattcgttggagagccttacttgggtttgcacccaaaaaaaaaaacccaatctgaggaaagactgcaagtgtctgaatgaagagtgcttgtcaatgatcaactcttgtggtacatcagggaactcacataggtgaaaaaacccatacttaccttgagtctgagaaaacctttggtagaagctcctgtcttatcaggccccaaaaaacctgttctgcagtgagagatttaattgtgggtgagaatctatgtacatataatatgtatgagaagactgttctcatagttagttgactcatatggtagagaggactttacatgaaatcagtatgaaaatagttttttagatacccagaagcttgttctgggagaagctagggtgggtcagagtagacctgatgggtaactcaggtaaagatgcttttcttttatctgaactacttaatgattgctttacttttactttttaaaaaattcagaaatccaataaaggaaaggacggtaacctta

SEQ ID NO: 84995 - DNA, 81 bp, Artificial Sequence
  derived and/or modified sequence
atgtacaccagcgaggagaagtgcaaccagagaacccagaagagaaagatctacaacgtgtgccccagaaagggcaagtag

SEQ ID NO: 84996 - DNA, 1209 bp, Artificial Sequence
  derived and/or modified sequence
atgtacaccagcgaggaaaaatgtaaccagcggacccaaaaacgtaaaatttacaatgtgtgcccacggaagggcaaaaagatttttatccacatgcatgagattatccagatcgacgggcatatctaccagtgtctcgagtgtaaacagaatttctgtgagaacctggccttgattatgtgcgagagaacccatacaggcgaaaagccatacaagtgtgatatgtgtgaaaaaacattcgttcaaagctcagacctcacgtcgcatcagaggatccacaactatgagaaaccctacaagtgtagtaaatgtgagaagtctttctggcatcacctggccctgtcagggcaccagcgtacccatgccggcaagaaattttacacttgcgatatctgcggaaagaacttcggtcagtcctccgatttgcttgtgcaccagcggagtcatactggcgaaaagccatacctgtgctccgagtgcgataagtgttttagcagaagtaccaatctgattcgccatcggcgcactcacacaggggagaagccttttaagtgcttggagtgcgaaaaggcctttagcggaaagagcgatctgatctcccaccagcgaacgcacactggcgaaaggccctataaatgtaacaaatgtgagaagagctaccgacacaggtctgcatttatagtgcacaaaagagtgcacactggtgaaaagccttacaaatgcggtgcctgcgaaaaatgtttcggccagaaatctgatcttattgtacatcagcgggtccataccggcgagaaaccatacaaatgtttagagtgtatgcgcagcttcacaagaagtgctaacctgatcagacaccaggccacacacacgcataccttcaaatgtctggagtatgagaaatcctttaactgcagctcagaccttatagttcaccagcgcattcatatggaagagaaaccccatcagtggagcgcgtgcgagtctgggtttctgctgggcatggactttgtggcccagcagaaaatgaggactcagacagaggagctgcattacaagtacaccgtctgtgacaagtcgttccaccagtcctctgccctgctccagcatcagacagtgcatattggcgagaaaccatttgtttgcaatgtttctgaaaaagggcttgaattgagtcctccacacgcctcagaggcatcccaaatgtcctag

SEQ ID NO: 84997 - DNA, 1209 bp, Artificial Sequence
  derived and/or modified sequence
atgtacacaagcgaagagaagtgcaatcagcggacccaaaagagaaagatctacaatgtctgtccccgcaaggggaaaaaaattttcatccacatgcacgagattatccagattgatgggcatatctaccagtgcctggagtgcaaacagaacttttgcgaaaatctcgcgcttatcatgtgtgagcgcacccataccggcgaaaagccttataagtgtgatatgtgcgaaaaaacattcgttcagtctagcgatctcacctcccaccaaaggatccataattacgaaaagccatacaaatgctccaagtgtgaaaaatccttttggcaccacctcgctctctccggacatcagagaacacacgctggcaagaagttttacacctgcgatatctgtgggaagaacttcggacagtccagtgatctgctagtgcaccagaggtcacatactggcgaaaaaccctatctctgctctgaatgtgacaaatgtttcagtagatcaactaatctaatcagacatagaaggacacacaccggcgaaaaacccttcaagtgcctcgaatgcgagaaagctttttcgggtaagtcggacctgatcagccaccagaggacacacaccggggagagaccttataagtgcaacaaatgcgaaaagtcatatcggcaccgttccgctttcatagtccacaagcgtgtgcatacaggggagaaaccctacaaatgcggcgcctgtgaaaaatgctttggccaaaaatccgatttgatcgtgcaccagagggtgcacactggagagaagccttacaagtgcctagaatgtatgcggagttttactcgcagtgctaacttgatacggcaccaggcgactcacacccacaccttcaagtgcctcgaatatgaaaagtcatttaactgctcttctgatctgatcgtgcaccagagaatccacatggaggagaagccacaccagtggtctgcctgcgagtccgggttcctgttgggtatggatttcgtggcacagcagaagatgagaactcagactgaagagttgcactacaagtacacagtgtgtgataaaagttttcatcagagctcagccctcctccaacaccaaaccgttcatatcggcgagaaaccttttgtgtgtaatgttagcgagaagggtctagaactgagccctccccacgcgtcggaggcgagccagatgtcttag

SEQ ID NO: 84998 - DNA, 81 bp, Artificial Sequence
  derived and/or modified sequence
atgtatacaagcgaagagaagtgtaaccaacgaactcagaaaaggaagatatacaacgtgtgtccgcgcaaaggcaaatag

SEQ ID NO: 84999 - DNA, 81 bp, Artificial Sequence
  derived and/or modified sequence
atgtacaccagcgaggagaagtgcaaccagaggacccagaagaggaagatctacaacgtgtgccccaggaagggcaagtag

SEQ ID NO: 85000 - DNA, 1209 bp, Artificial Sequence
  derived and/or modified sequence
atgtacaccagcgaggagaagtgcaaccagcggacccagaagcggaagatttacaatgtgtgcccccgcaaggggaagaagatttttattcacatgcacgagattatacagatagatggccatatatatcagtgcctcgaatgtaagcagaatttctgcgagaacttggcactgatcatgtgcgagagaactcacaccggggaaaagccttacaaatgtgatatgtgtgagaagacattcgtccagagctctgatctcaccagccatcagcgcattcacaattatgagaagccttataagtgctctaaatgcgagaaatccttctggcatcacctggcactcagcggccaccagcggacccatgcaggtaagaagttctacacatgcgacatttgtggtaaaaatttcggacagagcagtgatctcctcgtgcatcaacgctctcacactggagaaaaaccatacttatgcagtgagtgcgataagtgttttagccgtagcaccaatctcattcgccaccggcgaacccataccggtgagaagccgtttaagtgcctagagtgcgaaaaggcgttctccggcaagtccgacctgatctcccaccagcggactcatacgggcgaacggccatataagtgcaataaatgtgaaaaaagctatcggcatagatcagccttcatcgtacacaagcgggtccatacgggcgagaaaccatacaaatgtggagcttgtgagaaatgcttcggccagaagtctgatctgatagttcatcagagggtgcacacgggcgaaaaaccatataagtgcctggaatgcatgcggtctttcactcggagcgccaatctgatccgccatcaggcaactcatacccacactttcaagtgcttggaatatgagaagagctttaattgtagctccgacctgatagtgcatcagcgcatacacatggaggagaaaccgcaccaatggtccgcttgtgaaagtgggttcctacttggcatggacttcgtcgcccagcagaaaatgcgcacacagaccgaagaactccattataagtacacagtgtgcgataagtcttttcatcagagtagtgccctcctgcagcatcagacagtccatatcggcgaaaagcctttcgtgtgcaatgtctccgagaaggggctggaattgagcccaccccatgcatccgaggcttctcagatgtcctag

SEQ ID NO: 85001 - DNA, 1209 bp, Artificial Sequence
  derived and/or modified sequence
atgtacaccagcgaggagaagtgcaaccagcggacccagaagcggaaaatatacaatgtatgtccacgaaaagggaaaaaaatttttatccatatgcacgaaatcatccagatcgacgggcatatctatcagtgcctagaatgcaaacagaacttctgtgaaaatctggctcttattatgtgcgaaagaacccacaccggcgagaaaccttataagtgcgacatgtgcgaaaaaactttcgtgcaatcttcagatctgactagccatcagcgaatccataattatgaaaagccatacaaatgttctaagtgcgagaaatctttttggcaccacctggcactgtccgggcatcaacgcactcatgcagggaagaagttttacacatgtgatatttgcgggaagaacttcggccagtccagtgacctgttggtgcaccagaggtcccacaccggcgagaagccttatctttgttccgaatgtgacaaatgcttttccagatctactaacctgattcgtcataggaggacccacacaggggagaaaccatttaagtgcctcgaatgcgaaaaagcttttagtgggaagagcgacctcattagtcatcaacgtactcatactggcgaaaggccctataaatgtaataaatgtgaaaagtcttatagacatcgaagtgctttcattgttcataaacgtgtccacacgggggaaaagccctacaagtgcggggcttgcgaaaaatgtttcggacagaagagtgacctcattgtccatcagcgggtgcacacaggcgaaaaaccttacaaatgtctcgaatgtatgaggtccttcacccgcagtgccaatctcattcgccatcaggccactcatacccatacattcaagtgtctcgagtatgagaagtccttcaattgttcaagcgatttaattgtccaccagcggatccacatggaggaaaagccccatcagtggtccgcctgcgagtcgggattcctgcttggcatggactttgttgcacagcaaaaaatgcggacacagaccgaagagcttcactacaaatatacggtgtgtgacaaaagtttccaccagtcttctgccctgctgcaacatcagacagtacacatcggcgagaaacctttcgtgtgtaatgttagcgagaagggattagaattaagccctcctcatgcatcagaagccagccagatgtcgtag

SEQ ID NO: 85002 - DNA, 81 bp, Artificial Sequence
  derived and/or modified sequence
atgtacaccagcgaggagaagtgcaaccagcggacccagaagcggaagatctataatgtctgcccaagaaaaggtaagtag

SEQ ID NO: 85003 - DNA, 1209 bp, Artificial Sequence
  derived and/or modified sequence
atgtacacgagcgaggaaaaatgtaaccagcggacacagaagaggaaaatctataatgtgtgtccacggaagggtaagaagatatttatccatatgcatgagataatccagatagatggtcacatctatcagtgcctagaatgcaaacaaaacttttgtgaaaatctggctctgattatgtgcgaaagaacgcatacaggagaaaaaccatacaaatgcgacatgtgtgagaagacctttgtgcaatcgagcgatcttactagtcaccagaggattcacaactacgaaaaaccttacaagtgcagtaagtgcgaaaaatccttctggcatcacttggcgcttagtggtcaccagaggacacacgcaggcaagaaattctatacctgtgacatctgcgggaaaaattttggtcagagttccgacttattggttcaccaacgatctcacacgggcgagaaaccctatctctgtagcgaatgcgataagtgcttctcaagatcaaccaatctgattagacatcggagaactcatactggtgagaaacctttcaagtgtctggaatgcgaaaaagccttcagcggcaaaagtgatcttatcagtcaccaacggacacacaccggcgaaaggccctacaaatgtaacaagtgcgagaagagctacaggcataggagcgcctttatcgtccacaagagagtccacacgggcgaaaagccatacaagtgcggcgcatgcgagaaatgttttggccagaagagcgatctgatagttcaccaaagggtgcacacaggggaaaagccctacaaatgcctcgagtgcatgaggtcgtttacacggtcagctaacttgatcaggcaccaggctactcacactcacacctttaagtgcctggaatatgaaaaatctttcaattgtagctctgatttgattgtccatcagagaattcatatggaagagaagccccaccagtggtctgcttgcgaaagcggattcttgttaggtatggacttcgtggctcagcagaagatgaggactcagaccgaagaactgcactataagtacacagtctgtgataagtcattccaccaatctagcgcactgttgcaacaccagacagtgcatatcggagaaaaaccatttgtgtgtaacgtttctgagaaggggctggagctctcccctccacatgcctcagaggcgagccaaatgagctag

SEQ ID NO: 85004 - DNA, 1209 bp, Artificial Sequence
  derived and/or modified sequence
atgtacacaagtgaagaaaagtgcaaccagaggacacagaagcgaaagatctataacgtgtgcccaagaaagggaaagaagatcttcatacatatgcacgaaatcatacagattgatggacatatctaccagtgcctggagtgcaaacagaacttttgcgaaaatttagccctgataatgtgcgaacgcactcacaccggcgaaaaaccctataagtgcgatatgtgtgaaaagaccttcgtgcagtcatcagacctgacgtctcatcaacgaatccacaactatgagaagccttacaaatgtagcaagtgtgaaaagtccttctggcaccacctagcactgagcggccaccagaggacacatgccggtaagaagttttatacatgcgatatttgcggcaagaactttgggcaaagcagcgatctgctcgtacatcagagatctcacactggggaaaaaccatatctgtgctctgagtgcgataaatgcttttcaagaagtaccaacctcatccggcataggcggacacatactggcgagaagccatttaagtgtcttgaatgtgagaaagcattctctgggaagtcggatctgattagtcatcagagaacacacaccggcgaaagaccctataagtgcaacaagtgtgagaagtcctatcggcatcgttctgcttttatcgtacacaaacgcgtgcataccggtgagaagccttataagtgcggggcatgtgaaaagtgttttggacagaagtcagatttaatcgtgcatcagagagtgcacacaggcgaaaaaccatataagtgccttgagtgcatgaggagtttcactagaagcgccaaccttattcgccatcaggctactcatacacacacctttaagtgcttggaatacgaaaaatccttcaattgctccagcgatttgatcgtccaccaaagaattcacatggaggaaaaaccccaccagtggtccgcctgtgaatctgggttcctccttggcatggacttcgtcgcccaacagaagatgagaacgcagaccgaagaactccactacaagtacacagtctgcgataagagcttccaccagagcagcgcactgctgcaacatcagacagtgcatataggggagaaaccttttgtgtgtaacgtgtcagagaaaggtctggaattgtcccctcctcatgctagtgaggcttcacagatgtcttag

SEQ ID NO: 85005 - DNA, 81 bp, Artificial Sequence
  derived and/or modified sequence
atgtatacatccgaagaaaagtgcaaccagagaacacagaagcgtaagatctataatgtttgtccaagaaaggggaagtag

SEQ ID NO: 85006 - DNA, 2675 bp, Artificial Sequence
  derived and/or modified sequence
attcctcctgtttaactgaaattttgtatcctttgaccaatttcttcccaaccctgctatgtctcagcctctggtaaccaccattttaccatctgtttctatcagttagactgttttatactccatatcattatctctctattccagtattatgttgaaaagcagtgaatgctatcttctttgagaagtcaaattgtcaggatcaggaatgtatgttttcttccatctggattctagggttggaaataccaagtaaggaattaacatatatgatgctggaaacttgtagaggctcatgattgaaaggcctgaaacagatgtatcttccaagttcttatcaagaaaatgactgtgagggcaacgatgggtcaagaagaccagcggaaaactccctaggagagagccatagaaaatgtacacttcagaagagaaatgtaatcagagaactcaaaaaaggaaaatatataatgtatgccctcggaagggtaaaaagatttttattcatatgcatgagattattcagatagatggtcatatataccagtgccttgaatgcaagcaaaacttctgtgaaaacttagctcttattatgtgtgagagaacccatactggggagaaaccttataaatgtgatatgtgtgagaaaacctttgtccaaagctcagatcttacttcacaccagaggatccacaattacgagaaaccttataaatgtagcaaatgtgagaagagcttttggcatcacttagcgctttcaggacatcagagaacacatgcaggtaaaaaattctatacatgtgacatttgtggcaagaattttggtcagagttctgatctgcttgtccaccagcgaagccatactggcgagaaaccatatctatgtagtgagtgtgacaaatgcttcagtagaagtacaaacctcataaggcatcgaagaactcacacaggtgagaaaccatttaagtgtctcgagtgtgaaaaagcttttagtgggaaatcagatcttattagccaccagagaactcacactggggaaaggccctacaaatgtaataagtgtgagaaaagttaccgacaccgttcagccttcattgtacataaaagagttcatactggggagaagccctataagtgtggtgcctgtgaaaaatgctttggccagaaatcagaccttatcgtgcaccagagagtccacacaggtgagaagccgtataaatgcctggaatgtatgagaagttttactcggagtgccaacctaattaggcaccaggcaactcacactcacacttttaaatgccttgaatatgaaaaaagctttaactgtagctcagatcttattgtacatcagagaattcacatggaagagaaaccacatcagtggtctgcgtgtgagagtggcttcctcctaggaatggactttgttgcccaacagaaaatgagaactcaaacagaggagctacactataaatacactgtatgtgataaaagcttccaccagagttcagcccttcttcaacatcagacagtacacattggtgaaaaaccgtttgtctgtaatgtgagtgaaaaaggtcttgagcttagccctccccatgcgtcagaagcctcacagatgtcttgaccaggcgagaagctgtaataccaatattaaaaattatttatgtatcagagaactcattaagatgaggacaaatctcagactttgctcagagctcagaattcagtggggaccagagagcctgcaattggaaatatgagaaattctttgcccagagagctgccctaacagaacacttcatcctcactccaacgagaaatctacagatgcccagaggttttgaaaacttaccgtctgagctcaaatttgatcactcacaagaggattcatacaagtgggaaaccttagaaatgcactgagtgtgagagagctttctactaatgctcagcccttctcgttgtaagagaattcacaccggagaacaactttttaaatgccttcagtgtcagttgtgctgcagacagtatgaacatctcattggacctcagaaaacccaccctggggagaagccccagcaagtgtgaaaaaagcttctaacaaaactctgacttacccatcagagaagccatactggtgaaaaattgtatatttgtcttaagtatggcaaaagcattcgttggagagccttacttgggtttgcacccaaaaaaaaaaacccaatctgaggaaagactgcaagtgtctgaatgaagagtgcttgtcaatgatcaactcttgtggtacatcagggaactcacataggtgaaaaaacccatacttaccttgagtctgagaaaacctttggtagaagctcctgtcttatcaggccccaaaaaacctgttctgcagtgagagatttaattgtgggtgagaatctatgtacatataatatgtatgagaagactgttctcatagttagttgactcatatggtagagaggactttacatgaaatcagtatgaaaatagttttttagatacccagaagcttgttctgggagaagctagggtgggtcagagtagacctgatgggtaactcaggtaaagatgcttttcttttatctgaactacttaatgattgctttacttttactttttaaaaaattcagaaatccaataaaggaaaggacggtaacctt

SEQ ID NO: 85007 - DNA, 587 bp, Artificial Sequence
  derived and/or modified sequence
ccttgaagcgctctgttaaagcgctctgtgggcggcctggccccaactcctctagtctaggcgcacgaagggagttgctcctaggtcttgtccgtgccgggttcgcttttctttccttcccgaagcctggcccttagatctactatcgcagagtctgcggccgccaggaagcccagattcgagtgtccggagagtaaccggaagtgctgtccccaggcctaggggcggcgccggcggctgccagggagaggcaagaattgagtgttgtgaatagttctgaactagagaccttttgaaaccaaaaggaagatggtcttgagtctttcttgttacgggttggaaataccaagtaaggaattaacatatatgatgctggaaacttgtagaggctcatgattgaaaggcctgaaacagatgtatcttccaagttcttatcaagaaaatgactgtgagggcaacgatgggtcaagaagaccagcggaaaactccctaggagagagccatagaaaatgtacacttcagaagagaaatgtaatcagagaactcaaaaaaggaaaatatataatgtatgccctcggaagggtaaa

SEQ ID NO: 85008 - protein, 727 aa, Artificial Sequence
  derived and/or modified sequence
MSQQDAVAALSERLLVAAYKGQTENVVQLINKGARVAVTKHGRTPLHLAANKGHLPVVQILLKAGCDLDVQDDGDQTALHRATVVGNTEIIAALIHEGCALDRQDKDGNTALHEASWHGFSQSAKLLIKAGANVLAKNKAGNTALHLACQNSHSQSTRVLLLAGSRADLKNNAGDTCLHVAARYNHLSIIRLLLTAFCSVHEKNQAGDTALHVAAALNHKKVAKILLEAGADTTIVNNAGQTPLETARYHNNPEVALLLTKAPQVLRFSRGRSLRKKRERLKEERRAQSVPRDEVAQSKGSVSAGDTPSSEQAVARKEEAREEFLSASPEPRAKDDRRRKSRPKVSAFSDPTPPADQQPGHQKNLHAHNHPKKRNRHRCSSPPPPHEFRAYQLYTLYRGKDGKVMQAPINGCRCEPLINKLENQLEATVEEIKAELGSVQDKMNTKLGQMENKTQHQMRVLDKLMVERLSAERTECLNRLQQHSDTEKHEGEKRQISLVDELKTWCMLKIQNLEQKLSGDSRACRAKSTPSTCESSTGVDQLVVTAGPAAASDSSPPVVRPKEKALNSTATQRLQQELSSSDCTGSRLRNVKVQTALLPMNEAARSDQQAGPCVNRGTQTKKSGKSGPTRHRAQQPAASSTCGQPPPATGSEQTGPHIRDTSQALELTQYFFEAVSTQMEKWYERKIEEARSQANQKAQQDKATLKEHIKSLEEELAKLRTRVQKEN

SEQ ID NO: 85009 - protein, 175 aa, Artificial Sequence
  derived and/or modified sequence
MSQQDAVAALSERLLVAAYKGQTENVVQLINKGARVAVTKHGRTPLHLAANKGHLPVVQILLKAGCDLDVQDDGDQTALHRATVVGNTEIIAALIHEGCALDRQDKDGNTALHEASWHGFSQSAKLLIKAGANVLAKNKAGNTALHLACQNSHSQSTRVLLLAGSRADLKNNAGD

SEQ ID NO: 85010 - protein, 118 aa, Artificial Sequence
  derived and/or modified sequence
MSQQDAVAALSERLLVAAYKGQTENVVQLINKGARVAVTKHGRTPLHLAANKGHLPVVQILLKAGCDLDVQDDGDQTALHRATVVGNTEIIAALIHEGCALDRQDKDGNTALHEASWH

SEQ ID NO: 85011 - DNA, 2184 bp, Artificial Sequence
  derived and/or modified sequence
atgtcccaacaggatgctgtggctgctctgtcagagcgactcctggtggccgcttataagggtcagacggagaacgtggtgcagctcatcaacaagggagccagagtagccgtgaccaaacatggaagaacccccctgcaccttgctgccaacaagggacacctgcccgtggtgcagattctgttgaaagctggctgtgacttggacgtgcaggacgatggtgaccagactgccctgcaccgagctacagtagtcggaaatactgagatcatcgccgcactgatccatgaagggtgtgccctcgacaggcaggataaggacgggaataccgcactccacgaagccagctggcacggattctcccagtcagcaaagctcctgattaaggccggggcaaacgtgctcgccaaaaataaggctggtaacacagcgctccatctggcctgtcagaactcccattcacagtcaacccgtgtgttacttctggcggggtcccgggccgacctcaaaaacaatgccggagatacctgtctgcacgtcgctgcccgatataatcacctttcaatcatccgtctgctgctcaccgcattttgttccgttcacgagaagaaccaagccggagacaccgctctgcacgtcgcagccgcccttaaccacaagaaggtagcaaagatcctgctagaagctggagccgacactacaatcgttaacaacgctggccagacccccctggagaccgcacgctaccataataaccccgaagtggccctgctgctcacaaaggcaccccaggttctgaggttcagcagggggcggagccttagaaaaaaacgggaaaggctgaaagaggaacgccgcgcacagtccgtcccacgggatgaagtcgcccagtctaagggaagtgtgtccgccggcgatacaccttcatcagagcaagctgtggccagaaaggaagaggcaagggaggagttcctgtcggcatcccccgagcccagagccaaagatgacagacggcggaaatctcgacccaaggtctcagcgttcagtgaccccacaccaccagccgatcaacaacccgggcatcagaaaaacctacacgcccacaatcatccgaaaaaaagaaacaggcataggtgcagttctccacccccccctcacgagttccgtgcttaccagctgtatactctttaccgcggcaaggatgggaaagttatgcaggctcccataaacggatgcaggtgtgagcctctaattaataaactggaaaaccagcttgaggccaccgtcgaggagattaaggctgagttgggctctgtacaggataagatgaatactaagttgggacagatggaaaataagactcagcatcaaatgagagtgcttgacaaactcatggttgagcggctctccgccgaaaggactgaatgcctcaacagactgcaacagcactccgatacagaaaagcacgagggcgaaaagcgccagattagcctcgtcgatgagctgaagacgtggtgtatgctgaaaattcagaacttggagcagaaactgagcggcgacagtcgggcatgtcgggccaaaagcactccatctacctgtgagtcctccactggagtggaccagctggtagtgactgccggcccggctgccgctagcgactcatcaccccctgtcgttagacctaaggagaaggctctcaattccaccgcaacacagcgattgcagcaggaactgtccagctcagattgtaccggctcacgcctacgcaatgtgaaggtgcagacggccctgctccccatgaatgaagccgctaggtctgaccagcaggcagggccctgcgtgaaccgcggaactcagactaagaagtccggtaaatccggaccgacccgccatcgggctcagcaacccgccgcatcgtcaacatgcggtcagccccctcccgccaccggcagcgagcaaacaggcccccacattcgggatacaagccaggcattagaactgactcagtatttctttgaagctgtttcaacccagatggagaagtggtatgaacgaaaaattgaagaggcccggtcccaggctaaccagaaagcacagcaagataaggcaaccctgaaagagcatatcaaaagcctggaggaggagctggcgaaattaaggactagagtgcagaaggaaaactag

SEQ ID NO: 85012 - DNA, 2184 bp, Artificial Sequence
  derived and/or modified sequence
atgagccagcaggacgccgtcgcagcccttagtgagaggctgcttgtagccgcctataaagggcaaaccgaaaacgttgtccagcttatcaataagggtgcacgtgtcgccgtcactaagcacggtcggacccccttgcacttagctgccaataagggacaccttcctgtggtgcagatcctattaaaggccggctgcgacctagatgtgcaggatgatggtgaccaaaccgcccttcaccgtgcgactgtcgttggcaatactgaaatcatcgccgctcttattcacgaagggtgcgcactcgatagacaggataaggatggcaatacagctctacacgaagcatcctggcacggctttagccagtcagccaagctcctgatcaaggctggggccaatgttctggctaaaaacaaagccggcaataccgctctgcacctcgcctgtcagaatagccactcccaaagtactcgggtcttgttactggctggaagccgggccgatctaaagaacaacgctggcgacacctgtctccatgttgcagcccgatacaaccatctgtccattattcggttgctgttgaccgccttctgctctgtgcatgagaaaaaccaggctggggacacagcactgcatgtggctgccgcattgaatcataagaaggtagcgaagatcctgctggaggcaggagccgataccactatcgtgaataacgccggccagacaccgcttgagacagctaggtatcataataatcccgaagtcgcactcctgctgaccaaagcccctcaggtgttgaggttttcaaggggcagatcactgcgcaaaaagcgggagcggctcaaggaggaacgcagggcccagtccgttccaagggacgaggtcgctcagtcaaagggatcagtgtctgcgggggatacccccagctcagagcaggctgtggcaagaaaagaggaggcccgggaagagttcttgtccgcatctcctgagcccagagctaaggacgaccgcaggcggaaaagtcgccccaaagtatctgccttctccgaccccacgcctccagctgaccaacagcccggtcaccagaaaaatctccacgcgcataaccatccaaagaagagaaacagacacaggtgcagctctccccccccccctcacgaattccgcgcttatcaactgtacaccctctatcgcgggaaggatggaaaagttatgcaggcgcccatcaacgggtgccgctgcgaacctcttataaataaattggagaatcagctggaggcgacagtcgaggaaatcaaggccgaactaggctcagtacaggacaaaatgaatacaaagctgggtcagatggaaaacaaaacccagcatcagatgcgggtgctcgacaagctaatggttgaaagactgtcagccgaaagaaccgagtgcctgaacaggctacaacagcactccgatactgagaagcacgaaggggaaaaaagacagatcagcctcgtcgacgagctgaaaacatggtgcatgctcaaaattcaaaacctcgagcagaaactctctggcgatagtagagcctgccgggccaagagcaccccctcaacctgtgagtcaagcacgggcgtggaccaactggtagtaaccgccggacctgcggccgcatcggacagttctcctcccgttgtgagacccaaagagaaagccttaaattcgacagctacccagcgtctgcagcaggaattgtcgagttccgactgcacaggaagccgcctgcgaaatgttaaagtgcagactgcactcctgccaatgaacgaggcagcgcgttcggaccaacaggccggaccgtgcgtaaatcgaggaactcagacaaagaaatcaggtaagagcgggcctactcgacacagggcccagcagcccgctgcttcgagcacatgcgggcaaccccctccagcaactggcagtgagcagactggcccacacattcgggacacgtcccaagctctcgaattaacacagtatttcttcgaggcagtgagcacgcagatggagaagtggtacgaacggaaaatcgaagaggcccgaagccaggccaatcagaaggcgcagcaggacaaggctacactcaaagaacatattaagagcctggaagaagaactcgccaagcttcggacacgcgtgcagaaagagaactag

SEQ ID NO: 85013 - DNA, 2184 bp, Artificial Sequence
  derived and/or modified sequence
atgagccagcaggatgctgtggccgccctgtctgagcggctgctggtggccgcctacaagggccagacagaaaatgtggtgcagctgatcaacaagggggcccgggtggccgtgaccaagcacggccgcacccccctgcacctggccgccaacaagggccacctgcctgtggtgcagatcctgctgaaggccggctgtgacctggatgtgcaggatgatggagaccagacagccctgcaccgggccaccgtggtgggcaacacagagatcatcgccgccctgatccacgagggctgtgccctggaccggcaggacaaggatggcaacacagccctgcacgaggcctcctggcacggcttcagccagagcgccaagctgctgatcaaggccggggccaacgtgctggccaagaacaaggccggcaacacagccctgcacctggcctgccagaacagccacagccagagcaccagggtgctgctgctggccggcagcagagctgacctgaagaacaatgctggggacacctgcctgcacgtggccgcccgctacaaccacctgagcatcatccggctgctgctgacagccttctgcagcgtgcatgagaagaaccaggccggggacacagccctgcacgtggccgccgccctgaaccacaagaaggtggccaagatcctgctggaggccggggctgacaccaccatcgtgaacaatgccggccagacccccctggagacagcccgctaccacaacaaccctgaggtggccctgctgctgaccaaggccccccaggtgctgcgcttcagccggggccgcagcctgaggaagaagcgggagcggctgaaggaggagcggcgggcccagagcgtgcccagagatgaggtggcccagagcaaaggatctgtgtctgctggggacacccccagcagcgagcaggccgtggccaggaaggaggaggcccgggaggagttcctgagcgccagccctgagccccgggccaaggatgacagaagaaggaagagccggcccaaggtgtctgccttcagtgaccccaccccacctgctgaccagcagcccggccaccagaagaacctgcacgcccacaaccaccccaagaagaggaacagacaccgctgcagcagccccccacctcctcatgagttccgggcctaccagctgtacaccctgtaccggggcaaggatggcaaggtgatgcaggcccccatcaatggctgccgctgtgagcccctcatcaacaagctggagaaccagctggaggccaccgtggaggagatcaaggccgagctgggctctgtgcaggacaagatgaacaccaagctgggccagatggagaacaagacccagcaccagatgagggtgctggacaagctgatggtggagcggctgtctgctgagaggacagaatgtctgaaccggctgcagcagcacagcgacacagagaagcatgaaggagagaagaggcagatcagcctggtggatgagctgaagacctggtgcatgctgaagatccagaacctggagcagaagctgagcggggacagccgggcctgccgggccaagagcacccccagcacctgtgagagcagcactggagtggaccagctggtggtgacagctggccctgctgctgccagtgacagcagcccccctgtggtgcggcccaaggagaaggccctgaacagcacagccacccagaggctgcagcaggagctgagcagcagtgactgcaccggcagccggctgagaaatgtgaaggtgcagacagccctgctgcccatgaatgaagctgcccggagtgaccagcaggccggcccctgtgtgaacagaggcacccagaccaagaagagcggcaagagcggccccaccaggcaccgggcccagcagcctgctgccagcagcacctgtggccagcccccaccagccactggaagtgagcagacaggcccccacatccgggacaccagccaggccctggagctgacccagtacttctttgaggccgtgtccacccagatggagaagtggtatgaaaggaagattgaggaggcccggagccaggccaaccagaaggcccagcaggacaaggccaccctgaaggagcacatcaagagcctggaggaggagctggccaagctgcggaccagggtgcagaaggagaactag

SEQ ID NO: 85014 - DNA, 2184 bp, Artificial Sequence
  derived and/or modified sequence
atgagccagcaggacgccgtggccgccctgagcgagcggctgctggttgccgcctacaaaggtcagactgagaatgtagttcagcttattaacaaaggcgcccgcgtcgccgtaaccaagcatggtcgaacaccactgcaccttgccgccaacaaaggccatctgcctgtcgtccagatcctgttaaaggctggctgcgacctggacgtgcaggacgatggcgaccaaaccgcgctccatcgtgccacagtggttggaaacaccgaaataattgccgcgctaatccacgagggctgcgcgctcgacagacaggataaagatggtaataccgcactacacgaggcctcgtggcacggctttagccagtccgccaagctgttgatcaaagctggggccaacgtcttggccaaaaataaagcaggcaatacagctctgcacctcgcctgtcagaacagtcactcgcaaagcacaagggtgttactactcgcgggatctcgagccgatctcaagaacaatgccggagacacttgccttcatgtggcagctaggtataatcacctcagcattatccgacttttgctaacagctttttgttctgtacacgagaaaaaccaggcgggcgataccgccctccacgtggccgccgccctgaatcacaagaaagtagcaaagatattgctcgaggcaggcgcggatacaacaatagtgaacaatgccggacaaactcccctcgaaaccgcccgctaccataataatcccgaggtggcgctgctgctgaccaaggcaccccaggttttgcgattctctcggggacggagtctcagaaaaaaacgcgagagactcaaagaggaacgccgagcccaaagcgtcccccgggacgaagtggctcagtctaagggctccgtcagcgccggggatactccaagcagcgagcaggctgttgcccgtaaagaagaggctcgggaagagttcttgagcgcttctcccgaaccgcgggccaaggatgatcgccggaggaaaagccggccgaaggtgtcggctttttcagatcctacgccacccgccgaccagcaaccaggccaccagaaaaacctgcatgcacacaatcaccccaagaagcggaaccgccaccggtgctcgtccccgcccccgccccacgagtttcgcgcgtatcagctgtacaccctgtaccgggggaaggatggaaaggtgatgcaggcacctattaacgggtgtaggtgcgagcccctgattaacaagctggagaatcagctcgaagctaccgtggaagaaataaaagcagagctaggctcagtgcaggataaaatgaacacaaagttagggcagatggaaaataaaacccagcatcagatgcgggttctggataaactcatggtcgaacgcctaagcgctgagcggacagagtgtttgaatagacttcaacagcatagtgataccgaaaagcatgagggcgagaaacggcaaattagtcttgtcgatgagctaaaaacctggtgtatgctaaaaattcagaatcttgagcagaagctcagcggtgactcacgtgcctgtcgcgccaagagtaccccaagcacttgtgaaagttcaacaggcgtagaccagttggttgtgacggcagggcctgcagccgcatcggatagcagtccccccgttgtgcgtcccaaggagaaagcactgaattccacagccacacagagattacagcaagaattatccagctccgactgcacaggcagccgacttcgtaacgtgaaggtgcaaacagccctgctgcccatgaacgaggcggcacgttcagaccagcaagccggcccgtgcgttaaccgtggtactcagactaaaaagtctggcaagagtggaccaactaggcaccgggcccagcagcccgctgcatcatctacctgcggccagccgccacctgccactggtagcgagcagactgggccacatatcagggatacctcccaggccctagagcttacacagtacttctttgaggcggtctctacccaaatggaaaagtggtacgagcggaaaattgaggaggctcgatctcaggccaatcagaaagcccagcaggacaaagctacactcaaggaacacatcaagagcttggaggaagagcttgctaaattgagaacaagagtgcagaaagagaactag

SEQ ID NO: 85015 - DNA, 2184 bp, Artificial Sequence
  derived and/or modified sequence
atgagccagcaggacgccgtggccgccctgagcgagcggctgctggtggcagcttacaagggccagaccgaaaacgtcgtgcagctcattaacaagggtgcccgggtcgcagtcacaaaacacggccgcaccccgctccatctcgcagcgaacaagggacacctgcctgtagtacagatcctgttgaaagccggctgcgaccttgacgtccaggacgacggtgaccagaccgcactccatcgggctaccgttgtaggtaataccgaaattatcgctgcccttatccatgaagggtgcgccctcgatcggcaggacaaagacggcaacacagccctacatgaggcttcatggcatggatttagccagagcgccaaattgcttattaaagccggtgcgaatgttctggcaaaaaataaggctggaaataccgcactgcacctggcctgccagaacagtcactcccaatcgactagggttctgctactggccggaagccgcgctgatctaaaaaacaacgccggtgatacctgcctccacgttgccgccaggtataaccacctgagtataatccgtttacttcttaccgcgttctgcagtgtgcatgaaaaaaaccaggccggcgacactgctctacatgtcgctgccgctttgaaccataaaaaagtcgctaaaattctcctggaggccggagctgatacgaccatagttaacaacgccggccagaccccattggagaccgccagatatcacaacaatcctgaagtggctctgctgctgaccaaagccccccaggttctcagattctcaagaggaaggtcgctacggaaaaaacgcgagaggttaaaagaagaaaggcgggcccaatccgtccctcgcgatgaggttgcacaaagcaaagggtctgtctccgctggtgatacaccgagtagcgagcaggcagtggcacggaaggaggaagccagggaggaattcctaagcgcttcccccgagccacgtgcgaaggatgatagacgtcgtaagtcgagacctaaagtgtctgccttctctgatccgacccccccagcggaccagcagccaggccaccagaagaacctacacgcccataatcaccccaaaaaaagaaatagacaccggtgttccagtccacctcccccgcatgaatttagggcttaccagctctacacactgtataggggcaaagacggcaaagtcatgcaggctcctatcaacggttgccgctgtgaacccttaatcaacaagctggagaatcaattggaagcgacggtcgaggaaatcaaagctgagttgggttccgtccaggataaaatgaacacaaagcttggccaaatggagaacaaaacacagcaccagatgcgcgtcttggataagctcatggtcgagagattgtctgcagaaagaactgagtgcctgaatcgtctgcagcagcatagcgacactgagaagcatgagggtgaaaagcgacagatctcccttgtagacgaactgaagacctggtgtatgctgaaaatacagaatcttgaacagaagctgtcaggggatagccgcgcttgccgggccaaatcaaccccgtctacatgtgagagctctaccggagttgaccagttagtggtgacagccggaccagcggctgcttctgactctagcccaccagtggtgcgcccaaaggagaaggccctgaattcaacagccacccaacgactgcaacaggagctgtccagctccgactgtacaggctcacggctgaggaatgtgaaagtgcagactgcattgctgcccatgaacgaggccgcgcgatccgatcagcaggccggtccatgcgtgaacagggggacacaaactaagaaatctggcaaatccggccctactcggcacagggcacagcagcctgctgcgagtagcacctgcggccagccacccccagccaccgggagcgagcagacgggcccccacattcgcgatacgagccaagcgttagaactgactcagtacttcttcgaagctgtgagtacccagatggaaaagtggtatgagcgtaaaattgaggaagcaaggtcccaagctaatcagaaggctcagcaagataaggcaacgctgaaagagcatatcaaatcgctggaggaggagctggccaagctgaggacccgagttcagaaagagaactag

SEQ ID NO: 85016 - DNA, 3073 bp, Artificial Sequence
  derived and/or modified sequence
gagagcgctgcctggcgcgcgggcggctggaggcacggcgctgggcggcgccgaggccctggggccgccggagccagcgggagccagtccccgtcttcgcccctcgccccccaccgtgtcgccggccttggtccctgcggcgcggacgtccggcgcgggagagaaaggtcccgaagatggcatattcataaagacatcttctgatgattgtgaacatctttacctctgggtgccaggccgggccagtgacttcgtgttgagctgaaggaacttgtctaccgcttccctgaaaacctttctttcctaattcatgagccagcaagatgcggtcgctgcactttcagagcgccttctcgtagctgcgtacaaaggccaaacagagaatgtggttcagctcatcaacaagggcgccagggtagcggttaccaagcatggccggactcccctgcatcttgctgccaataagggccatcttcctgtggtccagatcttgctgaaggctggctgcgaccttgatgtccaggatgatggggaccagaccgccttgcaccgggccacagtggtggggaacacggagatcatcgcggcgctcatccacgaagggtgtgccctggacagacaagacaaggatgggaatacagccttgcatgaagcatcctggcatggtttcagccagtcagccaagctgctcattaaagcaggagccaacgtgcttgccaagaacaaggcggggaacacagctctgcacctggcctgccagaacagccactcccagagcacgcgcgtcctcctgctggccgggtcccgcgctgacctcaaaaataatgcaggagacacctgtttgcacgttgctgcgcgctataatcacttgtccatcattaggctcctcctcactgctttctgttctgtccatgaaaagaaccaggctggagacacagcacttcacgttgctgctgccctaaatcacaagaaggtggccaaaatcttactggaagccggagcagatacgaccattgttaacaatgcaggccagactccgctggagactgcccgctaccacaataacccggaagttgctcttctccttactaaagctccccaggtcttgcgcttcagtcgtgggcgaagcctgaggaaaaagagagagaggctcaaggaagagaggagagcccagtctgtgccaagagatgaggtggcccaaagcaagggcagtgtctcagcaggagacacccccagcagtgaacaggctgtggccagaaaagaagaagccagagaagagttcctgtcagcctccccagaacccagagcaaaggatgacaggaggagaaagtcaaggcccaaggtgtcagcattttctgaccccaccccaccagccgaccaacagcctggacaccagaagaacctgcatgctcataatcaccctaaaaagaggaacaggcatcggtgttcatccccacccccaccccatgagttcagggcgtatcagctctacacattgtaccggggcaaggatgggaaagtgatgcaggcaccaataaatggttgtcgatgtgaacctctaatcaacaagctggagaatcagttggaggctactgtggaggagataaaagcagagctgggatcggttcaggacaaaatgaatacaaagctggggcagatggagaataagacccagcaccaaatgcgtgttttggacaagctgatggttgagcgactttctgcagagaggacggagtgcctgaaccgcctgcaacagcactcagacacagagaagcatgagggggagaaacgacagatatccttggtggatgaattaaaaacctggtgcatgttaaagattcagaatctggagcagaagctttctggagattctagggcctgcagagctaaatccacaccatctacttgtgagtcctctacaggtgtggaccaattagtggtgactgcaggtccagcagcagcttccgacagctcccctccagtggttaggcccaaagagaaggccctcaactccactgctacccagagactccagcaggagctgtcgtcttctgactgtacaggctcccgactgagaaacgtcaaggtccagacagccttgctacccatgaatgaggcagccagatctgatcagcaggctgggccctgcgtcaacagaggcactcaaactaagaagtctgggaagagtgggccaacaaggcatcgtgcccagcaacccgcagccagcagcacctgtgggcagccgccaccagccacaggcagcgagcagactggccctcacattcgggacacctcccaagctctggagcttacccagtatttttttgaggctgtttctacccagatggaaaagtggtatgaaaggaagattgaagaagcacgaagccaagccaatcagaaagcccagcaagataaggctacattgaaggaacacattaaaagtttagaagaggaacttgccaaactaaggactagggtgcagaaggaaaattagcaccaataaagaggaaatatgaaaggattcttgaagatttccagttttgcaactgcataatagctatgcccaaggagtcaactattgtatatattgcagatttgcctttttaaaaaaatcactaattctacaatgtgccagatacatgtttcctatgcccaggaagttatgaagacttcaacaattaaactgaaaccaggggaagcttgcttagttttgggtttcattataaactcttagcctcagtccaggttaatctgaagtttgaaagctcagattaagcaagccatgccaagaaactggacgatgtgtaagcctagactctaaaattcaagatgtgtgaaataatataagtcaaaagcaagaaaaacgtaatcccgtctgaactcaagtagtcattcatataaatttgaacacacctgctgtgcctagacaagtgtctttctgtaagagctgtaactctgagatgtgctaaataaaccctctttctcaaattcgtaattctccaactgttgacattttaatcacatgaaaagttatcagatttttgaggagaaatattttcatgatgtcacaaga

SEQ ID NO: 85017 - DNA, 3157 bp, Artificial Sequence
  derived and/or modified sequence
gaggcagtttattacagatttcaaccctttctgcatccctccctcccttacaacacgcacactcatcttttcttgcattactgctgaaattatgcaaacttcgtttctctgtcatctgagcgtcattcagaaatgttcctccgatctgtgaattgttccctgacttcaatcggggcagtgttacaggtcctctgctggcaggagggagcagtccgtgaaaatctgcagacacaagactttcagaagctgtgacgagcagactagcaagccacaaaacattgcaagctgaatggatgtcttaataagcttttagatgtgatttggccagcatcagcagaggaggctaacgggaaaaggcagcgaacattgtaacgtaaatcactgcagatttgctgggagtgacagccctaggaagctaatgatctctccaggaaagaattgaccacagttatccagaaactgaacacgatgtagaacagagaggacagcccctcggatgtcccgaagatggcatattcataaagacatcttctgatgattgtgaacatctttacctctgggtgccaggccgggccagtgacttcgtgttgagctgaaggaacttgtctaccgcttccctgaaaacctttctttcctaattcatgagccagcaagatgcggtcgctgcactttcagagcgccttctcgtagctgcgtacaaaggccaaacagagaatgtggttcagctcatcaacaagggcgccagggtagcggttaccaagcatggccggactcccctgcatcttgctgccaataagggccatcttcctgtggtccagatcttgctgaaggctggctgcgaccttgatgtccaggatgatggggaccagaccgccttgcaccgggccacagtggtggggaacacggagatcatcgcggcgctcatccacgaagggtgtgccctggacagacaagacaaggatgggaatacagccttgcatgaagcatcctggcatggtttcagccagtcagccaagctgctcattaaagcaggagccaacgtgcttgccaagaacaaggcggggaacacagctctgcacctggcctgccagaacagccactcccagagcacgcgcgtcctcctgctggccgggtcccgcgctgacctcaaaaataatgcaggagacacctgtttgcacgttgctgcgcgctataatcacttgtccatcattaggctcctcctcactgctttctgttctgtccatgaaaagaaccaggctggagacacagcacttcacgttgctgctgccctaaatcacaagaaggtggccaaaatcttactggaagccggagcagatacgaccattgttaacaatgcaggccagactccgctggagactgcccgctaccacaataacccggaagttgctcttctccttactaaagctccccaggtcttgcgcttcagtcgtgggcgaagcctgaggaaaaagagagagaggctcaaggaagagaggagagcccagtctgtgccaagagatgaggtggcccaaagcaagggcagtgtctcagcaggagacacccccagcagtgaacaggctgtggccagaaaagaagaagccagagaagagttcctgtcagcctccccagaacccagagcaaaggatgacaggaggagaaagtcaaggcccaaggtgtcagcattttctgaccccaccccaccagccgaccaacagcctggacaccagaagaacctgcatgctcataatcaccctaaaaagaggaacaggcatcggtgttcatccccacccccaccccatgagttcagggcgtatcagctctacacattgtaccggggcaaggatgggaaagtgatgcaggcaccaataaatggttgtcgatgtgaacctctaatcaacaagctggagaatcagttggaggctactgtggaggagataaaagcagagctgggatcggttcaggacaaaatgaatacaaagctggggcagatggagaataagacccagcaccaaatgcgtgttttggacaagctgatggttgagcgactttctgcagagaggacggagtgcctgaaccgcctgcaacagcactcagacacagagaagcatgagggggagaaacgacagatatccttggtggatgaattaaaaacctggtgcatgttaaagattcagaatctggagcagaagctttctggagattctagggcctgcagagctaaatccacaccatctacttgtgagtcctctacaggtgtggaccaattagtggtgactgcaggtccagcagcagcttccgacagctcccctccagtggttaggcccaaagagaaggccctcaactccactgctacccagagactccagcaggagctgtcgtcttctgactgtacaggctcccgactgagaaacgtcaaggtccagacagccttgctacccatgaatgaggcagccagatctgatcagcaggctgggccctgcgtcaacagaggcactcaaactaagaagtctgggaagagtgggccaacaaggcatcgtgcccagcaacccgcagccagcagcacctgtgggcagccgccaccagccacaggcagcgagcagactggccctcacattcgggacacctcccaagctctggagcttacccagtatttttttgaggctgtttctacccagatggaaaagtggtatgaaaggaagattgaagaagcacgaagccaagccaatcagaaagcccagcaagataaggctacattgaaggaacacattaaaagtttagaagaggaacttgccaaactaaggactagggtgcagaaggaaaattagcaccaataaagaggaaatatgaaaggattcttgaagatttccagttttgcaactgcataatagctatgcccaaggagtcaactattgtatatattgcagatttgcctttttaaaaaaatcactaattctacaatgtgccagatacatgtttcctatgcccaggaagttatgaagacttcaacaattaaactgaaaccaggggaagcttgcttagttttgggtttcattataaactcttagcctcagtccaggttaatctgaagtttgaaagctcagattaagcaagccatgccaagaaactggacgatgtgtaagcctagactctaaaattc

SEQ ID NO: 85018 - DNA, 2184 bp, Artificial Sequence
  derived and/or modified sequence
atgtcacagcaggatgcagttgctgccttaagcgagcgcttgctcgtggctgcatacaagggccagacggagaatgtggtgcagctcatcaataagggcgctagagtagccgtgacaaagcacggccgaacgcctttacacctggccgctaataaaggtcacctccccgtggttcagattttgcttaaagctggctgtgacttagacgtgcaggatgatggggatcagacagctctgcacagagccaccgtggtaggcaacactgaaatcatagccgctttgattcacgagggctgtgcactggatagacaggataaggatggcaatactgctcttcatgaggcttcttggcatggtttctcccagtccgcaaagttactcataaaggccggagccaacgtcttagctaagaacaaagccggtaacaccgcgctccacctggcatgccaaaattctcatagccagtctactagagttctcctgctggcagggtcccgcgctgacctgaagaacaatgcaggcgacacgtgccttcacgttgctgcccgatataaccatttatctataatccggctattattgaccgcgttctgctccgttcatgagaaaaatcaagccggagataccgcactccacgtggctgccgctttgaatcacaaaaaggtagcgaaaattctgttggaagccggtgctgacaccaccatcgtgaataacgcgggacagacgcccctcgagaccgcacgctatcacaataaccccgaggtggccctcctgcttactaaggcaccacaggtgttacgcttctcccgtggacggtctctgcgcaagaaacgagagcggttaaaggaggagcgtagggcgcagtctgtgccacgagacgaagtcgcccagtccaagggcagtgtatctgcgggtgatacacctagcagcgagcaggccgtggcccgaaaagaagaggcccgagaagagtttttgagtgcttctccagagccccgtgcaaaggacgatcggagaagaaaaagtcgtccaaaggtgagcgccttttccgaccccaccccgccagctgaccagcagcccggtcatcagaaaaatttgcacgcgcacaaccatcccaagaagaggaaccgccaccgctgttcctccccccctccccctcacgaattcagggcttaccagttgtacaccctgtataggggcaaggacgggaaggttatgcaagccccaatcaatggttgcagatgcgaacccctgattaacaagctagagaaccagctcgaggccacggtcgaagagatcaaagcagagctggggtccgtacaggacaagatgaatactaaactggggcagatggagaataagacccaacaccagatgagggtcctcgacaaactgatggtggaacgtttgtctgccgaacgcacagaatgtttaaaccgcctccaacagcatagtgacacggaaaaacatgagggggaaaagaggcagatcagcctggtggatgaactaaagacttggtgcatgctgaaaattcagaatttagaacaaaaactgtctggagacagtcgagcctgccgcgctaagtcaacccccagtacctgcgagtccagtaccggagttgatcagctcgtggttaccgccggacctgctgcagcctcggatagttccccccctgtggtcagacccaaagaaaaggccttgaactctactgctactcaacggttgcagcaggaactctcttccagtgactgcacaggatctagactgaggaacgtgaaggttcaaacagcactgctcccaatgaatgaggccgctcgcagtgatcagcaggccggaccgtgcgtgaaccggggaactcaaacgaaaaaaagcggaaaatccggccctacccgccatcgagcccaacagcctgcggcatcctccacatgcgggcagccccctcccgctaccgggtctgagcaaaccggccctcatatcagagacactagccaggccctcgagctgactcagtactttttcgaggcagtctctactcaaatggagaagtggtatgagcgaaaaatcgaggaggccagaagccaagcaaaccagaaagcgcagcaggacaaagccactctcaaggaacacataaagtccctcgaggaggagcttgctaaactgcgaacaagggtgcaaaaggagaattag

SEQ ID NO: 85019 - DNA, 2184 bp, Artificial Sequence
  derived and/or modified sequence
atgtcccaacaggatgcagtggctgctctgtccgagaggctcctcgtagccgcatacaaggggcagacagagaacgtcgttcagctgatcaacaagggtgccagggtggccgtgaccaaacatggtcggaccccactccacctggccgctaacaagggacatttgcctgtagtccaaattttattgaaggccggatgcgatttagatgtgcaggatgacggcgatcagacagctctccacagagccacggtggtgggcaacaccgagatcattgcggctttaatccatgagggttgtgcactggacagacaagacaaagacgggaatacggcgttgcacgaggcctcatggcacggcttttcccaatctgccaagctcctgatcaaggcgggagctaatgtgctcgccaagaataaggcgggaaatactgccttgcatttagcctgccagaatagtcactctcaaagcacgagagttttacttcttgctggctctagggctgatttgaagaacaatgccggtgatacatgcctgcatgtagctgccaggtataaccacctgtccattattagactgctactaaccgccttctgttccgtgcacgagaaaaatcaggcaggtgatacagccttacacgtggccgcagctctgaatcacaaaaaggtggcaaagatcctcctcgaggccggtgctgatactaccattgtgaataatgccggacagactccactggagacagctaggtatcacaacaatcctgaagttgcacttctgctcactaaggctccgcaggtgttgcgcttttcccggggtaggtctcttagaaagaagagggagcggttaaaggaggagagacgagctcagagcgtgccaagagatgaggtggcccagagcaaaggcagtgtgtccgccggtgatacccccagtagcgagcaggccgttgccaggaaggaagaagcacgagaggaattcttgagtgctagccccgaaccccgtgcaaaggacgaccgacgcaggaaaagcagaccgaaggtgagcgcgttttctgacccgacgccacccgctgatcaacagcccggtcaccagaagaatctgcacgcccataatcacccaaagaaacgaaataggcataggtgctcttcacctcccccaccacacgaatttagggcttaccaattatacacgctgtaccggggaaaagacgggaaggtgatgcaggccccaataaacggctgtaggtgcgaaccgcttataaacaaattggaaaatcagctggaagctacggtggaggaaatcaaggcggagctgggaagcgtacaggacaaaatgaatacaaaactgggccagatggagaacaaaacacaacaccagatgcgcgtattagacaagctgatggttgaaagactgtctgctgaacgaaccgaatgtctcaatcgtctgcagcagcattccgataccgagaagcatgagggcgagaaaagacagattagccttgtcgatgagctcaagacctggtgcatgctcaaaattcaaaatctagagcaaaagttgtccggggattcccgggcatgccgggcaaagtcaaccccgagtacatgcgagtcctccaccggggttgatcagctggtggtgaccgccggacccgctgctgctagtgacagctcgcccccagtggtccgcccaaaggaaaaagcactaaacagtacagcaacgcaacgtctgcaacaagagctctcatccagtgattgtacagggtcaagactcaggaatgtgaaggtgcaaaccgcactcctccctatgaacgaagcggcaaggtccgaccagcaagcaggcccttgtgtaaatcgaggcacacagactaagaaatctggcaagtctggtccaacaaggcaccgcgctcagcagcccgctgcatcttccacttgcggacagccacccccagccaccggtagcgaacagaccggaccccacattcgagatacgtcacaggcactggagctgacccaatatttctttgaagctgtgagcacccagatggaaaaatggtacgagcggaaaatcgaagaggctcgatcccaggccaaccaaaaagcccagcaggacaaggctaccctcaaagagcacattaagtcccttgaagaggaactggctaaactcaggacccgggtccagaaggagaactag

SEQ ID NO: 85020 - DNA, 2184 bp, Artificial Sequence
  derived and/or modified sequence
atgagccagcaggacgccgtggccgccctgagcgagagactgctggtggccgcctacaagggccagaccgagaacgtggtgcagctgatcaacaagggcgccagagtggccgtgaccaagcacggcagaacccccctgcacctggccgccaacaagggccacctgcccgtggtgcagatcctgctgaaggccggctgcgacctggacgtgcaggacgacggcgaccagaccgccctgcacagagccaccgtggtgggcaacaccgagatcatcgccgccctgatccacgagggctgcgccctggacagacaggacaaggacggcaacaccgccctgcacgaggccagctggcacggcttcagccagagcgccaagctgctgatcaaggccggcgccaacgtgctggccaagaacaaggccggcaacaccgccctgcacctggcctgccagaacagccacagccagagcaccagagtgctgctgctggccggcagcagagccgacctgaagaacaacgccggcgacacctgcctgcacgtggccgccagatacaaccacctgagcatcatcagactgctgctgaccgccttctgcagcgtgcacgagaagaaccaggccggcgacaccgccctgcacgtggccgccgccctgaaccacaagaaggtggccaagatcctgctggaggccggcgccgacaccaccatcgtgaacaacgccggccagacccccctggagaccgccagataccacaacaaccccgaggtggccctgctgctgaccaaggccccccaggtgctgagattcagcagaggcagaagcctgagaaagaagagagagagactgaaggaggagagaagagcccagagcgtgcccagagacgaggtggcccagagcaagggcagcgtgagcgccggcgacacccccagcagcgagcaggccgtggccagaaaggaggaggccagagaggagttcctgagcgccagccccgagcccagagccaaggacgacagaagaagaaagagcagacccaaggtgagcgccttcagcgaccccaccccccccgccgaccagcagcccggccaccagaagaacctgcacgcccacaaccaccccaagaagagaaacagacacagatgcagcagccccccccccccccacgagttcagagcctaccagctgtacaccctgtacagaggcaaggacggcaaggtgatgcaggcccccatcaacggctgcagatgcgagcccctgatcaacaagctggagaaccagctggaggccaccgtggaggagatcaaggccgagctgggcagcgtgcaggacaagatgaacaccaagctgggccagatggagaacaagacccagcaccagatgagagtgctggacaagctgatggtggagagactgagcgccgagagaaccgagtgcctgaacagactgcagcagcacagcgacaccgagaagcacgagggcgagaagagacagatcagcctggtggacgagctgaagacctggtgcatgctgaagatccagaacctggagcagaagctgagcggcgacagcagagcctgcagagccaagagcacccccagcacctgcgagagcagcaccggcgtggaccagctggtggtgaccgccggccccgccgccgccagcgacagcagcccccccgtggtgagacccaaggagaaggccctgaacagcaccgccacccagagactgcagcaggagctgagcagcagcgactgcaccggcagcagactgagaaacgtgaaggtgcagaccgccctgctgcccatgaacgaggccgccagaagcgaccagcaggccggcccctgcgtgaacagaggcacccagaccaagaagagcggcaagagcggccccaccagacacagagcccagcagcccgccgccagcagcacctgcggccagcccccccccgccaccggcagcgagcagaccggcccccacatcagagacaccagccaggccctggagctgacccagtacttcttcgaggccgtgagcacccagatggagaagtggtacgagagaaagatcgaggaggccagaagccaggccaaccagaaggcccagcaggacaaggccaccctgaaggagcacatcaagagcctggaggaggagctggccaagctgagaaccagagtgcagaaggagaactag

SEQ ID NO: 85021 - protein, 692 aa, Artificial Sequence
  derived and/or modified sequence
MSQQDAVAALSERLLVAAYKGQTENVVQLINKGARVAVTKHGRTPLHLAANKGHLPVVQILLKAGCDLDVQDDGDQTALHRATVVGNTEIIAALIHEGCALDRQDKDGNTALHEASWHGFSQSAKLLIKAGANVLAKNKAGNTALHLACQNSHSQSTRVLLLAGSRADLKNNAGDTCLHVAARYNHLSIIRLLLTAFCSVHEKNQAGDTALHVAAALNHKKVAKILLEAGADTTIVNNAGQTPLETARYHNNPEVALLLTKAPQGSVSAGDTPSSEQAVARKEEAREEFLSASPEPRAKDDRRRKSRPKVSAFSDPTPPADQQPGHQKNLHAHNHPKKRNRHRCSSPPPPHEFRAYQLYTLYRGKDGKVMQAPINGCRCEPLINKLENQLEATVEEIKAELGSVQDKMNTKLGQMENKTQHQMRVLDKLMVERLSAERTECLNRLQQHSDTEKHEGEKRQISLVDELKTWCMLKIQNLEQKLSGDSRACRAKSTPSTCESSTGVDQLVVTAGPAAASDSSPPVVRPKEKALNSTATQRLQQELSSSDCTGSRLRNVKVQTALLPMNEAARSDQQAGPCVNRGTQTKKSGKSGPTRHRAQQPAASSTCGQPPPATGSEQTGPHIRDTSQALELTQYFFEAVSTQMEKWYERKIEEARSQANQKAQQDKATLKEHIKSLEEELAKLRTRVQKEN

SEQ ID NO: 85022 - DNA, 2079 bp, Artificial Sequence
  derived and/or modified sequence
atgtcccagcaggatgccgttgcagcgctcagtgaacgcctcttggtggctgcttacaagggccagactgaaaatgtggttcagctcatcaacaagggcgcacgggtggcggtcaccaaacacggacgaaccccattgcacctggctgcgaacaagggccatctgcccgttgtacagatcctcctcaaagcaggctgcgacctggatgtccaggacgacggggaccagaccgctttacaccgggcgactgttgtgggtaatacagagatcatagctgccctcatccatgaagggtgtgcacttgataggcaggataaggacggaaataccgctttgcacgaggccagttggcacggatttagtcagtctgctaaattactgataaaagccggcgcgaatgtgctggccaagaacaaagccggcaacacagctttgcatcttgcatgtcaaaactcgcacagccagtctacaagggtcctccttctggccgggagccgggccgatctaaagaacaatgctggtgacacatgcctccatgtagctgcccggtataaccacctctcaattattaggctcctgctgactgctttttgttccgtgcacgaaaagaaccaggcaggggacacagcactgcacgtggcagccgcactgaatcataagaaggtggccaagatcctgctcgaggctggagcagacaccaccattgtgaataacgccggccaaaccccgctcgagactgcgcgataccataataaccctgaagtggccctcctactcactaaagccccccaggggtctgtgtcagctggcgacacaccatccagtgagcaagcagtcgcccggaaggaagaagcccgagaggaatttttgtctgccagcccggagccgagagctaaggacgatcgccgaaggaaatctaggcctaaagtgagtgcgttctccgacccaactccccccgccgatcagcaacccgggcatcagaagaacttgcacgcacataatcatccaaagaaacgcaatcggcaccgatgcagcagtccgccacctccacacgagtttagggcctatcagctgtatacactctatagagggaaggacggcaaagtcatgcaggctccaattaacggctgtcgttgcgagcctttgatcaacaagttggagaaccagcttgaggcaactgtggaggagattaaagccgaactaggatcggtgcaggataagatgaacactaaactcgggcagatggaaaacaagactcagcaccagatgcgagtgttagacaaattgatggtggagagactgtcagctgaacgcaccgagtgcctgaatagactccagcagcactccgacactgaaaaacacgaaggcgagaaaagacagatatcgctggtagatgaattgaaaacctggtgtatgctcaagattcagaacctagagcagaagttatcgggggatagtagagcttgcagggccaagtccacaccctctacatgtgagtcaagcaccggcgtcgatcagctcgtggtgacagccggccccgctgctgcaagtgactcaagcccccccgttgtgcggcccaaggaaaaggctttgaactccaccgccacccaaaggttgcagcaagagcttagtagctccgattgcactgggtcaagacttagaaatgtgaaagtacagaccgctctactgccgatgaacgaagcagcaaggtcagatcaacaggccgggccgtgtgtaaataggggtacccagaccaaaaaatcaggcaaatccggcccaactagacatcgagctcagcagcccgccgccagttctacctgtgggcagccacctccagcaacgggatccgagcagaccgggccacacattagggacaccagccaagccctcgagttaactcaatacttttttgaggccgtgtcaacacagatggagaagtggtatgaaagaaagattgaggaagccagatcccaggctaatcagaaggctcagcaagataaggccacgcttaaagagcacataaagtctttagaagaggagctcgctaagctgcggacaagggttcagaaagagaattag

SEQ ID NO: 85023 - DNA, 528 bp, Artificial Sequence
  derived and/or modified sequence
atgtcacagcaggacgccgtggcggctcttagtgaaagacttttggtggccgcttacaagggccaaacagagaatgtggtccagctgatcaacaaaggtgctagagtcgctgtcaccaaacacggcaggacacccctgcatctcgcagccaacaagggacacctccctgtggttcagatcttgctgaaggctggttgcgatctcgatgtgcaggacgacggagatcaaactgctctgcacagagctacagttgtgggcaatacagaaattattgcagcccttattcacgagggctgtgccctagaccgccaggacaaagacggtaatacggcactgcacgaagcatcttggcatggattttctcagtccgccaaactgctgataaaagcaggagcaaatgtgttagcaaaaaacaaagccggaaatacagccctccatctggcctgccagaattcacactcccagtcaactcgggtgctcttactggctggttcccgcgccgacttaaagaacaatgccggtgattag

SEQ ID NO: 85024 - DNA, 357 bp, Artificial Sequence
  derived and/or modified sequence
atgtcacagcaggatgctgtcgcagcgctcagcgaaagactcctggtggcagcgtataaaggccaaaccgagaatgtggtgcaactgattaataagggcgcgcgtgtcgcagtgacaaagcatgggcgtacgcccctgcatcttgctgcaaataaaggccacctgcccgtcgtccagatcctgctcaaagccggctgcgatctggatgtccaagatgatggagaccagaccgccctgcatagggccacagtagttggaaataccgaaataatcgccgccctcattcacgagggctgtgctctggataggcaggataaagatggcaatacagcgttgcatgaagcttcctggcactag

SEQ ID NO: 85025 - DNA, 2079 bp, Artificial Sequence
  derived and/or modified sequence
atgagccagcaggatgctgtggccgccctgtctgagcggctgctggtggccgcctacaagggccagacagaaaatgtggtgcagctgatcaacaagggggcccgggtggccgtgaccaagcacggccgcacccccctgcacctggccgccaacaagggccacctgcctgtggtgcagatcctgctgaaggccggctgtgacctggatgtgcaggatgatggagaccagacagccctgcaccgggccaccgtggtgggcaacacagagatcatcgccgccctgatccacgagggctgtgccctggaccggcaggacaaggatggcaacacagccctgcacgaggcctcctggcacggcttcagccagagcgccaagctgctgatcaaggccggggccaacgtgctggccaagaacaaggccggcaacacagccctgcacctggcctgccagaacagccacagccagagcaccagggtgctgctgctggccggcagcagagctgacctgaagaacaatgctggggacacctgcctgcacgtggccgcccgctacaaccacctgagcatcatccggctgctgctgacagccttctgcagcgtgcatgagaagaaccaggccggggacacagccctgcacgtggccgccgccctgaaccacaagaaggtggccaagatcctgctggaggccggggctgacaccaccatcgtgaacaatgccggccagacccccctggagacagcccgctaccacaacaaccctgaggtggccctgctgctgaccaaggccccccagggctctgtgtctgctggggacacccccagcagcgagcaggccgtggccaggaaggaggaggcccgggaggagttcctgagcgccagccctgagccccgggccaaggatgacagaagaaggaagagccggcccaaggtgtctgccttcagtgaccccaccccacctgctgaccagcagcccggccaccagaagaacctgcacgcccacaaccaccccaagaagaggaacagacaccgctgcagcagccccccacctcctcatgagttccgggcctaccagctgtacaccctgtaccggggcaaggatggcaaggtgatgcaggcccccatcaatggctgccgctgtgagcccctcatcaacaagctggagaaccagctggaggccaccgtggaggagatcaaggccgagctgggctctgtgcaggacaagatgaacaccaagctgggccagatggagaacaagacccagcaccagatgagggtgctggacaagctgatggtggagcggctgtctgctgagaggacagagtgcctgaaccggctgcagcagcacagcgacacagagaagcatgaaggagagaagaggcagatcagcctggtggatgagctgaagacctggtgcatgctgaagatccagaacctggagcagaagctgagcggggacagccgggcctgccgggccaagagcacccccagcacctgtgagagcagcactggagtggaccagctggtggtgacagctggccctgctgctgccagtgacagcagcccccctgtggtgcggcccaaggagaaggccctgaacagcacagccacccagaggctgcagcaggagctgagcagcagtgactgcaccggcagccggctgagaaatgtgaaggtgcagacagccctgctgcccatgaatgaggccgcccggagtgaccagcaggccggcccctgtgtgaacagaggcacccagaccaagaagagcggcaagagcggccccaccaggcaccgggcccagcagcctgctgccagcagcacctgtggccagcccccaccagccaccggcagcgagcagacaggcccccacatccgggacaccagccaggccctggagctgacccagtacttctttgaagctgtgtccacccagatggagaagtggtatgaaaggaagattgaggaggcccggagccaggccaaccagaaggcccagcaggacaaggccaccctgaaggagcacatcaagagcctggaggaggagctggccaagctgcggaccagggtgcagaaggaaaattag

SEQ ID NO: 85026 - DNA, 528 bp, Artificial Sequence
  derived and/or modified sequence
atgagccagcaggatgctgtggccgccctgtctgagcggctgctggtggccgcctacaagggccagacagaaaatgtggtgcagctgatcaacaagggggcccgggtggccgtgaccaagcacggccgcacccccctgcacctggccgccaacaagggccacctgcctgtggtgcagatcctgctgaaggccggctgtgacctggatgtgcaggatgatggagaccagacagccctgcaccgggccaccgtggtgggcaacacagagatcatcgccgccctgatccacgagggctgtgccctggaccggcaggacaaggatggcaacacagccctgcacgaggcctcctggcacggcttcagccagagcgccaagctgctgatcaaggccggggccaacgtgctggccaagaacaaggccggcaacacagccctgcacctggcctgccagaacagccacagccagagcaccagggtgctgctgctggccggcagcagagctgacctgaagaacaatgctggggactag

SEQ ID NO: 85027 - DNA, 357 bp, Artificial Sequence
  derived and/or modified sequence
atgagccagcaggatgctgtggccgccctgtctgagcggctgctggtggccgcctacaagggccagacagaaaatgtggtgcagctgatcaacaagggggcccgggtggccgtgaccaagcacggccgcacccccctgcacctggccgccaacaagggccacctgcctgtggtgcagatcctgctgaaggccggctgtgacctggatgtgcaggatgatggagaccagacagccctgcaccgggccaccgtggtgggcaacacagagatcatcgccgccctgatccacgagggctgtgccctggaccggcaggacaaggatggcaacacagccctgcacgaggcctcctggcactag

SEQ ID NO: 85028 - DNA, 2079 bp, Artificial Sequence
  derived and/or modified sequence
atgagccagcaggacgccgtggccgccctgagcgagcggctgctggtggcagcctataagggtcagactgagaacgtggtacagctgattaataagggggctcgtgtagccgttactaagcatggacgaacaccccttcacctggctgctaacaagggccacctgcctgtagtacagattttgctgaaggcaggttgcgatctggatgtgcaggacgacggtgatcaaacggccctccaccgggccactgtcgtggggaatacagaaataatcgcagccctgatccacgaaggatgtgctcttgatcgacaagacaaggacggtaatactgccctgcacgaggctagctggcacggattttcacagagcgcaaaacttctgatcaaggccggggcaaacgtccttgcaaagaacaaggctggcaacaccgcactccacttagcctgccaaaattctcattcccaatcaacaagagtcctcctgctagccgggtctagagccgacctgaaaaacaatgctggcgatacctgcttacatgtcgcggccagatataaccatctgtcaattatccggctccttctgaccgcgttctgttccgtgcacgagaagaaccaggccggcgatacagcgctccacgttgctgcagccctcaatcataagaaggtcgcaaaaatcttgctggaggctggcgccgatactacgatcgttaataatgccggacaaactcctctggaaactgcccgataccacaataatcccgaggtcgctctgttgttaacaaaggctccccaggggtccgtcagtgccggagacactccatcatctgagcaagcagttgctaggaaagaggaggccagggaagagttcctttccgccagtcctgagcctagggctaaggatgatcgccgtaggaagtctcgtccaaaggtctcagccttctcagatcccacccctcctgcagaccaacagccgggccaccagaaaaatttgcatgctcacaatcatccgaaaaaaaggaacaggcatagatgcagcagtccaccccccccacacgagtttcgagcatatcagctatacacactgtatagggggaaagatggcaaggttatgcaggccccaatcaacgggtgccgctgcgaacccttgatcaacaagctcgaaaaccagttggaggctaccgtagaggagattaaagccgagctgggctctgttcaggacaaaatgaatacaaaactcggacagatggagaataagacacagcatcagatgagagtgttagataagctgatggtcgagaggttgtccgctgaaaggaccgagtgcctcaatcgactgcagcaacattccgacaccgaaaagcacgagggcgagaaaagacagattagtttggtggacgaactgaagacctggtgtatgttgaaaatacaaaacctcgagcagaaactgagcggtgattctagagcgtgccgtgccaagagcacaccgtctacttgtgagagttccaccggcgtagatcagcttgtggtgacagctggaccggctgccgcctcggacagctctccccccgtagtgcggcccaaggaaaaggcattgaattctacagccacccaacggcttcaacaggagcttagcagctccgattgcacaggctcgagattgcgcaacgtgaaagtccagaccgctcttctaccaatgaacgaggcagcccgctccgatcagcaagctggaccctgcgtcaataggggcacccaaaccaaaaagagcggaaaaagtggtcccaccaggcatagagcccagcagcccgctgcaagctccacttgtggccagcccccacctgccactgggtctgaacagacgggtccccacatccgcgacacctctcaggcccttgagttaactcagtatttcttcgaagcggtgagtacccaaatggaaaagtggtatgaaagaaagatagaggaagcccgcagtcaggctaatcaaaaggcccaacaagacaaggccacactgaaagaacacatcaagtccctcgaggaggaactagccaagttacgcacccgcgtgcaaaaggaaaattag

SEQ ID NO: 85029 - DNA, 528 bp, Artificial Sequence
  derived and/or modified sequence
atgagccagcaggacgccgtggccgccctgagcgagcggctgctggtggctgcctataaggggcaaacggaaaacgtagttcagcttatcaacaagggcgctagggtcgcagtaacaaagcacgggagaactccactgcatctggccgctaacaagggacatctccctgtagtacagatcctcctcaaggcaggctgtgacctggacgtacaggatgatggagatcaaacggccctgcaccgcgccactgttgttggcaacaccgaaatcattgctgccctcatccacgaagggtgtgctctcgatcgccaggataaggatggcaacactgcactgcatgaagcctcatggcacggtttctctcagtctgccaagctgttaatcaaagccggcgccaacgttttggccaaaaacaaggctggtaatactgccctccatttagcatgtcagaattctcactcgcagtcaacacgcgtgttgctgctggctggctctcgggcggatctgaagaataatgccggtgattag

SEQ ID NO: 85030 - DNA, 357 bp, Artificial Sequence
  derived and/or modified sequence
atgagccagcaggacgccgtggccgccctgagcgagcggctgctggttgccgcttacaaggggcagaccgagaatgtggtgcagctgattaataaaggggcaagagtcgccgtcacaaaacacggcaggactccactgcacttggccgcgaacaaaggacacttgcccgtggtccagattcttctgaaggccgggtgtgacctggacgttcaggacgacggggaccagaccgcccttcaccgggcgactgtagtgggaaacactgagattatcgccgcgcttattcacgaagggtgtgctctcgatcgccaggataaagacgggaatactgccctgcacgaagctagctggcactag

SEQ ID NO: 85031 - DNA, 5258 bp, Artificial Sequence
  derived and/or modified sequence
ggacgcggcgggctcggccacaggtaacccgcaggagccgagagcgctgcctggcgcgcgggcggctggaggcacggcgctgggcggcgccgaggccctggggccgccggagccagcgggagccagtccccgtcttcgcccctcgccccccaccgtgtcgccggccttggtccctgcggcgcggacgtccggcgcgggagagaaaggtcccgaagatggcatattcataaagacatcttctgatgattgtgaacatctttacctctgggtgccaggccgggccagtgacttcgtgttgagctgaaggaacttgtctaccgcttccctgaaaacctttctttcctaattcatgagccagcaagatgcggtcgctgcactttcagagcgccttctcgtagctgcgtacaaaggccaaacagagaatgtggttcagctcatcaacaagggcgccagggtagcggttaccaagcatggccggactcccctgcatcttgctgccaataagggccatcttcctgtggtccagatcttgctgaaggctggctgcgaccttgatgtccaggatgatggggaccagaccgccttgcaccgggccacagtggtggggaacacggagatcatcgcggcgctcatccacgaagggtgtgccctggacagacaagacaaggatgggaatacagccttgcatgaagcatcctggcatggtttcagccagtcagccaagctgctcattaaagcaggagccaacgtgcttgccaagaacaaggcggggaacacagctctgcacctggcctgccagaacagccactcccagagcacgcgcgtcctcctgctggccgggtcccgcgctgacctcaaaaataatgcaggagacacctgtttgcacgttgctgcgcgctataatcacttgtccatcattaggctcctcctcactgctttctgttctgtccatgaaaagaaccaggctggagacacagcacttcacgttgctgctgccctaaatcacaagaaggtggccaaaatcttactggaagccggagcagatacgaccattgttaacaatgcaggccagactccgctggagactgcccgctaccacaataacccggaagttgctcttctccttactaaagctccccagggcagtgtctcagcaggagacacccccagcagtgaacaggctgtggccagaaaagaagaagccagagaagagttcctgtcagcctccccagaacccagagcaaaggatgacaggaggagaaagtcaaggcccaaggtgtcagcattttctgaccccaccccaccagccgaccaacagcctggacaccagaagaacctgcatgctcataatcaccctaaaaagaggaacaggcatcggtgttcatccccacccccaccccatgagttcagggcgtatcagctctacacattgtaccggggcaaggatgggaaagtgatgcaggcaccaataaatggttgtcgatgtgaacctctaatcaacaagctggagaatcagttggaggctactgtggaggagataaaagcagagctgggatcggttcaggacaaaatgaatacaaagctggggcagatggagaataagacccagcaccaaatgcgtgttttggacaagctgatggttgagcgactttctgcagagaggacggagtgcctgaaccgcctgcaacagcactcagacacagagaagcatgagggggagaaacgacagatatccttggtggatgaattaaaaacctggtgcatgttaaagattcagaatctggagcagaagctttctggagattctagggcctgcagagctaaatccacaccatctacttgtgagtcctctacaggtgtggaccaattagtggtgactgcaggtccagcagcagcttccgacagctcccctccagtggttaggcccaaagagaaggccctcaactccactgctacccagagactccagcaggagctgtcgtcttctgactgtacaggctcccgactgagaaacgtcaaggtccagacagccttgctacccatgaatgaggcagccagatctgatcagcaggctgggccctgcgtcaacagaggcactcaaactaagaagtctgggaagagtgggccaacaaggcatcgtgcccagcaacccgcagccagcagcacctgtgggcagccgccaccagccacaggcagcgagcagactggccctcacattcgggacacctcccaagctctggagcttacccagtatttttttgaggctgtttctacccagatggaaaagtggtatgaaaggaagattgaagaagcacgaagccaagccaatcagaaagcccagcaagataaggctacattgaaggaacacattaaaagtttagaagaggaacttgccaaactaaggactagggtgcagaaggaaaattagcaccaataaagaggaaatatgaaaggattcttgaagatttccagttttgcaactgcataatagctatgcccaaggagtcaactattgtatatattgcagatttgcctttttaaaaaaatcactaattctacaatgtgccagatacatgtttcctatgcccaggaagttatgaagacttcaacaattaaactgaaaccaggggaagcttgcttagttttgggtttcattataaactcttagcctcagtccaggttaatctgaagtttgaaagctcagattaagcaagccatgccaagaaactggacgatgtgtaagcctagactctaaaattcaagatgtgtgaaataatataagtcaaaagcaagaaaaacgtaatcccgtctgaactcaagtagtcattcatataaatttgaacacacctgctgtgcctagacaagtgtctttctgtaagagctgtaactctgagatgtgctaaataaaccctctttctcaaattcgtaattctccaactgttgacattttaatcacatgaaaagttatcagatttttgaggagaaatattttcatgatgtcacaagatccaatatatcttatgataaaatttattgaaaagtcagtttatttaaataatgaataattggctaacagctctggaaacaatgagatcaaatgagaaagattcaaattgtttgttattttctgtattttcagtcaaaaaatcagttatatagtgattttaaagcagattaatggaaaaaaattcatgtaacaattacctgaaaatttataacctattcctaatcaaacccaattatatcagaatacctttctgaatttgagatttttgctctacattttataatgaataaggctattttttgaaagtatttcattttgaattctgtcattaacctcaaaagctttctactgctttgcggtgaaggcaaaatattcgataactcaacttaggccccactgttccccaacttcatggaggccagaagactttactttgttccataatgaaatataaacacagaacaaagttgtaaaagtagcatggatatgttgaaactttggacaagcttcttgtcctttggaatatgggatttatattcatctcctcaatatcccatgtatgcacagaaacttcagttctatttctatagacacaggaacctagtgactattgaacgtaattgtaataaaatgctgctcattgagccaaagagaagaaatgatttattaacatggggacaccaagaaaaacaaagtatgcttttattccctttgtcaagctcagttttagggttttttcttttttttatagtgacaatccatagatatagacattcctaaaagaaaaataattcagtagatatatgtcactgttacctgaatatggaatgaatttgatgttttttattttgttgagacagggtcttgctctgtcacccagactggagtgcagtggcatgatcacacctcactgcagccttggcctctcaggctcgtgatcctcctgcctcaacctcgcaagtagcttgggactacaggcgtgtgccaccagtcctggctaattttttgtagatataaggtctcatgatattgcccaggctgaatttgatgttatttcaagttgattttcatgtgtttgggagcttgtcttgttctcaactactacgcaggtagacagtcttcccccagagactcattagattgcaatatagaggcactttctcatttccctattgttcctaatacagaattgtagagctggagagtaccttcagttttctaaatctattctcaaacaggatatcactaacctctttagaatcattcctcagtatacatcaatttattgagaactgcctaatactcaagaaattaaatcctgagttcagtaggctgtgttccaagcaggaattattttcacttaccaaaatatctcctattacctcaaggtatccttgttgaggaatgctgaaaactaaattttaagtatcaagtctagaccatagagtgctttggtgggagtattttgattacctcctacccatcagaagcaggcagctaatattgtgaactgagtatttttgtcaaaagtcacagggaagagactacagaagaatgagaagggtcaaaaggacctagtgtggcttactacatggatcttgtctcttggaggtctgtcgtagaagaagaaacaaatagaggtgatgaagacacagaacaggctcagtcagcatcctcacccagagatggcaacatctattaagaccaatgcaataccttttcatcttcagcaaatgttgtttcatctgtttttgatccttggcattgtcaaaaacttaactgcaggtccagtgtatatttttccttatttttcccttttagctatctgctaaagtgagtaaatgccacaactgtacttttccaaagaaaaagaactattgacaacttatagcctgtcatgcaggtcatgtttcaaatcaaggctgaaattttcaacagctgtgggaaaaactaaaacacagaaatactgtacagtattagtgtttttttaaagaaattgttagtgcattattgagtatactaaatatctgtgattaaataaattagttctaacttttgattttgggagcccaaaataaagggagtgttgttttcatggttatgccttgtttgtggagtcaagtgttgatatacttgaggcatgttatgtgtcttctaattaatatttttatcaccttgaatttgtgtctcttccaagcattaaagatactatggatcttaaattccttattaaaaaaatgcaagtgtgaat

SEQ ID NO: 85032 - DNA, 829 bp, Artificial Sequence
  derived and/or modified sequence
aactgtaagtagcgagcttggtttccatgagtcacatgtgtccacagaataggcccaactagacaacagatctgtgggaatgtttggctctccatgaaccacaaagactcctccaacacagaggtgcagtacccacctgggccaaggagggaagatgcaggtcccgaagatggcatattcataaagacatcttctgatgattgtgaacatctttacctctgggtgccaggccgggccagtgacttcgtgttgagctgaaggaacttgtctaccgcttccctgaaaacctttctttcctaattcatgagccagcaagatgcggtcgctgcactttcagagcgccttctcgtagctgcgtacaaaggccaaacagagaatgtggttcagctcatcaacaagggcgccagggtagcggttaccaagcatggccggactcccctgcatcttgctgccaataagggccatcttcctgtggtccagatcttgctgaaggctggctgcgaccttgatgtccaggatgatggggaccagaccgccttgcaccgggccacagtggtggggaacacggagatcatcgcggcgctcatccacgaagggtgtgccctggacagacaagacaaggatgggaatacagccttgcatgaagcatcctggcatggtttcagccagtcagccaagctgctcattaaagcaggagccaacgtgcttgccaagaacaaggcggggaacacagctctgcacctggcctgccagaacagccactcccagagcacgcgcgtcctcctgctggccgggtcccgcgctgacctcaaaaataatgcaggagaca

SEQ ID NO: 85033 - DNA, 576 bp, Artificial Sequence
  derived and/or modified sequence
acagttatccagaaactgaacacgatgtagaacagagaggacagcccctcggatgtgagtaccatctcttcaacacaaggtcccgaagatggcatattcataaagacatcttctgatgattgtgaacatctttacctctgggtgccaggccgggccagtgacttcgtgttgagctgaaggaacttgtctaccgcttccctgaaaacctttctttcctaattcatgagccagcaagatgcggtcgctgcactttcagagcgccttctcgtagctgcgtacaaaggccaaacagagaatgtggttcagctcatcaacaagggcgccagggtagcggttaccaagcatggccggactcccctgcatcttgctgccaataagggccatcttcctgtggtccagatcttgctgaaggctggctgcgaccttgatgtccaggatgatggggaccagaccgccttgcaccgggccacagtggtggggaacacggagatcatcgcggcgctcatccacgaagggtgtgccctggacagacaagacaaggatgggaatacagccttgcatgaagcatcctggcat

SEQ ID NO: 85034 - DNA, 2079 bp, Artificial Sequence
  derived and/or modified sequence
atgagtcagcaagatgccgtggccgctcttagcgagaggcttctggtcgcagcctacaagggccagacagagaatgtcgtgcagctgataaataaaggtgctagggtggcagttacgaagcatggcaggacaccacttcatctcgccgctaataaagggcacttacctgtggtacaaattttgctgaaggcaggctgtgacctggatgtacaagatgacggcgaccagactgctctgcatcgagccaccgtagttggtaacaccgagatcattgctgcgctcatccacgagggatgtgcattggatcggcaggataaagatggtaacacagcattgcatgaagcatcatggcacgggttttcccaatcagcaaagttgttaatcaaggccggagccaacgtgctggccaagaacaaagcgggtaatacagccttgcatttggcgtgtcaaaacagccattctcaatcaacccgggtacttctgctggccggttcccgcgcagatctcaagaacaatgccggtgacacctgcctgcacgtggccgcaagatataatcacctctccatcatccggctgctgctcaccgcattttgctcagtacatgaaaagaaccaagcaggtgatacggcccttcatgtggccgctgcgctgaaccacaagaaggttgcaaagatcttgctagaagctggagccgacacgaccatcgtgaacaacgcgggacagacaccattggagactgccaggtaccacaacaaccccgaagtggctctgttattaaccaaggctccccagggctccgtatcagccggagacactccaagcagcgaacaggctgtggctagaaaggaggaagcaagagaggaatttctgtccgctagtccggaaccacgcgctaaggatgaccgacgcaggaaatcaagaccgaaagtctccgcattcagcgaccccactccccctgctgatcaacagccagggcaccagaagaaccttcacgcccacaaccaccccaagaaaagaaatcgccaccggtgctcatccccgccacccccacatgagttcagggcttatcaactgtatacactctatcggggaaaggacggaaaggtgatgcaggccccaattaatggatgtaggtgcgaacctcttataaataaactggagaaccagctggaggctaccgtcgaagaaattaaagctgagctcggatccgtgcaggataagatgaacacaaaattgggtcagatggaaaacaaaacccagcaccagatgagagtcctcgacaaactaatggtggaaaggctgagcgctgaaagaactgagtgtctgaaccgcctgcaacagcatagcgataccgaaaagcacgagggcgagaaaagacagataagtttggtcgatgagcttaagacttggtgcatgcttaaaattcagaatctggagcaaaaactctctggggactctagagcctgtcgagcaaaatccacgccctccacgtgtgaaagctctacaggcgtcgatcagctcgtggtcaccgcaggaccagcggcagcctccgacagctcacccccagtggtgcggccaaaagagaaggcactgaactccaccgccacgcagcgcttgcaacaagagttaagctcctcagattgcaccggctcacgactccgtaatgtgaaggtacagactgcgctactacctatgaacgaagctgctaggtccgatcagcaggccggtccttgcgtgaatagaggaacccagacaaaaaagtctggtaagtcgggacctacgaggcaccgggctcagcagcccgcagcgagtagcacgtgcggccagcctccccctgctactggatcagagcagactgggccacatatacgcgatacctcacaggcgctggagctgactcagtactttttcgaggctgtctccacccaaatggagaagtggtacgaaaggaaaatagaggaggcacgatctcaggcaaaccagaaggcacagcaggacaaggccactctgaaagagcatatcaagagccttgaggaggagctggcaaaactgaggacaagagtacaaaaagagaattag

SEQ ID NO: 85035 - DNA, 528 bp, Artificial Sequence
  derived and/or modified sequence
atgtctcagcaagacgccgtggccgctctgagcgagcgcttgctggttgccgcttacaaagggcagactgaaaacgttgtgcaacttatcaacaaaggcgctcgtgtggcagttacgaagcacgggaggacccctcttcacctagctgcgaacaagggtcatctgcccgtggtgcagatcctcctcaaagccggatgtgatctcgatgttcaggatgacggagatcagactgcccttcatcgcgcaaccgtggttggaaacaccgagattatcgctgcactgatccacgagggatgcgcactggataggcaggataaagatggcaatactgctctgcatgaagccagttggcacgggttctctcagtctgcaaaactccttattaaagccggagccaacgtgctggccaagaacaaagcaggaaatacggcattgcatctcgcatgtcagaacagccactctcagtccacccgagtgttgctactggcagggtcaagagccgacctcaaaaataacgccggagattag

SEQ ID NO: 85036 - DNA, 357 bp, Artificial Sequence
  derived and/or modified sequence
atgagccagcaggatgctgtcgcggctctgtccgagcggctgctggtggcggcttataagggccagacagagaatgtcgtccagcttattaacaaaggcgctcgggtggccgtaaccaaacatgggaggacgccccttcacctggccgcaaacaaagggcatctcccagtggttcagatcctcttgaaagccggatgtgatctcgacgtgcaagatgacggtgaccagacagcacttcatagggccaccgtggtgggcaacactgagataatagctgctcttattcacgaagggtgtgctctggaccgccaggacaaggatgggaacactgccctccacgaggccagctggcactag

SEQ ID NO: 85037 - DNA, 2079 bp, Artificial Sequence
  derived and/or modified sequence
atgagccagcaggacgccgtggccgccctgagcgagagactgctggtggccgcctacaagggccagaccgagaacgtggtgcagctgatcaacaagggcgccagagtggccgtgaccaagcacggcagaacccccctgcacctggccgccaacaagggccacctgcccgtggtgcagatcctgctgaaggccggctgcgacctggacgtgcaggacgacggcgaccagaccgccctgcacagagccaccgtggtgggcaacaccgagatcatcgccgccctgatccacgagggctgcgccctggacagacaggacaaggacggcaacaccgccctgcacgaggccagctggcacggcttcagccagagcgccaagctgctgatcaaggccggcgccaacgtgctggccaagaacaaggccggcaacaccgccctgcacctggcctgccagaacagccacagccagagcaccagagtgctgctgctggccggcagcagagccgacctgaagaacaacgccggcgacacctgcctgcacgtggccgccagatacaaccacctgagcatcatcagactgctgctgaccgccttctgcagcgtgcacgagaagaaccaggccggcgacaccgccctgcacgtggccgccgccctgaaccacaagaaggtggccaagatcctgctggaggccggcgccgacaccaccatcgtgaacaacgccggccagacccccctggagaccgccagataccacaacaaccccgaggtggccctgctgctgaccaaggccccccagggcagcgtgagcgccggcgacacccccagcagcgagcaggccgtggccagaaaggaggaggccagagaggagttcctgagcgccagccccgagcccagagccaaggacgacagaagaagaaagagcagacccaaggtgagcgccttcagcgaccccaccccccccgccgaccagcagcccggccaccagaagaacctgcacgcccacaaccaccccaagaagagaaacagacacagatgcagcagccccccccccccccacgagttcagagcctaccagctgtacaccctgtacagaggcaaggacggcaaggtgatgcaggcccccatcaacggctgcagatgcgagcccctgatcaacaagctggagaaccagctggaggccaccgtggaggagatcaaggccgagctgggcagcgtgcaggacaagatgaacaccaagctgggccagatggagaacaagacccagcaccagatgagagtgctggacaagctgatggtggagagactgagcgccgagagaaccgagtgcctgaacagactgcagcagcacagcgacaccgagaagcacgagggcgagaagagacagatcagcctggtggacgagctgaagacctggtgcatgctgaagatccagaacctggagcagaagctgagcggcgacagcagagcctgcagagccaagagcacccccagcacctgcgagagcagcaccggcgtggaccagctggtggtgaccgccggccccgccgccgccagcgacagcagcccccccgtggtgagacccaaggagaaggccctgaacagcaccgccacccagagactgcagcaggagctgagcagcagcgactgcaccggcagcagactgagaaacgtgaaggtgcagaccgccctgctgcccatgaacgaggccgccagaagcgaccagcaggccggcccctgcgtgaacagaggcacccagaccaagaagagcggcaagagcggccccaccagacacagagcccagcagcccgccgccagcagcacctgcggccagcccccccccgccaccggcagcgagcagaccggcccccacatcagagacaccagccaggccctggagctgacccagtacttcttcgaggccgtgagcacccagatggagaagtggtacgagagaaagatcgaggaggccagaagccaggccaaccagaaggcccagcaggacaaggccaccctgaaggagcacatcaagagcctggaggaggagctggccaagctgagaaccagagtgcagaaggagaactag

SEQ ID NO: 85038 - DNA, 528 bp, Artificial Sequence
  derived and/or modified sequence
atgagccagcaggacgccgtggccgccctgagcgagagactgctggtggccgcctacaagggccagaccgagaacgtggtgcagctgatcaacaagggcgccagagtggccgtgaccaagcacggcagaacccccctgcacctggccgccaacaagggccacctgcccgtggtgcagatcctgctgaaggccggctgcgacctggacgtgcaggacgacggcgaccagaccgccctgcacagagccaccgtggtgggcaacaccgagatcatcgccgccctgatccacgagggctgcgccctggacagacaggacaaggacggcaacaccgccctgcacgaggccagctggcacggcttcagccagagcgccaagctgctgatcaaggccggcgccaacgtgctggccaagaacaaggccggcaacaccgccctgcacctggcctgccagaacagccacagccagagcaccagagtgctgctgctggccggcagcagagccgacctgaagaacaacgccggcgactag

SEQ ID NO: 85039 - DNA, 357 bp, Artificial Sequence
  derived and/or modified sequence
atgagccagcaggacgccgtggccgccctgagcgagagactgctggtggccgcctacaagggccagaccgagaacgtggtgcagctgatcaacaagggcgccagagtggccgtgaccaagcacggcagaacccccctgcacctggccgccaacaagggccacctgcccgtggtgcagatcctgctgaaggccggctgcgacctggacgtgcaggacgacggcgaccagaccgccctgcacagagccaccgtggtgggcaacaccgagatcatcgccgccctgatccacgagggctgcgccctggacagacaggacaaggacggcaacaccgccctgcacgaggccagctggcactag

SEQ ID NO: 85040 - protein, 80 aa, Artificial Sequence
  derived and/or modified sequence
MSQQDAVAALSERLLVAAYKGQTENVVQLINKGARVAVTKHGRTPLHLAANKGHLPVVQILLKAGCDLDVQDDGDQTALH

SEQ ID NO: 85041 - protein, 663 aa, Artificial Sequence
  derived and/or modified sequence
MSQQDAVAALSERLLVAAYKGQTENVVQLINKGARVAVTKHGRTPLHLAANKGHLPVVQILLKAGCDLDVQDDGDQTALHRATVVGNTEIIAALIHEGCALDRQDKAGNTALHLACQNSHSQSTRVLLLAGSRADLKNNAGDTCLHVAARYNHLSIIRLLLTAFCSVHEKNQAGDTALHVAAALNHKKVAKILLEAGADTTIVNNVLRFSRGRSLRKKRERLKEERRAQSVPRDEVAQSKGSVSAGDTPSSEQAVARKEEAREEFLSASPEPRAKDDRRRKSRPKVSAFSDPTPPADQQPGHQKNLHAHNHPKKRNRHRCSSPPPPHEFRAYQLYTLYRGKDGKVMQAPINGCRCEPLINKLENQLEATVEEIKAELGSVQDKMNTKLGQMENKTQHQMRVLDKLMVERLSAERTECLNRLQQHSDTEKHEGEKRQISLVDELKTWCMLKIQNLEQKLSGDSRACRAKSTPSTCVDQLVVTAGPAAASDSSPPVVRPKEKALNSTATQRLQQELSSSDCTGSRLRNVKVQTALLPMNEAARSDQQAGPCVNRGTQTKKSGKSGPTRHRAQQPAASSTCGQPPPATGSEQTGPHIRDTSQALELTQYFFEAVSTQMEKWYERKIEEARSQANQKAQQDKATLKEHIKSLEEELAKLRTRVQKEN

SEQ ID NO: 85042 - DNA, 243 bp, Artificial Sequence
  derived and/or modified sequence
atgagtcagcaagatgccgtggctgctctgtcagaacggctattagtggcagcctacaagggccaaaccgagaatgtagtgcagttgatcaataagggtgcccgcgtagctgtcaccaaacacgggcgtactccactgcatcttgctgcgaacaaggggcacttacccgtggtacagatactcctcaaggccgggtgcgatctcgacgtccaggatgatggcgaccagacagccctgcactag

SEQ ID NO: 85043 - DNA, 309 bp, Artificial Sequence
  derived and/or modified sequence
atgtcccaacaggacgccgtagcagcattgagtgaacgcttgctagtcgctgcatataaggggcagactgaaaatgtggtgcaactcataaataagggggcgagagtggcagttaccaagcatggaagaactccactgcaccttgccgccaacaaaggccatttgccggtggtgcagattttattgaaggcaggttgtgatctggacgtgcaggatgacggtgaccagacagccctgcaccgcgccacagtggttggtaatactgagatcatcgccgctctgatccatgagggttgtgccctggactag

SEQ ID NO: 85044 - DNA, 1992 bp, Artificial Sequence
  derived and/or modified sequence
atgagccagcaggatgctgtcgcagctctgtcagagaggttattagtcgctgcttacaaaggccagacagagaatgtcgtgcaattgataaacaagggtgcccgcgttgccgtcacaaagcacggcagaaccccactgcatctggctgccaataagggacacttacccgtcgtccagatcttactcaaggcgggttgtgacctcgacgttcaggatgatggggaccaaaccgccctccatcgcgccactgtggtcggcaatacggagatcatcgctgctttaatccacgagggctgcgctctggatcggcaggacaaagcaggaaacaccgcgttgcatctcgcctgccagaattcacacagccagtcaacccgcgtgcttctgttagctgggtccagggcagatctaaagaataacgcaggagacacttgtctccatgttgccgcccgctataatcacttgtcgatcatcaggttgcttctcaccgcattctgctcagtgcatgagaaaaaccaggccggtgatacagctttacatgtcgctgctgctctcaaccacaagaaggttgcaaaaatcttacttgaagcaggagcagatacaacaatcgttaataacgtgcttcggttttcccgagggaggagcttacgaaaaaagcgcgagcgcctcaaggaagagcggcgagcccagtcggtgcccagagatgaggtggctcagtccaaggggtctgtttccgcaggcgacacaccatctagtgagcaagccgttgccaggaaggaggaggcccgtgaagaattcctgagcgcgtctccggagcctcgggccaaggacgatcggaggagaaaatccaggcccaaagtgtctgcattcagtgatccaacaccacctgctgatcaacagcctgggcatcagaagaaccttcacgctcataatcatcctaaaaagagaaatcgacataggtgctcttcccctcccccgccacatgagttccgggcctaccagctatacactctttaccgcggaaaggacggtaaagtcatgcaggccccaattaatggctgccgctgtgagcccctcatcaacaaactggagaaccaacttgaggccactgtggaagagatcaaagccgaactgggctccgtccaggataagatgaacacaaaactgggtcagatggagaataaaactcagcaccagatgcgggtgctggacaagctcatggttgagaggttaagcgccgagagaaccgagtgcttgaatcgtcttcagcagcattctgacaccgaaaagcatgagggcgaaaagcgccaaataagcctggtggacgagctgaagacctggtgcatgttaaaaattcagaacctagagcagaagcttagcggtgacagtcgcgcctgtcgagcaaagtctaccccctcaacctgcgttgatcagctggtggtcaccgcggggcccgctgcagcttccgacagcagtcccccagttgtgcgccccaaagagaaagccttgaacagtacagctactcagagacttcagcaggaactcagctcttccgactgcaccggaagccgcctgagaaacgtgaaggtccaaaccgcacttctgcccatgaatgaggctgcccgctcagaccagcaggccggcccctgcgttaatagaggcactcagacaaaaaaatctggtaagtctggccccacccgccacagggcccaacagcccgcagcgtctagcacgtgcgggcaacctcctccagccaccgggtccgagcaaacaggcccgcacatcagagataccagtcaagccctggagctgacacagtatttcttcgaggccgtgagtactcagatggagaaatggtacgaaagaaagattgaggaagccagaagtcaagctaatcagaaagcacagcaagacaaggccacgctgaaggagcatattaagagcctggaggaggaattggcaaagcttaggaccagagtgcaaaaggagaattag

SEQ ID NO: 85045 - DNA, 243 bp, Artificial Sequence
  derived and/or modified sequence
atgagccagcaggatgctgtggccgccctgtctgagcggctgctggtggccgcctacaagggccagacagaaaatgtggtgcagctgatcaacaagggggcccgggtggccgtgaccaagcacggccgcacccccctgcacctggccgccaacaagggccacctgcctgtggtgcagatcctgctgaaggccggctgtgacctggatgtgcaggatgatggagaccagacagccctgcactag

SEQ ID NO: 85046 - DNA, 309 bp, Artificial Sequence
  derived and/or modified sequence
atgagccagcaggatgctgtggccgccctgtctgagcggctgctggtggccgcctacaagggccagacagaaaatgtggtgcagctgatcaacaagggggcccgggtggccgtgaccaagcacggccgcacccccctgcacctggccgccaacaagggccacctgcctgtggtgcagatcctgctgaaggccggctgtgacctggatgtgcaggatgatggagaccagacagccctgcaccgggccaccgtggtgggcaacacagagatcatcgccgccctgatccacgagggctgtgccctggactag

SEQ ID NO: 85047 - DNA, 1992 bp, Artificial Sequence
  derived and/or modified sequence
atgagccagcaggatgctgtggccgccctgtctgagcggctgctggtggccgcctacaagggccagacagaaaatgtggtgcagctgatcaacaagggggcccgggtggccgtgaccaagcacggccgcacccccctgcacctggccgccaacaagggccacctgcctgtggtgcagatcctgctgaaggccggctgtgacctggatgtgcaggatgatggagaccagacagccctgcaccgggccaccgtggtgggcaacacagagatcatcgccgccctgatccacgagggctgtgccctggaccggcaggacaaggccggcaacacagccctgcacctggcctgccagaacagccacagccagagcaccagggtgctgctgctggccggcagcagagctgacctgaagaacaatgctggggacacctgcctgcacgtggccgcccgctacaaccacctgagcatcatccggctgctgctgacagccttctgcagcgtgcatgagaagaaccaggccggggacacagccctgcacgtggccgccgccctgaaccacaagaaggtggccaagatcctgctggaggccggggctgacaccaccatcgtgaacaacgtgctgcgcttcagccggggccgcagcctgaggaagaagcgggagcggctgaaggaggagcggcgggcccagagcgtgcccagagatgaggtggcccagagcaagggctctgtgtctgctggggacacccccagcagcgagcaggccgtggccaggaaggaggaggcccgggaggagttcctgagcgccagccctgagccccgggccaaggatgacagaagaaggaagagccggcccaaggtgtctgccttcagtgaccccaccccacctgctgaccagcagcccggccaccagaagaacctgcacgcccacaaccaccccaagaagaggaacagacaccgctgcagcagccccccacctcctcatgagttccgggcctaccagctgtacaccctgtaccggggcaaggatggcaaggtgatgcaggcccccatcaatggctgccgctgtgagcccctcatcaacaagctggagaaccagctggaggccaccgtggaggagatcaaggccgagctgggctctgtgcaggacaagatgaacaccaagctgggccagatggagaacaagacccagcaccagatgagggtgctggacaagctgatggtggagcggctgtctgctgagaggacagagtgcctgaaccggctgcagcagcacagcgacacagagaagcatgaaggagagaagaggcagatcagcctggtggatgagctgaagacctggtgcatgctgaagatccagaacctggagcagaagctgagcggggacagccgggcctgccgggccaagagcacccccagcacctgtgtggaccagctggtggtgacagctggccctgctgctgccagtgacagcagcccccctgtggtgcggcccaaggagaaggccctgaacagcacagccacccagaggctgcagcaggagctgagcagcagtgactgcaccggcagccggctgagaaatgtgaaggtgcagacagccctgctgcccatgaatgaagctgcccggagtgaccagcaggccggcccctgtgtgaacagaggcacccagaccaagaagagcggcaagagcggccccaccaggcaccgggcccagcagcctgctgccagcagcacctgtggccagcccccaccagccactggaagtgagcagacaggcccccacatccgggacaccagccaggccctggagctgacccagtacttctttgaggccgtgtccacccagatggagaagtggtatgaaaggaagattgaggaggcccggagccaggccaaccagaaggcccagcaggacaaggccaccctgaaggagcacatcaagagcctggaggaggagctggccaagctgcggaccagggtgcagaaggagaactag

SEQ ID NO: 85048 - DNA, 243 bp, Artificial Sequence
  derived and/or modified sequence
atgagccagcaggacgccgtggccgccctgagcgagcggctgctggtagcggcgtacaaaggccaaaccgaaaacgtggttcagcttatcaacaagggggcccgagttgcagtcaccaagcacggtcggactcccctgcaccttgctgctaacaaggggcatcttcccgtggtgcaaatactactgaaggctggttgcgatctggatgtccaagatgatggcgaccagaccgcgcttcactag

SEQ ID NO: 85049 - DNA, 309 bp, Artificial Sequence
  derived and/or modified sequence
atgagccagcaggacgccgtggccgccctgagcgagcggctgctggtggcagcttataagggccagactgagaacgtggtccagctgattaacaaaggcgctcgcgtggccgttactaaacacggccggacgccactgcacttggcagcaaacaaaggccacctgccggtggtgcagatcctgcttaaggccggttgcgatttggatgttcaagatgatggcgaccaaacagcacttcatcgcgccacagtggtcgggaacaccgaaatcatagccgcactcattcacgaaggctgcgcacttgactag

SEQ ID NO: 85050 - DNA, 1992 bp, Artificial Sequence
  derived and/or modified sequence
atgagccagcaggacgccgtggccgccctgagcgagcggctgctggtggccgcctacaaggggcagactgagaatgtggttcagttgattaataagggcgctcgggtggcagtcactaaacatggtagaactccactccatttagctgcgaataaggggcaccttcccgttgttcagatactcttgaaagccgggtgtgacctggatgtgcaagacgatggggaccaaacagccctgcacagggccacggtggtgggaaacacagagattattgccgcactgattcatgagggttgcgcccttgatcgtcaagacaaagctgggaacaccgcactgcacctcgcttgtcaaaacagccacagccagagcacgcgggtgctgttgttagcaggatcccgcgccgatctgaagaataatgccggtgacacatgtctgcacgtggccgcccgctacaatcacctgtctattattaggctgctcctcacagcattttgtagcgtccacgaaaaaaatcaggccggggacactgctcttcacgtggccgcggctttgaatcacaagaaagtcgccaaaatactgctggaggccggggcggatacaaccatcgtcaataatgtgcttagatttagccgaggacggtctctgcgaaaaaaaagagagcgccttaaggaagaacgccgggcccaatccgtccccagggatgaggtagcccagagcaagggctccgtgtcagctggtgataccccgagcagcgaacaggctgtggcaagaaaggaggaagcccgagaagaattcctcagcgccagccccgagccccgagcaaaggacgaccgtaggagaaaaagtcgacctaaagttagtgccttctctgatcctacaccgcctgctgaccagcagcccgggcaccagaagaacctgcacgcccacaaccaccccaaaaaaagaaaccgccacagatgttcctccccccctcctccccacgagtttagggcctatcagttgtatacactgtacagaggtaaagatgggaaagtgatgcaggcacctatcaacgggtgccgatgtgagccactcatcaataaactggaaaaccagctcgaggcaactgtggaggaaattaaggccgagctgggaagcgtgcaggacaagatgaacaccaagctgggccagatggaaaacaagacacagcaccaaatgagggtgctggacaaattgatggttgagcggttgtcagctgaacgtactgagtgtttgaaccgcttacagcagcactcagacactgaaaaacacgaaggagagaaaaggcagattagcctcgtggacgaactcaaaacgtggtgtatgctgaaaattcagaacctggaacagaagctgtctggcgattcgcgtgcttgccgagccaagtccacaccgtcaacctgcgtcgaccagctcgtggtcaccgctggtcctgccgccgcctccgacagcagtcctcccgtagttagacctaaagagaaggccctgaacagcaccgccactcaacgactgcaacaggaactctcatcttcagattgtacaggatcgaggctgaggaacgtgaaggttcagacagctctgctacccatgaatgaggctgcacggtccgatcagcaagccgggccctgcgtaaacagaggaacccaaacgaaaaagtcaggtaagagcgggcctacaagacaccgggcacagcagcctgctgcctcatctacatgcggtcaaccaccccccgccacaggcagcgaacagactggcccccacatacgggataccagtcaggccctggagctgacgcagtatttttttgaggctgtgtccacgcagatggaaaaatggtacgaaaggaaaattgaggaagcccgcagccaagctaatcaaaaggcgcaacaggataaagccaccctgaaagaacacatcaagtctttggaggaggagctggctaagctcagaacacgcgtccagaaggagaactag

SEQ ID NO: 85051 - DNA, 539 bp, Artificial Sequence
  derived and/or modified sequence
agttttggtttggccattgacatgtaaatgtcagagaggcctgaggctgttccccagtggaccctcccgccttcccacacaaagccctggctctgtgagggccatggctttgcctttgtgaggcctgggccatcccagctgcagagggaagtccccgtcccgaagatggcatattcataaagacatcttctgatgattgtgaacatctttacctctgggtgccaggccgggccagtgacttcgtgttgagctgaaggaacttgtctaccgcttccctgaaaacctttctttcctaattcatgagccagcaagatgcggtcgctgcactttcagagcgccttctcgtagctgcgtacaaaggccaaacagagaatgtggttcagctcatcaacaagggcgccagggtagcggttaccaagcatggccggactcccctgcatcttgctgccaataagggccatcttcctgtggtccagatcttgctgaaggctggctgcgaccttgatgtccaggatgatggggaccagaccgccttgcac

SEQ ID NO: 85052 - DNA, 546 bp, Artificial Sequence
  derived and/or modified sequence
ctcctggctgcttcctgatgtcttgctggcagcaagtgggctagggtcggcttgcccagaggggcgcatccaggtggggttcacctttctgaaccaggtcccgaagatggcatattcataaagacatcttctgatgattgtgaacatctttacctctgggtgccaggccgggccagtgacttcgtgttgagctgaaggaacttgtctaccgcttccctgaaaacctttctttcctaattcatgagccagcaagatgcggtcgctgcactttcagagcgccttctcgtagctgcgtacaaaggccaaacagagaatgtggttcagctcatcaacaagggcgccagggtagcggttaccaagcatggccggactcccctgcatcttgctgccaataagggccatcttcctgtggtccagatcttgctgaaggctggctgcgaccttgatgtccaggatgatggggaccagaccgccttgcaccgggccacagtggtggggaacacggagatcatcgcggcgctcatccacgaagggtgtgccctggac

SEQ ID NO: 85053 - DNA, 2489 bp, Artificial Sequence
  derived and/or modified sequence
catgagccagcaagatgcggtcgctgcactttcagagcgccttctcgtagctgcgtacaaaggccaaacagagaatgtggttcagctcatcaacaagggcgccagggtagcggttaccaagcatggccggactcccctgcatcttgctgccaataagggccatcttcctgtggtccagatcttgctgaaggctggctgcgaccttgatgtccaggatgatggggaccagaccgccttgcaccgggccacagtggtggggaacacggagatcatcgcggcgctcatccacgaagggtgtgccctggacagacaagacaaggcggggaacacagctctgcacctggcctgccagaacagccactcccagagcacgcgcgtcctcctgctggccgggtcccgcgctgacctcaaaaataatgcaggagacacctgtttgcacgttgctgcgcgctataatcacttgtccatcattaggctcctcctcactgctttctgttctgtccatgaaaagaaccaggctggagacacagcacttcacgttgctgctgccctaaatcacaagaaggtggccaaaatcttactggaagccggagcagatacgaccattgttaacaatgtcttgcgcttcagtcgtgggcgaagcctgaggaaaaagagagagaggctcaaggaagagaggagagcccagtctgtgccaagagatgaggtggcccaaagcaagggcagtgtctcagcaggagacacccccagcagtgaacaggctgtggccagaaaagaagaagccagagaagagttcctgtcagcctccccagaacccagagcaaaggatgacaggaggagaaagtcaaggcccaaggtgtcagcattttctgaccccaccccaccagccgaccaacagcctggacaccagaagaacctgcatgctcataatcaccctaaaaagaggaacaggcatcggtgttcatccccacccccaccccatgagttcagggcgtatcagctctacacattgtaccggggcaaggatgggaaagtgatgcaggcaccaataaatggttgtcgatgtgaacctctaatcaacaagctggagaatcagttggaggctactgtggaggagataaaagcagagctgggatcggttcaggacaaaatgaatacaaagctggggcagatggagaataagacccagcaccaaatgcgtgttttggacaagctgatggttgagcgactttctgcagagaggacggagtgcctgaaccgcctgcaacagcactcagacacagagaagcatgagggggagaaacgacagatatccttggtggatgaattaaaaacctggtgcatgttaaagattcagaatctggagcagaagctttctggagattctagggcctgcagagctaaatccacaccatctacttgtgtggaccaattagtggtgactgcaggtccagcagcagcttccgacagctcccctccagtggttaggcccaaagagaaggccctcaactccactgctacccagagactccagcaggagctgtcgtcttctgactgtacaggctcccgactgagaaacgtcaaggtccagacagccttgctacccatgaatgaggcagccagatctgatcagcaggctgggccctgcgtcaacagaggcactcaaactaagaagtctgggaagagtgggccaacaaggcatcgtgcccagcaacccgcagccagcagcacctgtgggcagccgccaccagccacaggcagcgagcagactggccctcacattcgggacacctcccaagctctggagcttacccagtatttttttgaggctgtttctacccagatggaaaagtggtatgaaaggaagattgaagaagcacgaagccaagccaatcagaaagcccagcaagataaggctacattgaaggaacacattaaaagtttagaagaggaacttgccaaactaaggactagggtgcagaaggaaaattagcaccaataaagaggaaatatgaaaggattcttgaagatttccagttttgcaactgcataatagctatgcccaaggagtcaactattgtatatattgcagatttgcctttttaaaaaaatcactaattctacaatgtgccagatacatgtttcctatgcccaggaagttatgaagacttcaacaattaaactgaaaccaggggaagcttgcttagttttgggtttcattataaactcttagcctcagtccaggttaatctgaagtttgaaagctcagattaagcaagccatgccaagaaactggacgatgtgtaagcctagactctaaaattcaagatgtgtgaaataatataagtcaaaagcaagaaaaacgtaatcccgtctgaactcaagtagtcattcatataaatttgaacacacctgctgtgcctagacaagtgtctttctgtaagagctgtaactctgagatgtgctaaataaaccctctttctcaaatt

SEQ ID NO: 85054 - DNA, 243 bp, Artificial Sequence
  derived and/or modified sequence
atgagtcaacaggatgctgtcgcagctttgtctgagcggctgctggtcgcagcgtataagggtcagaccgaaaacgtggttcagctcatcaacaagggcgctcgcgtcgcagtaacaaaacacgggcgtacacccctgcatttggccgctaacaagggacatcttccggtcgttcagatcctgctgaaggcaggatgcgatctggacgtgcaggatgacggcgaccagactgcgctgcattag

SEQ ID NO: 85055 - DNA, 309 bp, Artificial Sequence
  derived and/or modified sequence
atgagccaacaagacgctgtagccgcactcagcgaacgtttactggttgctgcctacaagggccagacagaaaatgttgtacaactaatcaataagggggctagagtggccgttactaagcacgggagaacacccctccatctggcagctaataagggccacctgcctgtagtccagatcctgctgaaagctggttgcgaccttgacgtgcaggatgatggagaccagactgccttgcaccgcgcaacagtggtagggaatacagagatcatcgctgcgttgattcacgaaggatgcgcactcgactag

SEQ ID NO: 85056 - DNA, 1992 bp, Artificial Sequence
  derived and/or modified sequence
atgtcgcaacaggacgccgttgctgccctctccgagcggctgctcgtcgctgcttacaaagggcaaacggaaaatgtggtgcagctgatcaacaaaggggctagggtggcagtaaccaaacacggccgtactcctttacacttagccgctaacaagggccatctgcctgtggtgcagatccttctcaaggccggttgtgatcttgatgttcaggacgacggggatcaaaccgcacttcatagagctaccgtggtggggaataccgagattattgccgcactaatccatgagggctgcgccctcgacagacaagacaaggccggtaatactgcactgcacctggcatgtcagaattctcactcacaaagcactcgtgtcttgctactcgctggctccagagcagacttgaaaaacaatgctggtgacacctgcctgcatgtggccgcaagatataaccacctgagcataattcggctgctgctgaccgcattctgctctgtgcacgagaagaaccaggccggagacaccgctctccatgtggccgcagcccttaatcacaaaaaggtggctaagatcctgctggaggcgggtgctgacacgaccatcgttaacaacgtgctcagattctcccggggtcgatccctcagaaagaagcgggagagattgaaggaagagagacgcgctcagtccgttcctcgggacgaggttgcacaatctaaaggctcagtcagcgccggagataccccgagcagcgaacaggccgttgctaggaaggaggaagccagggaagaattcctcagtgcaagccctgagccccgagcgaaagatgataggagacgcaagtctcggccaaaagtcagcgctttctctgacccaaccccgccagccgatcaacagccagggcaccagaagaacctccatgcccacaaccatccaaaaaagcgcaatcgccacaggtgctctagtcctcccccaccgcacgagttccgtgcctaccagctgtacacgctgtaccggggaaaggacgggaaggtgatgcaagcccctatcaatggctgtagatgtgagccacttatcaacaagctggagaaccaattagaggctaccgtcgaggaaattaaggccgagctgggctccgtgcaggataagatgaacactaagctgggccagatggagaacaagacacagcaccagatgcgggtgctggataaactcatggttgagcgcctcagcgccgagaggacagagtgtttgaaccgacttcagcagcacagcgacaccgaaaagcatgagggcgagaaaaggcagatcagcctcgtagacgaacttaaaacatggtgtatgctcaagattcagaatttggagcagaaattgagtggggattctagggcttgtcgagctaaatctactccctcaacttgtgttgatcagttggtggttaccgcgggtcctgccgctgcctcagactcaagcccaccagtggtgcgacccaaggagaaggcactgaatagcacggctacccagcgcctgcagcaagagttatcatctagcgattgcaccgggtcaagactgcggaatgtgaaagtgcaaactgccctactgcctatgaacgaggcagcgagatcggatcaacaggcgggtccatgcgttaataggggcacacagacgaagaagagcggaaagtctggtccaacacgtcatagggctcagcagcccgctgcatcctctacatgcgggcagccaccacccgctactggcagcgagcagactggtcctcatattcgtgataccagtcaagccttagaacttacccagtacttttttgaggcagtcagtacgcagatggaaaaatggtacgagaggaagatcgaggaagcaagaagccaggcaaatcaaaaggcccagcaggacaaagccaccttgaaggagcacattaaaagtttggaggaggaactcgcgaaactcagaaccagagttcagaaggaaaattag

SEQ ID NO: 85057 - DNA, 243 bp, Artificial Sequence
  derived and/or modified sequence
atgagccagcaggacgccgtggccgccctgagcgagagactgctggtggccgcctacaagggccagaccgagaacgtggtgcagctgatcaacaagggcgccagagtggccgtgaccaagcacggcagaacccccctgcacctggccgccaacaagggccacctgcccgtggtgcagatcctgctgaaggccggctgcgacctggacgtgcaggacgacggcgaccagaccgccctgcactag

SEQ ID NO: 85058 - DNA, 309 bp, Artificial Sequence
  derived and/or modified sequence
atgagccagcaggacgccgtggccgccctgagcgagagactgctggtggccgcctacaagggccagaccgagaacgtggtgcagctgatcaacaagggcgccagagtggccgtgaccaagcacggcagaacccccctgcacctggccgccaacaagggccacctgcccgtggtgcagatcctgctgaaggccggctgcgacctggacgtgcaggacgacggcgaccagaccgccctgcacagagccaccgtggtgggcaacaccgagatcatcgccgccctgatccacgagggctgcgccctggactag

SEQ ID NO: 85059 - DNA, 1992 bp, Artificial Sequence
  derived and/or modified sequence
atgagccagcaggacgccgtggccgccctgagcgagagactgctggtggccgcctacaagggccagaccgagaacgtggtgcagctgatcaacaagggcgccagagtggccgtgaccaagcacggcagaacccccctgcacctggccgccaacaagggccacctgcccgtggtgcagatcctgctgaaggccggctgcgacctggacgtgcaggacgacggcgaccagaccgccctgcacagagccaccgtggtgggcaacaccgagatcatcgccgccctgatccacgagggctgcgccctggacagacaggacaaggccggcaacaccgccctgcacctggcctgccagaacagccacagccagagcaccagagtgctgctgctggccggcagcagagccgacctgaagaacaacgccggcgacacctgcctgcacgtggccgccagatacaaccacctgagcatcatcagactgctgctgaccgccttctgcagcgtgcacgagaagaaccaggccggcgacaccgccctgcacgtggccgccgccctgaaccacaagaaggtggccaagatcctgctggaggccggcgccgacaccaccatcgtgaacaacgtgctgagattcagcagaggcagaagcctgagaaagaagagagagagactgaaggaggagagaagagcccagagcgtgcccagagacgaggtggcccagagcaagggcagcgtgagcgccggcgacacccccagcagcgagcaggccgtggccagaaaggaggaggccagagaggagttcctgagcgccagccccgagcccagagccaaggacgacagaagaagaaagagcagacccaaggtgagcgccttcagcgaccccaccccccccgccgaccagcagcccggccaccagaagaacctgcacgcccacaaccaccccaagaagagaaacagacacagatgcagcagccccccccccccccacgagttcagagcctaccagctgtacaccctgtacagaggcaaggacggcaaggtgatgcaggcccccatcaacggctgcagatgcgagcccctgatcaacaagctggagaaccagctggaggccaccgtggaggagatcaaggccgagctgggcagcgtgcaggacaagatgaacaccaagctgggccagatggagaacaagacccagcaccagatgagagtgctggacaagctgatggtggagagactgagcgccgagagaaccgagtgcctgaacagactgcagcagcacagcgacaccgagaagcacgagggcgagaagagacagatcagcctggtggacgagctgaagacctggtgcatgctgaagatccagaacctggagcagaagctgagcggcgacagcagagcctgcagagccaagagcacccccagcacctgcgtggaccagctggtggtgaccgccggccccgccgccgccagcgacagcagcccccccgtggtgagacccaaggagaaggccctgaacagcaccgccacccagagactgcagcaggagctgagcagcagcgactgcaccggcagcagactgagaaacgtgaaggtgcagaccgccctgctgcccatgaacgaggccgccagaagcgaccagcaggccggcccctgcgtgaacagaggcacccagaccaagaagagcggcaagagcggccccaccagacacagagcccagcagcccgccgccagcagcacctgcggccagcccccccccgccaccggcagcgagcagaccggcccccacatcagagacaccagccaggccctggagctgacccagtacttcttcgaggccgtgagcacccagatggagaagtggtacgagagaaagatcgaggaggccagaagccaggccaaccagaaggcccagcaggacaaggccaccctgaaggagcacatcaagagcctggaggaggagctggccaagctgagaaccagagtgcagaaggagaactag

SEQ ID NO: 85060 - protein, 1744 aa, Artificial Sequence
  derived and/or modified sequence
MRLLWGLIWASSFFTLSLQKPRLLLFSPSVVHLGVPLSVGVQLQDVPRGQVVKGSVFLRNPSRNNVPCSPKVDFTLSSERDFALLSLQVPLKDAKSCGLHQLLRGPEVQLVAHSPWLKDSLSRTTNIQGINLLFSSRRGHLFLQTDQPIYNPGQRVRYRVFALDQKMRPSTDTITVMVENSHGLRVRKKEVYMPSSIFQDDFVIPDISEPGTWKISARFSDGLESNSSTQFEVKKYVLPNFEVKITPGKPYILTVPGHLDEMQLDIQARYIYGKPVQGVAYVRFGLLDEDGKKTFFRGLESQTKLVNGQSHISLSKAEFQDALEKLNMGITDLQGLRLYVAAAIIEYPGGEMEEAELTSWYFVSSPFSLDLSKTKRHLVPGAPFLLQALVREMSGSPASGIPVKVSATVSSPGSVPEVQDIQQNTDGSGQVSIPIIIPQTISELQLSVSAGSPHPAIARLTVAAPPSGGPGFLSIERPDSRPPRVGDTLNLNLRAVGSGATFSHYYYMILSRGQIVFMNREPKRTLTSVSVFVDHHLAPSFYFVAFYYHGDHPVANSLRVDVQAGACEGKLELSVDGAKQYRNGESVKLHLETDSLALVALGALDTALYAAGSKSHKPLNMGKVFEAMNSYDLGCGPGGGDSALQVFQAAGLAFSDGDQWTLSRKRLSCPKEKTTRKKRNVNFQKAINEKLGQYASPTAKRCCQDGVTRLPMMRSCEQRAARVQQPDCREPFLSCCQFAESLRKKSRDKGQAGLQRALEILQEEDLIDEDDIPVRSFFPENWLWRVETVDRFQILTLWLPDSLTTWEIHGLSLSKTKGLCVATPVQLRVFREFHLHLRLPMSVRRFEQLELRPVLYNYLDKNLTVSVHVSPVEGLCLAGGGGLAQQVLVPAGSARPVAFSVVPTAAAAVSLKVVARGSFEFPVGDAVSKVLQIEKEGAIHREELVYELNPLDHRGRTLEIPGNSDPNMIPDGDFNSYVRVTASDPLDTLGSEGALSPGGVASLLRLPRGCGEQTMIYLAPTLAASRYLDKTEQWSTLPPETKDHAVDLIQKGYMRIQQFRKADGSYAAWLSRGSSTWLTAFVLKVLSLAQEQVGGSPEKLQETSNWLLSQQQADGSFQDLSPVIHRSMQGGLVGNDETVALTAFVTIALHHGLAVFQDEGAEPLKQRVEASISKASSFLGEKASAGLLGAHAAAITAYALTLTKAPADLRGVAHNNLMAMAQETGDNLYWGSVTGSQSNAVSPTPAPRNPSDPMPQAPALWIETTAYALLHLLLHEGKAEMADQAAAWLTRQGSFQGGFRSTQDTVIALDALSAYWIASHTTEERGLNVTLSSTGRNGFKSHALQLNNRQIRGLEEELQFSLGSKINVKVGGNSKGTLKVLRTYNVLDMKNTTCQDLQIEVTVKGHVEYTMEANEDYEDYEYDELPAKDDPDAPLQPVTPLQLFEGRRNRRRREAPKVVEEQESRVHYTVCIWRNGKVGLSGMAIADVTLLSGFHALRADLEKLTSLSDRYVSHFETEGPHVLLYFDSVPTSRECVGFEAVQEVPVGLVQPASATLYDYYNPERRCSVFYGAPSKSRLLATLCSAEVCQCAEGKCPRQRRALERGLQDEDGYRMKFACYYPRVEYGFQVKVLREDSRAAFRLFETKITQVLHFTKDVKAAANQMRNFLVRASCRLRLEPGKEYLIMGLDGATYDLEGHPQYLLDSNSWIEEMPSERLCRSTRQRAACAQLNDFLQEYGTQGCQV

SEQ ID NO: 85061 - protein, 270 aa, Artificial Sequence
  derived and/or modified sequence
MCPEDSLQVPLKDAKSCGLHQLLRGPEVQLVAHSPWLKDSLSRTTNIQGINLLFSSRRGHLFLQTDQPIYNPGQRVRYRVFALDQKMRPSTDTITVMVENSHGLRVRKKEVYMPSSIFQDDFVIPDISEPGTWKISARFSDGLESNSSTQFEVKKYVLPNFEVKITPGKPYILTVPGHLDEMQLDIQARYIYGKPVQGVAYVRFGLLDEDGKKTFFRGLESQTKLVNGQSHISLSKAEFQDALEKLNMGITDLQGLRLYVAAAIIEYPGG

SEQ ID NO: 85062 - DNA, 1536 bp, Artificial Sequence
  derived and/or modified sequence
atggccaagggcctgagcgtgcagaacgacaagcaccccggctaccagccagcactgctgttgtcccccggggccccgctgtttgctgatggccccgcgtacgccctgttgcatctactgctgcacgaaggaaaagctgagatggccgaccaggccgccgcgtggcttacgcgccagggatcattccagggcggtttcaggtctacacaggacactgttatcgccctggacgcactctccgcatattggatcgcttcacacaccacagaggagcgaggactgaatgtcactctctcttcaactgggagaaacggatttaaaagtcatgcattgcagctcaacaaccggcagattcgtgggttagaggaggagctacagtttagcctggggtctaagattaatgtcaaagtcggcggaaattccaaggggacccttaaagtgttgcggacctataacgtcctggatatgaagaacacaacctgtcaggacctgcagatcgaggtgaccgtgaaaggtcacgtcgaatacacaatggaggccaatgaggattatgaggattacgagtacgatgaactccctgcaaaggacgaccctgacgccccactgcaaccggtgaccccactgcaattgtttgagggaaggaggaatcggagacgcagagaagcccctaaagttgtggaagaacaggagtctagggtgcattataccgtttgcatctggcgcaatggaaaagtaggcctatctgggatggcgatcgctgacgttactctgttgtcaggattccatgccctgcgagctgacctggagaagctgacctccctctccgacaggtatgtcagccacttcgagaccgaagggcctcacgttttgctatattttgactcagtaccaactagcagggaatgcgtgggattcgaggccgtccaagaggtgcctgtaggactagtacagcctgccagcgccacattgtatgattactacaaccccgaacgccgatgtagcgtgttctacggggcaccatcaaaaagcagattgcttgccactctgtgctctgcagaggtttgtcagtgtgcagaggggaagtgcccccgtcagcggcgtgcgctcgaacgcgggctacaggatgaagatggctatcgcatgaaattcgcctgttattatccccgggtggagtatgggttccaggtgaaggtattgagggaggacagtcgcgctgcttttcggctctttgagaccaagatcacccaggttttacacttcaccaaagacgtcaaagccgcagctaatcaaatgcggaactttctggtcagggcctcctgtagacttcggctggaacctggcaaggagtacctgattatgggtctcgacggcgccacttacgacctagaggggcatccccagtacctattggactctaacagttggatagaagagatgccatccgagcgcttatgccggtcgactcgacaacgggctgcgtgtgcccaactgaatgattttttgcaggagtacgggacccaagggtgccaggtgtag

SEQ ID NO: 85063 - DNA, 5234 bp, Artificial Sequence
  derived and/or modified sequence
atgcgacttctgtgggggctcatctgggcctccagttttttcacattgagtctgcagaagccacggctgctgctgttctctcccagcgtggtgcaccttggtgtgccactctctgtgggtgttcagctgcaggacgtaccgaggggccaggtggtcaaaggaagcgtattcctgaggaatccgtcgcggaacaatgtcccatgctctccaaaagtagacttcaccttgtcctctgagcgagactttgcgttgctgtcactacaggtgcccctaaaggacgctaagtcttgcggactccaccagctgcttcgcggtccagaggttcagctcgtcgctcattctccatggctcaaggattccctttcacgcacaacgaacatacagggaatcaacctccttttctcctcacggcgaggccacctgttcctccagactgatcaacctatatataatccaggccagagagttcgttacagggtgtttgctctcgatcaaaaaatgaggccttccaccgacacaattaccgtaatggtggagaactcacatggtctccgagtaaggaagaaggaggtgtatatgccatccagtatttttcaggacgatttcgtgatccctgacataagtgaaccgggaacctggaaaatctctgcacgcttctctgacggtctggaaagcaatagcagcacccagttcgaggtgaagaaatatgtgttgcctaatttcgaagtgaaaatcactccaggcaaaccctacattctcacggtaccgggacacttagacgaaatgcaactggatatccaggcacgatacatctatggaaagcccgtgcagggcgtggcttatgtgcggttcggcctgctcgacgaggatggcaaaaaaactttcttccgtggattggaatcccagaccaaactggtgaacggccaaagccacatcagtttgtctaaggctgaatttcaggatgctctggaaaaactcaacatggggatcaccgatctgcaaggcctgcgcttgtatgtagccgcagccattattgagtaccctggtggagagatggaggaggccgagttgacatcctggtatttcgtgagtagtccgttttcactagatctgagcaagacaaaacggcacctagtgcctggggcaccatttctgctccaggccctcgtccgtgagatgagcgggtctcctgcttccggcattccagtcaaggtctctgctactgtgagctctcctggttctgtgcccgaagtccaggatattcaacagaacacagatggttctgggcaggtcagtatcccgattataatacctcagacgatctctgagctccagctgtccgtttcggctggctcacctcatcctgcgatcgccaggctgactgtcgcggctccaccgtcgggagggccaggcttcttgtcaatcgagcgtcccgacagccgaccaccccgagtcggagataccctgaacctgaacctgagagctgtggggtcgggggctactttcagccactactactatatgatcctttctcggggacagatcgtgttcatgaaccgagaacctaagcggactctcacaagtgtgagtgtatttgtcgaccaccatctggcacccagcttctatttcgtggcattctactatcatggagatcacccagttgcaaactcgcttcgggtggatgttcaggctggggcttgtgagggcaagctcgagttgagtgtggatggtgccaagcagtacagaaacggagagagcgtgaagttgcatcttgaaactgattcccttgccctggtggccctgggcgcactggacactgctctctacgctgcaggatccaaatcgcataagccactcaacatgggaaaggtctttgaagctatgaactcatacgacttgggctgcggccctgggggaggcgactctgccctgcaggtttttcaagccgcagggctggcgttctccgatggggaccaatggacactgtctcgcaaaaggctgtcatgtcctaaagagaagaccaccagaaaaaaaagaaatgtcaactttcagaaggccatcaatgagaagttaggacaatacgcctcaccaacggccaaaagatgttgtcaggacggcgttactcgtctccccatgatgagatcatgtgagcagagagcagctagggtgcaacagccagattgtagggaaccgttcctgtcctgctgtcagtttgcagagtccctacggaaaaaatccagggacaaaggccaagcagggctacagcgagcgctcgaaattctgcaagaagaggatctaattgacgaagatgatattccagtccggagcttcttccctgaaaattggctgtggcgcgtcgagaccgtggacagattccagatcctcacactgtggctacctgatagtctcacaacctgggaaatccacggcctgtccttgtctaaaacaaaaggactctgtgtggcaactccggttcagctgagggtgttccgcgagttccatcttcacttgaggctccccatgagtgtccggcgattcgaacaacttgagctgagaccagtcctgtacaactacctagacaagaacctgacagtgagcgtccacgtgagtcctgtggaagggctgtgcctggcaggcggtgggggactcgcacagcaggtcctcgtccctgccggtagcgcacgccctgtggccttttctgtagtcccaactgctgccgcagccgtgtccctcaaagttgtcgccagaggttcctttgagttccctgtcggcgatgcagtgtctaaagtgctgcagattgagaaagagggcgcaatacacagggaggaactagtatatgaacttaaccccttggaccaccggggtcgcactctggaaattcccggtaacagcgatccgaatatgattcccgacggggacttcaacagctacgtacgtgtaacagcatccgatccactggataccttggggagcgagggcgcattgtcgcctggtggggtggcctctctccttagactgccacggggatgtggggaacagacaatgatctacttggcccctacactcgccgcttctaggtatctggataagaccgaacagtggtctacgctaccgcctgaaaccaaggaccacgccgtggacttgattcagaagggctacatgagaatccaacagttccgaaaagccgacggctcctatgctgcttggttgtccagaggcagcagtacatggctaactgcatttgtgttgaaggtgcttagtttggcacaggaacaggttggtggtagtcctgaaaaacttcaggagacttctaactggctcctgtctcagcagcaagccgacggtagcttccaggatcttagtccagtcatccatcggagcatgcaaggagggttggttgggaatgatgaaacggtggcattgaccgcatttgtgacaatcgctctgcatcatggactcgccgtgttccaggacgagggcgctgagcctttgaagcaacgcgttgaagcgtccattagcaaggctagttcctttctcggcgagaaggcgtctgcaggattattgggggctcacgcggctgctatcaccgcgtacgcactcacactgactaaggccccagccgacttgagaggcgttgcccataacaatcttatggccatggcacaagagacgggagataatctctactggggttctgtaaccggatcacagtctaacgccgttagccccaccccagctccccgaaacccgagtgacccaatgccacaggctcctgctctttggatcgagactacggcttacgccctgctgcaccttctgttacacgaaggcaaggccgagatggccgaccaagccgctgcatggctaactagacagggcagctttcagggcggatttagaagcacgcaggatacggttatcgcccttgatgctctctctgcatattggattgcctcgcacaccacagaagagcgtgggctgaatgttacactctccagcaccggacggaatggattcaagtcccatgcactgcagttgaataacagacagatccgtggactggaggaggagttgcaattttccctgggctcaaagattaacgttaaggttggaggcaatagcaagggcacactgaaagtgttaaggacctacaatgtgttagacatgaaaaacacgacttgccaggatttgcagattgaagtaactgtcaagggacatgtggagtatacgatggaggcaaatgaggattacgaggactatgaatatgatgagctacctgcaaaggatgatcctgacgctcctctgcagccagtcacacctctgcagctgtttgaaggcaggaggaatagacggcgacgagaggctccaaaggtagtggaagagcaagagagtagagtccactacaccgtctgcatctggaggaacggtaaggtcggactgtcagggatggccatcgcggacgttaccttgctgagcgggttccacgccctgcgagcagatctagagaaattgacaagtttgagtgaccgctacgtgagtcactttgagacagaaggaccccacgtcttactgtacttcgatagcgtccccacctctcgcgaatgcgtcggattcgaagcagtccaggaagtgcctgtgggtctggttcaaccagcctccgcgaccctgtacgactattacaatcctgaacgacgctgctccgtgttctacggcgcaccttcaaagtcgaggctgttggccacactttgcagtgcagaggtgtgtcagtgcgccgagggcaagtgtcccagacagagacgcgctctagagagaggcttacaagatgaagatggctacagaatgaaatttgcctgctattatcccagagtagagtatggtttccaggtgaaggtcctgcgggaggactctagggctgctttccgactcttcgaaacaaaaatcacccaggtgcttcactttaccaaggacgtgaaggctgctgcaaatcagatgagaaactttctcgtgagagcttcttgccgactcagactggagccagggaaggagtacctgatcatgggactcgacggcgcaacctatgatttggaaggacatcctcaatacttgctggatagtaacagctggatagaagagatgcccagcgagagactatgccgcagcacaagacaacgtgccgcttgtgcccagctcaatgattttttacaggaatatggcacccaggggtgtcaggtcta

SEQ ID NO: 85064 - DNA, 5235 bp, Artificial Sequence
  derived and/or modified sequence
atgcgcctgctctggggccttatctgggccagttctttttttacgctcagtttacagaagccacgtctgctgttattttccccctcagtcgttcatctcggtgtgccattgtctgtcggtgtgcagctgcaggacgtaccccgaggccaggttgtcaaaggcagtgtgttcttgaggaatcccagccggaacaacgttccgtgcagccctaaggtcgacttcacattaagctcagaacgcgacttcgccctgctgtcacttcaggtccctctcaaggatgctaagagttgcggactgcatcagttgctccggggacctgaggtacaactggtagcccacagtccttggctgaaagactcattaagtcggactactaacatccagggtatcaatctgctctttagctcaaggagagggcatctgttccttcagactgaccaacccatctataatcctggccaaagggtacgataccgagtttttgccctcgaccagaagatgcggccatcaacggacactatcacggtaatggttgagaattcccatgggctgagggttagaaaaaaggaagtttacatgcctagttccatcttccaggatgatttcgtgattcctgacatctccgagcccggtacctggaagatcagcgccaggttttcggacggccttgaatctaactcatctacccagttcgaagtgaaaaaatatgtcttaccaaacttcgaggtcaagatcacgcccggaaaaccttacattctaacagtcccaggacacctcgacgagatgcagctagacatacaagcacggtacatttacggtaaacctgtccagggcgtcgcctatgtcaggttcggtttgctagatgaagatggcaagaaaaccttctttcggggattggagtcacagaccaaacttgtcaatggccagtcacacatttccttgagcaaggccgagtttcaggatgcattggagaaactcaatatgggtatcaccgacctacaagggctcaggctttacgtcgcagcagccattattgagtacccaggtggagagatggaagaggccgaactcacctcctggtattttgtgtcttcaccatttagtctggaccttagtaagactaagagacatttagtgcccggtgccccattcttactacaagcactcgtgcgtgagatgtctggcagtcccgcatctgggattccggtgaaggtaagcgctactgtgtcctctcccggaagcgtgcctgaggtccaggacatacagcagaataccgatggcagcggacaggtttcgattccgatcattataccgcagactatatccgagttgcagctctccgtttctgctggctcaccccacccagcaatcgccagactaacggtggctgccccacccagcgggggtcctgggttcctgagtattgagaggccagattcccgacctcccagggttggggataccctcaaccttaacctgcgagcggttggttctggcgcaacgtttagccactattactatatgatcctttcaaggggtcagattgtattcatgaatcgagagcccaaacgcactttaacctctgtgtccgtcttcgtggaccatcatcttgctcctagcttctacttcgttgctttttactaccacggcgatcaccctgtggccaacagcctgagggtggacgtgcaggcaggggcatgcgaagggaagctggaacttagcgtggacggagccaagcagtatagaaatggcgagagtgtgaagctgcatttagagacggactccctagctctggttgcgctgggcgctctcgacaccgctctctacgcagccggatccaaatcccacaaacctttgaatatgggcaaggtcttcgaggccatgaatagttatgacctcggttgcggccctggtggcggagactctgcgttgcaggtttttcaggccgcagggttggcttttagcgacggtgatcaatggacgttgtctaggaaacggctgagttgcccaaaagagaagaccacgcgaaaaaagaggaacgttaactttcagaaggccataaatgagaaactgggacagtatgcttctccgactgccaagaggtgttgtcaggacggggtgacacggttaccaatgatgaggtcatgtgaacagagggccgctcgtgttcaacagccagactgccgcgagccatttctttcgtgctgccagttcgctgaaagcctgcgcaaaaagtcgcgggataaggggcaagcgggactccagcgcgcactggagattctgcaggaagaagatttgattgatgaggacgatatcccagtcaggagtttcttcccggaaaattggctgtggcgcgtggaaacggtggaccgatttcaaatcctgactttgtggctgccggattcactaacaacctgggagattcacgggctcagtctgtctaaaacgaaaggattatgtgtggccacacctgtgcagctgagggtgttcagagagtttcacctgcatctgagactgcctatgagtgtccgtaggttcgagcagttagagctgcgccctgtcctctacaactatctcgacaaaaacctgaccgtgtccgttcatgtaagccccgtggaaggactatgcctggccggaggtgggggactggctcagcaggtgctggttcccgcagggagcgcaaggcccgtggccttctcggttgtaccgacagccgctgctgcggtgtcccttaaggtggtggcacgcggatccttcgaattcccagttggggacgcagtgagtaaggtgctccaaatcgagaaagagggcgctatccaccgagaggaactggtctatgaacttaaccccctggatcataggggtcgaactcttgagataccaggaaatagtgacccaaacatgatccccgacggggattttaactcttatgtccgcgtcacagccagtgatccattagacacattaggctctgaaggagccctcagcccgggaggcgttgcatccctgttgcgactccccaggggatgcggagagcagacaatgatctatctagcaccaacacttgcggcaagcagatatttggacaagacagagcaatggagcaccctcccaccggaaactaaggatcacgcagtggatctgattcaaaaaggttacatgcggattcagcaattccggaaggccgatggctcatacgccgcttggttatcccggggaagctccacttggcttaccgcttttgttttgaaggtactctccctggcccaggaacaagtcggcggatctcctgaaaagcttcaggaaacatctaattggttactttctcaacagcaggccgacggtagcttccaagatctgtcgccagttattcaccgcagcatgcaggggggactggtcggcaacgatgagaccgtggccctgaccgcgttcgtgactatcgccctgcaccacggcctggcggtattccaggacgagggggcagagcctctgaaacagagagtggaagccagcatctcaaaggcttcaagcttccttggcgaaaaagctagtgccggtctactgggcgctcatgctgccgctatcacagcctacgcactgactctgacaaaagctcctgcagacctccgaggggtggcacataataatcttatggccatggcccaggagactggggataacctgtattggggcagtgttacaggctctcagtcaaatgccgtaagcccgactcccgctcccagaaatccatccgacccaatgccacaggcaccagccctgtggatagagaccacagcctacgccctgctgcatctcctactgcacgagggcaaggcagaaatggctgatcaggcagcagcttggttgactaggcaggggagcttccaagggggtttcaggtcaacccaggacacagtaatagctttggatgccctgtcggcctattggatagcctcccacacaacggaggagcggggactgaacgtcactctaagcagtacaggtagaaacgggttcaaatctcacgcgcttcagctgaataaccgccagatcaggggactggaggaagagctgcagttcagcctgggatctaaaataaatgtgaaagtcgggggaaattctaaagggacacttaaggtcttaagaacttacaacgtcctcgacatgaaaaacacaacctgtcaggatctgcagattgaagtgaccgtcaagggacacgtggagtacacaatggaggccaacgaggactacgaagattatgagtacgacgagctaccagccaaggacgaccccgacgctccactgcagccagtcacgcccctacagctgtttgagggcagacggaacaggagacgtcgcgaggcacctaaggtggtggaggaacaggagagccgcgtccattatactgtctgcatttggcggaacggaaaggttgggttaagcggcatggccatcgcagatgttacattactcagcggcttccacgccctgcgggctgacttagagaaactgactagtttatcagatagatacgtctctcattttgaaaccgaggggcctcatgtgctgctctactttgatagcgttccaaccagcagagagtgcgtggggtttgaggcagtgcaagaagttccagtgggtctggtacaaccagcatcagctaccctctacgactattataacccagaacgcaggtgtagcgtattctacggcgctccatctaagagtcgcttgctggctaccctgtgttcggccgaggtgtgccagtgcgctgaaggtaagtgtcctagacagcggagagctctcgaaaggggcctccaggacgaagatggctacagaatgaaattcgcctgctattatccgagagtggagtatgggttccaagttaaagtgctgagggaggatagtagagccgctttcagactgttcgaaacaaagatcacccaggttctgcactttaccaaggacgttaaggctgccgctaatcagatgcgaaattttttggtacgcgcatcatgtcgcttaagactggagcccggaaaggaatatctgatcatgggactggatggagcaacatatgaccttgaggggcacccacagtacctgctcgactccaattcgtggatagaagagatgccatcagaaagattatgtagatctactcgccagcgagcggcttgtgcacagctcaacgattttcttcaagagtacggcacccagggatgccaggtctat

SEQ ID NO: 85065 - DNA, 1536 bp, Artificial Sequence
  derived and/or modified sequence
atggccaaaggcctcagcgtacagaatgataagcaccccggatatcaacctgctctcctcctgagtcccggagctcctctgttcgcagatgggccagcgtacgctctgctccatctgcttctccatgaagggaaagcggaaatggcggatcaggccgctgcctggctgaccagacagggctcattccagggagggttccgctccactcaggacacagtgatcgcattggatgctctcagcgcctactggatagcttcacacacaaccgaggagcggggtctaaatgtgactctctcttcaaccggtcgcaacgggtttaagagccacgcactgcagctgaataaccgtcaaatccggggacttgaagaggaacttcagttctcactgggtagcaagatcaacgtgaaagtcggcggtaactctaaaggcaccctgaaggttctgagaacctacaatgtgctcgatatgaagaacacaacctgccaagacttgcagatcgaggttacagttaagggacacgttgagtatactatggaagctaacgaagattatgaagattacgagtatgacgaactacctgctaaggacgaccctgatgctccattgcagcccgttacgcccctccagcttttcgaggggaggagaaaccggagacgtagagaagcacctaaggtcgtggaggagcaagagtcgcgtgtgcactataccgtgtgcatctggaggaatgggaaggtgggtctgtcgggtatggctattgctgacgttaccttgctgtctggattccacgccctccgggctgatcttgaaaagctcacttctctgagcgaccgatatgtcagccactttgagactgagggccctcatgtgctgctatacttcgactctgtacctacgtcgcgagagtgcgtgggtttcgaagcagtgcaagaggtacctgtaggactggtacagccagccagcgctacactctacgactattacaatcctgaaaggcggtgctcagtcttctatggggcaccttcgaaatctcggctcctggcaaccctgtgcagtgccgaagtttgtcagtgtgcggagggtaagtgtcctcggcagcgcagggctctcgagcggggactccaggatgaggacgggtacaggatgaaattcgcttgctattacccacgtgttgaatacggatttcaagtcaaagtcctgcgagaggattccagagcagctttcagactcttcgaaacgaagatcacacaggtccttcactttactaaggatgtaaaggcagccgctaatcagatgcgcaacttcctggtgagggcaagctgccgcctccgtctcgagcctgggaaagagtatctgatcatggggctggacggcgcaacctacgacctggaaggccacccccagtaccttctggattctaattcgtggattgaagaaatgccgagcgagaggctgtgtagatctacccgacagagagccgcttgtgcacaactgaatgacttcttacaggagtacgggacacaaggttgtcaggtttag

SEQ ID NO: 85066 - DNA, 5235 bp, Artificial Sequence
  derived and/or modified sequence
atgcggctgctgtggggcctgatctgggctagtagcttctttacactgagtttgcagaaaccccgattgttgcttttctctccctctgtagtgcatctcggcgtgcccctcagcgtaggagtgcagctacaggacgtgcctagaggccaggttgtgaaggggagcgtgttcttacgaaacccatctaggaataacgtcccttgctctcccaaggttgacttcaccctcagctcagaacgagatttcgccttgctttccctacaggtcccgcttaaggatgcaaaatcttgtggcttgcaccaactgcttcgaggacctgaggtgcagctggtcgcacactcaccgtggctgaaagattcgctatcccgcacaacgaacattcagggaattaatttgcttttctcaagccgtcgcggccacctgtttctacaaacggaccaaccaatctacaatccagggcagagggtgcgatatagagtcttcgccctggatcagaagatgcgcccgtcgaccgatacaattacggttatggtggaaaactcgcacggattaagggtgcgtaaaaaagaggtctacatgcccagttccatcttccaggatgacttcgtcatcccagacatctctgagcctggaacctggaaaatttccgccagattctccgatggacttgaatctaattcaagtacacagtttgaagtgaagaaatatgttctccctaacttcgaggtaaaaatcaccccaggcaagccgtatatcctgactgtgccaggtcacctggatgagatgcaacttgatatccaggcaagatacatctacggcaagcccgtgcagggggtcgcctacgtgcgattcgggctcctggacgaggatgggaagaagactttctttcgagggctagaaagccagactaagttagtcaacggacagtcacacattagcctttcaaaggcagagtttcaggatgcgcttgagaaattgaatatgggcataacagacctgcaagggcttcggctatatgtcgctgccgccatcattgaataccctggaggggagatggaagaagcagagctcacctcatggtatttcgtgtcatcaccctttagcctcgatttgagcaagaccaaaagacacctggtgccaggtgcccccttcctgcttcaagccttagtgcgcgaaatgtcaggcagtccagcctcggggatccccgtcaaagtctctgctactgtgtcctcaccaggttctgttccagaggtgcaggacattcagcagaacactgatgggagcggtcaggtgtccatcccaataattatccctcagacaatatccgaactgcagctttccgtctccgctgggtccccacaccccgcaatcgcacgtttaactgtggcggcacctccgagcggagggccgggatttctctctatcgaacgccctgacagccgccctccaagggtgggcgatacactgaacctcaatctgcgggctgttggaagtggcgcaactttttcacattactactacatgattttaagcagggggcagatcgtgttcatgaatagagagcctaaaaggacacttacaagcgtttctgtgtttgtggaccaccatttagcacctagcttctatttcgtggccttctactaccatggtgatcatcccgtggccaatagtttgcgcgtggacgtgcaagccggagcttgtgaaggaaagttagagctgtccgtggacggggctaaacaataccgtaatggggagagcgtcaaattgcacctggagactgacagcctcgccctggtagccctcggtgcccttgataccgccctgtatgctgcagggtcaaagagtcacaaacccttgaatatggggaaggtcttcgaggccatgaattcctacgacctaggctgcggtcccggtggaggggattccgctttgcaggtctttcaggcagctgggcttgcttttagtgacggcgaccaatggacgttatctagaaagcggttgtcctgtcccaaagaaaagacaacaaggaagaagagaaatgtgaacttccagaaggctattaacgagaaactggggcagtatgcttctccaacagccaaacgatgttgtcaagacggagttaccaggttgcctatgatgagatcctgcgagcagagagcagcaagagtgcagcagcccgattgcagagagccttttctgtcctgttgccagtttgctgagagtctacgtaagaagtccagagacaagggacaggctgggttacaacgagctctcgagattttgcaggaagaggacctcattgatgaggacgatataccggttcgatctttctttcctgagaactggctgtggcgtgtggaaacagtggatagatttcagatcctgacactgtggctgcccgatagcctgactacttgggagatccacgggctgtccctgagcaaaaccaaggggctctgcgtagcgacgcctgtgcagcttagggtgtttcgagaattccacctccatctccggctccctatgtccgtcagaaggtttgaacaactggaactaagaccagtgctgtacaactatctagacaaaaatctgactgtttccgtccatgtcagtcccgtggagggcctgtgcctagcaggaggcgggggtttggcccagcaggtcttggtgcctgccggctccgcgcgcccggtggctttctctgtcgtacctacggcagccgcagctgtttcactaaaagtggtagcccggggctcattcgagtttcccgtgggcgatgctgtaagtaaagtactccagattgagaaggaaggcgctattcacagggaggagcttgtatacgaattgaatcctttagaccaccgtggccgcacactcgagattcccgggaacagcgaccccaacatgattccggacggagatttcaatagctacgtgcgggttacagcctctgaccctctggacacattgggctccgagggcgccctgagcccagggggagtcgccagtcttttgcgtctgcccagaggatgtggtgaacagaccatgatttacctggccccaaccctggccgcttctcggtatctcgacaagactgaacagtggtcaaccctaccccccgagacaaaggatcacgccgtcgacttaatccagaaggggtacatgcggatccagcagttccgcaaagccgatggatcctacgctgcctggttgtctcgaggcagctctacatggttgaccgcttttgttcttaaggtcttgtccctcgcacaggaacaagtgggcgggagcccagaaaagttgcaagagacctctaactggttgctgagccagcagcaggctgacggatcctttcaggacctgagtcccgtgatccaccgcagcatgcaggggggactggtgggtaacgacgaaactgtggcattaacagcatttgtgaccatagcactgcatcatggcctggccgtgtttcaggatgaaggagctgagcctttgaagcaaagagtggaggcatctatctcgaaagcgtcctcctttttgggtgaaaaggcaagtgccggcttattgggtgcgcatgccgccgcaataactgcttatgcattgactcttacaaaggctcctgccgatttgaggggcgtcgctcataataatctgatggcgatggcccaagagacaggcgataatctgtattggggatcagtgacgggctcacagagtaatgccgtctcccccacacccgctcccagaaatccctcagatccaatgcctcaggcccccgctctctggatcgagaccaccgcttacgccctcctacatctgctcttgcatgagggaaaagcggagatggcggaccaggccgccgcctggctcactcgtcaaggaagctttcagggcggctttcggagtacacaagataccgtcatagctttagatgccctgtctgcctattggatcgcatcacacacaactgaagaacggggcttaaatgtaaccctgtctagcactggccgcaatggctttaaatcccacgccctgcaactgaacaacagacagatacggggcctagaagaggagctacaattcagcctcggctccaaaatcaatgtcaaagtcggggggaactccaaggggactctgaaagtactacgaacttacaacgtacttgacatgaaaaacaccacctgccaggatctgcagatcgaagttacagtcaagggtcacgtggaatacacaatggaagctaatgaggactacgaagattatgaatatgacgaactgcctgcaaaagacgatccggacgcccctctgcagcctgtgacacccctgcagctgtttgagggccggagaaaccgcaggcgccgggaggcaccgaaagttgtcgaggaacaggagagcagggtccattacacagtctgtatctggcgaaatggcaaggtggggctgtccgggatggccatagccgatgtgacactcctctcaggttttcacgccctccgggctgacttggaaaagttaactagtctgagcgatcgctacgtctcccattttgagactgagggcccccacgtcctgctctatttcgattctgtgcccacctctagggagtgtgtgggtttcgaggccgtgcaagaagtgcccgttgggctggtgcagccagctagcgccaccctttacgactactataatcccgaacgaaggtgcagcgtgttctacggggctccttctaaaagccgactcttggctaccctgtgctcagctgaagtttgccaatgtgcagaaggaaagtgcccacgccaacggcgagcccttgaaagaggattacaggatgaggacggttaccgaatgaagttcgcctgctactaccctcgagtcgagtatgggtttcaagtgaaggttttacgcgaggactcgcgcgctgctttcagattgtttgagactaagattacccaagttctgcacttcaccaaggacgtcaaggcggctgccaaccaaatgcgtaacttcctcgtgcgagccagctgccgcctccgcctcgaacccggtaaggaatatctgatcatgggacttgacggcgctacctatgatctggaaggccatcctcagtacctcctggattctaattcttggattgaagaaatgcccagcgaaagactatgccgatctacccgacaaagggccgcatgtgcacaactcaatgatttcctgcaggaatacggtacacaggggtgccaggtgtag

SEQ ID NO: 85067 - DNA, 5460 bp, Artificial Sequence
  derived and/or modified sequence
agagtcaactctgccccgaggcctagcttggccagaaggtagcagacagacagacggatctaacctctcttggatcctccagccatgaggctgctctgggggctgatctgggcatccagcttcttcaccttatctctgcagaagcccaggttgctcttgttctctccttctgtggttcatctgggggtccccctatcggtgggggtgcagctccaggatgtgccccgaggacaggtagtgaaaggatcagtgttcctgagaaacccatctcgtaataatgtcccctgctccccaaaggtggacttcacccttagctcagaaagagacttcgcactcctcagtctccaggtgcccttgaaagatgcgaagagctgtggcctccatcaactcctcagaggccctgaggtccagctggtggcccattcgccatggctaaaggactctctgtccagaacgacaaacatccagggtatcaacctgctcttctcctctcgccgggggcacctctttttgcagacggaccagcccatttacaaccctggccagcgggttcggtaccgggtctttgctctggatcagaagatgcgcccgagcactgacaccatcacagtcatggtggagaactctcacggcctccgcgtgcggaagaaggaggtgtacatgccctcgtccatcttccaggatgactttgtgatcccagacatctcagagccagggacctggaagatctcagcccgattctcagatggcctggaatccaacagcagcacccagtttgaggtgaagaaatatgtccttcccaactttgaggtgaagatcacccctggaaagccctacatcctgacggtgccaggccatcttgatgaaatgcagttagacatccaggccaggtacatctatgggaagccagtgcagggggtggcatatgtgcgctttgggctcctagatgaggatggtaagaagactttctttcgggggctggagagtcagaccaagctggtgaatggacagagccacatttccctctcaaaggcagagttccaggacgccctggagaagctgaatatgggcattactgacctccaggggctgcgcctctacgttgctgcagccatcattgagtatccaggtggggagatggaggaggcagagctcacatcctggtattttgtgtcatctcccttctccttggatcttagcaagaccaagcgacaccttgtgcctggggcccccttcctgctgcaggccttggtccgtgagatgtcaggctccccagcttctggcattcctgtcaaagtttctgccacggtgtcttctcctgggtctgttcctgaagtccaggacattcagcaaaacacagacgggagcggccaagtcagcattccaataattatccctcagaccatctcagagctgcagctctcagtatctgcaggctccccacatccagcgatagccaggctcactgtggcagccccaccttcaggaggccccgggtttctgtctattgagcggccggattctcgacctcctcgtgttggggacactctgaacctgaacttgcgagccgtgggcagtggggccaccttttctcattactactacatgatcctatcccgagggcagatcgtgttcatgaatcgagagcccaagaggaccctgacctcggtctcggtgtttgtggaccatcacctggcaccctccttctactttgtggccttctactaccatggagaccacccagtggccaactccctgcgagtggatgtccaggctggggcctgcgagggcaagctggagctcagcgtggacggtgccaagcagtaccggaacggggagtccgtgaagctccacttagaaaccgactccctagccctggtggcgctgggagccttggacacagctctgtatgctgcaggcagcaagtcccacaagcccctcaacatgggcaaggtctttgaagctatgaacagctatgacctcggctgtggtcctgggggtggggacagtgcccttcaggtgttccaggcagcgggcctggccttttctgatggagaccagtggaccttatccagaaagagactaagctgtcccaaggagaagacaacccggaaaaagagaaacgtgaacttccaaaaggcgattaatgagaaattgggtcagtatgcttccccgacagccaagcgctgctgccaggatggggtgacacgtctgcccatgatgcgttcctgcgagcagcgggcagcccgcgtgcagcagccggactgccgggagcccttcctgtcctgctgccaatttgctgagagtctgcgcaagaagagcagggacaagggccaggcgggcctccaacgagccctggagatcctgcaggaggaggacctgattgatgaggatgacattcccgtgcgcagcttcttcccagagaactggctctggagagtggaaacagtggaccgctttcaaatattgacactgtggctccccgactctctgaccacgtgggagatccatggcctgagcctgtccaaaaccaaaggcctatgtgtggccaccccagtccagctccgggtgttccgcgagttccacctgcacctccgcctgcccatgtctgtccgccgctttgagcagctggagctgcggcctgtcctctataactacctggataaaaacctgactgtgagcgtccacgtgtccccagtggaggggctgtgcctggctgggggcggagggctggcccagcaggtgctggtgcctgcgggctctgcccggcctgttgccttctctgtggtgcccacggcagccgccgctgtgtctctgaaggtggtggctcgagggtccttcgaattccctgtgggagatgcggtgtccaaggttctgcagattgagaaggaaggggccatccatagagaggagctggtctatgaactcaaccccttggaccaccgaggccggaccttggaaatacctggcaactctgatcccaatatgatccctgatggggactttaacagctacgtcagggttacagcctcagatccattggacactttaggctctgagggggccttgtcaccaggaggcgtggcctccctcttgaggcttcctcgaggctgtggggagcaaaccatgatctacttggctccgacactggctgcttcccgctacctggacaagacagagcagtggagcacactgcctcccgagaccaaggaccacgccgtggatctgatccagaaaggctacatgcggatccagcagtttcggaaggcggatggttcctatgcggcttggttgtcacggggcagcagcacctggctcacagcctttgtgttgaaggtcctgagtttggcccaggagcaggtaggaggctcgcctgagaaactgcaggagacatctaactggcttctgtcccagcagcaggctgacggctcgttccaggacctctctccagtgatacataggagcatgcaggggggtttggtgggcaatgatgagactgtggcactcacagcctttgtgaccatcgcccttcatcatgggctggccgtcttccaggatgagggtgcagagccattgaagcagagagtggaagcctccatctcaaaggcaagctcatttttgggggagaaagcaagtgctgggctcctgggtgcccacgcagctgccatcacggcctatgccctgacactgaccaaggcccctgcggacctgcggggtgttgcccacaacaacctcatggcaatggcccaggagactggagataacctgtactggggctcagtcactggttctcagagcaatgccgtgtcgcccaccccagctcctcgcaacccatccgaccccatgccccaggccccagccctgtggattgaaaccacagcctacgccctgctgcacctcctgcttcacgagggcaaagcagagatggcagaccaggctgcggcctggctcacccgtcagggcagcttccaagggggattccgcagtacccaagacacggtgattgccctggatgccctgtctgcctactggattgcctcccacaccactgaggagaggggtctcaatgtgactctcagctccacaggccggaatgggttcaagtcccacgcgctgcagctgaacaaccgccagattcgcggcctggaggaggagctgcagttttccttgggcagcaagatcaatgtgaaggtgggaggaaacagcaaaggaaccctgaaggtccttcgtacctacaatgtcctggacatgaagaacacgacctgccaggacctacagatagaagtgacagtcaaaggccacgtcgagtacacgatggaagcaaacgaggactatgaggactatgagtacgatgagcttccagccaaggatgacccagatgcccctctgcagcccgtgacacccctgcagctgtttgagggtcggaggaaccgccgcaggagggaggcgcccaaggtggtggaggagcaggagtccagggtgcactacaccgtgtgcatctggcggaacggcaaggtggggctgtctggcatggccatcgcggacgtcaccctcctgagtggattccacgccctgcgtgctgacctggagaagctgacctccctctctgaccgttacgtgagtcactttgagaccgaggggccccacgtcctgctgtattttgactcggtccccacctcccgggagtgcgtgggctttgaggctgtgcaggaagtgccggtggggctggtgcagccggccagcgcaaccctgtacgactactacaaccccgagcgcagatgttctgtgttttacggggcaccaagtaagagcagactcttggccaccttgtgttctgctgaagtctgccagtgtgctgaggggaagtgccctcgccagcgtcgcgccctggagcggggtctgcaggacgaggatggctacaggatgaagtttgcctgctactacccccgtgtggagtacggcttccaggttaaggttctccgagaagacagcagagctgctttccgcctctttgagaccaagatcacccaagtcctgcacttcaccaaggatgtcaaggccgctgctaatcagatgcgcaacttcctggttcgagcctcctgccgccttcgcttggaacctgggaaagaatatttgatcatgggtctagatggggccacctatgacctcgagggacacccccagtacctgctggactcgaatagctggatcgaggagatgccctctgaacgcctgtgccggagcacccgccagcgggcagcctgtgcccagctcaacgacttcctccaggagtatggcactcaggggtgccaggtgtgagggctgccctcccacctccgctgggaggaacctgaacctgggaaccatgaagctggaagcactgctgtgtccgctttcatgaacacagcctgggaccagggcatattaaaggcttttggcagcaaagtgtcagtgttggca

SEQ ID NO: 85068 - DNA, 5235 bp, Artificial Sequence
  derived and/or modified sequence
atgcgattattatgggggctgatatgggcttcctccttctttaccctgagcctacagaagcctagattgttacttttctctccctctgtggtccatttaggcgtgccactctcggtgggagtacagctgcaagacgtgccccgcgggcaggtggtcaaagggtccgtgttcctgaggaatccatcccggaacaacgtgccctgttcccccaaagtcgacttcaccttgtctagtgaacgcgatttcgccctgctgagtctccaagtcccactgaaggatgcaaagtcctgcggcctccaccagttgctgcgtggacctgaagtgcagctggtcgcgcacagcccctggctgaaggatagcctgagtcgcaccactaacattcaaggcatcaacctcttgttctcttcacgacgggggcatttgtttttgcagaccgaccagcccatctataaccctgggcagagagtccgctaccgcgtgttcgccctcgatcagaagatgcggccttcgacagataccattaccgtgatggtggagaactctcatggactgcgcgttagaaaaaaagaggtttatatgcctagctctatctttcaggatgatttcgtgatcccagatatctcggagcccgggacatggaaaataagtgctcggttcagcgacggtctggagtccaactcatccactcagttcgaagtcaagaagtatgtcctcccaaacttcgaagtaaagatcacgccaggtaaaccctatatcctgacagttccgggacacctcgacgagatgcagctggacatccaggcacggtacatttacggtaaacctgtgcagggcgtggcgtacgtgcggttcggtctgctggatgaggatgggaaaaagactttctttcgcggccttgagtcccagacaaagttagtcaacggacaatcccacattagcctgtctaaagccgaatttcaggacgcccttgagaagcttaacatgggcattactgacttgcagggacttcgactgtatgtcgccgcagcaattatcgagtatccaggaggagagatggaggaggccgaactcacaagctggtatttcgttagctctcctttcagcttagacttgagcaaaactaagagacatctggtgcctggcgccccctttctcctccaagcacttgtcagggagatgagcgggtcccctgcctcgggaattcctgtaaaggtgagtgcaaccgtgtcatcaccagggtccgtgccagaggtccaggatattcagcagaacacggacggcagcggtcaggtgtctattcccatcattattccacaaacaatctccgagctccaactgagtgtaagcgccgggagcccgcacccagcgatcgcccgcctgactgtcgccgccccgccaagcggaggccccggctttctttctatagagcgaccagactcccgccctccaagagtcggggacactctcaacctgaatctgcgcgctgtggggtctggcgcaaccttttcacattactattatatgattttgtctaggggccagattgtctttatgaatcgagagccgaagaggacactgactagtgtgagtgttttcgtagatcatcacctagctccaagtttttatttcgtggctttctattatcatggcgatcatccagtggctaactcactgcgggtagacgtccaggcaggagcctgcgagggaaagcttgagctttctgtggatggggccaagcagtatagaaacggagagtctgtgaaactccacctggagacagatagcctcgcactggttgcactcggagcactggataccgcactctacgctgccggcagcaagtcccacaaacctcttaacatgggcaaagtgtttgaagcgatgaactcatatgacctgggctgcgggccaggcggaggggattctgccctgcaggtcttccaggcggcagggctggccttcagcgacggtgaccagtggactctgagccgtaaaagactgagttgccctaaggaaaagactacaagaaaaaaaaggaatgttaattttcagaaggccatcaacgaaaagctgggtcaatacgcatcaccaaccgctaaacgctgctgccaagatggagtcaccagactgcccatgatgcggagttgcgagcaacgcgcagccagggtccaacagccagactgccgagaacccttcctatcctgctgccaatttgcagagtcactgcggaaaaagtctcgtgacaagggacaggccggactccagcgggctcttgaaatccttcaggaggaagaccttattgatgaagacgatattcctgtgcgatccttcttccctgagaattggctctggagggtggagacagttgatcgctttcagattctgactctctggctgccagactcactcactacatgggaaattcacggtttaagtctcagtaagactaaaggtctttgtgtcgcgacgcccgtgcaacttcgcgtttttcgggagttccacctacatctgcggctgcccatgtccgtgcgacggtttgagcaactggagcttcggcccgtgctttacaattatctggacaagaatctgaccgtaagcgtgcacgtgtcaccagtggaaggcctctgtctcgctggcggcgggggcttggctcagcaggttctggtgccagcgggatccgcccgtcctgtagctttttcagtcgttcccacggcggccgcagccgtgtctctgaaagttgtcgccaggggcagcttcgagtttcctgtgggggatgcggtttcaaaggtcctccaaattgagaaggaaggggccatccatcgcgaagagctggtctatgagcttaaccccctcgatcatcgggggagaaccctcgaaatacccggaaatagtgatccgaacatgatccctgatggtgacttcaactcctacgtgagggttacagcctctgaccccttggatacattgggttctgagggggccctttcacccggcggagtggcatcgcttctgcggttaccccgagggtgcggcgaacagaccatgatatacctggcaccgacccttgccgcctcacgctatttagacaagaccgagcaatggtccaccttacccccagagaccaaagaccacgccgtggaccttatacagaagggttacatgcgtattcaacagttcaggaaagccgatggctcatatgccgcctggttaagtcgtgggtctagcacatggctgaccgcctttgtgctgaaagtgctgagcctggcccaggaacaggtagggggttccccagaaaagctgcaggagacctctaactggctgctgagccagcagcaggccgacggttcattccaggatcttagtcctgtcatccatcgaagcatgcaaggggggttagtgggaaatgatgagacagtcgcacttacagcgttcgtaacaattgctctgcaccacggactggcagtcttccaggatgagggcgctgagccactgaaacagcgcgtggaagcctccatcagcaaggcctcctcttttttgggtgaaaaggccagtgcagggctcttgggcgcacatgccgctgcgatcactgcttatgctctcaccctcacaaaggctccggccgatctccggggagtcgcccacaacaatctgatggcaatggcgcaggaaactggggacaacctctactggggctctgttactgggagtcagtcaaacgccgtctctcccaccccagctcctcgcaatccctccgaccccatgcctcaggcccctgcactatggatcgaaactacagcatacgcacttctacatttgctcctgcacgagggtaaagccgaaatggcagaccaggctgcggcttggctgacacgccaagggtcttttcagggcggcttccgttcaactcaagacaccgtgattgctctcgacgccctaagcgcctactggattgccagccacactactgaggaacgggggctgaacgtaactctatcatccacgggccgcaacggcttcaagtcacatgccctgcagctgaataacagacaaattcgtggcctcgaggaagagctgcaatttagcttaggttctaaaattaacgtgaaggtcggcggcaactcaaagggtactctgaaggtgctgcgaacgtataacgttcttgatatgaagaacaccacctgtcaggatctgcagatcgaggtgacagtcaagggacatgtcgaatacactatggaggcgaacgaggactacgaagactatgaatacgatgagcttcccgccaaagacgaccctgacgcacctctgcagcccgtaactccattacagctgtttgaaggacgaaggaaccggcggcgaagggaagcgccaaaagtcgttgaagagcaggagagtagagtacactacactgtatgcatatggaggaatggcaaagtgggcctttctggaatggccatcgcagacgtgacactcttgagtggatttcatgcgctacgagctgatctcgagaagctaacttctctgtccgacagatacgtgtctcattttgaaacagaaggtccacacgtgctcttgtacttcgactctgtgccgacaagccgtgaatgcgtgggatttgaggcagttcaggaagtgcctgtagggctcgtgcagcctgcttccgctactttgtacgactactacaaccccgaaaggagatgttccgttttttatggcgccccttccaaaagtcggctgctagccaccttgtgctcagcagaagtgtgtcagtgcgccgaagggaagtgtccgaggcaacggcgcgctctggaacggggcttacaagatgaggacggctacagaatgaagttcgcctgctattaccctagagtggagtatggcttccaagtgaaggttctgcgggaagactccagagccgctttcaggctgtttgaaacaaaaattactcaagtactgcattttactaaagacgtgaaagccgccgcaaatcagatgcgcaatttcctggtgagagcatcatgcaggctacggctggaacccggtaaagaatacctgattatgggattagacggggcaacatatgatctggaaggacatcctcagtacttgctcgactccaactcgtggatcgaggaaatgccaagcgagcgcttatgccggagcacaagacaaagagccgcctgcgcccagcttaatgattttctccaggagtatggcacccagggatgccaggtctag

SEQ ID NO: 85069 - DNA, 1536 bp, Artificial Sequence
  derived and/or modified sequence
atggccaaaggtctgagcgtgcagaacgataagcaccctggatatcaacctgcactgctgttgtctcctggcgctcctctgtttgcagatggcccagcctacgcgctgttacatttactgctccacgaaggaaaggccgagatggcagatcaggcagcagcctggctgactcggcagggatcattccaagggggctttcggagcacacaggatacagttatcgcactggacgccctctcagcgtattggattgctagtcacacaacagaagagagaggacttaatgttacgttgtcatctacaggcagaaatggatttaaatcccacgcattacagcttaacaaccggcagatcaggggtttggaagaagaacttcagttttcactcggctccaagattaatgtgaaggttggaggcaatagtaagggcaccttgaaggtgctccgcacatataatgttctggacatgaagaacaccacctgtcaagacctgcaaattgaggtcaccgtcaagggtcatgtcgagtacaccatggaggctaacgaggattacgaagactatgagtatgacgaactgcccgccaaagatgatccagacgctccactccaacccgtaaccccactgcaactcttcgagggacggcgtaaccggagacggcgagaggctcctaaagtagttgaagaacaagagtcccgcgtccattacacagtctgcatctggcgcaatggcaaagtggggctgtccggaatggctatcgccgacgtaaccttgttgtccggctttcatgcccttcgagctgatctcgagaagttaacaagtctgagcgatagatatgtgagccacttcgagaccgaaggcccacacgtgcttctttacttcgactctgttccaacgtctcgagaatgtgttggatttgaagccgtgcaggaggtccctgtggggttagtgcagcccgcgtccgctactttatacgactactataaccccgagagaagatgttcagtcttctatggggccccttccaagtcacggctgttggctacactgtgtagtgccgaggtatgccagtgcgcagagggcaagtgtcctcgccaacgacgcgccctagagcggggcctgcaggacgaagacggctaccgcatgaaatttgcctgttactaccctcgtgttgaatacggctttcaagttaaagtgctgagggaggacagccgcgcagcttttagactgtttgagaccaagataacccaggtactgcactttactaaagatgtcaaggcggcagccaaccagatgcgaaattttctggtgcgcgcctcctgtcggttgagactggaaccgggcaaagagtatttgataatgggcctagatggtgctacttacgatttagagggtcaccctcaatatcttctagattccaactcctggatagaggaaatgccaagcgagcggttgtgcagaagtacccgacagagagcagcttgcgcccagttaaacgatttcctgcaggagtacgggacacaaggctgccaggtttag

SEQ ID NO: 85070 - DNA, 5235 bp, Artificial Sequence
  derived and/or modified sequence
atgcggctgctatggggactaatctgggcctctagtttttttacattatcactgcaaaagccgagactcttgctcttttcaccgtcggttgtgcatctgggtgtccctctgtcagtgggggttcaactgcaggacgtacctaggggccaggtggttaaggggagcgtgtttctgcgcaacccctcccgcaataacgtgccatgctctccaaaagtagattttacgctctctagcgaaagggactttgcattgctctccctacaagtgccattaaaagatgccaagtcttgtgggctccatcaacttttgcgcggccccgaggtacagttggttgcccatagtccgtggctgaaggactccctatccagaaccacgaacattcaggggataaatttgctattttcaagcagacgcggacatctattcctacagacagaccagcccatctataatcctggccagagggtccggtaccgagtgtttgccctcgatcagaaaatgcgtccttccacagataccatcaccgtgatggttgagaactcccacggcttaagagtccgcaagaaagaagtgtacatgcctagtagcattttccaggatgactttgtgatcccggacatatctgagcccgggacctggaagatatcagcccggttttctgacggtctcgaatcaaactcctccacacaattcgaagtaaaaaaatatgttctgcctaactttgaagtgaagattacccctggtaaaccttacatactgacagtcccaggacaccttgatgagatgcaactggacatccaggccagatacatttacggaaagcctgtacagggagtggcgtatgtgcgcttcggcctcctggacgaagacggaaaaaaaacattcttccgcgggttagagtcccagacgaaactcgtgaacggccaatctcacatctccctttccaaggcagaatttcaggatgcattagagaaactaaatatgggaattactgatctacagggcctccgcctttatgtagctgctgccataattgagtatcccggaggagagatggaggaagctgaactcacttcctggtatttcgtctcctctcccttcagtttggatttatctaaaacaaagcgccaccttgtccctggggcgcctttccttcttcaagcactggtccgagaaatgtccggctccccagcctccgggattcctgtgaaagtaagcgcgaccgtcagttcccctggctcggttccagaggtgcaggacattcagcaaaacacagatggatcaggacaggtctcaatccccatcattattccacaaacaataagtgagctgcagctttccgtttctgcaggatccccgcaccctgcgattgcacgtttgactgtggcagcaccgcccagtgggggacccggatttctctctattgaacgtcccgattccaggccgccccgtgttggcgacacactgaatctcaacctgcgggcagtcggttctggtgccacattcagccattattactatatgattttaagccgcgggcaaatcgtattcatgaatcgagaaccaaaacgaacccttacttcagtgtcagtatttgtcgatcatcacttagccccttccttttatttcgtcgccttttactaccatggggaccatcctgtcgccaactcactgcgcgtagatgtgcaagcaggggcctgcgaaggcaaattagagctgtctgtcgatggtgccaaacaatatagaaacggcgaaagcgtgaaacttcaccttgagacggatagcctggcactcgtagcacttggtgctcttgataccgcgctgtatgcagctggcagtaaaagccacaagccattaaatatgggaaaagtatttgaggctatgaacagttatgacttaggatgcggacccggggggggcgattccgctctacaggtgttccaggctgccggactggcattctccgatggtgatcagtggactctgtccaggaaacgactaagctgccctaaagaaaagaccacaagaaaaaagagaaatgttaactttcagaaggcaatcaacgagaagctggggcaatacgcttcccctaccgctaaacgatgttgtcaagacggagttaccaggttgcctatgatgagatcctgcgagcagagagcagcaagagtgcagcagcccgattgcagagagccttttctgtcctgttgccagtttgctgagagtctacgtaagaagtccagagacaagggacaggctgggttacaacgagctctcgagattttgcaggaagaggacctcattgatgaggacgatataccggttcgatctttctttcctgagaactggctgtggcgtgtggaaacagtggatagatttcagatcctgacactgtggctgcccgatagtttaacaacttgggaaatacatggactgtcgctgagtaaaacaaagggactgtgcgttgcgaccccagtccaactccgagttttcagagaattccatctacaccttcgattgcccatgtcagtgaggcgctttgagcagctcgagctgagacccgtgctctacaactacctggataagaacctgactgtgtccgtgcacgtctcaccagtggagggtttatgtctcgccgggggcggaggcctggcccaacaggtgctggtccctgctgggtctgcaagacccgtggcctttagcgtggtgccgacagctgcggcggcagtctcccttaaagtagtagcccgagggtcctttgaattcccagtcggtgatgccgtgtcaaaggtgctgcaaatcgagaaagaaggagcaatccaccgtgaagaacttgtctatgaactgaacccacttgaccatcgcgggcggacgctggaaatcccaggcaattccgacccaaatatgatacccgacggcgactttaacagttatgtcagagttactgcatccgacccactcgatactttgggaagcgagggtgccctttcacctggaggggtcgccagtttgctgaggcttcccagaggttgtggggaacagacaatgatctatttggctccaacactcgccgctagccgttacttagataagacagagcaatggtcaacgttaccaccagaaactaaggatcatgccgtcgacctcatccagaagggctatatgagaatacaacaatttaggaaagcagacgggagctacgctgcatggctctcgcgggggagtagtacctggctgacagcctttgtccttaaagtcctttctctcgcccaggagcaggtgggtggctctcccgagaaacttcaagagacctctaactggttgctgagccagcagcaggctgacggatcctttcaggacctgagtcccgtgatccaccgcagcatgcaggggggactggtgggtaacgacgaaactgtggcattaacagcatttgtgaccatagcactgcatcatggcctggccgtgtttcaggatgaaggagctgagcctttgaagcaaagagtggaggcatctatctcgaaagcgtcctcctttttgggtgaaaaggcaagtgccggcttattgggtgcgcatgccgccgcaataactgcttatgcattgacgcttactaaagctccagccgacctgcgcggggtagctcacaacaacctgatggcgatggcacaggagaccggagacaatctctattggggctcggtgacaggaagccaatccaatgcagtgtcaccaaccccagctcctagaaatccgtccgaccctatgccccaagccccagctctttggatagagactacagcatacgccctcctccacctgcttctccacgagggaaaagccgaaatggccgatcaggcagctgcttggcttacacgacagggctcttttcaaggcggctttaggagtacacaagataccgtcatagctttagatgccctgtctgcctattggatcgcatcacacacaactgaagaacggggcttaaatgtaaccctgtctagcactggccgcaatggctttaaatcccacgccctgcaactgaacaacagacagatacggggcctagaagaggagctacaattcagcctcggctccaaaatcaatgtcaaagtcggggggaactccaaggggactctgaaagtactacgaacttacaacgtacttgacatgaaaaacaccacctgccaggatctgcagatcgaagtgaccgtcaagggccacgtggaatacactatggaagctaacgaggactatgaggattacgaatacgacgagttacctgccaaagacgatccagatgctccccttcagccagtcactcctttgcaactgtttgaagggagaaggaatcgaagacgtagggaagcgcctaaagtcgtggaggaacaagagtcaagagtgcactataccgtgtgtatatggagaaacggcaaagttgggttgtccggaatggccattgctgatgtcacccttctcagtgggttccatgcattacgagccgatctcgagaagttaacttcactaagcgatcgatacgtatcacatttcgagaccgaaggaccacatgtacttctctacttcgattctgtccctacttcaagagaatgcgtggggtttgaggcagtccaggaagtccctgtgggcctggtgcagcctgcctctgccacactgtacgactactataacccagaacgccggtgttcagttttttatggcgctccctcaaaatctaggttactcgccacgttatgcagcgccgaagtctgtcaatgtgcagaaggaaagtgccccaggcaaaggcgcgccttggagcgtgggcttcaggatgaggacggctacagaatgaaattcgcttgctactacccacgggttgaatatggcttccaggtcaaagtactcagggaggatagtagagccgcctttcgcttattcgagactaagatcacacaggtgcttcactttaccaaagacgttaaagccgccgccaaccagatgagaaacttcctagtcagagctagctgccgattacgccttgaaccggggaaggaatatttgattatggggctggatggcgccacatatgaccttgaagggcatccccaatatttgctggactccaattcctggattgaagagatgcctagcgaacggttatgtcgatccactcgtcaaagagcagcctgcgcacaactaaacgactttctgcaagaatacggaacacaaggttgtcaggtttag

SEQ ID NO: 85071 - DNA, 5235 bp, Artificial Sequence
  derived and/or modified sequence
atgaggctgctctggggactgatttgggcctcatccttcttcaccctatctctgcagaagccaagattgctgctgtttagcccctccgtcgtgcacctgggcgtccccctatccgtgggagtgcaattacaggatgtcccacgtggccaggttgtcaagggctccgtatttctcagaaaccctagtcgaaacaacgtcccatgtagcccaaaagtggatttcaccctcagctcagaaagagattttgctctactgtcccttcaggtcccactaaaagacgccaaaagctgcggactgcatcaacttcttcgaggcccagaggtccagctggtggcacacagcccatggttaaaggatagcctgtcacgcactactaacatacaaggtattaatttactgttttctagtagaagaggccatctctttctgcaaactgaccagcctatatacaatcctgggcagagagtcaggtacagggtcttcgccctcgaccaaaagatgcgcccaagcacagacacgatcacagtgatggtggagaacagtcatggtctacgagtgcggaaaaaagaggtttacatgccatcttccatcttccaagacgattttgtgatccccgacattagcgaaccaggtacgtggaagatctctgcaaggttcagtgacggcttagaatccaatagttcaacgcagttcgaggtcaaaaaatacgttctccccaatttcgaggtaaagatcacaccaggaaaaccctacattctgactgtcccaggacatcttgacgagatgcagctggacatccaggcacgttatatttacggcaagccagtgcagggcgtggcttatgtgcgcttcggtctgcttgacgaggatggtaaaaagacttttttcagaggattagagtctcagaccaagcttgtcaacggccagtcacacatatcactcagtaaggctgaatttcaggatgctttggaaaagttgaatatgggaataactgacctgcaaggactgcgtttatacgtcgctgccgcaatcattgagtaccctggaggagaaatggaggaagctgaattgacatcatggtactttgtaagctcacccttcagcctggatctgtcgaagacaaaacgtcacctggttcccggggcacccttcctgctgcaggccctcgttcgggaaatgtcaggatctccagccagcgggattcccgttaaggtcagtgctaccgtctcctcacctgggtctgtgcccgaagttcaggatatacagcaaaacactgatggatccggtcaagtatctatccccatcattatcccgcaaactatcagtgaactccagctgtcagtgtctgctggatctccccatcccgctattgcgcgtctgactgtggccgcccctccctccgggggtcccggatttctttccatcgaacgacctgattctagacctcctcgcgtcggcgataccctgaacctgaatctgcgagctgtgggcagcggcgctacgttctcacattattactacatgatactctctaggggtcagattgttttcatgaatcgagagccgaaaagaactctcacatcagtctctgttttcgtcgatcaccacctggcgccgagcttttattttgtggccttttactaccatggcgatcatccagttgccaactcactgcgtgtggatgtgcaagctggggcttgtgaaggaaaactggaactctctgtcgacggtgcaaagcagtataggaatggagagtctgtcaaactgcatttggaaactgactcactagctctcgttgccttaggagcccttgacactgctctttacgcagctggatcaaagtcccataaaccattaaatatgggtaaagtcttcgaggctatgaattcttatgacctggggtgcggaccaggcggaggcgatagtgcacttcaggtatttcaggctgcagggcttgctttctctgatggagaccaatggaccttatcacgcaagcgactgagctgcccaaaagaaaaaaccacacgcaaaaagaggaacgtgaattttcagaaggccattaacgaaaagctgggtcagtacgcttctcctactgctaagcgctgttgccaggacggcgtgacacgtttaccaatgatgagaagctgtgagcagagagcagcaagagttcagcaaccagattgcagagagccatttctctcatgctgccagtttgccgagtcgctgagaaagaagagccgcgacaagggacaagccggactacagagggctctcgagatactgcaagaagaggatctcatagacgaagacgacattcctgttaggtctttctttcctgagaattggctttggcgtgtcgagaccgtagaccgattccagatcctcacattgtggctgcctgattctctgaccacctgggaaatccacggtttatcactgtctaaaaccaaaggcctctgtgttgcaaccccggtacaactgcgagtttttagagagttccatttgcatctgaggctcccgatgtctgtacgcaggtttgaacagctggaactgcgcccagtcctctacaattatctcgataagaatctgaccgtgtctgtgcatgttagtcctgtggaaggcctttgtctcgcaggtggaggagggctcgctcagcaggtgttggtgccggcaggcagtgcacgcccagtcgcgttctctgtggtccctactgccgcagcggctgtatccctgaaggtcgtggctagaggctcatttgagtttcccgtgggcgacgccgtctctaaagtgttacagattgaaaaagaaggcgccatccaccgcgaggagctggtgtacgaattgaacccacttgaccaccgagggcgtactctggagatacctggtaacagcgacccgaatatgattccagatggagattttaactcatacgtgagagtgactgcctccgatcccctcgacacacttggcagcgagggtgctttgtctcctggaggcgtggcatcccttctgaggcttcctagagggtgtggggagcaaaccatgatttatctggcaccaacactggccgcatcccggtatctggacaagaccgagcaatggtcaacactccctcccgaaacaaaggaccacgcagtggacctgatccagaaaggctatatgagaatccaacaatttagaaaggctgatggctcttacgccgcgtggctgtccagaggctcttccacttggctgacggctttcgtgctgaaggttctgagcttggcccaggaacaggtggggggttctcctgagaaactgcaagaaacctcaaactggttgctctcgcaacagcaggccgacggatccttccaagacctgagcccagtaatccatagaagtatgcaaggggggctggtaggcaatgacgagactgtggccctcactgcctttgtcacgattgccttacatcacggcctcgccgtgtttcaggacgagggagctgagccactgaaacaaagagttgaggcgtcaatttctaaggcttcttctttcctcggtgaaaaagccagcgcaggcttactcggagctcatgcagccgctattaccgcctacgccctgactctaacgaaagcccctgccgacctgcgtggagtcgcacataataatttaatggctatggcccaggagaccggagataacttatactgggggtcagtaaccggctctcagtccaacgccgtcagtccgaccccagccccccgcaatccctctgaccctatgccacaagcccctgcactatggattgaaaccacagcatacgctctcctgcacctgctgctacatgaagggaaagccgaaatggcagatcaggctgcagcgtggttgaccagacaaggaagcttccaaggcggatttagatcaacccaggatacagtcattgcgctcgacgctctgtcagcctactggattgcaagccacaccacagaggaacggggtctgaacgtaaccttgagcagcacaggaagaaatgggttcaaaagccacgcgctgcagctgaacaacagacagattaggggcctggaggaagaattacagttctctttagggtccaagattaacgttaaagtgggggggaactctaaggggacactaaaggttctgaggacttacaacgtgttagatatgaaaaatacaacttgccaggatctgcagatcgaagtgactgtgaagggccacgtagagtatactatggaagcgaatgaggattatgaggattatgaatacgatgaactacctgcaaaagacgaccccgacgcaccattgcagccagtgacccctcttcaattattcgaaggtcggagaaatagaaggaggagagaggccccgaaagtggttgaagaacaagaaagtagggtccattacaccgtgtgtatctggcggaatggcaaggtcggcctgtcaggaatggctatcgccgacgtgaccttgctgagcggtttccacgcattgagagcagatctggagaaattgacaagcttgtctgatagatatgtttcacactttgaaaccgagggcccacatgttctcttatactttgattcagtaccgacgtcccgggaatgcgtggggtttgaggcagtccaagaagtccctgttggcctcgtccagcccgcttctgccactctgtacgattactataaccccgagagaagatgcagtgttttttatggcgctcctagcaagtcgcgacttctggcaacactctgtagtgcagaagtatgccaatgtgctgaagggaaatgtccccgtcaaaggagagctctggaacggggcttacaagatgaggacggctacagaatgaagttcgcctgctattaccctagagtggagtatggcttccaagtgaaggttctgcgggaagactccagagccgctttcaggctgtttgaaacaaaaattactcaagtactgcattttactaaagacgtgaaagccgccgcaaatcagatgcgcaatttcctggtgagagcatcatgcaggctacggctggaacccggtaaagaatacctgattatgggattagacggggcaacatatgatctggaaggacatcctcagtatctcctagactccaattcatggatcgaggaaatgccctccgagagactttgccgaagcactagacagagagccgcttgcgcgcagttgaacgactttttacaggaatacggaacacaaggatgtcaggtttag

SEQ ID NO: 85072 - DNA, 1536 bp, Artificial Sequence
  derived and/or modified sequence
atggccaagggactctcggtacagaacgataagcaccccggttaccagccagcactgctactttcacctggagcccctctgtttgccgacggaccagcttatgccctgttacatttattgctgcacgaggggaaagctgaaatggcagatcaagccgccgcctggctgactcggcagggttccttccaagggggcttccggtcaactcaggatacagtgattgccttggacgcattaagcgcttactggatcgcttcccacaccaccgaggaaagagggttaaacgtgaccctgagtagtaccggccgcaatggtttcaaaagtcatgcactgcagctgaacaatcgacaaatccgaggtcttgaagaggagctgcagttcagccttgggagcaaaatcaatgtaaaagtcggagggaatagtaagggcacactcaaagtgctgcggacttacaatgttctggatatgaaaaatactacctgccaagatctacagatagaagtaacagtgaaaggacacgttgagtacacaatggaggcgaatgaagattacgaggactacgaatacgacgagctgcccgccaaggacgatcccgacgctcctctgcaacccgtgactccattgcagctgtttgagggcagaaggaacagacgcaggagggaagcaccaaaggtcgtcgaagaacaggagagccgagtacattataccgtttgtatatggagaaacgggaaagtgggtctgtctggcatggctatcgcagatgtgacgctactgtccggctttcacgctctgagagcagatcttgaaaagcttaccagcctttccgacaggtatgtttcccatttcgagactgaaggccctcacgtcttattgtactttgacagcgtgccaacatcaagagagtgcgttggattcgaagcagtccaggaggtcccagtagggctcgtccagcccgcctccgctacactatatgactattacaaccccgaacgcagatgttccgtcttttacggcgctccaagcaaaagtcgcctattagccaccctgtgttccgccgaagtttgccaatgtgcagagggcaaatgtcccagacagagacgcgccctggaacggggtctgcaggacgaagacggttatcgtatgaagttcgcgtgttactacccacgcgttgagtacggattccaggtcaaggtgctacgcgaggactctagagccgccttccgcctcttcgagacaaagattacccaagtactccattttacaaaagatgtaaaggccgcagccaatcagatgcgaaattttctggtccgtgcctcttgtcggttaagacttgaacctggaaaggagtatcttatcatgggcctcgatggcgcaacttacgacctggaaggacatccacaatatttactagattctaacagttggatagaagagatgccatccgaaaggctctgccggtccacacgccagcgggcagcttgcgcacagctaaatgattttcttcaagaatacggaactcagggctgccaagtatag

SEQ ID NO: 85073 - DNA, 2054 bp, Artificial Sequence
  derived and/or modified sequence
agaaggtagcagacagacagacggatctaacctctcttggatcctccagccatgaggctgctctgggggctgatctgggcatccagcttcttcaccttatctctgcagaagcccaggttgctcttgttctctccttctgtggttcatctgggggtccccctatcggtgggggtgcagctccaggatgtgccccgaggacaggtagtgaaaggatcagtgttcctgagaaacccatctcgtaataatgtcccctgctccccaaaggtggacttcacccttagctcagaaagagacttcgcactcctcagtctccaggtgcccttgaaagatgcgaagagctgtggcctccatcaactcctcagaggccctgaggtccagctggtggcccattcgccatggctaaaggactctctgtccagaacgacaaacatccagggtatcaacctgctcttctcctctcgccgggggcacctctttttgcagacggaccagcctacgccctgctgcacctcctgcttcacgagggcaaagcagagatggcagaccaggctgcggcctggctcacccgtcagggcagcttccaagggggattccgcagtacccaagacacggtgattgccctggatgccctgtctgcctactggattgcctcccacaccactgaggagaggggtctcaatgtgactctcagctccacaggccggaatgggttcaagtcccacgcgctgcagctgaacaaccgccagattcgcggcctggaggaggagctgcagttttccttgggcagcaagatcaatgtgaaggtgggaggaaacagcaaaggaaccctgaaggtccttcgtacctacaatgtcctggacatgaagaacacgacctgccaggacctacagatagaagtgacagtcaaaggccacgtcgagtacacgatggaagcaaacgaggactatgaggactatgagtacgatgagcttccagccaaggatgacccagatgcccctctgcagcccgtgacacccctgcagctgtttgagggtcggaggaaccgccgcaggagggaggcgcccaaggtggtggaggagcaggagtccagggtgcactacaccgtgtgcatctggcggaacggcaaggtggggctgtctggcatggccatcgcggacgtcaccctcctgagtggattccacgccctgcgtgctgacctggagaagctgacctccctctctgaccgttacgtgagtcactttgagaccgaggggccccacgtcctgctgtattttgactcggtccccacctcccgggagtgcgtgggctttgaggctgtgcaggaagtgccggtggggctggtgcagccggccagcgcaaccctgtacgactactacaaccccgagcgcagatgttctgtgttttacggggcaccaagtaagagcagactcttggccaccttgtgttctgctgaagtctgccagtgtgctgaggggaagtgccctcgccagcgtcgcgccctggagcggggtctgcaggacgaggatggctacaggatgaagtttgcctgctactacccccgtgtggagtacggcttccaggttaaggttctccgagaagacagcagagctgctttccgcctctttgagaccaagatcacccaagtcctgcacttcaccaaggatgtcaaggccgctgctaatcagatgcgcaacttcctggttcgagcctcctgccgccttcgcttggaacctgggaaagaatatttgatcatgggtctagatggggccacctatgacctcgagggacacccccagtacctgctggactcgaatagctggatcgaggagatgccctctgaacgcctgtgccggagcacccgccagcgggcagcctgtgcccagctcaacgacttcctccaggagtatggcactcaggggtgccaggtgtgagggctgccctcccacctccgctgggaggaacctgaacctgggaaccatgaagctggaagcactgctgtgtccgctttcatgaacacagcctgggaccagggcatattaaaggcttttggcagc

SEQ ID NO: 85074 - DNA, 5235 bp, Artificial Sequence
  derived and/or modified sequence
atgagactgctgtggggcctgatctgggccagcagcttcttcaccctgagcctgcagaagcccagactgctgctgttcagccccagcgtggtgcacctgggcgtgcccctgagcgtgggcgtgcagctgcaggacgtgcccagaggccaggtggtgaagggcagcgtgttcctgagaaaccccagcagaaacaacgtgccctgcagccccaaggtggacttcaccctgagcagcgagagagacttcgccctgctgagcctgcaggtgcccctgaaggacgccaagagctgcggcctgcaccagctgctgagaggccccgaggtgcagctggtggcccacagcccctggctgaaggacagcctgagcagaaccaccaacatccagggcatcaacctgctgttcagcagcagaagaggccacctgttcctgcagaccgaccagcccatctacaaccccggccagagagtgagatacagagtgttcgccctggaccagaagatgagacccagcaccgacaccatcaccgtgatggtggagaacagccacggcctgagagtgagaaagaaggaggtgtacatgcccagcagcatcttccaggacgacttcgtgatccccgacatcagcgagcccggcacctggaagatcagcgccagattcagcgacggcctggagagcaacagcagcacccagttcgaggtgaagaagtacgtgctgcccaacttcgaggtgaagatcacccccggcaagccctacatcctgaccgtgcccggccacctggacgagatgcagctggacatccaggccagatacatctacggcaagcccgtgcagggcgtggcctacgtgagattcggcctgctggacgaggacggcaagaagaccttcttcagaggcctggagagccagaccaagctggtgaacggccagagccacatcagcctgagcaaggccgagttccaggacgccctggagaagctgaacatgggcatcaccgacctgcagggcctgagactgtacgtggccgccgccatcatcgagtaccccggcggcgagatggaggaggccgagctgaccagctggtacttcgtgagcagccccttcagcctggacctgagcaagaccaagagacacctggtgcccggcgcccccttcctgctgcaggccctggtgagagagatgagcggcagccccgccagcggcatccccgtgaaggtgagcgccaccgtgagcagccccggcagcgtgcccgaggtgcaggacatccagcagaacaccgacggcagcggccaggtgagcatccccatcatcatcccccagaccatcagcgagctgcagctgagcgtgagcgccggcagcccccaccccgccatcgccagactgaccgtggccgccccccccagcggcggccccggcttcctgagcatcgagagacccgacagcagaccccccagagtgggcgacaccctgaacctgaacctgagagccgtgggcagcggcgccaccttcagccactactactacatgatcctgagcagaggccagatcgtgttcatgaacagagagcccaagagaaccctgaccagcgtgagcgtgttcgtggaccaccacctggcccccagcttctacttcgtggccttctactaccacggcgaccaccccgtggccaacagcctgagagtggacgtgcaggccggcgcctgcgagggcaagctggagctgagcgtggacggcgccaagcagtacagaaacggcgagagcgtgaagctgcacctggagaccgacagcctggccctggtggccctgggcgccctggacaccgccctgtacgccgccggcagcaagagccacaagcccctgaacatgggcaaggtgttcgaggccatgaacagctacgacctgggctgcggccccggcggcggcgacagcgccctgcaggtgttccaggccgccggcctggccttcagcgacggcgaccagtggaccctgagcagaaagagactgagctgccccaaggagaagaccaccagaaagaagagaaacgtgaacttccagaaggccatcaacgagaagctgggccagtacgccagccccaccgccaagagatgctgccaggacggcgtgaccagactgcccatgatgagaagctgcgagcagagagccgccagagtgcagcagcccgactgcagagagcccttcctgagctgctgccagttcgccgagagcctgagaaagaagagcagagacaagggccaggccggcctgcagagagccctggagatcctgcaggaggaggacctgatcgacgaggacgacatccccgtgagaagcttcttccccgagaactggctgtggagagtggagaccgtggacagattccagatcctgaccctgtggctgcccgacagcctgaccacctgggagatccacggcctgagcctgagcaagaccaagggcctgtgcgtggccacccccgtgcagctgagagtgttcagagagttccacctgcacctgagactgcccatgagcgtgagaagattcgagcagctggagctgagacccgtgctgtacaactacctggacaagaacctgaccgtgagcgtgcacgtgagccccgtggagggcctgtgcctggccggcggcggcggcctggcccagcaggtgctggtgcccgccggcagcgccagacccgtggccttcagcgtggtgcccaccgccgccgccgccgtgagcctgaaggtggtggccagaggcagcttcgagttccccgtgggcgacgccgtgagcaaggtgctgcagatcgagaaggagggcgccatccacagagaggagctggtgtacgagctgaaccccctggaccacagaggcagaaccctggagatccccggcaacagcgaccccaacatgatccccgacggcgacttcaacagctacgtgagagtgaccgccagcgaccccctggacaccctgggcagcgagggcgccctgagccccggcggcgtggccagcctgctgagactgcccagaggctgcggcgagcagaccatgatctacctggcccccaccctggccgccagcagatacctggacaagaccgagcagtggagcaccctgccccccgagaccaaggaccacgccgtggacctgatccagaagggctacatgagaatccagcagttcagaaaggccgacggcagctacgccgcctggctgagcagaggcagcagcacctggctgaccgccttcgtgctgaaggtgctgagcctggcccaggagcaggtgggcggcagccccgagaagctgcaggagaccagcaactggctgctgagccagcagcaggccgacggcagcttccaggacctgagccccgtgatccacagaagcatgcagggcggcctggtgggcaacgacgagaccgtggccctgaccgccttcgtgaccatcgccctgcaccacggcctggccgtgttccaggacgagggcgccgagcccctgaagcagagagtggaggccagcatcagcaaggccagcagcttcctgggcgagaaggccagcgccggcctgctgggcgcccacgccgccgccatcaccgcctacgccctgaccctgaccaaggcccccgccgacctgagaggcgtggcccacaacaacctgatggccatggcccaggagaccggcgacaacctgtactggggcagcgtgaccggcagccagagcaacgccgtgagccccacccccgcccccagaaaccccagcgaccccatgccccaggcccccgccctgtggatcgagaccaccgcctacgccctgctgcacctgctgctgcacgagggcaaggccgagatggccgaccaggccgccgcctggctgaccagacagggcagcttccagggcggcttcagaagcacccaggacaccgtgatcgccctggacgccctgagcgcctactggatcgccagccacaccaccgaggagagaggcctgaacgtgaccctgagcagcaccggcagaaacggcttcaagagccacgccctgcagctgaacaacagacagatcagaggcctggaggaggagctgcagttcagcctgggcagcaagatcaacgtgaaggtgggcggcaacagcaagggcaccctgaaggtgctgagaacctacaacgtgctggacatgaagaacaccacctgccaggacctgcagatcgaggtgaccgtgaagggccacgtggagtacaccatggaggccaacgaggactacgaggactacgagtacgacgagctgcccgccaaggacgaccccgacgcccccctgcagcccgtgacccccctgcagctgttcgagggcagaagaaacagaagaagaagagaggcccccaaggtggtggaggagcaggagagcagagtgcactacaccgtgtgcatctggagaaacggcaaggtgggcctgagcggcatggccatcgccgacgtgaccctgctgagcggcttccacgccctgagagccgacctggagaagctgaccagcctgagcgacagatacgtgagccacttcgagaccgagggcccccacgtgctgctgtacttcgacagcgtgcccaccagcagagagtgcgtgggcttcgaggccgtgcaggaggtgcccgtgggcctggtgcagcccgccagcgccaccctgtacgactactacaaccccgagagaagatgcagcgtgttctacggcgcccccagcaagagcagactgctggccaccctgtgcagcgccgaggtgtgccagtgcgccgagggcaagtgccccagacagagaagagccctggagagaggcctgcaggacgaggacggctacagaatgaagttcgcctgctactaccccagagtggagtacggcttccaggtgaaggtgctgagagaggacagcagagccgccttcagactgttcgagaccaagatcacccaggtgctgcacttcaccaaggacgtgaaggccgccgccaaccagatgagaaacttcctggtgagagccagctgcagactgagactggagcccggcaaggagtacctgatcatgggcctggacggcgccacctacgacctggagggccacccccagtacctgctggacagcaacagctggatcgaggagatgcccagcgagagactgtgcagaagcaccagacagagagccgcctgcgcccagctgaacgacttcctgcaggagtacggcacccagggctgccaggtgtag

SEQ ID NO: 85075 - DNA, 1536 bp, Artificial Sequence
  derived and/or modified sequence
atggccaagggcctgagcgtgcagaacgacaagcaccccggctaccagcccgccctgctgctgagccccggcgcccccctgttcgccgacggccccgcctacgccctgctgcacctgctgctgcacgagggcaaggccgagatggccgaccaggccgccgcctggctgaccagacagggcagcttccagggcggcttcagaagcacccaggacaccgtgatcgccctggacgccctgagcgcctactggatcgccagccacaccaccgaggagagaggcctgaacgtgaccctgagcagcaccggcagaaacggcttcaagagccacgccctgcagctgaacaacagacagatcagaggcctggaggaggagctgcagttcagcctgggcagcaagatcaacgtgaaggtgggcggcaacagcaagggcaccctgaaggtgctgagaacctacaacgtgctggacatgaagaacaccacctgccaggacctgcagatcgaggtgaccgtgaagggccacgtggagtacaccatggaggccaacgaggactacgaggactacgagtacgacgagctgcccgccaaggacgaccccgacgcccccctgcagcccgtgacccccctgcagctgttcgagggcagaagaaacagaagaagaagagaggcccccaaggtggtggaggagcaggagagcagagtgcactacaccgtgtgcatctggagaaacggcaaggtgggcctgagcggcatggccatcgccgacgtgaccctgctgagcggcttccacgccctgagagccgacctggagaagctgaccagcctgagcgacagatacgtgagccacttcgagaccgagggcccccacgtgctgctgtacttcgacagcgtgcccaccagcagagagtgcgtgggcttcgaggccgtgcaggaggtgcccgtgggcctggtgcagcccgccagcgccaccctgtacgactactacaaccccgagagaagatgcagcgtgttctacggcgcccccagcaagagcagactgctggccaccctgtgcagcgccgaggtgtgccagtgcgccgagggcaagtgccccagacagagaagagccctggagagaggcctgcaggacgaggacggctacagaatgaagttcgcctgctactaccccagagtggagtacggcttccaggtgaaggtgctgagagaggacagcagagccgccttcagactgttcgagaccaagatcacccaggtgctgcacttcaccaaggacgtgaaggccgccgccaaccagatgagaaacttcctggtgagagccagctgcagactgagactggagcccggcaaggagtacctgatcatgggcctggacggcgccacctacgacctggagggccacccccagtacctgctggacagcaacagctggatcgaggagatgcccagcgagagactgtgcagaagcaccagacagagagccgcctgcgcccagctgaacgacttcctgcaggagtacggcacccagggctgccaggtgtag

SEQ ID NO: 85076 - DNA, 5235 bp, Artificial Sequence
  derived and/or modified sequence
atgagactgctgtggggtttaatatgggccagttccttctttactctgtccctgcaaaaaccgcggcttctcctgtttagccctagcgtcgtgcacctgggagtacccctttctgtgggagttcaactgcaagacgtccctaggggccaagtagtgaaaggatctgttttcctaaggaacccctcccggaacaatgtgccatgtagccctaaggttgattttaccctgagctccgaaagggatttcgcgttgctgagtctccaagtacctctgaaagacgcaaaaagctgcggtttacaccagttgctgcgggggccagaggtacagcttgtcgcacattctccttggctaaaagactctctttctaggaccacaaatatccagggcataaatctgctgtttagttctcgccgaggccacctgttccttcagacagaccagcctatttacaatccaggccagcgggtccgctaccgcgtgtttgcgctggaccagaaaatgagaccctctactgatacgatcaccgtgatggtagagaactcccacgggctccgcgtgcgaaaaaaggaagtttacatgcctagctcaatcttccaggacgatttcgtgattcctgacatttcagagccaggtacttggaaaattagtgcaaggtttagcgacggactggagtctaactcatctacacagtttgaggttaagaagtatgtgctgccgaacttcgaggtgaagattacccccggaaagccctatatcctgaccgtgcctggacaccttgatgaaatgcaacttgacattcaggctcggtatatatatggaaaacctgtccagggtgtagcatatgtccgtttcggtcttctggatgaggacggaaaaaagacttttttccggggccttgagtcccaaacaaaactcgtaaacggacaaagccatatttccctctctaaagcggaattccaggatgcattggaaaaattaaacatggggattacagatctacagggcttaaggctgtacgttgctgctgccattattgagtacccggggggtgaaatggaagaggctgagctgacaagttggtactttgtctcatcacccttttctcttgacctttcgaaaaccaagagacatctcgtgccaggagccccatttcttctgcaggccttggtgagagagatgtcaggatcgccagcaagtggtattccagttaaagtttcagccaccgtctctagccccggatccgtccccgaagtccaggacatccagcaaaacactgacggatccggtcaggtctcgattcccataatcatcccccaaaccatcagcgagttgcagctgtcggtcagtgccgggagcccccacccagctatagctcgtctcacggtggcagcaccccctagcggcggacccggattcctctccattgaaagaccggatagtcgccctccgagggttggagacacgcttaatttgaacctgagggccgtgggatccggagcaactttcagccattactattacatgatcctatcacggggccagatcgtgttcatgaacagggaaccaaagaggacactcacaagcgtgagcgtcttcgttgaccatcacctggcccctagcttttactttgtggcgttctactatcacggcgaccatcccgtggcaaacagcttaagagtggatgtccaagccggagcctgtgaaggtaaattggaattatcagtggatggtgccaagcagtacagaaacggggaaagtgttaaattacacctagagaccgactctttggccctggtggccctgggggcactggacactgccttatacgctgcaggaagtaaatcccataagccactcaacatgggaaaggtgttcgaggccatgaattcctacgatttggggtgtggacccgggggaggcgacagcgccctccaggtttttcaagccgcaggcttggcgttttcagatggagaccagtggactttgagccgtaaacgcctttcgtgccctaaggaaaagacaacaagaaagaaacgcaacgtcaactttcagaaggctattaacgagaagttaggccagtacgccagtccgaccgccaaacggtgttgtcaggacggcgttacaagattgcctatgatgcggagctgtgagcagagagccgcacgtgtccagcaaccagattgcagggagccatttctgtcttgctgtcagttcgccgaaagcctgaggaagaagtcgcgcgacaaaggccaggctggcctacaaagagcactcgaaattctgcaagaagaggatcttatcgacgaagacgacattccagtcaggtccttctttccagagaactggctgtggagagtcgaaacagtcgacaggttccagatcctgactctctggctgccggatagcctcacaacctgggaaatccatggcctctccctgagtaaaaccaagggtctctgcgttgctactcctgttcaactgcgggttttccgcgaatttcacttacaccttcggttgcctatgagcgtcagacggttcgaacaattggagctacggccagttctgtataactaccttgacaaaaacttaacagtgagcgtccacgtctctcccgtggagggtctctgcttggcgggcgggggcggcctggcgcaacaggtgctggtgcccgcaggaagcgcccggcctgtggctttttccgtcgtgccaacagcagctgcggccgtcagccttaaagtagtagcgagggggtccttcgagttccccgtcggagacgcagtttctaaggtgcttcagatcgagaaagagggagcaatccatagagaggagctcgtgtacgagttgaatccgctggaccaccggggccggaccctggagataccaggaaactctgatccgaacatgattcctgacggcgattttaactcttatgtgagggtaaccgcatccgatcccctagatacgctgggtagcgagggtgcactgagtcccggtggggtggccagccttctgcgcctcccaaggggctgtggcgaacaaacaatgatatacctcgcccctacactggccgccagcagatacctggacaaaaccgaacagtggtctactctgccccccgagactaaggatcatgccgtggacctcattcaaaaaggctatatgagaatccaacagtttcggaaggcagatgggagttatgcagcatggctttctagaggctcctccacctggctgaccgcgttcgtcttgaaagtgttatccctcgcccaggagcaggtggggggctcccctgagaagttacaggaaacaagtaactggctgctttctcaacagcaggcagacgggagtttccaggacctaagccctgtgatccatcgcagtatgcagggcggcttggtcggtaacgatgaaactgtagcattaactgcctttgtgaccatcgcactccatcatgggctggcagtgttccaggacgagggcgcggagcccctgaaacagcgggttgaggcctccatttcgaaggcttctagctttctcggggaaaaagcgtctgcaggactgctgggggctcacgccgctgcgatcactgcttacgcactcacattaactaaggcccccgcggaccttcggggagtagctcataacaatttgatggcaatggcccaggagaccggcgacaacctctattggggttccgtgactgggagccagtctaacgctgttagccccactcccgcccctcggaatccatccgatcccatgcctcaagctcctgcactgtggatcgagacgacagcttacgccctcctacacctcctacttcatgaaggcaaggccgaaatggcggatcaggctgcggcctggttgactcgacaggggtccttccaaggaggcttccgatcgactcaggatacagtgattgccttggatgcgctctccgcctactggatagcaagccataccaccgaggaacgtggcttaaacgtcacattgtccagcacagggaggaatgggttcaagtcacatgcccttcagctcaataatagacaaattagaggtctggaagaagagctccagttttccctgggtagtaaaataaacgtcaaggtaggcggaaactctaaaggtacattgaaggttctgcgcacctacaacgttcttgatatgaagaacacgacctgtcaggacctgcagattgaggtcacagttaaaggacacgtcgaatacacaatggaggccaacgaggattacgaggactacgagtatgacgaattacctgccaaagacgatccggatgcacccctccagcctgtaacacctctgcagctgttcgaaggacggcgaaaccgacgaagaagagaggcccccaaggtggtcgaagaacaggagtctcgcgtgcattacacggtgtgtatctggagaaacggcaaagtggggctcagcggaatggctatcgccgacgttaccctccttagtgggtttcacgccctgagggctgacttggaaaaactgaccagcctgagcgatcgctacgtgagtcactttgagactgaagggcctcacgtgttgttgtatttcgactctgtcccaaccagcagagagtgtgtgggcttcgaggccgtgcaggaggttccagttgggctagtgcagccggcttccgccacactgtatgattattataaccccgagcgcagatgctccgtgttttatggagccccctcaaagagtaggcttttggccaccctgtgctccgctgaggtgtgtcagtgtgcggagggtaagtgtccacgtcagagacgagctctggaacggggactgcaggatgaagatggataccgaatgaaattcgcttgttactatcctcgcgtggaatacgggtttcaggtgaaagtcttgcgggaggacagccgcgcagcctttagacttttcgaaaccaagattacccaggtgttgcatttcaccaaagacgtaaaagccgctgcgaatcaaatgaggaatttcctggtgagggcaagctgtaggttaagactcgaacccgggaaagagtacctgatcatgggcctagacggagccacttacgatcttgaaggacacccgcagtatctgctcgatagcaattcctggatagaagagatgcccagcgaaagactgtgcagaagcacaagacaaagggccgcgtgcgctcagctgaatgatttcctccaggaatatggcacccagggatgtcaggtgtag

SEQ ID NO: 85077 - DNA, 5235 bp, Artificial Sequence
  derived and/or modified sequence
atgcgattactgtgggggctcatctgggcatccagcttttttacgctgagcctgcaaaagccccgcctgcttttgtttagtcccagcgtcgtccatctcggggttccgctatctgtcggggtacagctgcaggacgttcctcggggccaggtcgtcaaaggtagcgtcttcctccggaacccatctaggaataacgtcccttgctcccccaaggtggattttacgcttagctctgagagagacttcgcactgctgtctctgcaagtccctctgaaggatgcaaagagctgcggattgcaccagctgctccggggacctgaggttcagcttgttgcacacagcccgtggctgaaggattcactcagccggacaaccaacattcagggaatcaatttgttgttctccagtaggagaggacacttgtttttacagaccgaccaacccatatataatccaggccagagagtccgttaccgtgtttttgcgctcgatcagaaaatgcgtccaagcacagatactatcaccgtgatggttgaaaactcacacgggttgagagttaggaagaaggaagtctatatgccctcctccattttccaggatgattttgtgatccctgacatatccgaaccggggacctggaagatcagcgctcggttttctgacggcttggagtctaacagctcaacccagttcgaagtgaaaaagtatgtgctgccaaacttcgaggtgaagataacccctggcaagccgtacattctaacagtccctggccacctagatgagatgcagctggatatccaggctaggtacatatatggcaagcccgtgcagggagtcgcttacgtgaggttcgggcttcttgacgaggatggaaaaaagacgttcttccggggattggagtcccagaccaaactggtaaatgggcagagtcatatttcgcttagcaaggctgaattccaggatgccctggagaagttaaatatggggattacagatctgcagggtctgaggttgtacgttgcggcagctatcatcgaatatcccggcggcgaaatggaggaagctgaactcacttcctggtattttgtgagtagtcccttttccctcgacctcagcaaaactaagcgccatttagtccctggagccccgtttcttctccaggcactggtgcgagagatgtctggtagccccgcctccgggatcccagttaaggttagtgccacagtaagtagtcctggatctgtgcccgaggtccaggacatccagcagaacactgacggctcaggccaggtgtccataccgatcatcatccctcagaccattagcgagttacagctgtctgttagcgctggcagcccacaccccgctattgcccgcttgactgtcgctgcacccccatctggaggccccgggtttctttctatcgagagacctgattcccgccctcccagggtcggcgataccctcaacctgaatctcagagccgtcggaagcggagcaaccttctcacactattactacatgatcttaagtcgcggccaaatcgtgtttatgaaccgtgaacccaagcggaccttgacatctgtttcagtgttcgtcgaccaccaccttgcacccagcttctactttgtggctttctactatcacggtgaccatcccgtggcaaacagtctgcgagttgatgtacaggctggtgcctgtgaaggtaagctggagctttcggtggatggtgccaaacaatataggaacggtgagagcgtaaaactgcatctggagaccgactccttagctctggtggccctcggcgctctggacaccgcattgtacgccgcaggaagcaaatcccataagccccttaacatgggtaaggtgttcgaggcgatgaactcatatgatctcggctgcggccctgggggaggagatagcgccctgcaggtgtttcaggccgcggggttagctttcagtgacggggaccagtggacgctgtctagaaagcggctgagttgcccaaaagagaaaacgacaagaaagaaacgcaatgtcaacttccagaaggccatcaatgagaaattgggccaatacgcatctccaactgccaagcgctgttgccaggacggagtgacccggctgcccatgatgagaagctgcgaacagcgggccgcccgtgtccagcagccggactgccgggagcccttcttaagctgttgccagttcgcagagagcttgcggaaaaaatcccgggataaaggtcaggctggactgcaacgggccttagagatcctccaggaagaagaccttattgatgaagatgacatcccggtaagatccttttttccggagaactggttgtggcgggttgagacagtagacaggtttcagatcctcaccctctggttgcccgactccctcaccacgtgggaaattcacggtctgagcctcagcaagaccaaaggcctctgtgtcgccacccctgtgcaactgagggtatttcgcgagttccatctccatctcaggcttcctatgtccgttagacggtttgagcagctagaattgcgtcccgtgctctacaattacctggataagaacctgactgttagcgtacatgtgtctcctgtcgaaggcctgtgcttggctggcggtggggggctcgctcaacaggtcctagtgccggctggatcagccaggcccgtggcattctcagtggtaccaacagcggccgccgcggtaagcctaaaggtggtggcacgaggctctttcgaattccctgtgggcgacgctgtctctaaagtgctgcagattgaaaaagagggtgccatccatagggaagaactcgtgtatgagctgaatccgctcgatcataggggcagaacactagaaatccctggaaactctgacccgaatatgatccccgatggcgacttcaactcgtacgttagggtgactgcctccgatcccctggataccctgggctctgaaggtgctttgtctcctgggggggtcgccagtctgctgaggctgcctagagggtgcggggagcagactatgatttacctggcgcctacattagctgcttcacgttacctcgacaagacagagcaatggtctacattgcctcccgagactaaagaccacgcagtggacctgatccagaaaggttatatgcgcatccaacagttcaggaaagcggatggcagctacgcagcttggctgtcccgagggtctagtacgtggctgacagcattcgtgctgaaggtgctcagtctggcacaggaacaggtgggagggtctccagagaagttacaggagacctccaactggctgctctcacagcagcaggctgacggttccttccaggatctatctcccgttattcatcgctcaatgcaagggggtcttgttggcaacgacgagactgttgccctaaccgcgtttgtgacgatcgcacttcatcacggcctcgccgttttccaagatgaaggcgccgaacctctaaagcagagagtcgaggcttcaatcagtaaagccagctcctttcttggggaaaaggcttcagccggcttgctaggcgcccacgccgcagcaataacagcttacgctctgacacttacaaaggcacctgcagatctcagaggcgtagctcacaataatctgatggccatggctcaagagacaggggacaacttgtattggggctcagtaacaggcagccagtcgaatgcagtcagccccacaccagcccctagaaatccttccgatcctatgccccaggctcccgcactttggatcgaaactacagcctacgcgttattacatttgctgctccatgaaggaaaggccgaaatggctgaccaggccgccgcttggctgacccggcaggggagctttcagggaggtttcaggagcacacaggacaccgttatcgctcttgacgcgttatctgcctattggattgcctctcacaccactgaagagcgaggcctaaatgtgaccctctccagcaccggcaggaatggctttaagtcccacgccctgcagctcaataaccgtcagatacgggggctggaagaagaactccagttttccctagggtcgaaaatcaacgtcaaggtagggggcaacagtaagggcactctgaaggttttgagaacgtacaatgtacttgacatgaaaaataccacatgtcaggacctccagattgaggtgacagtcaaagggcacgtggagtacactatggaggctaatgaagattacgaggactacgaatacgacgagctccccgccaaagacgacccagacgcgcctctgcagcctgtgacgcccctacagctgttcgaaggtcggcgcaatcgtaggagaagggaggccccgaaggtagtggaggaacaggagagccgcgtccactacaccgtatgcatctggcgcaatgggaaggtgggactgtcgggaatggccatagctgatgttactttactctcaggtttccatgccttgcgggcagatctagaaaagctaaccagcctgagcgaccgctacgtatctcattttgaaaccgaggggcctcacgtgttattgtatttcgactctgtccccaccagcagggagtgcgtcggtttcgaagcggtccaggaagtccctgtaggacttgtacaacccgctagcgcaaccctgtacgattactacaacccggaacgaagatgcagtgttttctatggtgcaccatctaaaagccgcttgctggctacgctgtgctcagccgaggtttgtcagtgcgccgaaggaaagtgtcctcggcagcgtcgtgccctggagcgtggtcttcaggacgaggatggctataggatgaaatttgcatgttattaccctcgcgtcgagtatgggttccaggtgaaggtgctgagagaggattcaagagcggctttccggctgttcgaaacgaagatcacacaggtcctgcattttactaaagatgtgaaggctgccgccaaccaaatgcgtaatttcttggtgagggccagctgtcggctcaggctggagcccggtaaagaatatctcatcatggggctagatggggctacctatgatctagagggccacccacagtatctgctcgacagcaacagttggattgaggagatgcctagcgagcgtttatgccgcagcacccgccaaagagccgcctgtgcacagctgaacgacttccttcaggagtatggaactcagggttgtcaggtgtag

SEQ ID NO: 85078 - DNA, 1536 bp, Artificial Sequence
  derived and/or modified sequence
atggccaaaggcctgtcagtacagaacgacaagcacccgggctaccagccagcattgctcctgtccccgggcgcaccgctgttcgcagacggaccagcctatgcactcttgcacctgctgctgcacgagggcaaagctgagatggcagaccaggccgccgcatggctgaccagacagggctcctttcagggcggcttccgcagtacgcaggacaccgttattgccctggacgccctcagcgcttactggatagcatctcacaccaccgaggaacgggggctgaatgtgactctatccagtaccggccgcaatggctttaagtcacacgctctgcagcttaataaccgtcaaattcgaggcttggaagaggagctgcagttttccctggggtctaaaatcaatgtgaaggtgggtgggaactcaaaaggcacattgaaggtccttcggacgtacaacgttctcgacatgaagaacaccacatgccaggatctgcagatcgaggtcaccgtcaagggacacgtcgagtacacgatggaggccaatgaagattacgaggactacgagtatgatgagctcccagcgaaggatgatcctgacgccccactgcaacctgtgaccccattgcaactcttcgaagggcggcgaaacaggcgcaggagagaggcccctaaggtagtggaggaacaggagagtagagttcactacaccgtgtgtatttggcgcaacggcaaggtcggcctgtccggcatggccatagctgacgttactctgctcagcggcttccacgcactgcgagcagatctggagaagttgacctcactctcagatcgttatgtatcccatttcgaaacagaagggccacatgtcctgttgtattttgattcagtgccaacgtcccgagagtgtgttggttttgaggctgtacaggaggtaccggttgggctggtacagcctgccagtgcgaccctttacgattactataatcctgaaagaagatgttctgtcttttacggcgcgccaagtaagtcccggctcctagccactctgtgttccgctgaggtatgccagtgtgccgaggggaagtgccctcgccaaaggcgggccctcgagcggggcttgcaagacgaggacggctatcggatgaaatttgcatgttactaccctagagtggagtatgggttccaagtgaaggttctccgcgaagactcccgggctgccttcaggctgttcgaaaccaaaatcacccaagtgctccattttacgaaggacgtcaaagccgccgccaatcaaatgcgtaatttcttggtacgcgcctcttgtcgtctgagacttgagcctggcaaagagtatcttatcatgggactcgatggcgctacgtatgacctggaaggacaccctcaatatctactggatagcaatagctggatcgaggagatgccctccgaacgcctgtgcagatcaactaggcagagggctgcttgcgctcagctaaacgattttcttcaggagtatgggacgcagggctgccaggtatag

SEQ ID NO: 85079 - DNA, 5235 bp, Artificial Sequence
  derived and/or modified sequence
atgaggctgctgtggggcctcatctgggccagcagcttcttcaccctgagcctgcagaagccccggctgctgctcttcagccccagcgtggtgcacctgggcgtgcccctgtctgtgggcgtgcagctgcaggatgtgccccggggccaggtggtgaagggctctgtgttcctgaggaaccccagcagaaataatgtgccctgcagccccaaggtggacttcaccctgagcagcgagcgggactttgccctgctgagcctgcaggtgcccctgaaggatgccaagagctgtggcctgcaccagctgctgcggggccctgaggtgcagctggtggcccacagcccctggctgaaggacagcctgagcaggaccaccaacatccagggcatcaacctgctcttcagcagcagaagaggccacctgttcctgcagacagaccagcccatctacaaccctggccagagggtgcgctacagagtgtttgccctggaccagaagatgaggcccagcacagacaccatcaccgtgatggtggagaacagccacggcctgcgggtgaggaagaaggaggtgtacatgcccagcagcatcttccaggatgactttgtgatcccagacatcagcgagcccggcacctggaagatcagcgcccgcttcagtgatggcctggagagcaacagcagcacccagtttgaggtgaagaagtatgtgctgcccaactttgaggtgaagatcaccccaggcaagccctacatcctgactgtgcccggccacctggatgagatgcagctggacatccaggcccgctacatctacggcaagcctgtgcagggcgtggcctacgtgcgcttcggcctgctggatgaagatggcaagaagaccttcttccggggcctggagagccagaccaagctggtgaatggccagagccacatcagcctgagcaaggccgagttccaggatgccctggagaagctgaacatgggcatcacagacctgcagggcctgcggctgtatgtggccgccgccatcatcgagtacccaggaggagagatggaggaggccgagctgacctcctggtactttgtgagcagccccttcagcctggacctgagcaagaccaagaggcacctggtgcctggggcccccttcctgctgcaggccctggtgcgggagatgagcggcagccctgccagcggcatccctgtgaaggtgtctgccaccgtgagcagccctggctctgtgcctgaggtgcaggacatccagcagaacacagatggcagcggccaggtgtccatccccatcatcatcccccagaccatcagcgagctgcagctgtctgtgtctgctggcagcccccacccagccatcgcccggctgactgtggccgcccctccttctgggggccctggcttcctgagcattgaaagaccagacagccggcccccccgggtgggggacaccctgaacctgaacctgcgggctgtgggcagcggggccaccttcagccactactactacatgatcctgagccggggccagatcgtgttcatgaaccgggagcccaagaggaccctgacctctgtgtctgtgtttgtggaccaccacctggcccccagcttctactttgtggccttctactaccatggagaccaccctgtggccaacagcctgcgggtggatgtgcaggccggggcctgtgagggcaagctggagctgtctgtggatggagccaagcagtacagaaatggagagagcgtgaagctgcacctggagacagacagcctggccctggtggccctgggcgccctggacacagccctgtatgctgctggcagcaagagccacaagcccctgaacatgggcaaggtgtttgaggccatgaacagctatgacctgggctgcggccctgggggcggggacagcgccctgcaggtgttccaggccgccggcctggccttcagtgatggagaccagtggaccctgagcaggaagaggctgagctgccccaaggagaagaccaccaggaagaagagaaatgtgaacttccagaaggccatcaatgagaagctgggccagtatgccagccccacagccaagcgctgctgccaggatggagtgacccggctgcccatgatgaggagctgtgagcagagagctgcccgggtgcagcagcctgactgccgggagcccttcctgagctgctgccagtttgctgagagcctgaggaagaagagccgggacaagggccaggccggcctgcagagggccctggagatcctgcaggaggaggacctgattgatgaagatgacatccctgtgcgctccttcttccctgagaactggctgtggagggtggagaccgtggaccgcttccagatcctgaccctgtggctgcctgacagcctgaccacctgggagatccacggcctgagcctgagcaagaccaagggcctgtgtgtggccacccctgtgcagctgcgggtcttccgggagttccacctgcacctgcggctgcccatgtctgtgagaagatttgagcagctggagctgcggcctgtgctgtacaactacctggacaagaacctgactgtgtctgtgcacgtgtcccctgtggagggcctgtgcctggccggcggcggcggcctggcccagcaggtgctggtgcctgctggcagcgcccggcctgtggccttctctgtggtgcccacagctgctgctgctgtgtccctgaaggtggtggcccggggcagctttgagttccctgtgggagatgctgtgtccaaggtgctgcagatcgagaaggagggcgccatccaccgggaggagctggtgtatgagctgaaccccctggaccaccggggccgcaccctggagatccctggcaacagcgaccccaacatgatcccagatggagacttcaacagctatgtgcgggtgacagccagtgaccccctggacaccctgggcagcgagggcgccctgagccctggaggagtggccagcctgctgcggctgccccggggctgtggggagcagaccatgatctacctggcccccaccctggccgccagccgctacctggacaagacagagcagtggagcaccctgcccccagagaccaaggaccatgctgtggacctgatccagaagggctacatgaggatccagcagttcaggaaggcagatggcagctatgctgcctggctgagccggggcagcagcacctggctgacagcctttgtgctgaaggtgctgagcctggcccaggagcaggtgggcggcagccctgagaagctgcaggagaccagcaactggctgctgagccagcagcaggctgatggcagcttccaggacctgagccctgtgatccaccgctccatgcagggcggcctggtgggcaatgatgagaccgtggccctgacagcctttgtgaccatcgccctgcaccacggcctggccgtgttccaggatgagggcgctgagcccctgaagcagagggtggaggccagcatcagcaaggccagcagcttcctgggggagaaggccagcgctggcctgctgggcgcccacgccgccgccatcacagcctatgccctgaccctgaccaaggccccagctgacctgcggggcgtggcccacaacaacctgatggccatggcccaggagaccggggacaacctgtactggggctctgtgacaggcagccagagcaatgctgtgagccccaccccagcccccaggaaccccagcgaccccatgccccaggccccagccctgtggattgagaccacagcctatgccctgctgcacctgctgctgcacgagggcaaggccgagatggctgaccaggccgccgcctggctgacccggcagggcagcttccagggcggcttccgcagcacccaggacacagtgattgccctggatgccctgagcgcctactggatcgccagccacaccacagaggagcggggcctgaatgtgaccctgagcagcactggaagaaatggcttcaagagccacgccctgcagctgaacaaccggcagatccggggcctggaggaggagctgcagttcagcctgggcagcaagatcaacgtgaaggtgggcggcaacagcaagggcaccctgaaggtgctgcggacctacaacgtgctggacatgaagaacaccacctgccaggacctgcagatcgaggtgacagtgaagggccacgtggagtacaccatggaggccaatgaagattatgaggactatgaatatgatgagctgcctgccaaggatgatcctgatgcccccctgcagcctgtgacccccctgcagctgtttgagggcagaagaaacagaagaagaagagaggcccccaaggtggtggaggagcaggagagccgggtgcactacacagtgtgcatctggagaaatggcaaggtgggcctgagcggcatggccatcgcagatgtgaccctgctgagcggcttccacgccctgcgggctgacctggagaagctgaccagcctgagtgacagatatgtgagccactttgaaacagagggcccccacgtgctgctgtactttgacagcgtgcccaccagccgggagtgtgtgggctttgaggccgtgcaggaggtgcctgtgggcctggtgcagcctgccagcgccaccctgtatgactactacaaccctgagcggcgctgcagcgtcttctacggggcccccagcaagagccggctgctggccaccctgtgcagcgctgaggtgtgccagtgtgccgagggcaagtgcccccggcagaggcgggccctggagcggggcctgcaggatgaagatggctacaggatgaagtttgcctgctactacccccgggtggagtatggcttccaggtgaaggtgctgcgggaggacagccgggccgccttccggctgtttgagaccaagatcacccaggtgctgcacttcaccaaggatgtgaaggccgccgccaaccagatgaggaacttcctggtgcgggccagctgccgcctgcggctggagcccgggaaggagtacctgatcatgggcctggatggagccacctatgacctggagggccacccccagtacctgctggacagcaacagctggattgaggagatgcccagcgagcggctgtgccgcagcacccggcagagagctgcctgtgcccagctgaatgacttcctgcaggagtatggcacccagggctgccaggtgtag

SEQ ID NO: 85080 - DNA, 5460 bp, Artificial Sequence
  derived and/or modified sequence
agagtcaactctgccccgaggcctagcttggccagaaggtagcagacagacagacggatctaacctctcttggatcctccagccatgaggctgctctgggggctgatctgggcatccagcttcttcaccttatctctgcagaagcccaggttgctcttgttctctccttctgtggttcatctgggggtccccctatcggtgggggtgcagctccaggatgtgccccgaggacaggtagtcaaaggatcagtgttcctgagaaacccatctcgtaataatgtcccctgctccccaaaggtggacttcacccttagctcagaaagagacttcgcactcctcagtctccaggtgcccttgaaagatgcgaagagctgtggcctccatcaactcctcagaggccctgaggtccagctggtggcccattcgccatggctaaaggactctctgtccagaacgacaaacatccagggtatcaacctgctcttctcctctcgccgggggcacctctttttgcagacggaccagcccatttacaaccctggccagcgggttcggtaccgggtctttgctctggatcagaagatgcgcccgagcactgacaccatcacagtcatggtggagaactctcacggcctccgcgtgcggaagaaggaggtgtacatgccctcgtccatcttccaggatgactttgtgatcccagacatctcagagccagggacctggaagatctcagcccgattctcagatggcctggaatccaacagcagcacccagtttgaggtgaagaaatatgtccttcccaactttgaggtgaagatcacccctggaaagccctacatcctgacggtgccaggccatcttgatgaaatgcagttagacatccaggccaggtacatctatgggaagccagtgcagggggtggcatatgtgcgctttgggctcctagatgaggatggtaagaagactttctttcgggggctggagagtcagaccaagctggtgaatggacagagccacatttccctctcaaaggcagagttccaggacgccctggagaagctgaatatgggcattactgacctccaggggctgcgcctctacgttgctgcagccatcattgagtatccaggtggggagatggaggaggcagagctcacatcctggtattttgtgtcatctcccttctccttggatcttagcaagaccaagcgacaccttgtgcctggggcccccttcctgctgcaggccttggtccgtgagatgtcaggctccccagcttctggcattcctgtcaaagtttctgccacggtgtcttctcctgggtctgttcctgaagtccaggacattcagcaaaacacagacgggagcggccaagtcagcattccaataattatccctcagaccatctcagagctgcagctctcagtatctgcaggctccccacatccagcgatagccaggctcactgtggcagccccaccttcaggaggccccgggtttctgtctattgagcggccggattctcgacctcctcgtgttggggacactctgaacctgaacttgcgagccgtgggcagtggggccaccttttctcattactactacatgatcctatcccgagggcagatcgtgttcatgaatcgagagcccaagaggaccctgacctcggtctcggtgtttgtggaccatcacctggcaccctccttctactttgtggccttctactaccatggagaccacccagtggccaactccctgcgagtggatgtccaggctggggcctgcgagggcaagctggagctcagcgtggacggtgccaagcagtaccggaacggggagtccgtgaagctccacttagaaaccgactccctagccctggtggcgctgggagccttggacacagctctgtatgctgcaggcagcaagtcccacaagcccctcaacatgggcaaggtctttgaagctatgaacagctatgacctcggctgtggtcctgggggtggggacagtgcccttcaggtgttccaggcagcgggcctggccttttctgatggagaccagtggaccttatccagaaagagactaagctgtcccaaggagaagacaacccggaaaaagagaaacgtgaacttccaaaaggcgattaatgagaaattgggtcagtatgcttccccgacagccaagcgctgctgccaggatggggtgacacgtctgcccatgatgcgttcctgcgagcagcgggcagcccgcgtgcagcagccggactgccgggagcccttcctgtcctgctgccaatttgctgagagtctgcgcaagaagagcagggacaagggccaggcgggcctccaacgagccctggagatcctgcaggaggaggacctgattgatgaggatgacattcccgtgcgcagcttcttcccagagaactggctctggagagtggaaacagtggaccgctttcaaatattgacactgtggctccccgactctctgaccacgtgggagatccatggcctgagcctgtccaaaaccaaaggcctatgtgtggccaccccagtccagctccgggtgttccgcgagttccacctgcacctccgcctgcccatgtctgtccgccgctttgagcagctggagctgcggcctgtcctctataactacctggataaaaacctgactgtgagcgtccacgtgtccccagtggaggggctgtgcctggctgggggcggagggctggcccagcaggtgctggtgcctgcgggctctgcccggcctgttgccttctctgtggtgcccacggcagccgccgctgtgtctctgaaggtggtggctcgagggtccttcgaattccctgtgggagatgcggtgtccaaggttctgcagattgagaaggaaggggccatccatagagaggagctggtctatgaactcaaccccttggaccaccgaggccggaccttggaaatacctggcaactctgatcccaatatgatccctgatggggactttaacagctacgtcagggttacagcctcagatccattggacactttaggctctgagggggccttgtcaccaggaggcgtggcctccctcttgaggcttcctcgaggctgtggggagcaaaccatgatctacttggctccgacactggctgcttcccgctacctggacaagacagagcagtggagcacactgcctcccgagaccaaggaccacgccgtggatctgatccagaaaggctacatgcggatccagcagtttcggaaggcggatggttcctatgcggcttggttgtcacggggcagcagcacctggctcacagcctttgtgttgaaggtcctgagtttggcccaggagcaggtaggaggctcgcctgagaaactgcaggagacatctaactggcttctgtcccagcagcaggctgacggctcgttccaggacctctctccagtgatacataggagcatgcaggggggtttggtgggcaatgatgagactgtggcactcacagcctttgtgaccatcgcccttcatcatgggctggccgtcttccaggatgagggtgcagagccattgaagcagagagtggaagcctccatctcaaaggcaagctcatttttgggggagaaagcaagtgctgggctcctgggtgcccacgcagctgccatcacggcctatgccctgacactgaccaaggcccctgcggacctgcggggtgttgcccacaacaacctcatggcaatggcccaggagactggagataacctgtactggggctcagtcactggttctcagagcaatgccgtgtcgcccaccccagctcctcgcaacccatccgaccccatgccccaggccccagccctgtggattgaaaccacagcctacgccctgctgcacctcctgcttcacgagggcaaagcagagatggcagaccaggctgcggcctggctcacccgtcagggcagcttccaagggggattccgcagtacccaagacacggtgattgccctggatgccctgtctgcctactggattgcctcccacaccactgaggagaggggtctcaatgtgactctcagctccacaggccggaatgggttcaagtcccacgcgctgcagctgaacaaccgccagattcgcggcctggaggaggagctgcagttttccttgggcagcaagatcaatgtgaaggtgggaggaaacagcaaaggaaccctgaaggtccttcgtacctacaatgtcctggacatgaagaacacgacctgccaggacctacagatagaagtgacagtcaaaggccacgtcgagtacacgatggaagcaaacgaggactatgaggactatgagtacgatgagcttccagccaaggatgacccagatgcccctctgcagcccgtgacacccctgcagctgtttgagggtcggaggaaccgccgcaggagggaggcgcccaaggtggtggaggagcaggagtccagggtgcactacaccgtgtgcatctggcggaacggcaaggtggggctgtctggcatggccatcgcggacgtcaccctcctgagtggattccacgccctgcgtgctgacctggagaagctgacctccctctctgaccgttacgtgagtcactttgagaccgaggggccccacgtcctgctgtattttgactcggtccccacctcccgggagtgcgtgggctttgaggctgtgcaggaagtgccggtggggctggtgcagccggccagcgcaaccctgtacgactactacaaccccgagcgcagatgttctgtgttttacggggcaccaagtaagagcagactcttggccaccttgtgttctgctgaagtctgccagtgtgctgaggggaagtgccctcgccagcgtcgcgccctggagcggggtctgcaggacgaggatggctacaggatgaagtttgcctgctactacccccgtgtggagtacggcttccaggttaaggttctccgagaagacagcagagctgctttccgcctctttgagaccaagatcacccaagtcctgcacttcaccaaggatgtcaaggccgctgctaatcagatgcgcaacttcctggttcgagcctcctgccgccttcgcttggaacctgggaaagaatatttgatcatgggtctagatggggccacctatgacctcgagggacacccccagtacctgctggactcgaatagctggatcgaggagatgccctctgaacgcctgtgccggagcacccgccagcgggcagcctgtgcccagctcaacgacttcctccaggagtatggcactcaggggtgccaggtgtgagggctgccctcccacctccgctgggaggaacctgaacctgggaaccatgaagctggaagcactgctgtgtccgctttcatgaacacagcctgggaccagggcatattaaaggcttttggcagcaaagtgtcagtgttggca

SEQ ID NO: 85081 - DNA, 1536 bp, Artificial Sequence
  derived and/or modified sequence
atggccaagggcctgtctgtgcagaatgacaagcaccctggctaccagcctgccctgctgctgagccctggggcccccctgtttgctgatggccctgcctatgccctgctgcacctgctgctgcacgagggcaaggccgagatggctgaccaggccgccgcctggctgacccggcagggcagcttccagggcggcttccgcagcacccaggacaccgtcatcgccctggatgccctgagcgcctactggatcgccagccacaccacagaggagcggggcctgaatgtgaccctgagcagcactggaagaaatggcttcaagagccacgccctgcagctgaacaaccggcagatccggggcctggaggaggagctgcagttcagcctgggcagcaagatcaacgtgaaggtgggcggcaacagcaagggcaccctgaaggtgctgcggacctacaacgtgctggacatgaagaacaccacctgccaggacctgcagatcgaggtgacagtgaagggccacgtggagtacaccatggaggccaatgaagattatgaagattatgaatatgatgagctgcctgccaaggatgatcctgatgcccccctgcagcctgtgacccccctgcagctgtttgagggcagaagaaacagaagaagaagagaggcccccaaggtggtggaggagcaggagagccgggtgcactacacagtgtgcatctggagaaatggcaaggtgggcctgagcggcatggccatcgcagatgtgaccctgctgagcggcttccacgccctgcgggctgacctggagaagctgaccagcctgagtgaccgctacgtgagccactttgaaacagagggcccccacgtgctgctgtactttgattctgtgcccaccagcagagaatgtgtgggctttgaagctgtgcaggaggtgcctgtgggcctggtgcagcctgccagcgccaccctgtatgactactacaaccctgagcggcgctgcagcgtcttctatggagcccccagcaagagccggctgctggccaccctgtgcagcgctgaggtgtgccagtgtgccgagggcaaatgtccccggcagaggcgggccctggagcggggcctgcaggatgaagatggctacaggatgaagtttgcctgctactacccccgggtggagtatggcttccaggtgaaggtgctgcgggaggacagcagagctgccttccggctgtttgagaccaagatcacccaggtgctgcacttcaccaaggatgtgaaggctgctgccaaccagatgaggaacttcctggtgcgggccagctgccgcctgcggctggagcccgggaaggagtacctgatcatgggcctggatggagccacctatgacctggagggccacccccagtacctgctggacagcaacagctggattgaggagatgcccagcgagcggctgtgccgcagcacccggcagagagctgcctgtgcccagctgaatgacttcctgcaggagtatggcacccagggctgccaggtgtag

SEQ ID NO: 85082 - DNA, 5235 bp, Artificial Sequence
  derived and/or modified sequence
atgcggctgctgtggggcctgatctgggccagcagcttcttcaccctgtccctgcagaagcctcgcctgcttctcttcagtccctcggtggtacacctgggcgtccctctgtctgtcggggtccagttgcaagatgtaccaagggggcaagttgtcaaaggttctgtcttccttagaaaccccagccggaacaatgtcccctgtagccccaaagtggacttcacactttcgtctgaaagagacttcgccttactgagcttacaggtgcccctcaaagacgcaaagtcttgcggcttgcatcagttactgaggggaccagaagtgcagctcgtggcccactcaccgtggctgaaggatagtctgagtagaacaactaacatccagggtattaacctgctcttctcgagtaggcgtggccacctttttcttcaaactgaccaacccatttataatcctgggcagcgcgtgagatatagggtttttgcgcttgaccaaaagatgagaccctcgaccgatactataacggtaatggtcgaaaattcccacggattacgggttaggaagaaagaagtgtacatgccatcttccatcttccaggatgacttcgtgattcctgatatcagcgagcccggaacatggaagatcagcgcacggtttagcgacgggcttgagtctaattcttctacacagttcgaggttaagaagtacgtgctgcctaacttcgaagtgaagattacacctggtaaaccctacatcctgactgttcccgggcatctggacgaaatgcagctggatattcaggctcgttatatatatgggaagcccgtgcagggagtggcttatgtgcgctttgggctgctcgacgaggacggaaagaagaccttctttagagggctcgagtcacagaccaagttggtgaatgggcagagtcatatttcactgagtaaggcggagtttcaggacgctctggaaaaactcaacatggggatcacagaccttcagggactgaggctgtacgttgcagctgccattattgagtaccctggtggggaaatggaggaggcggaactgacatcttggtactttgtgtcaagcccattttcacttgatttatccaagactaagagacatttggttcctggcgctcccttcctcctccaggctcttgttcgtgaaatgtctggctcccccgcgtccggcattcctgtgaaggtgtcagccaccgttagctcacccggatctgttccggaggtccaggacattcagcagaacaccgatgggtccggtcaggtgagcatcccaatcatcatccctcagacaatctccgaattgcagttatctgtatctgcagggtctccacatcccgccatagctcgactgacagtggcggcaccgccatccggcggtccaggattcctgtcaattgagagaccagatagtcggcctccgcgggtgggtgacaccctcaatctgaatttgagggcagttggtagcggagccactttttcgcattattattacatgatcctctctcgggggcaaattgtgttcatgaatcgcgaaccaaagcgcactctgacttctgtcagcgtattcgtggaccatcatctggcccccagtttctactttgtggctttttattatcacggggatcatcctgtggccaacagcctgagagtggatgtgcaggctggagcttgcgaggggaagctcgaactctccgtcgacggcgctaagcaatatcggaacggggagtctgtgaagctgcacctggagaccgacagcttggcactagtcgccctgggtgccctcgacaccgccctgtatgctgctggctcaaagtcgcacaagcctctgaacatgggcaaagtgtttgaggcaatgaattcttatgatctcggttgcggacccggcggcggcgacagcgctctgcaggtgtttcaggcggccgggctagcattctccgatggtgaccagtggactcttagtcgaaaacgcctgtcctgcccaaaggagaaaacaactaggaagaagaggaacgtgaacttccaaaaagcgataaacgaaaagttgggccagtacgcttcgcctactgctaaacgatgctgtcaggatggcgtgaccagactgcccatgatgcgatcctgtgagcagagggccgccagagttcaacaacccgactgtcgggagccttttctgagttgctgtcagttcgccgaatcattacggaagaagtcaagggacaaggggcaggccggactgcagcgcgcacttgagatattgcaagaggaagatttaattgatgaagacgacatcccggtgcgctcttttttcccagaaaactggctgtggcgcgtggagaccgtagatcgttttcaaattctgaccctgtggctccccgactcgttgactacatgggaaatccatggactctcactttcgaagactaaggggctttgcgtcgccacaccagtccaacttagggtattcagggaatttcatttgcatctgaggctgcctatgagtgttagacgttttgaacagctcgaactgaggcccgtgctctacaactacctcgacaagaacttgacagtatcagtgcacgtgagtccagtggagggattgtgtttggcgggcgggggcggactagcacagcaggtcttggtgcccgcaggaagtgctcgccccgtggcgttctccgtggtgcctaccgccgctgccgccgttagcctgaaagtagtggcccgagggtcatttgaattccccgtgggcgatgcagtaagcaaagtgctgcagatcgagaaggaaggtgcaatacatcgggaggagctggtctacgaactgaacccactggaccatcggggcaggacactagaaatccccggcaactcggatcctaacatgatcccagacggtgactttaattcttacgtgagagtcaccgcaagcgatcctcttgatactcttggcagtgaaggtgctctcagtcccggaggggtggcttcacttctgcgcctaccccggggctgcggcgagcaaactatgatctatcttgccccaacccttgccgcttctcgatacctagacaaaacggaacaatggagtactctcccaccggagacaaaggaccatgccgtggatctgatccagaagggttacatgaggattcaacagttccggaaggcagatggaagctacgcggcgtggctgtcccgagggtcgtctacctggctgacggctttcgttcttaaagtgttgtccctagcacaggagcaggttgggggatctccagaaaaactccaggagacctcgaattggttgcttagccagcagcaggcggacgggtccttccaagatctttctcccgtcatccatagatcgatgcagggggggctggtcggcaatgatgagaccgtcgctctgacagcgtttgtcaccattgctctccatcatggactggcagtgtttcaggacgagggcgccgagcctctgaagcagagagtggaagcttcaatctccaaagccagcagcttccttggggagaaagcatcagccggactgttgggcgcacatgccgccgccattactgcgtacgcgctgacactgacaaaggccccggccgacttacggggcgtggcacataacaacctgatggccatggctcaagaaaccggagataatctgtactggggctcagtgacaggctcgcagtccaacgccgtgtcacctactccggcaccccgtaatcccagcgaccctatgcctcaggccccagccctgtggatcgaaaccaccgcgtacgcccttctgcatctgctgctgcatgagggcaaagctgagatggcagatcaggccgcagcatggttaacacggcagggctcatttcaggggggctttagaagcacgcaggatacagtcattgctctggatgctttgtctgcctattggatcgcctcacacacaactgaggagcggggcctgaatgtcaccctgagttccacaggacgcaatgggttcaagtcacatgcgctgcagctcaacaacagacagattcgcggcctggaggaagaattacagttcagtctcggttctaagatcaacgtgaaggtgggaggcaactccaaagggactctgaaggtcttacgtacctataacgtgctggacatgaaaaacactacttgtcaggatctacagatagaggtcacggtgaaaggacatgtagagtatactatggaagccaacgaggattacgaggactatgagtacgacgagcttcctgcgaaagatgacccagacgcaccgctgcagccagtcacccccctgcagctgttcgaaggaaggagaaaccgacgaagacgcgaggcacccaaggtggtggaggaacaggaatcacgtgtacattatacggtttgtatatggaggaatggcaaggtgggactgtccggtatggctattgctgacgttacactactgtctggtttccatgccttgcgtgctgatcttgaaaagctcactagtctctcagaccgctatgtgagtcacttcgagacagaaggcccacacgtgttgctgtacttcgatagcgtccccactagtagagaatgcgtgggatttgaagccgtccaggaggtcccagtcggtctcgtccaacctgcgagcgctacattgtacgattactacaaccctgagagacggtgcagcgtcttctacggcgccccatccaagagcaggctacttgctacgctttgtagcgccgaggtttgtcagtgcgcggaagggaagtgccctaggcagcgccgcgccttagaacggggtttacaggacgaggatggctaccgaatgaaattcgcctgttattacccacgggtggagtacggtttccaggtcaaggttctgagagaggattcgagagccgcatttaggttatttgagacaaagattactcaggtgttgcactttaccaaggacgtgaaggccgccgcgaatcagatgcgcaacttcctcgtaagagcgtcctgcaggcttcgtctcgagccaggcaaggagtatcttattatgggactggatggagccacctatgatctggaaggccacccacaatacctgctggacagtaatagttggattgaggagatgccaagtgagagactgtgccgctcaacaaggcagcgcgcagcctgtgcgcaactgaacgacttcttacaggaatacgggactcaaggctgtcaggtgtag

SEQ ID NO: 85083 - DNA, 5235 bp, Artificial Sequence
  derived and/or modified sequence
atgcggctgctgtggggcctgatctgggccagcagcttcttcaccctcagtctgcagaaacctaggcttctgctctttagtcccagcgtcgtacacctcggtgttccactgagcgtcggcgtacagttgcaggacgtaccaaggggtcaagtggtcaaagggtcagtttttctgcggaatccctccagaaacaatgtcccctgcagtcccaaggtcgatttcacactcagttctgaacgcgatttcgccctcttgagcttgcaggtgccactgaaggatgccaaaagctgcggactgcaccagcttcttcgaggccccgaagtgcaattggtggcacactccccttggctcaaagacagtttatcacggacaaccaacatccaaggaatcaatcttcttttctcatcccgtcgaggacacttatttctgcagacagatcagcctatctataatccagggcaacgggtcaggtacagagtcttcgcacttgaccagaagatgaggccctccaccgacaccattactgtaatggttgagaattctcacggacttcgcgtgagaaagaaagaggtctatatgcccagttctatcttccaggacgacttcgtgatccccgacataagcgagccaggaacctggaagatctccgccagatttagtgacggcctagaaagtaattcctccacccaatttgaggtgaagaaatacgtcctacccaacttcgaagtaaagatcacgcccggcaaaccatacattttaaccgtgcctgggcacctcgatgaaatgcaactggacattcaggcccgctatatttacggtaagccagttcaaggggtggcctacgtgaggtttgggttactggacgaagatgggaagaaaactttcttccggggtctcgaatcccagacgaagctggtgaacggtcagtcacacatctccctctccaaagctgagtttcaagacgccctagagaaactcaacatgggaataactgatctccagggactgagactgtacgttgcagcggcgataatagagtacccagggggcgagatggaggaagcggagctgacatcatggtacttcgtgtccagcccattcagtctggatctctcaaagactaagcggcacctcgtaccaggggcccctttcttactacaagcactcgtaagagaaatgagcgggtcccccgcttcaggcatacccgttaaggtgtccgcaaccgtctcatcccctgggagcgtgccggaagtgcaggacatccagcagaatactgacggcagcgggcaggttagtatccccatcataattccacagactattagcgagctccagctttccgtcagcgcggggagcccacatcctgccattgcccgtctgactgtggcagcccccccaagtggggggccagggttcctgagtatcgaacgacccgactcaaggcctccccgggtgggcgatacactcaacctgaacctcagggccgtgggctctggagcaaccttttctcattactactacatgatcttaagccgggggcagattgtgttcatgaaccgcgaacctaaacgaacactgaccagtgtgagcgtctttgtggatcatcatcttgccccctcattttacttcgtcgccttctattatcacggtgaccacccagtagcgaactctcttcgtgtcgacgttcaggcgggagcctgcgagggcaaacttgagttatcggtcgatggggcaaaacaataccgcaacggcgagtctgtgaagctgcacctggagactgacagtctggccttggttgcgctgggggctctggacacagccctttatgctgcgggttcaaaatcacataagcccctcaatatggggaaggtattcgaggcaatgaatagttatgacctcggttgcgggccgggggggggggattcagctctccaagtcttccaggcagcaggcctggctttctctgacggcgaccagtggaccctcagtagaaagcggctgtcatgtcccaaagagaagactacaaggaaaaagcgtaacgtgaactttcagaaggcaatcaacgagaaattagggcagtatgcttcgccaaccgcaaaaaggtgctgccaggacggggtaacaagactccctatgatgcggtcttgtgaacagcgagcagctcgcgtccagcaacctgattgccgcgagcctttccttagctgttgtcaattcgcggaatctttgcgaaaaaagtcccgcgataaaggccaggcaggcctccagcgggcacttgagatcctgcaggaggaggatcttatagacgaggacgacattcccgtgcggagcttctttcctgaaaactggctgtggcgggtcgagacggtcgataggtttcagattctgacactgtggctgccggactcattgacaacatgggaaattcacggattgtctctttcaaaaaccaaggggctgtgtgtggccacacctgtacagctcagggtattccgcgaattccatctccacttgagactgccgatgtccgtgaggcgtttcgaacagctggagttacggcctgtactgtacaattacctggacaaaaatttaaccgtttcagtgcatgtttcccccgtggagggcctgtgtctggctgggggtggaggactcgctcaacaggtgttggttccagccgggagcgcgcgacccgttgccttctcagtcgtccccacagccgcagctgctgtttcactgaaggtggttgctcgcggtagttttgagtttcccgtgggggatgcagtcagcaaggtcctgcagattgagaaggagggcgccatccatcgcgaggagctggtgtatgaactaaaccctctggatcatagaggccgaaccttagaaattcctgggaactctgatcctaatatgattcctgacggagattttaattcgtatgtcagggtgactgcctccgatcctttggatactcttggaagcgagggcgcattgtccccaggaggggtcgccagcttacttcggctgccacgggggtgcggggagcagacgatgatctatttggcccccactctcgcggcctcgcgttatcttgacaagacggagcagtggtctactctaccgccagagacgaaagatcacgccgttgatttaatacaaaaggggtacatgcgcatccagcagtttcggaaggctgatggatcctatgccgcctggttgtcaagggggtcctccacgtggcttactgcgttcgtgctgaaagttttgtccctggcacaggagcaggttggcggtagtccagagaaactgcaagagacgagtaattggctcctatcccagcagcaggccgatggcagttttcaggacctgtccccagttatacaccgaagcatgcaagggggactcgtgggtaacgacgagaccgtcgctcttactgcctttgtgacaatagccctacatcacgggctggcggtcttccaagatgaaggcgcggaaccccttaaacaacgggtggaggcttctatcagtaaggccagctcttttctcggagaaaaggcttccgcagggcttttaggggctcatgccgctgccattaccgcatacgctctgacactaaccaaagcccctgcggatctgaggggggtagcccataacaatctcatggctatggcacaggagacaggtgacaacctctactggggcagcgtcactggctctcaatcaaacgctgttagccctacgcctgcacctcgcaacccctccgatcccatgcctcaagcccctgctctgtggatcgagacaaccgcctacgcactccttcacctcctattgcacgagggcaaggctgaaatggctgatcaagctgcagcatggttgacacggcagggtagcttccaggggggattcaggagcacacaagataccgtgatcgccctggacgctttgtccgcttattggatcgcttcccatacaactgaggagcgggggctcaacgttacgcttagctccacaggccgtaatgggtttaaatcacatgcattgcagctcaataatagacagatccggggactagaggaggagctgcagttttctctaggttcgaagatcaatgtgaaagtaggtggcaatagcaagggcacgctgaaagttctgcgcacttacaatgtgctagatatgaagaatacgacttgccaagatctgcaaatagaagttacagtgaagggccatgttgagtacacgatggaggccaacgaagactacgaggactatgagtatgacgagctcccagctaaagacgaccccgatgctccactgcagcctgtgacaccactccagctattcgaaggcagaagaaatcgccgacgtagggaggcacctaaggtcgtcgaggagcaggagagccgcgtccattacacagtgtgtatctggcgaaacggaaaggtcggccttagcggcatggcaatcgcagatgtaaccctactaagtgggttccacgccctccgggcagatctcgagaaactgacatctttgtccgatcggtatgtgtcacatttcgaaacggagggtccgcacgtgctgttatactttgacagcgtgccgactagtagagagtgtgtgggctttgaagccgtgcaagaggtacccgtgggactcgttcaaccagccagcgctacgctctacgactactataaccccgagcggaggtgtagtgtgttctacggtgccccctcaaagagtcgtttgctggccactctgtgctcggctgaagtctgtcagtgtgctgaaggcaagtgtccccgccagcggagggccctggagagaggacttcaggatgaggatgggtacagaatgaaatttgcttgttactatccccgggtagagtacggtttccaggttaaggtgctccgagaagatagtagagcggcctttaggcttttcgaaacaaaaatcactcaagtgctgcattttactaaggacgtgaaggccgccgcgaatcaaatgcgaaatttcttagttagggctagctgcaggctacgtctggagcctggaaaggagtatctcattatgggactcgacggagccacttatgacttagaggggcatcctcagtacctgctggattctaacagctggatagaggagatgccaagcgagcgactgtgtcgatcaactaggcagagagcagcatgtgcccagctgaacgactttctgcaagaatatgggacgcaggggtgccaggtgtag

SEQ ID NO: 85084 - DNA, 1536 bp, Artificial Sequence
  derived and/or modified sequence
atggctaaggggctgagcgtgcaaaacgacaagcaccccggatatcagcccgcgctcctgctttcccctggggccccactgtttgctgatgggcctgcttatgccttgttacacctactgctgcatgaagggaaagccgagatggccgatcaggcagctgcttggttgactcggcaggggagctttcagggagggttccggtccacacaggatacagtcattgcgcttgacgccctgtccgcctactggattgcgtcacacaccaccgaagagaggggcctcaatgtgactctgtcctccaccggacgcaatgggttcaaatcccatgcactccaacttaacaacaggcaaatacgggggctagaggaagagctgcagtttagcctaggctccaaaatcaatgtgaaggtcggcgggaattctaagggcactctgaaggtactcagaacctacaatgtgcttgacatgaaaaatacgacctgccaggacctccagattgaggtgaccgtgaaaggtcatgtcgaatatacgatggaagctaatgaagactacgaggactacgagtatgacgagcttccggccaaggacgaccctgatgctccactgcaaccagttactcccctccagttgttcgaggggaggcgcaatcgcagacgccgtgaggctcccaaggtggtggaggagcaggaaagtagggttcactacacagtctgcatatggagaaatgggaaggtggggctgagcgggatggctatcgctgacgtgactctgctgtccgggtttcacgcacttagggcggatctggagaagttgacttccctcagcgatcgctacgtaagtcactttgagaccgagggaccccatgtgctattgtacttcgatagcgtcccaacgtcaagggaatgtgtcggcttcgaggccgtccaagaagtgcccgtcgggctagtgcagcctgcatccgcaacactatacgactattacaaccccgaacggagatgttccgtcttctacggcgcccccagtaagtcccggctcctggcaacattgtgctccgccgaagtgtgccagtgcgccgaggggaagtgccctaggcagcgcagagctctcgagcgaggtctccaggacgaggacggctatcggatgaaatttgcgtgttattatccccgggtcgagtacggttttcaggtgaaggtgctgcgagaggatagcagggcagcattcaggctgtttgaaactaagatcacacaggtcctgcattttacaaaagacgtgaaggcagcagcaaaccaaatgcgaaattttctggtccgcgcctcgtgccgcctccggctcgaacctgggaaggaatacctaatcatgggcttggatggcgccacctacgacctcgaggggcatccccaatacctgctggacagtaacagctggatcgaggaaatgccctctgagcggttgtgtcgaagtacacgccagagggccgcctgcgcccaactcaacgacttcctgcaggagtacggcactcaaggctgtcaggtctag

SEQ ID NO: 85085 - DNA, 1536 bp, Artificial Sequence
  derived and/or modified sequence
atggcaaaaggcctgagtgtgcaaaacgataaacaccctggttaccagcctgctctgctgttgtctccaggagcccctctgttcgctgacggaccagcctacgctttgcttcacctgctactgcatgaaggaaaggcggagatggctgatcaggcagccgcttggcttactcgtcagggaagcttccagggtgggttcaggagcacccaggacacggtcatcgctctggacgcactgagcgcttattggatcgcctctcacacaacggaggagcgaggccttaacgtgactcttagtagcaccggtcgcaacggctttaagagccacgcactgcagcttaataatcgccaaatcaggggcctggaggaagaactccagttttccctaggtagtaagatcaatgtcaaggtgggaggaaattccaaaggaacacttaaggtactgaggacctataatgtgctcgacatgaaaaacaccacatgccaggatctgcagatcgaagtgacagttaagggacatgtggaatatactatggaggcaaacgaggattatgaggattatgaatatgacgagctcccagccaaggatgatcccgatgccccccttcaaccagtgaccccactccaacttttcgagggtaggcggaaccgcaggaggagagaggcgcccaaagtcgtcgaggaacaggaaagcagggtgcactacaccgtgtgcatttggagaaacggcaaggtaggattgtccggaatggctattgcagacgttaccttgctcagtggcttccacgcgctacgagctgacctggaaaagctgaccagcctctctgaccggtacgtgagtcacttcgaaacagaaggaccacatgtgctcttatatttcgactcagtccccacctctcgggaatgtgtcggattcgaggcggtgcaagaggtgcccgtcgggctcgtgcagccagctagcgcaacgttgtacgattattacaaccccgagaggcgatgctccgtattctacggcgcgccatctaagtccagattgttggccacactatgtagcgccgaggtgtgccagtgtgccgagggaaagtgtccccggcagagaagggcacttgagcgcggtttgcaggatgaggatgggtaccgcatgaagttcgcatgctactatccgagagttgagtatggcttccaggttaaggtgctgagggaagactcaagagctgccttccgattgtttgaaactaaaattacacaggtgctgcatttcacaaaggacgtaaaggccgcagcaaaccagatgcgaaactttctagtccgagccagctgcaggctgagactggaacccggtaaggaatacctgataatgggcctagatggtgccacgtacgatctggagggccacccacagtatctgttggattcaaattcctggatcgaggaaatgcctagtgaacggttatgcagatctactaggcagagagctgcatgcgcccaactgaatgatttcttgcaagagtacggtactcagggatgccaagtgtag

SEQ ID NO: 85086 - DNA, 813 bp, Artificial Sequence
  derived and/or modified sequence
atgtgtcccgaagacagcctgcaggtgcccctgaaagatgcaaagagttgtggcttgcaccagcttcttcgggggccagaggtgcagctggtggcacacagcccttggttgaaagattcactgtcacgaacaaccaatattcaaggaatcaaccttctgttcagttcccgccgcggccatttgtttctgcaaactgaccagcccatttataatcctggccaaagggttagataccgggtctttgccctagatcagaaaatgcgaccttccaccgacactataaccgtgatggtcgagaactctcacggattacgcgtgcggaagaaggaggtctatatgccctcctctatctttcaggatgactttgtgatcccagatatttccgagcccgggacatggaagatcagcgctcgtttcagcgatggactggagtccaatagctccactcagtttgaggttaagaaatacgttctcccaaacttcgaggtgaagatcacacccggcaagccttacatccttaccgtgcccggacacctcgacgaaatgcagctcgacatccaggccaggtacatctatggtaagcctgttcagggggtggcctacgtacggtttgggctcctcgatgaggatggaaagaaaacgttctttcgcgggctggagtcccagactaagcttgtcaatggacagtcccatatttccctgagcaaagcagagtttcaggacgcgctcgagaagcttaacatgggcatcactgatctccaggggctgcgattatacgtcgccgctgcgattatagagtaccccggggggtag

SEQ ID NO: 85087 - DNA, 1536 bp, Artificial Sequence
  derived and/or modified sequence
atggccaaagggctctcagtgcaaaacgataagcatccaggctatcaacctgcacttttgctttcgcccggagctcctctctttgctgatggccctgcctacgccctgttacatctgctgctgcacgaaggaaaagccgaaatggccgatcaagctgccgcctggttgaccaggcagggatcattccagggaggcttccgctcaacacaggataccgtcattgcactggacgctctctccgcttactggatcgcaagtcacaccaccgaggaacgtggcctaaacgtgacactgagctctaccggtcgaaatgggttcaagtcccacgcactgcaacttaataataggcagatccggggactcgaggaggagcttcagttctctctgggctcaaaaataaatgtgaaggtcggcggaaattctaaagggaccctgaaagtcttacggacctataatgttctggatatgaaaaatacaacatgtcaggacctgcaaattgaagttaccgtgaagggccatgtggagtatacaatggaggccaacgaggattacgaagattatgagtacgacgagttgccagctaaggatgaccccgatgctccccttcaacccgttacgcccttacaattattcgaagggaggcggaatcgccgtaggcgcgaagcccctaaggtggtggaggagcaggagagtcgagttcattacacagtctgcatctggcggaacggcaaggtagggttgtctgggatggccattgcagacgtgacattgctgtcaggttttcacgccctgcgggccgatctcgagaagctgacttctttatccgacagatacgtgagccacttcgaaaccgagggacctcatgtgctcttatattttgattctgtccctacttctagggagtgtgtaggtttcgaggcggtgcaggaagttcctgttggcctggtccagccggcaagcgcaaccctttatgattattataaccctgaaagaagatgtagtgtcttttatggtgcaccaagtaaaagccggctcctcgcaacgttatgcagtgctgaagtgtgccaatgcgctgagggtaaatgtccgcgacaaagaagagcacttgaaagagggctgcaagacgaggacggctacagaatgaagtttgcatgctactaccctagggtcgagtacgggttccaggttaaagtgctgcgcgaagattctcgcgccgcgttcagactgtttgaaactaagattacacaggttcttcactttaccaaagatgtgaaggccgcagccaaccagatgcgcaatttcctagtccgagcctcctgcaggctgcggttggaacccggcaaggaatatttaattatggggctggatggcgccacatatgatctggaaggtcacccccaatatcttctcgattccaacagttggatcgaagaaatgccatcggaaaggctgtgccgcagtactagacaaagagccgcctgtgcccagctgaacgactttttgcaggagtatgggacacaaggatgtcaagtgtag

SEQ ID NO: 85088 - DNA, 1953 bp, Artificial Sequence
  derived and/or modified sequence
atggggagccaatgcagaggttggcacatgtgtgcccttggaagtcagcaacaggccgatggcagctttcaggacctcagccccgtgatacatagaagcatgcagggcgggttagttggcaatgacgaaacagtggccttgacagcctttgtgaccattgcacttcatcatggcctggctgtgttccaggacgaaggagcagagcctttgaaacagagagttgaggcttcgatctctaaagccagttccttcctgggtgaaaaagcctctgccggtctgcttggggcacacgccgcagcaatcaccgcgtacgctttaaccctgaccaaagctcctgctgatctaaggggagtggctcataacaacttgatggcgatggcacaagagaccggagacaacctttactggggctcagttaccgggtctcagagcaacgctgtgagccctacccccgctcctcgcaatccatccgatcctatgccacaagcgccagctctgtggatcgagacaaccgcctacgcactcttgcatctgttactgcatgagggaaaggcagagatggcagaccaggccgctgcatggctcacccggcagggaagtttccagggaggtttccgctcaacacaagataccgttatcgccttagacgctcttagcgcctactggattgcatctcacacaaccgaagagcgcgggctgaacgtgaccctgtccagcacaggacgtaacggtttcaagtctcacgccttacagttgaacaacagacagatccgtggccttgaggaggagctccaattctcacttggcagcaagattaacgtgaaagtgggaggcaactcaaaaggcaccctgaaggttcttagaacctacaatgttctagacatgaaaaacacgacatgtcaggatctgcagattgaggtgaccgttaaagggcatgtggagtacactatggaggccaacgaggactatgaagactacgaatatgatgagcttcctgctaaagacgaccctgacgccccattgcaaccggtcacaccactgcagctgtttgagggccggaggaaccgtaggcgccgcgaggccccaaaggttgtggaggaacaggagagtcgggtgcattacaccgtgtgtatttggcgaaacggtaaagtgggtctgtctggaatggctatcgcagatgtgactttgttgagtgggtttcatgccctgcgcgcagacctggagaagctgacctccctcagcgatcgatacgtgtctcactttgagaccgagggcccgcatgtgcttctgtattttgacagcgtgccaaccagtcgggagtgtgtggggttcgaagctgttcaggaagtgccggtgggcctggtacaaccagcctccgctactctttacgattactacaaccccgagcgacgctgctccgttttctacggagctccgagcaagtccaggctgctcgcgactctttgttccgctgaagtgtgccaatgtgctgagggtaagtgtcctcggcagagaagagcactggagcgcggactgcaagatgaagatggctaccgtatgaagttcgcatgctattatcccagagtggaatacggattccaggtcaaagtgctaagagaagacagtagggcagcgttcaggttatttgaaacaaaaattacccaggtgttgcactttaccaaggatgtcaaggccgcggcaaaccagatgcgtaatttcctcgtgcgcgcttcctgccgtttgagactagaacctggcaaagagtacctcattatgggtctggacggcgctacatacgatttggaaggtcatcctcagtatctgctagattcaaacagttggatcgaggagatgccatctgaacgattgtgtcgaagtacacggcaacgggcagcatgtgctcaactcaacgatttcttgcaagagtatgggacgcaggggtgtcaggtatag

SEQ ID NO: 85089 - DNA, 813 bp, Artificial Sequence
  derived and/or modified sequence
atgtgcccagaggacagcctgcaggtgcccctgaaggatgccaagagctgtggcctgcaccagctgctgcggggccctgaggtgcagctggtggcccacagcccctggctgaaggacagcctgagcaggaccaccaacatccagggcatcaacctgctcttcagcagcagaagaggccacctgttcctgcagacagaccagcccatctacaaccctggccagagggtgcgctacagagtgtttgccctggaccagaagatgaggcccagcacagacaccatcaccgtgatggtggagaacagccacggcctgcgggtgaggaagaaggaggtgtacatgcccagcagcatcttccaggatgactttgtgatcccagacatcagcgagcccggcacctggaagatcagcgcccgcttcagtgatggcctggagagcaacagcagcacccagtttgaggtgaagaagtatgtgctgcccaactttgaggtgaagatcaccccaggcaagccctacatcctgactgtgcccggccacctggatgagatgcagctggacatccaggcccgctacatctacggcaagcctgtgcagggcgtggcctacgtgcgcttcggcctgctggatgaagatggcaagaagaccttcttccggggcctggagagccagaccaagctggtgaatggccagagccacatcagcctgagcaaggccgagttccaggatgccctggagaagctgaacatgggcatcacagacctgcagggcctgcggctgtatgtggccgccgccatcatcgagtacccaggcggctag

SEQ ID NO: 85090 - DNA, 1953 bp, Artificial Sequence
  derived and/or modified sequence
atgggcagccagtgccggggctggcacatgtgtgccctgggcagccagcagcaggctgatggcagcttccaggacctgagccctgtgatccaccgctccatgcagggcggcctggtgggcaatgatgagaccgtggccctgacagcctttgtgaccatcgccctgcaccacggcctggccgtgttccaggatgagggcgctgagcccctgaagcagagggtggaggccagcatcagcaaggccagcagcttcctgggggagaaggccagcgctggcctgctgggcgcccacgccgccgccatcacagcctatgccctgaccctgaccaaggccccagctgacctgcggggcgtggcccacaacaacctgatggccatggcccaggagaccggggacaacctgtactggggctctgtgacaggcagccagagcaatgctgtgagccccaccccagcccccaggaaccccagcgaccccatgccccaggccccagccctgtggattgagaccacagcctatgccctgctgcacctgctgctgcacgagggcaaggccgagatggctgaccaggccgccgcctggctgacccggcagggcagcttccagggcggcttccgcagcacccaggacacagtgattgccctggatgccctgagcgcctactggatcgccagccacaccacagaggagcggggcctgaatgtgaccctgagcagcactggaagaaatggcttcaagagccacgccctgcagctgaacaaccggcagatccggggcctggaggaggagctgcagttcagcctgggcagcaagatcaacgtgaaggtgggcggcaacagcaagggcaccctgaaggtgctgcggacctacaacgtgctggacatgaagaacaccacctgccaggacctgcagatcgaggtgacagtgaagggccacgtggagtacaccatggaggccaatgaagattatgaggactatgaatatgatgagctgcctgccaaggatgatcctgatgcccccctgcagcctgtgacccccctgcagctgtttgagggcagaagaaacagaagaagaagagaggcccccaaggtggtggaggagcaggagagccgggtgcactacacagtgtgcatctggagaaatggcaaggtgggcctgagcggcatggccatcgcagatgtgaccctgctgagcggcttccacgccctgcgggctgacctggagaagctgaccagcctgagtgacagatatgtgagccactttgaaacagagggcccccacgtgctgctgtactttgacagcgtgcccaccagccgggagtgtgtgggctttgaggccgtgcaggaggtgcctgtgggcctggtgcagcctgccagcgccaccctgtatgactactacaaccctgagcggcgctgcagcgtcttctacggggcccccagcaagagccggctgctggccaccctgtgcagcgctgaggtgtgccagtgtgccgagggcaagtgcccccggcagaggcgggccctggagcggggcctgcaggatgaagatggctacaggatgaagtttgcctgctactacccccgggtggagtatggcttccaggtgaaggtgctgcgggaggacagccgggccgccttccggctgtttgagaccaagatcacccaggtgctgcacttcaccaaggatgtgaaggccgccgccaaccagatgaggaacttcctggtgcgggccagctgccgcctgcggctggagcccgggaaggagtacctgatcatgggcctggatggagccacctatgacctggagggccacccccagtacctgctggacagcaacagctggattgaggagatgcccagcgagcggctgtgccgcagcacccggcagagagctgcctgtgcccagctgaatgacttcctgcaggagtatggcacccagggctgccaggtgtag

SEQ ID NO: 85091 - DNA, 1536 bp, Artificial Sequence
  derived and/or modified sequence
atggccaagggcctgagcgtgcagaacgacaagcaccccggctaccagcccgcactgctgctctctcctggagcccccctgtttgccgatgggcctgcttacgccttgcttcatctgctgcttcacgaaggcaaggcagaaatggccgatcaagctgccgcctggctcactaggcagggtagtttccaaggggggtttagatccacccaggatactgttattgctctcgacgccctgagcgcatattggattgcatcacacacaaccgaggagagaggactaaacgtgaccttaagcagtaccgggcgcaatggattcaaaagccatgcgctgcagctgaataaccggcagataagggggttggaggaagaactccagttctcgctgggatctaagatcaacgtgaaggtgggcgggaactccaaaggcacactcaaggtcctgcgtacttataatgtcctggatatgaagaacacgacctgtcaggacctgcagattgaggtgacagtgaaggggcatgtggagtataccatggaggccaatgaggactatgaagactacgagtacgatgagctgccagccaaagacgacccagacgccccactccagcctgtcacacccttacagctgtttgagggccgtcgtaacagaagaagaagggaagcacccaaagtggtagaggaacaggagtctcgcgtgcattacacggtctgtatttggagaaatgggaaagtgggactatctgggatggccatcgcggatgtgacgttgttaagcgggtttcacgccctccgcgccgacttagaaaagcttacttcattgagtgacagatacgtgagccacttcgaaaccgagggcccccatgtactcttatacttcgactctgtgccgacgagcagggaatgcgttggcttcgaagcggttcaagaggtgcctgtgggtctggtccaaccagcttccgccactctttatgactactacaaccccgagcggcgttgttccgtcttctatggcgccccatccaaaagccgtctgcttgctaccctttgtagcgccgaggtttgtcagtgcgctgaagggaagtgccctcggcagagacgggcattagagaggggactccaggacgaggacggatacaggatgaaatttgcctgttactatccacgtgtagagtatggtttccaggtgaaagttctgagagaggatagcagagccgcatttcgcttattcgagaccaagatcacacaagtactccattttactaaagacgtgaaggctgcggccaatcagatgaggaacttcctggtgcgcgctagctgcaggctgcgcttagagcctggtaaggaataccttattatgggtctggatggggctacttacgatttggaggggcatccccaatacctgctcgattccaatagttggatcgaggagatgccttcagagcgtctttgccgctccacccgccagagagctgcttgtgctcagttgaacgacttcttgcaagagtacggaacccagggctgccaggtgtag

SEQ ID NO: 85092 - DNA, 1536 bp, Artificial Sequence
  derived and/or modified sequence
atggccaagggcctgagcgtgcagaacgacaagcaccccggctaccagcctgcgctattgctgtcaccaggagcccccctttttgccgatggcccggcctatgccttgctgcacttgctgctgcatgagggcaaggcagaaatggccgaccaggcagccgcctggctgaccaggcagggtagctttcaggggggattcaggtccacccaggacaccgtgatcgcactggacgcgctgagtgcttactggattgcctcacataccacagaggaaagaggcctgaatgtgaccttgagttccaccggacgaaatgggttcaagtctcacgcgctgcaattaaataataggcaaatcaggggcttggaggaggaactgcaattttcccttggatctaagattaatgtaaaggtgggtggcaattccaagggcacactgaaagtcttgaggacttacaatgttctcgacatgaagaataccacttgccaggatttacagatcgaggtcactgtaaaaggccacgtcgaatatacaatggaggccaatgaagattatgaggactatgagtacgatgagctacccgcaaaggatgacccagatgccccattacaacctgtcaccccactccagctgtttgaggggcgccgtaatcgcaggagaagagaggcacctaaagtcgtggaggaacaggagtctcgcgtgcattacacggtctgcatctggcgaaacgggaaagtgggcctatccggtatggccatcgccgacgtaacccttctgtccggcttccatgccctcagagccgatctggaaaagctgacctccctaagcgatcggtacgttagtcacttcgagactgaaggcccacacgtcctcttgtattttgacagcgttccaacatcacgagaatgcgtggggtttgaggctgtccaggaagtccccgtgggtctcgttcaacccgccagtgccaccctctacgattactataatcccgagaggagatgttcagttttttatggcgcaccctcgaagagtcgcctgctggcaaccctctgcagcgccgaggtgtgtcagtgtgccgaaggcaagtgcccaaggcaacggcgtgcattggagcgcggcttgcaggacgaagatggctacaggatgaagttcgcttgttattatcctcgtgtggagtacgggtttcaggtgaaagtgttaagggaggactccagagccgctttccgtctctttgagacaaagatcacccaggtattgcactttactaaggacgtgaaggctgctgctaatcaaatgcggaattttcttgttagggcctcctgccgacttcgcctggagccaggcaaagaatacttgattatggggctggacggggcaacatacgatcttgagggacaccctcagtaccttttagacagcaacagttggatcgaggagatgcccagtgagaggctgtgcagaagcacccgccagcgcgccgcatgtgctcagttaaatgatttcctccaggagtatgggacacagggctgtcaggtgtag

SEQ ID NO: 85093 - DNA, 813 bp, Artificial Sequence
  derived and/or modified sequence
atgtgccccgaggacagcctgcaggtgcccctgaaggacgccaagagttgcggactccatcagctgctgcgaggccctgaagtccagcttgtcgcccatagcccttggctcaaggattctttgtcacgcacaactaacatccagggcatcaatcttttgttcagtagccggcgggggcacctattcctgcagaccgaccagccgatctataatccaggccagcgcgtgcggtaccgcgtttttgcactggaccagaagatgcgcccctcaaccgacacaatcaccgtcatggtcgagaattcccacgggctcagggtcaggaaaaaagaagtttacatgccaagcagcatctttcaggacgacttcgtcatcccggatatctccgagccgggcacatggaagatctctgcgcggttctctgacgggctggagtcgaactcctcaacacaattcgaagtgaagaagtatgtgctgccgaacttcgaagtgaagatcacccccggtaaaccgtacattctcaccgtcccaggccatttggacgagatgcagctagacatccaggcgaggtatatctatgggaaaccagttcagggagtggcttatgtcagattcggcttgctagacgaggacggtaagaagaccttctttcggggactcgaaagtcagacaaaactcgttaatggccagagccatatctcgctgtccaaggcagagttccaggacgccttggaaaagctcaacatggggattactgacctgcagggactgcgactttatgtggctgccgcaatcatcgagtaccccggaggctag

SEQ ID NO: 85094 - DNA, 1536 bp, Artificial Sequence
  derived and/or modified sequence
atggccaagggcctgagcgtgcagaacgacaagcaccccggctaccagcccgcgctcctgctgagccccggggctcctctgttcgcagacggccccgcatacgcgcttttgcatctgttacttcacgaaggtaaggccgagatggccgaccaggctgcagcatggctcacgaggcaagggtctttccagggaggattccgatccacgcaggacaccgtgatcgctctcgacgccctctcagcctactggattgcctctcatacaactgaagaacgcgggctgaacgtgacactaagtagtaccggcaggaacggttttaaatcacacgctctgcagcttaacaaccgccagatccgcgggttggaggaggagcttcagtttagcctggggtccaaaattaatgtgaaagtgggcgggaactccaaagggactctgaaggtgctcagaacttataatgtccttgacatgaaaaacaccacctgtcaggatttacagatcgaggtgaccgtaaagggtcacgtggaatacacaatggaggcgaacgaagattatgaggactacgaatatgacgagctgccagccaaggatgatccggacgcacccctccagccagtgactcccttacagctctttgagggtcgccgcaaccggcgtcgcagagaagcacccaaagtggtggaggaacaggaaagcagggttcattacactgtttgcatctggagaaacggtaaggtcggactgtcaggcatggcgatcgctgatgtaacactactgtctggcttccacgccctcagggccgatcttgaaaaactgacatctctatcggatcggtatgtgtctcattttgaaaccgaagggccgcacgtgctgctgtactttgatagcgtgccaacttcccgcgaatgcgttggattcgaggcagtccaggaagtacctgtggggctcgtgcaacctgcgagtgctaccctgtatgattactataacccggagaggagatgtagtgttttttacggcgcccccagtaagagtagacttctcgcgactctgtgtagcgctgaagtgtgtcagtgcgctgaagggaaatgcccccgacagaggagggccctggaaagggggctacaggacgaggatggatacaggatgaagtttgcgtgctactatcccagagttgagtacggatttcaggtcaaggtcctccgggaagattcccgggcagccttccgactgtttgagactaagataacccaagtgttgcattttaccaaggatgtcaaagccgcggccaatcaaatgcgaaattttctggtgcgcgccagctgcaggttgaggctggaacccggaaaagaatacctcatcatgggacttgacggtgccacatacgacctggagggccatccccaatacctgctggactcaaattcgtggattgaggagatgccgagcgagagactttgtcgctcaacaaggcaaagagccgcttgcgctcagctgaatgacttcctacaggagtacgggactcagggctgccaggtttag

SEQ ID NO: 85095 - DNA, 1953 bp, Artificial Sequence
  derived and/or modified sequence
atgggcagccagtgccggggctggcacatgtgcgccctgggcagccagcagcaggcggacggatcttttcaagatctatcacccgttatccatagaagcatgcaaggcggacttgttggaaacgacgagacagtggccctaacggcctttgtgacgatcgccttgcatcacggactggcggtgttccaagatgagggcgcagaacctctgaagcagcgggtggaggccagcatctctaaagcgtcctctttcctcggcgaaaaagcgagcgcaggacttctgggcgcacacgccgcagccatcaccgcatatgccctgacgctcacgaaagcacccgctgacctgcggggggtcgcccataataacctcatggcgatggcccaggagactggggataacctgtactggggctctgtgacaggatctcagagtaatgctgtcagccctacaccggcaccaaggaatccctctgatccgatgccccaggctcccgcactgtggatcgagaccactgcctatgctctgttacacctgctgcttcatgaaggcaaggcagagatggcagatcaggccgccgcctggcttacccggcaggggtcatttcagggcggattcagatcgacccaggataccgtgatcgcactggatgccctgagcgcttattggatagcctcacatacaaccgaagaacgaggcctgaacgtaactctgtcttcaaccggtcgcaatggatttaaatcccatgcgcttcagcttaacaaccggcagattcggggactcgaggaggagcttcagttctcacttggctccaagattaatgtgaaagtgggcggtaactccaaaggaaccttgaaggtgcttagaacatacaatgtgctggatatgaagaacactacatgtcaggatctgcagattgaggttactgtgaagggccacgttgaatacacaatggaagccaacgaggactacgaagactatgagtacgatgagcttccagccaaggacgatccagatgcgcccctccagccagtaacaccgctgcaattgttcgaaggcagaaggaaccgcagaagacgtgaagcgccaaaggtcgtggaggaacaggagagccgagtccattatacggtctgcatatggagaaacggtaaggtgggcctgagtggcatggcaattgctgacgtcactctgctctccgggtttcatgcattgagggccgatcttgaaaagcttacatctctgagtgaccgctatgtgtcccactttgaaaccgaagggcctcatgttctgctttattttgactctgtgcccacttctcgcgagtgtgtgggatttgaagcagtgcaggaagtgccggtaggactcgttcaaccagcttccgctaccctgtacgactactacaatcccgagagaagatgcagtgttttttacggagcccccagtaaatcacgcctgctagccactctttgtagtgccgaagtttgccaatgcgcggaggggaagtgtccccgccagaggcgagccctggagaggggacttcaggacgaggacggttaccgcatgaagtttgcatgctactatccaagagtcgaatatggattccaggtgaaagtattgagagaggactctcgggctgcgtttcggctgttcgaaacaaagatcacccaagttcttcattttaccaaggacgtcaaggccgccgccaaccaaatgagaaactttttagtaagagcaagttgccgactcagacttgaacccgggaaagagtacctgatcatggggctcgacggcgcaacttatgacctcgaaggccatccccagtacctgttagatagcaacagctggatcgaggaaatgccttctgagcgcctatgcagatctactaggcagcgagcagcatgcgcccagctgaatgatttccttcaagaatacggaacccagggatgccaggtgtag

SEQ ID NO: 85096 - DNA, 1536 bp, Artificial Sequence
  derived and/or modified sequence
atggccaagggcctgagcgttcagaatgacaaacatccaggttaccagcctgctctgctgctttccccaggagctcctttgttcgctgacggtccagcctatgctcttctccatcttctcttgcatgaaggaaaggccgagatggctgatcaggcagcggcttggttgacacgacagggcagcttccaggggggttttcggtcgacacaggacacagtaatcgcccttgacgctttgagcgcatattggatagcttctcacacgactgaggaacgtggactcaacgtaacactctcctcgacgggcagaaatgggttcaaatctcacgcgctgcagctgaataaccgacagattaggggtttagaggaggaactgcagttttcgcttggctcgaaaataaacgtgaaagtgggtgggaatagcaaggggacattgaaagtcctccgtacttacaacgtcctggacatgaaaaacacaacctgccaggacttacagatcgaggtgaccgtaaaagggcacgtcgagtataccatggaagccaacgaggattacgaagactatgaatacgatgagctgcccgctaaagacgacccggatgctcctctgcaacccgtgacacctctccagctttttgaaggcaggcggaatagaagaagaagagaagctcctaaggtggttgaagaacaggagagtcgggttcattacacggtgtgcatatggcgtaacgggaaggtgggcctttccgggatggctatcgcagatgtaactctcctgtctggctttcatgcgctgagggctgatctcgagaaactcaccagccttagtgatcgatacgtgtcgcatttcgaaactgaaggcccacatgttcttctctacttcgactccgtacctacaagtcgcgagtgtgtgggcttcgaggctgtgcaggaggttcctgtcgggctggttcaacctgccagtgccaccttgtatgattactataatccggagagacgttgttccgtgttctacggagcgcctagcaaaagtcgcttactggctacgctctgcagcgcagaagtgtgtcagtgtgccgaaggcaagtgtcccagacagagaagagccctggagcgtggcctgcaagatgaagatggctatcgaatgaagtttgcctgttattatcctcgagtcgaatacggcttccaggtcaaagtgctccgtgaagacagtagggccgcattccggttgtttgaaactaagatcacacaggtgctgcacttcacgaaagatgtcaaagcagccgctaatcagatgcgtaatttcctggttagggctagctgtcggctgagactggaaccaggaaaggagtatcttatcatggggcttgatggcgcaacctatgatcttgaagggcacccgcagtatctgctggactccaattcctggatagaggagatgccaagcgagaggctgtgcagatcaacaaggcagcgggcagcatgcgcacagctgaatgacttccttcaggagtacgggacacagggttgtcaggtgtag

SEQ ID NO: 85097 - DNA, 1536 bp, Artificial Sequence
  derived and/or modified sequence
atggcaaaaggactgagtgtgcagaatgataagcacccaggctatcagcccgctctcctgcttagccctggagcccctctctttgccgacggtcctgcttatgctctgttgcacctgctgttgcatgagggcaaggccgaaatggcagatcaggcggctgcttggttgacccggcaaggctcatttcagggcggatttcggtcaactcaggatacagtgattgctttagacgcgttgtcggcatactggattgcatcgcatacaaccgaggaaagagggctcaatgtgaccctatcctcaacaggtagaaacggtttcaaatctcacgcactccaacttaataaccggcagatccgtgggcttgaagaggaattgcagttctcactgggatcaaagatcaacgtcaaagtcggagggaatagcaaaggtaccctgaaggttctgaggacttataacgtcctggacatgaaaaacactacctgccaggaccttcagatagaagtaaccgtcaagggacacgtggagtacaccatggaagccaacgaagactatgaggattatgaatatgatgagctgccggcaaaggatgatccggacgccccactacagcccgtgactccgctgcagctgtttgagggtagacgaaatcgacgccgacgcgaagcccctaaagtagtggaagagcaagaatctagggtgcactatactgtctgcatttggaggaatggtaaagtgggcctgagtggcatggccatcgctgatgtgaccctgctttctggatttcatgccctccgggctgatttggaaaaactcacgtctctatccgacagatatgtgtctcatttcgagacagagggacctcacgtgctcctttatttcgacagcgtgcccacttcacgcgagtgtgttgggtttgaggctgtacaggaggtgcctgtaggcctggtgcagcccgcaagtgctactctttatgactattataaccctgaacgtagatgcagcgtgttttacggcgctccaagtaagagccgtcttctggccacactgtgcagcgccgaggtctgtcagtgtgccgaaggtaagtgccctcgccagcgcagggcccttgaaaggggattacaagatgaagacgggtaccggatgaagtttgcatgctactatcccagagtggaatacggctttcaggtcaaggtgctgagggaagactccagagccgctttccggctgttcgagacgaaaatcacacaggttcttcatttcactaaggacgttaaggccgctgcaaatcagatgagaaatttcctggttagagcctcatgccgcctgcggcttgagcctggtaaggaatatctaattatgggactggatggagccacctacgacctggaaggccatccccaatacctcctagattccaacagttggatcgaagaaatgccgagcgagagactgtgtcgttcgactcggcaaagggctgcctgcgctcaactcaatgattttcttcaagagtatgggacccaggggtgccaggtgtag

SEQ ID NO: 85098 - DNA, 813 bp, Artificial Sequence
  derived and/or modified sequence
atgtgccccgaagacagccttcaagtgcctttgaaagacgcaaaatcctgcgggctgcatcagttgctgcgcggtccagaagttcagctcgtagctcatagcccctggctgaaggacagcctctcccgtacgactaacatccaaggcatcaatctcttgttttcttcaaggcgaggtcatcttttcctgcagaccgaccagcctatctataaccctgggcaacgggtgcggtatcgagtgttcgcactcgatcaaaaaatgcggccatctacagacacgatcactgtcatggtggagaactcccacggtttgcgggtcaggaaaaaggaggtgtacatgccatcatccattttccaggacgactttgtgattccagatatttcggagccagggacctggaagatcagtgccagattctcggacggcttagaatcaaattcctctacccagttcgaggttaagaaatacgtgctgccaaactttgaagtcaaaatcacgcccggtaaaccctacatacttacagttcccggacaccttgatgaaatgcagttggacatccaggccaggtatatttatgggaaaccagtgcagggggtggcatatgtgcgcttcgggcttctggacgaggacgggaaaaagaccttttttagaggtctggaatcccaaaccaagctcgtgaacggccaaagtcacatatcattatctaaggccgagtttcaggacgccctggaaaaactaaacatgggcattacagacctacagggccttcgtttatacgtggccgcagccatcatagagtaccctggcggatag

SEQ ID NO: 85099 - DNA, 1536 bp, Artificial Sequence
  derived and/or modified sequence
atggccaagggtctgtccgtgcagaacgataagcatccgggataccagccagctctgctgcttagccccggtgcaccacttttcgccgacgggccagcctacgctctgttgcacctgcttctgcacgaaggaaaggctgaaatggccgatcaagcagcagcctggctgacccgccagggaagtttccaaggcggatttcgatcgacccaggataccgtcatcgccctggacgctctgtcagcttattggatcgctagccacacgactgaggagaggggactgaatgtgacgttgtcgtctaccggccgaaatggattcaagagccacgccctgcagctgaataacagacaaatacgaggcttggaggaggagctgcagttttcgctcggaagcaaaatcaatgttaaggttggcggaaacagtaagggaacactgaaagttctaagaacttataatgtgctcgacatgaaaaacacgacatgccaggacctccaaatagaagtgacagtgaagggacatgtggaatacaccatggaagccaatgaggactacgaggactatgaatatgatgagttgcccgctaaagacgacccagacgccccactgcaacctgtgacaccattgcagctcttcgagggccgacggaatagacggagaagagaggcacctaaagttgttgaagagcaggaatctcgcgtgcactatactgtatgtatatggagaaacggtaaggtgggattaagtggcatggcaattgctgatgtgacactgttgtctggcttccatgccctgcgagcggacctggaaaaactcacgtccctttctgacagatacgtaagccactttgagaccgaaggaccccacgtgctgctttattttgattcggtccccacgagcagagagtgcgtgggcttcgaagcagtgcaggaggttcccgtcggtctggtccagccggcatcagccaccctctatgactattataaccccgaaagacgctgtagcgtgttctatggcgcaccatccaagtccagactacttgctactctgtgcagcgccgaagtatgccagtgtgccgaaggcaagtgccctcgccagaggagggccctggaacgaggcttacaggacgaagatggttataggatgaaatttgcctgctactacccacgcgtagagtatggttttcaagtgaaagtgttgagggaggactcacgcgctgccttccgcctgttcgaaacaaagataacacaagtcctccatttcactaaagacgttaaggccgctgctaaccagatgcggaactttctcgtgcgcgcaagttgcaggctccggcttgagcctggcaaggaatacttaattatgggcctcgacggagccacgtacgacctggaaggacatcctcagtacctccttgattcaaatagttggatcgaagagatgccaagtgagagattgtgtcgcagcactcgccaacgagctgcctgtgctcagctgaatgatttcctgcaggagtacggcactcagggatgccaggtctag

SEQ ID NO: 85100 - DNA, 1953 bp, Artificial Sequence
  derived and/or modified sequence
atgggtagtcagtgtcgcggttggcatatgtgcgccctcggctcgcagcagcaagcagatggctcctttcaggacctatctcccgttatccatcggtctatgcagggtggtctggtggggaacgacgagactgtggccctgaccgcattcgtaaccatcgctctccaccacggtctcgcagtgttccaggacgagggagctgaacctcttaaacagagggtggaagcatcaatatccaaagcctctagcttcttaggagagaaagcatcagccggactgctgggagctcacgccgcagcgataaccgcatacgcgctcacacttaccaaggctcccgcagaccttcgcggagttgctcacaataacttaatggcaatggcacaagagacgggcgataatctctactggggaagcgtaacaggttcccagtctaacgcggtttcccctactccggcacctcggaatccatcagatccgatgccccaggccccagcactctggattgagacaacagcctatgctctcctgcatctgctgttgcatgaaggaaaagctgagatggccgatcaagccgcagcctggctcacaaggcaaggcagtttccagggtggctttcgctctacccaagatactgtcatcgccctcgatgccctgagcgcctactggatcgccagccatactaccgaagagcgcggtctcaatgttacactcagttctacaggacgcaacgggttcaagagccatgccctccagctgaataataggcaaatccgtgggctcgaagaggaactccagttctccctcggctctaaaatcaatgtgaaggtgggcggtaattcgaaaggcaccctaaaagtcttgcggacttacaacgtccttgacatgaaaaataccacttgccaggacctccaaatagaagtgaccgtgaaaggacacgtagaatacaccatggaggctaatgaagattacgaggattacgagtacgacgagctacccgctaaggacgatcccgatgcccctctgcagcccgttaccccgttgcagctgttcgagggacggagaaatcgcagacggagggaggcgccaaaggtcgtggaagaacaagaatctcgggtgcactacaccgtgtgcatctggaggaacggtaaggtcgggttgtcggggatggccattgccgacgtgaccttactgagcgggttccatgctcttcgggcagatttggagaagctgacctccctcagcgacagatacgtgagccacttcgagacggagggtccgcacgtcctgttgtatttcgactcagttcctactagtagagagtgtgtgggatttgaggccgtgcaggaggtgccggtgggcctggtgcagcccgctagcgctacactgtacgattattataacccagagcggcgatgcagtgtcttttatggagccccatcaaagtcacgccttctcgccacgctgtgcagcgccgaagtttgtcaatgtgccgagggcaaatgccccaggcagcggagggcccttgagcggggactgcaggacgaagatggataccggatgaagtttgcgtgctactatcctagggtggagtacggctttcaggtgaaagttctgagggaggattctagggcagcatttcgcctctttgagacaaagatcacccaggtgttgcatttcaccaaggacgtgaaagccgctgctaatcagatgcggaactttctagtgcgcgcttcatgtcgattacggttggagccaggaaaagagtatctcattatgggcctggacggagcaacgtatgacctcgaaggtcatccacagtacttactggatagcaatagctggattgaggaaatgccatccgaacgcctgtgccgctctactcgtcaaagggctgcgtgcgcccagctgaatgacttcttacaggagtacgggacccagggttgccaggtgtag

SEQ ID NO: 85101 - DNA, 2054 bp, Artificial Sequence
  derived and/or modified sequence
agaaggtagcagacagacagacggatctaacctctcttggatcctccagccatgaggctgctctgggggctgatctgggcatccagcttcttcaccttatctctgcagaagcccaggttgctcttgttctctccttctgtggttcatctgggggtccccctatcggtgggggtgcagctccaggatgtgccccgaggacaggtagtgaaaggatcagtgttcctgagaaacccatctcgtaataatgtcccctgctccccaaaggtggacttcacccttagctcagaaagagacttcgcactcctcagtctccaggtgcccttgaaagatgcgaagagctgtggcctccatcaactcctcagaggccctgaggtccagctggtggcccattcgccatggctaaaggactctctgtccagaacgacaaacatccagggtatcaacctgctcttctcctctcgccgggggcacctctttttgcagacggaccagcctacgccctgctgcacctcctgcttcacgagggcaaagcagagatggcagaccaggctgcggcctggctcacccgtcagggcagcttccaagggggattccgcagtacccaagacacggtgattgccctggatgccctgtctgcctactggattgcctcccacaccactgaggagaggggtctcaatgtgactctcagctccacaggccggaatgggttcaagtcccacgcgctgcagctgaacaaccgccagattcgcggcctggaggaggagctgcagttttccttgggcagcaagatcaatgtgaaggtgggaggaaacagcaaaggaaccctgaaggtccttcgtacctacaatgtcctggacatgaagaacacgacctgccaggacctacagatagaagtgacagtcaaaggccacgtcgagtacacgatggaagcaaacgaggactatgaggactatgagtacgatgagcttccagccaaggatgacccagatgcccctctgcagcccgtgacacccctgcagctgtttgagggtcggaggaaccgccgcaggagggaggcgcccaaggtggtggaggagcaggagtccagggtgcactacaccgtgtgcatctggcggaacggcaaggtggggctgtctggcatggccatcgcggacgtcaccctcctgagtggattccacgccctgcgtgctgacctggagaagctgacctccctctctgaccgttacgtgagtcactttgagaccgaggggccccacgtcctgctgtattttgactcggtccccacctcccgggagtgcgtgggctttgaggctgtgcaggaagtgccggtggggctggtgcagccggccagcgcaaccctgtacgactactacaaccccgagcgcagatgttctgtgttttacggggcaccaagtaagagcagactcttggccaccttgtgttctgctgaagtctgccagtgtgctgaggggaagtgccctcgccagcgtcgcgccctggagcggggtctgcaggacgaggatggctacaggatgaagtttgcctgctactacccccgtgtggagtacggcttccaggttaaggttctccgagaagacagcagagctgctttccgcctctttgagaccaagatcacccaagtcctgcacttcaccaaggatgtcaaggccgctgctaatcagatgcgcaacttcctggttcgagcctcctgccgccttcgcttggaacctgggaaagaatatttgatcatgggtctggatggggccacctatgacctcgagggacacccccagtacctgctggactcgaatagctggatcgaggagatgccctctgaacgcctgtgccggagcacccgccagcgggcagcctgtgcccagctcaacgacttcctccaggagtatggcactcaggggtgccaggtgtgagggctgccctcccacctccgctgggaggaacctgaacctgggaaccatgaagctggaagcactgctgtgtccgctttcatgaacacagcctgggaccagggcatattaaaggcttttggcagc

SEQ ID NO: 85102 - DNA, 979 bp, Artificial Sequence
  derived and/or modified sequence
agacggatctaacctctcttggatcctccagccatgaggctgctctgggggctgatctgggcatccagcttcttcaccttatctctgcagaagcccaggttgctcttgttctctccttctgtggttcatctgggggtccccctatcggtgggggtgcagctccaggatgtgccccgaggacagtctccaggtgcccttgaaagatgcgaagagctgtggcctccatcaactcctcagaggccctgaggtccagctggtggcccattcgccatggctaaaggactctctgtccagaacgacaaacatccagggtatcaacctgctcttctcctctcgccgggggcacctctttttgcagacggaccagcccatttacaaccctggccagcgggttcggtaccgggtctttgctctggatcagaagatgcgcccgagcactgacaccatcacagtcatggtggagaactctcacggcctccgcgtgcggaagaaggaggtgtacatgccctcgtccatcttccaggatgactttgtgatcccagacatctcagagccagggacctggaagatctcagcccgattctcagatggcctggaatccaacagcagcacccagtttgaggtgaagaaatatgtccttcccaactttgaggtgaagatcacccctggaaagccctacatcctgacggtgccaggccatcttgatgaaatgcagttagacatccaggccaggtacatctatgggaagccagtgcagggggtggcatatgtgcgctttgggctcctagatgaggatggtaagaagactttctttcgggggctggagagtcagaccaagctggtgaatggacagagccacatttccctctcaaaggcagagttccaggacgccctggagaagctgaatatgggcattactgacctccaggggctgcgcctctacgttgctgcagccatcattgagtatccaggtgggtga

SEQ ID NO: 85103 - DNA, 2076 bp, Artificial Sequence
  derived and/or modified sequence
atgggaagccagtgcagggggtggcatatgtgcgctttgggctcccagcagcaggctgacggctcgttccaggacctctctccagtgatacataggagcatgcaggggggtttggtgggcaatgatgagactgtggcactcacagcctttgtgaccatcgcccttcatcatgggctggccgtcttccaggatgagggtgcagagccattgaagcagagagtggaagcctccatctcaaaggcaagctcatttttgggggagaaagcaagtgctgggctcctgggtgcccacgcagctgccatcacggcctatgccctgacactgaccaaggcccctgcggacctgcggggtgttgcccacaacaacctcatggcaatggcccaggagactggagataacctgtactggggctcagtcactggttctcagagcaatgccgtgtcgcccaccccggctcctcgcaacccatccgaccccatgccccaggccccagccctgtggattgaaaccacagcctacgccctgctgcacctcctgcttcacgagggcaaagcagagatggcagaccaggctgcggcctggctcacccgtcagggcagcttccaagggggattccgcagtacccaagacacggtgattgccctggatgccctgtctgcctactggattgcctcccacaccactgaggagaggggtctcaatgtgactctcagctccacaggccggaatgggttcaagtcccacgcgctgcagctgaacaaccgccagattcgcggcctggaggaggagctgcagttttccttgggcagcaagatcaatgtgaaggtgggaggaaacagcaaaggaaccctgaaggtccttcgtacctacaatgtcctggacatgaagaacacgacctgccaggacctacagatagaagtgacagtcaaaggccacgtcgagtacacgatggaagcaaacgaggactatgaggactatgagtacgatgagcttccagccaaggatgacccagatgcccctctgcagcccgtgacacccctgcagctgtttgagggtcggaggaaccgccgcaggagggaggcgcccaaggtggtggaggagcaggagtccagggtgcactacaccgtgtgcatctggcggaacggcaaggtggggctgtctggcatggccatcgcggacgtcaccctcctgagtggattccacgccctgcgtgctgacctggagaagctgacctccctctctgaccgttacgtgagtcactttgagaccgaggggccccacgtcctgctgtattttgactcggtccccacctcccgggagtgcgtgggctttgaggctgtgcaggaagtgccggtggggctggtgcagccggccagcgcaaccctgtacgactactacaaccccgagcgcagatgttctgtgttttacggggcaccaagtaagagcagactcttggccaccttgtgttctgctgaagtctgccagtgtgctgaggggaagtgccctcgccagcgtcgcgccctggagcggggtctgcaggacgaggatggctacaggatgaagtttgcctgctactacccccgtgtggagtacggcttccaggttaaggttctccgagaagacagcagagctgctttccgcctctttgagaccaagatcacccaagtcctgcacttcaccaaggatgtcaaggccgctgctaatcagatgcgcaacttcctggttcgagcctcctgccgccttcgcttggaacctgggaaagaatatttgatcatgggtctggatggggccacctatgacctcgagggacacccccagtacctgctggactcgaatagctggatcgaggagatgccctctgaacgcctgtgccggagcacccgccagcgggcagcctgtgcccagctcaacgacttcctccaggagtatggcactcaggggtgccaggtgtgagggctgccctcccacctccgctgggaggaacctgaacctgggaaccatgaagctggaagcactgctgtgtccgctttcatgaacacagcctgggaccagggcatattaaaggcttttggcagc

SEQ ID NO: 85104 - DNA, 813 bp, Artificial Sequence
  derived and/or modified sequence
atgtgccccgaggacagcctgcaggtgcccctgaaggacgccaagagctgcggcctgcaccagctgctgagaggccccgaggtgcagctggtggcccacagcccctggctgaaggacagcctgagcagaaccaccaacatccagggcatcaacctgctgttcagcagcagaagaggccacctgttcctgcagaccgaccagcccatctacaaccccggccagagagtgagatacagagtgttcgccctggaccagaagatgagacccagcaccgacaccatcaccgtgatggtggagaacagccacggcctgagagtgagaaagaaggaggtgtacatgcccagcagcatcttccaggacgacttcgtgatccccgacatcagcgagcccggcacctggaagatcagcgccagattcagcgacggcctggagagcaacagcagcacccagttcgaggtgaagaagtacgtgctgcccaacttcgaggtgaagatcacccccggcaagccctacatcctgaccgtgcccggccacctggacgagatgcagctggacatccaggccagatacatctacggcaagcccgtgcagggcgtggcctacgtgagattcggcctgctggacgaggacggcaagaagaccttcttcagaggcctggagagccagaccaagctggtgaacggccagagccacatcagcctgagcaaggccgagttccaggacgccctggagaagctgaacatgggcatcaccgacctgcagggcctgagactgtacgtggccgccgccatcatcgagtaccccggcggctag

SEQ ID NO: 85105 - DNA, 1953 bp, Artificial Sequence
  derived and/or modified sequence
atgggcagccagtgcagaggctggcacatgtgcgccctgggcagccagcagcaggccgacggcagcttccaggacctgagccccgtgatccacagaagcatgcagggcggcctggtgggcaacgacgagaccgtggccctgaccgccttcgtgaccatcgccctgcaccacggcctggccgtgttccaggacgagggcgccgagcccctgaagcagagagtggaggccagcatcagcaaggccagcagcttcctgggcgagaaggccagcgccggcctgctgggcgcccacgccgccgccatcaccgcctacgccctgaccctgaccaaggcccccgccgacctgagaggcgtggcccacaacaacctgatggccatggcccaggagaccggcgacaacctgtactggggcagcgtgaccggcagccagagcaacgccgtgagccccacccccgcccccagaaaccccagcgaccccatgccccaggcccccgccctgtggatcgagaccaccgcctacgccctgctgcacctgctgctgcacgagggcaaggccgagatggccgaccaggccgccgcctggctgaccagacagggcagcttccagggcggcttcagaagcacccaggacaccgtgatcgccctggacgccctgagcgcctactggatcgccagccacaccaccgaggagagaggcctgaacgtgaccctgagcagcaccggcagaaacggcttcaagagccacgccctgcagctgaacaacagacagatcagaggcctggaggaggagctgcagttcagcctgggcagcaagatcaacgtgaaggtgggcggcaacagcaagggcaccctgaaggtgctgagaacctacaacgtgctggacatgaagaacaccacctgccaggacctgcagatcgaggtgaccgtgaagggccacgtggagtacaccatggaggccaacgaggactacgaggactacgagtacgacgagctgcccgccaaggacgaccccgacgcccccctgcagcccgtgacccccctgcagctgttcgagggcagaagaaacagaagaagaagagaggcccccaaggtggtggaggagcaggagagcagagtgcactacaccgtgtgcatctggagaaacggcaaggtgggcctgagcggcatggccatcgccgacgtgaccctgctgagcggcttccacgccctgagagccgacctggagaagctgaccagcctgagcgacagatacgtgagccacttcgagaccgagggcccccacgtgctgctgtacttcgacagcgtgcccaccagcagagagtgcgtgggcttcgaggccgtgcaggaggtgcccgtgggcctggtgcagcccgccagcgccaccctgtacgactactacaaccccgagagaagatgcagcgtgttctacggcgcccccagcaagagcagactgctggccaccctgtgcagcgccgaggtgtgccagtgcgccgagggcaagtgccccagacagagaagagccctggagagaggcctgcaggacgaggacggctacagaatgaagttcgcctgctactaccccagagtggagtacggcttccaggtgaaggtgctgagagaggacagcagagccgccttcagactgttcgagaccaagatcacccaggtgctgcacttcaccaaggacgtgaaggccgccgccaaccagatgagaaacttcctggtgagagccagctgcagactgagactggagcccggcaaggagtacctgatcatgggcctggacggcgccacctacgacctggagggccacccccagtacctgctggacagcaacagctggatcgaggagatgcccagcgagagactgtgcagaagcaccagacagagagccgcctgcgcccagctgaacgacttcctgcaggagtacggcacccagggctgccaggtgtag

SEQ ID NO: 85106 - RNA, 5235 nt, Artificial Sequence
  derived and/or modified sequence
augcggcugcuguggggccugaucugggcuaguagcuucuuuacacugaguuugcagaaaccccgauuguugcuuuucucucccucuguagugcaucucggcgugccccucagcguaggagugcagcuacaggacgugccuagaggccagguugugaaggggagcguguucuuacgaaacccaucuaggaauaacgucccuugcucucccaagguugacuucacccucagcucagaacgagauuucgccuugcuuucccuacaggucccgcuuaaggaugcaaaaucuuguggcuugcaccaacugcuucgaggaccugaggugcagcuggucgcacacucaccguggcugaaagauucgcuaucccgcacaacgaacauucagggaauuaauuugcuuuucucaagccgucgcggccaccuguuucuacaaacggaccaaccaaucuacaauccagggcagagggugcgauauagagucuucgcccuggaucagaagaugcgcccgucgaccgauacaauuacgguuaugguggaaaacucgcacggauuaagggugcguaaaaaagaggucuacaugcccaguuccaucuuccaggaugacuucgucaucccagacaucucugagccuggaaccuggaaaauuuccgccagauucuccgauggacuugaaucuaauucaaguacacaguuugaagugaagaaauauguucucccuaacuucgagguaaaaaucaccccaggcaagccguauauccugacugugccaggucaccuggaugagaugcaacuugauauccaggcaagauacaucuacggcaagcccgugcagggggucgccuacgugcgauucgggcuccuggacgaggaugggaagaagacuuucuuucgagggcuagaaagccagacuaaguuagucaacggacagucacacauuagccuuucaaaggcagaguuucaggaugcgcuugagaaauugaauaugggcauaacagaccugcaagggcuucggcuauaugucgcugccgccaucauugaauacccuggaggggagauggaagaagcagagcucaccucaugguauuucgugucaucacccuuuagccucgauuugagcaagaccaaaagacaccuggugccaggugcccccuuccugcuucaagccuuagugcgcgaaaugucaggcaguccagccucggggauccccgucaaagucucugcuacuguguccucaccagguucuguuccagaggugcaggacauucagcagaacacugaugggagcggucagguguccaucccaauaauuaucccucagacaauauccgaacugcagcuuuccgucuccgcuggguccccacaccccgcaaucgcacguuuaacuguggcggcaccuccgagcggagggccgggauuucucucuaucgaacgcccugacagccgcccuccaagggugggcgauacacugaaccucaaucugcgggcuguuggaaguggcgcaacuuuuucacauuacuacuacaugauuuuaagcagggggcagaucguguucaugaauagagagccuaaaaggacacuuacaagcguuucuguguuuguggaccaccauuuagcaccuagcuucuauuucguggccuucuacuaccauggugaucaucccguggccaauaguuugcgcguggacgugcaagccggagcuugugaaggaaaguuagagcuguccguggacggggcuaaacaauaccguaauggggagagcgucaaauugcaccuggagacugacagccucgcccugguagcccucggugcccuugauaccgcccuguaugcugcagggucaaagagucacaaacccuugaauauggggaaggucuucgaggccaugaauuccuacgaccuaggcugcggucccgguggaggggauuccgcuuugcaggucuuucaggcagcugggcuugcuuuuagugacggcgaccaauggacguuaucuagaaagcgguuguccugucccaaagaaaagacaacaaggaagaagagaaaugugaacuuccagaaggcuauuaacgagaaacuggggcaguaugcuucuccaacagccaaacgauguugucaagacggaguuaccagguugccuaugaugagauccugcgagcagagagcagcaagagugcagcagcccgauugcagagagccuuuucuguccuguugccaguuugcugagagucuacguaagaaguccagagacaagggacaggcuggguuacaacgagcucucgagauuuugcaggaagaggaccucauugaugaggacgauauaccgguucgaucuuucuuuccugagaacuggcuguggcguguggaaacaguggauagauuucagauccugacacuguggcugcccgauagccugacuacuugggagauccacgggcugucccugagcaaaaccaaggggcucugcguagcgacgccugugcagcuuaggguguuucgagaauuccaccuccaucuccggcucccuauguccgucagaagguuugaacaacuggaacuaagaccagugcuguacaacuaucuagacaaaaaucugacuguuuccguccaugucagucccguggagggccugugccuagcaggaggcggggguuuggcccagcaggucuuggugccugccggcuccgcgcgcccgguggcuuucucugucguaccuacggcagccgcagcuguuucacuaaaagugguagcccggggcucauucgaguuucccgugggcgaugcuguaaguaaaguacuccagauugagaaggaaggcgcuauucacagggaggagcuuguauacgaauugaauccuuuagaccaccguggccgcacacucgagauucccgggaacagcgaccccaacaugauuccggacggagauuucaauagcuacgugcggguuacagccucugacccucuggacacauugggcuccgagggcgcccugagcccagggggagucgccagucuuuugcgucugcccagaggauguggugaacagaccaugauuuaccuggccccaacccuggccgcuucucgguaucucgacaagacugaacaguggucaacccuaccccccgagacaaaggaucacgccgucgacuuaauccagaagggguacaugcggauccagcaguuccgcaaagccgauggauccuacgcugccugguugucucgaggcagcucuacaugguugaccgcuuuuguucuuaaggucuugucccucgcacaggaacaagugggcgggagcccagaaaaguugcaagagaccucuaacugguugcugagccagcagcaggcugacggauccuuucaggaccugagucccgugauccaccgcagcaugcaggggggacugguggguaacgacgaaacuguggcauuaacagcauuugugaccauagcacugcaucauggccuggccguguuucaggaugaaggagcugagccuuugaagcaaagaguggaggcaucuaucucgaaagcguccuccuuuuugggugaaaaggcaagugccggcuuauugggugcgcaugccgccgcaauaacugcuuaugcauugacucuuacaaaggcuccugccgauuugaggggcgucgcucauaauaaucugauggcgauggcccaagagacaggcgauaaucuguauuggggaucagugacgggcucacagaguaaugccgucucccccacacccgcucccagaaaucccucagauccaaugccucaggcccccgcucucuggaucgagaccaccgcuuacgcccuccuacaucugcucuugcaugagggaaaagcggagauggcggaccaggccgccgccuggcucacucgucaaggaagcuuucagggcggcuuucggaguacacaagauaccgucauagcuuuagaugcccugucugccuauuggaucgcaucacacacaacugaagaacggggcuuaaauguaacccugucuagcacuggccgcaauggcuuuaaaucccacgcccugcaacugaacaacagacagauacggggccuagaagaggagcuacaauucagccucggcuccaaaaucaaugucaaagucggggggaacuccaaggggacucugaaaguacuacgaacuuacaacguacuugacaugaaaaacaccaccugccaggaucugcagaucgaaguuacagucaagggucacguggaauacacaauggaagcuaaugaggacuacgaagauuaugaauaugacgaacugccugcaaaagacgauccggacgccccucugcagccugugacaccccugcagcuguuugagggccggagaaaccgcaggcgccgggaggcaccgaaaguugucgaggaacaggagagcaggguccauuacacagucuguaucuggcgaaauggcaagguggggcuguccgggauggccauagccgaugugacacuccucucagguuuucacgcccuccgggcugacuuggaaaaguuaacuagucugagcgaucgcuacgucucccauuuugagacugagggcccccacguccugcucuauuucgauucugugcccaccucuagggaguguguggguuucgaggccgugcaagaagugcccguugggcuggugcagccagcuagcgccacccuuuacgacuacuauaaucccgaacgaaggugcagcguguucuacggggcuccuucuaaaagccgacucuuggcuacccugugcucagcugaaguuugccaaugugcagaaggaaagugcccacgccaacggcgagcccuugaaagaggauuacaggaugaggacgguuaccgaaugaaguucgccugcuacuacccucgagucgaguauggguuucaagugaagguuuuacgcgaggacucgcgcgcugcuuucagauuguuugagacuaagauuacccaaguucugcacuucaccaaggacgucaaggcggcugccaaccaaaugcguaacuuccucgugcgagccagcugccgccuccgccucgaacccgguaaggaauaucugaucaugggacuugacggcgcuaccuaugaucuggaaggccauccucaguaccuccuggauucuaauucuuggauugaagaaaugcccagcgaaagacuaugccgaucuacccgacaaagggccgcaugugcacaacucaaugauuuccugcaggaauacgguacacaggggugccagguguag

SEQ ID NO: 85107 - RNA, 5235 nt, Artificial Sequence
  derived and/or modified sequence
augcgauuauuaugggggcugauaugggcuuccuccuucuuuacccugagccuacagaagccuagauuguuacuuuucucucccucugugguccauuuaggcgugccacucucggugggaguacagcugcaagacgugccccgcgggcagguggucaaaggguccguguuccugaggaauccaucccggaacaacgugcccuguucccccaaagucgacuucaccuugucuagugaacgcgauuucgcccugcugagucuccaagucccacugaaggaugcaaaguccugcggccuccaccaguugcugcguggaccugaagugcagcuggucgcgcacagccccuggcugaaggauagccugagucgcaccacuaacauucaaggcaucaaccucuuguucucuucacgacgggggcauuuguuuuugcagaccgaccagcccaucuauaacccugggcagagaguccgcuaccgcguguucgcccucgaucagaagaugcggccuucgacagauaccauuaccgugaugguggagaacucucauggacugcgcguuagaaaaaaagagguuuauaugccuagcucuaucuuucaggaugauuucgugaucccagauaucucggagcccgggacauggaaaauaagugcucgguucagcgacggucuggaguccaacucauccacucaguucgaagucaagaaguauguccucccaaacuucgaaguaaagaucacgccagguaaacccuauauccugacaguuccgggacaccucgacgagaugcagcuggacauccaggcacgguacauuuacgguaaaccugugcagggcguggcguacgugcgguucggucugcuggaugaggaugggaaaaagacuuucuuucgcggccuugagucccagacaaaguuagucaacggacaaucccacauuagccugucuaaagccgaauuucaggacgcccuugagaagcuuaacaugggcauuacugacuugcagggacuucgacuguaugucgccgcagcaauuaucgaguauccaggaggagagauggaggaggccgaacucacaagcugguauuucguuagcucuccuuucagcuuagacuugagcaaaacuaagagacaucuggugccuggcgcccccuuucuccuccaagcacuugucagggagaugagcggguccccugccucgggaauuccuguaaaggugagugcaaccgugucaucaccaggguccgugccagagguccaggauauucagcagaacacggacggcagcggucaggugucuauucccaucauuauuccacaaacaaucuccgagcuccaacugaguguaagcgccgggagcccgcacccagcgaucgcccgccugacugucgccgccccgccaagcggaggccccggcuuucuuucuauagagcgaccagacucccgcccuccaagagucggggacacucucaaccugaaucugcgcgcuguggggucuggcgcaaccuuuucacauuacuauuauaugauuuugucuaggggccagauugucuuuaugaaucgagagccgaagaggacacugacuagugugaguguuuucguagaucaucaccuagcuccaaguuuuuauuucguggcuuucuauuaucauggcgaucauccaguggcuaacucacugcggguagacguccaggcaggagccugcgagggaaagcuugagcuuucuguggauggggccaagcaguauagaaacggagagucugugaaacuccaccuggagacagauagccucgcacugguugcacucggagcacuggauaccgcacucuacgcugccggcagcaagucccacaaaccucuuaacaugggcaaaguguuugaagcgaugaacucauaugaccugggcugcgggccaggcggaggggauucugcccugcaggucuuccaggcggcagggcuggccuucagcgacggugaccaguggacucugagccguaaaagacugaguugcccuaaggaaaagacuacaagaaaaaaaaggaauguuaauuuucagaaggccaucaacgaaaagcugggucaauacgcaucaccaaccgcuaaacgcugcugccaagauggagucaccagacugcccaugaugcggaguugcgagcaacgcgcagccaggguccaacagccagacugccgagaacccuuccuauccugcugccaauuugcagagucacugcggaaaaagucucgugacaagggacaggccggacuccagcgggcucuugaaauccuucaggaggaagaccuuauugaugaagacgauauuccugugcgauccuucuucccugagaauuggcucuggaggguggagacaguugaucgcuuucagauucugacucucuggcugccagacucacucacuacaugggaaauucacgguuuaagucucaguaagacuaaaggucuuugugucgcgacgcccgugcaacuucgcguuuuucgggaguuccaccuacaucugcggcugcccauguccgugcgacgguuugagcaacuggagcuucggcccgugcuuuacaauuaucuggacaagaaucugaccguaagcgugcacgugucaccaguggaaggccucugucucgcuggcggcgggggcuuggcucagcagguucuggugccagcgggauccgcccguccuguagcuuuuucagucguucccacggcggccgcagccgugucucugaaaguugucgccaggggcagcuucgaguuuccugugggggaugcgguuucaaagguccuccaaauugagaaggaaggggccauccaucgcgaagagcuggucuaugagcuuaacccccucgaucaucgggggagaacccucgaaauacccggaaauagugauccgaacaugaucccugauggugacuucaacuccuacgugaggguuacagccucugaccccuuggauacauuggguucugagggggcccuuucacccggcggaguggcaucgcuucugcgguuaccccgagggugcggcgaacagaccaugauauaccuggcaccgacccuugccgccucacgcuauuuagacaagaccgagcaaugguccaccuuacccccagagaccaaagaccacgccguggaccuuauacagaaggguuacaugcguauucaacaguucaggaaagccgauggcucauaugccgccugguuaagucgugggucuagcacauggcugaccgccuuugugcugaaagugcugagccuggcccaggaacagguaggggguuccccagaaaagcugcaggagaccucuaacuggcugcugagccagcagcaggccgacgguucauuccaggaucuuaguccugucauccaucgaagcaugcaagggggguuagugggaaaugaugagacagucgcacuuacagcguucguaacaauugcucugcaccacggacuggcagucuuccaggaugagggcgcugagccacugaaacagcgcguggaagccuccaucagcaaggccuccucuuuuuugggugaaaaggccagugcagggcucuugggcgcacaugccgcugcgaucacugcuuaugcucucacccucacaaaggcuccggccgaucuccggggagucgcccacaacaaucugauggcaauggcgcaggaaacuggggacaaccucuacuggggcucuguuacugggagucagucaaacgccgucucucccaccccagcuccucgcaaucccuccgaccccaugccucaggccccugcacuauggaucgaaacuacagcauacgcacuucuacauuugcuccugcacgaggguaaagccgaaauggcagaccaggcugcggcuuggcugacacgccaagggucuuuucagggcggcuuccguucaacucaagacaccgugauugcucucgacgcccuaagcgccuacuggauugccagccacacuacugaggaacgggggcugaacguaacucuaucauccacgggccgcaacggcuucaagucacaugcccugcagcugaauaacagacaaauucguggccucgaggaagagcugcaauuuagcuuagguucuaaaauuaacgugaaggucggcggcaacucaaaggguacucugaaggugcugcgaacguauaacguucuugauaugaagaacaccaccugucaggaucugcagaucgaggugacagucaagggacaugucgaauacacuauggaggcgaacgaggacuacgaagacuaugaauacgaugagcuucccgccaaagacgacccugacgcaccucugcagcccguaacuccauuacagcuguuugaaggacgaaggaaccggcggcgaagggaagcgccaaaagucguugaagagcaggagaguagaguacacuacacuguaugcauauggaggaauggcaaagugggccuuucuggaauggccaucgcagacgugacacucuugaguggauuucaugcgcuacgagcugaucucgagaagcuaacuucucuguccgacagauacgugucucauuuugaaacagaagguccacacgugcucuuguacuucgacucugugccgacaagccgugaaugcgugggauuugaggcaguucaggaagugccuguagggcucgugcagccugcuuccgcuacuuuguacgacuacuacaaccccgaaaggagauguuccguuuuuuauggcgccccuuccaaaagucggcugcuagccaccuugugcucagcagaagugugucagugcgccgaagggaaguguccgaggcaacggcgcgcucuggaacggggcuuacaagaugaggacggcuacagaaugaaguucgccugcuauuacccuagaguggaguauggcuuccaagugaagguucugcgggaagacuccagagccgcuuucaggcuguuugaaacaaaaauuacucaaguacugcauuuuacuaaagacgugaaagccgccgcaaaucagaugcgcaauuuccuggugagagcaucaugcaggcuacggcuggaacccgguaaagaauaccugauuaugggauuagacggggcaacauaugaucuggaaggacauccucaguacuugcucgacuccaacucguggaucgaggaaaugccaagcgagcgcuuaugccggagcacaagacaaagagccgccugcgcccagcuuaaugauuuucuccaggaguauggcacccagggaugccaggucuag

SEQ ID NO: 85108 - RNA, 1536 nt, Artificial Sequence
  derived and/or modified sequence
auggccaaaggucugagcgugcagaacgauaagcacccuggauaucaaccugcacugcuguugucuccuggcgcuccucuguuugcagauggcccagccuacgcgcuguuacauuuacugcuccacgaaggaaaggccgagauggcagaucaggcagcagccuggcugacucggcagggaucauuccaagggggcuuucggagcacacaggauacaguuaucgcacuggacgcccucucagcguauuggauugcuagucacacaacagaagagagaggacuuaauguuacguugucaucuacaggcagaaauggauuuaaaucccacgcauuacagcuuaacaaccggcagaucagggguuuggaagaagaacuucaguuuucacucggcuccaagauuaaugugaagguuggaggcaauaguaagggcaccuugaaggugcuccgcacauauaauguucuggacaugaagaacaccaccugucaagaccugcaaauugaggucaccgucaagggucaugucgaguacaccauggaggcuaacgaggauuacgaagacuaugaguaugacgaacugcccgccaaagaugauccagacgcuccacuccaacccguaaccccacugcaacucuucgagggacggcguaaccggagacggcgagaggcuccuaaaguaguugaagaacaagagucccgcguccauuacacagucugcaucuggcgcaauggcaaaguggggcuguccggaauggcuaucgccgacguaaccuuguuguccggcuuucaugcccuucgagcugaucucgagaaguuaacaagucugagcgauagauaugugagccacuucgagaccgaaggcccacacgugcuucuuuacuucgacucuguuccaacgucucgagaauguguuggauuugaagccgugcaggaggucccugugggguuagugcagcccgcguccgcuacuuuauacgacuacuauaaccccgagagaagauguucagucuucuauggggccccuuccaagucacggcuguuggcuacacuguguagugccgagguaugccagugcgcagagggcaaguguccucgccaacgacgcgcccuagagcggggccugcaggacgaagacggcuaccgcaugaaauuugccuguuacuacccucguguugaauacggcuuucaaguuaaagugcugagggaggacagccgcgcagcuuuuagacuguuugagaccaagauaacccagguacugcacuuuacuaaagaugucaaggcggcagccaaccagaugcgaaauuuucuggugcgcgccuccugucgguugagacuggaaccgggcaaagaguauuugauaaugggccuagauggugcuacuuacgauuuagagggucacccucaauaucuucuagauuccaacuccuggauagaggaaaugccaagcgagcgguugugcagaaguacccgacagagagcagcuugcgcccaguuaaacgauuuccugcaggaguacgggacacaaggcugccagguuuag

SEQ ID NO: 85109 - RNA, 5235 nt, Artificial Sequence
  derived and/or modified sequence
augcggcugcuauggggacuaaucugggccucuaguuuuuuuacauuaucacugcaaaagccgagacucuugcucuuuucaccgucgguugugcaucugggugucccucugucaguggggguucaacugcaggacguaccuaggggccaggugguuaaggggagcguguuucugcgcaaccccucccgcaauaacgugccaugcucuccaaaaguagauuuuacgcucucuagcgaaagggacuuugcauugcucucccuacaagugccauuaaaagaugccaagucuugugggcuccaucaacuuuugcgcggccccgagguacaguugguugcccauaguccguggcugaaggacucccuauccagaaccacgaacauucaggggauaaauuugcuauuuucaagcagacgcggacaucuauuccuacagacagaccagcccaucuauaauccuggccagaggguccgguaccgaguguuugcccucgaucagaaaaugcguccuuccacagauaccaucaccgugaugguugagaacucccacggcuuaagaguccgcaagaaagaaguguacaugccuaguagcauuuuccaggaugacuuugugaucccggacauaucugagcccgggaccuggaagauaucagcccgguuuucugacggucucgaaucaaacuccuccacacaauucgaaguaaaaaaauauguucugccuaacuuugaagugaagauuaccccugguaaaccuuacauacugacagucccaggacaccuugaugagaugcaacuggacauccaggccagauacauuuacggaaagccuguacagggaguggcguaugugcgcuucggccuccuggacgaagacggaaaaaaaacauucuuccgcggguuagagucccagacgaaacucgugaacggccaaucucacaucucccuuuccaaggcagaauuucaggaugcauuagagaaacuaaauaugggaauuacugaucuacagggccuccgccuuuauguagcugcugccauaauugaguaucccggaggagagauggaggaagcugaacucacuuccugguauuucgucuccucucccuucaguuuggauuuaucuaaaacaaagcgccaccuugucccuggggcgccuuuccuucuucaagcacugguccgagaaauguccggcuccccagccuccgggauuccugugaaaguaagcgcgaccgucaguuccccuggcucgguuccagaggugcaggacauucagcaaaacacagauggaucaggacaggucucaauccccaucauuauuccacaaacaauaagugagcugcagcuuuccguuucugcaggauccccgcacccugcgauugcacguuugacuguggcagcaccgcccagugggggacccggauuucucucuauugaacgucccgauuccaggccgccccguguuggcgacacacugaaucucaaccugcgggcagucgguucuggugccacauucagccauuauuacuauaugauuuuaagccgcgggcaaaucguauucaugaaucgagaaccaaaacgaacccuuacuucagugucaguauuugucgaucaucacuuagccccuuccuuuuauuucgucgccuuuuacuaccauggggaccauccugucgccaacucacugcgcguagaugugcaagcaggggccugcgaaggcaaauuagagcugucugucgauggugccaaacaauauagaaacggcgaaagcgugaaacuucaccuugagacggauagccuggcacucguagcacuuggugcucuugauaccgcgcuguaugcagcuggcaguaaaagccacaagccauuaaauaugggaaaaguauuugaggcuaugaacaguuaugacuuaggaugcggacccggggggggcgauuccgcucuacagguguuccaggcugccggacuggcauucuccgauggugaucaguggacucuguccaggaaacgacuaagcugcccuaaagaaaagaccacaagaaaaaagagaaauguuaacuuucagaaggcaaucaacgagaagcuggggcaauacgcuuccccuaccgcuaaacgauguugucaagacggaguuaccagguugccuaugaugagauccugcgagcagagagcagcaagagugcagcagcccgauugcagagagccuuuucuguccuguugccaguuugcugagagucuacguaagaaguccagagacaagggacaggcuggguuacaacgagcucucgagauuuugcaggaagaggaccucauugaugaggacgauauaccgguucgaucuuucuuuccugagaacuggcuguggcguguggaaacaguggauagauuucagauccugacacuguggcugcccgauaguuuaacaacuugggaaauacauggacugucgcugaguaaaacaaagggacugugcguugcgaccccaguccaacuccgaguuuucagagaauuccaucuacaccuucgauugcccaugucagugaggcgcuuugagcagcucgagcugagacccgugcucuacaacuaccuggauaagaaccugacuguguccgugcacgucucaccaguggaggguuuaugucucgccgggggcggaggccuggcccaacaggugcuggucccugcugggucugcaagacccguggccuuuagcguggugccgacagcugcggcggcagucucccuuaaaguaguagcccgaggguccuuugaauucccagucggugaugccgugucaaaggugcugcaaaucgagaaagaaggagcaauccaccgugaagaacuugucuaugaacugaacccacuugaccaucgcgggcggacgcuggaaaucccaggcaauuccgacccaaauaugauacccgacggcgacuuuaacaguuaugucagaguuacugcauccgacccacucgauacuuugggaagcgagggugcccuuucaccuggaggggucgccaguuugcugaggcuucccagagguuguggggaacagacaaugaucuauuuggcuccaacacucgccgcuagccguuacuuagauaagacagagcaauggucaacguuaccaccagaaacuaaggaucaugccgucgaccucauccagaagggcuauaugagaauacaacaauuuaggaaagcagacgggagcuacgcugcauggcucucgcgggggaguaguaccuggcugacagccuuuguccuuaaaguccuuucucucgcccaggagcagguggguggcucucccgagaaacuucaagagaccucuaacugguugcugagccagcagcaggcugacggauccuuucaggaccugagucccgugauccaccgcagcaugcaggggggacugguggguaacgacgaaacuguggcauuaacagcauuugugaccauagcacugcaucauggccuggccguguuucaggaugaaggagcugagccuuugaagcaaagaguggaggcaucuaucucgaaagcguccuccuuuuugggugaaaaggcaagugccggcuuauugggugcgcaugccgccgcaauaacugcuuaugcauugacgcuuacuaaagcuccagccgaccugcgcgggguagcucacaacaaccugauggcgauggcacaggagaccggagacaaucucuauuggggcucggugacaggaagccaauccaaugcagugucaccaaccccagcuccuagaaauccguccgacccuaugccccaagccccagcucuuuggauagagacuacagcauacgcccuccuccaccugcuucuccacgagggaaaagccgaaauggccgaucaggcagcugcuuggcuuacacgacagggcucuuuucaaggcggcuuuaggaguacacaagauaccgucauagcuuuagaugcccugucugccuauuggaucgcaucacacacaacugaagaacggggcuuaaauguaacccugucuagcacuggccgcaauggcuuuaaaucccacgcccugcaacugaacaacagacagauacggggccuagaagaggagcuacaauucagccucggcuccaaaaucaaugucaaagucggggggaacuccaaggggacucugaaaguacuacgaacuuacaacguacuugacaugaaaaacaccaccugccaggaucugcagaucgaagugaccgucaagggccacguggaauacacuauggaagcuaacgaggacuaugaggauuacgaauacgacgaguuaccugccaaagacgauccagaugcuccccuucagccagucacuccuuugcaacuguuugaagggagaaggaaucgaagacguagggaagcgccuaaagucguggaggaacaagagucaagagugcacuauaccguguguauauggagaaacggcaaaguuggguuguccggaauggccauugcugaugucacccuucucaguggguuccaugcauuacgagccgaucucgagaaguuaacuucacuaagcgaucgauacguaucacauuucgagaccgaaggaccacauguacuucucuacuucgauucugucccuacuucaagagaaugcgugggguuugaggcaguccaggaagucccugugggccuggugcagccugccucugccacacuguacgacuacuauaacccagaacgccgguguucaguuuuuuauggcgcucccucaaaaucuagguuacucgccacguuaugcagcgccgaagucugucaaugugcagaaggaaagugccccaggcaaaggcgcgccuuggagcgugggcuucaggaugaggacggcuacagaaugaaauucgcuugcuacuacccacggguugaauauggcuuccaggucaaaguacucagggaggauaguagagccgccuuucgcuuauucgagacuaagaucacacaggugcuucacuuuaccaaagacguuaaagccgccgccaaccagaugagaaacuuccuagucagagcuagcugccgauuacgccuugaaccggggaaggaauauuugauuauggggcuggauggcgccacauaugaccuugaagggcauccccaauauuugcuggacuccaauuccuggauugaagagaugccuagcgaacgguuaugucgauccacucgucaaagagcagccugcgcacaacuaaacgacuuucugcaagaauacggaacacaagguugucagguuuag

SEQ ID NO: 85110 - RNA, 5235 nt, Artificial Sequence
  derived and/or modified sequence
augaggcugcucuggggacugauuugggccucauccuucuucacccuaucucugcagaagccaagauugcugcuguuuagccccuccgucgugcaccugggcgucccccuauccgugggagugcaauuacaggaugucccacguggccagguugucaagggcuccguauuucucagaaacccuagucgaaacaacgucccauguagcccaaaaguggauuucacccucagcucagaaagagauuuugcucuacugucccuucaggucccacuaaaagacgccaaaagcugcggacugcaucaacuucuucgaggcccagagguccagcugguggcacacagcccaugguuaaaggauagccugucacgcacuacuaacauacaagguauuaauuuacuguuuucuaguagaagaggccaucucuuucugcaaacugaccagccuauauacaauccugggcagagagucagguacagggucuucgcccucgaccaaaagaugcgcccaagcacagacacgaucacagugaugguggagaacagucauggucuacgagugcggaaaaaagagguuuacaugccaucuuccaucuuccaagacgauuuugugauccccgacauuagcgaaccagguacguggaagaucucugcaagguucagugacggcuuagaauccaauaguucaacgcaguucgaggucaaaaaauacguucuccccaauuucgagguaaagaucacaccaggaaaacccuacauucugacugucccaggacaucuugacgagaugcagcuggacauccaggcacguuauauuuacggcaagccagugcagggcguggcuuaugugcgcuucggucugcuugacgaggaugguaaaaagacuuuuuucagaggauuagagucucagaccaagcuugucaacggccagucacacauaucacucaguaaggcugaauuucaggaugcuuuggaaaaguugaauaugggaauaacugaccugcaaggacugcguuuauacgucgcugccgcaaucauugaguacccuggaggagaaauggaggaagcugaauugacaucaugguacuuuguaagcucacccuucagccuggaucugucgaagacaaaacgucaccugguucccggggcacccuuccugcugcaggcccucguucgggaaaugucaggaucuccagccagcgggauucccguuaaggucagugcuaccgucuccucaccugggucugugcccgaaguucaggauauacagcaaaacacugauggauccggucaaguaucuauccccaucauuaucccgcaaacuaucagugaacuccagcugucagugucugcuggaucuccccaucccgcuauugcgcgucugacuguggccgccccucccuccgggggucccggauuucuuuccaucgaacgaccugauucuagaccuccucgcgucggcgauacccugaaccugaaucugcgagcugugggcagcggcgcuacguucucacauuauuacuacaugauacucucuaggggucagauuguuuucaugaaucgagagccgaaaagaacucucacaucagucucuguuuucgucgaucaccaccuggcgccgagcuuuuauuuuguggccuuuuacuaccauggcgaucauccaguugccaacucacugcguguggaugugcaagcuggggcuugugaaggaaaacuggaacucucugucgacggugcaaagcaguauaggaauggagagucugucaaacugcauuuggaaacugacucacuagcucucguugccuuaggagcccuugacacugcucuuuacgcagcuggaucaaagucccauaaaccauuaaauauggguaaagucuucgaggcuaugaauucuuaugaccuggggugcggaccaggcggaggcgauagugcacuucagguauuucaggcugcagggcuugcuuucucugauggagaccaauggaccuuaucacgcaagcgacugagcugcccaaaagaaaaaaccacacgcaaaaagaggaacgugaauuuucagaaggccauuaacgaaaagcugggucaguacgcuucuccuacugcuaagcgcuguugccaggacggcgugacacguuuaccaaugaugagaagcugugagcagagagcagcaagaguucagcaaccagauugcagagagccauuucucucaugcugccaguuugccgagucgcugagaaagaagagccgcgacaagggacaagccggacuacagagggcucucgagauacugcaagaagaggaucucauagacgaagacgacauuccuguuaggucuuucuuuccugagaauuggcuuuggcgugucgagaccguagaccgauuccagauccucacauuguggcugccugauucucugaccaccugggaaauccacgguuuaucacugucuaaaaccaaaggccucuguguugcaaccccgguacaacugcgaguuuuuagagaguuccauuugcaucugaggcucccgaugucuguacgcagguuugaacagcuggaacugcgcccaguccucuacaauuaucucgauaagaaucugaccgugucugugcauguuaguccuguggaaggccuuugucucgcagguggaggagggcucgcucagcagguguuggugccggcaggcagugcacgcccagucgcguucucuguggucccuacugccgcagcggcuguaucccugaaggucguggcuagaggcucauuugaguuucccgugggcgacgccgucucuaaaguguuacagauugaaaaagaaggcgccauccaccgcgaggagcugguguacgaauugaacccacuugaccaccgagggcguacucuggagauaccugguaacagcgacccgaauaugauuccagauggagauuuuaacucauacgugagagugacugccuccgauccccucgacacacuuggcagcgagggugcuuugucuccuggaggcguggcaucccuucugaggcuuccuagaggguguggggagcaaaccaugauuuaucuggcaccaacacuggccgcaucccgguaucuggacaagaccgagcaauggucaacacucccucccgaaacaaaggaccacgcaguggaccugauccagaaaggcuauaugagaauccaacaauuuagaaaggcugauggcucuuacgccgcguggcuguccagaggcucuuccacuuggcugacggcuuucgugcugaagguucugagcuuggcccaggaacaggugggggguucuccugagaaacugcaagaaaccucaaacugguugcucucgcaacagcaggccgacggauccuuccaagaccugagcccaguaauccauagaaguaugcaaggggggcugguaggcaaugacgagacuguggcccucacugccuuugucacgauugccuuacaucacggccucgccguguuucaggacgagggagcugagccacugaaacaaagaguugaggcgucaauuucuaaggcuucuucuuuccucggugaaaaagccagcgcaggcuuacucggagcucaugcagccgcuauuaccgccuacgcccugacucuaacgaaagccccugccgaccugcguggagucgcacauaauaauuuaauggcuauggcccaggagaccggagauaacuuauacugggggucaguaaccggcucucaguccaacgccgucaguccgaccccagccccccgcaaucccucugacccuaugccacaagccccugcacuauggauugaaaccacagcauacgcucuccugcaccugcugcuacaugaagggaaagccgaaauggcagaucaggcugcagcgugguugaccagacaaggaagcuuccaaggcggauuuagaucaacccaggauacagucauugcgcucgacgcucugucagccuacuggauugcaagccacaccacagaggaacggggucugaacguaaccuugagcagcacaggaagaaauggguucaaaagccacgcgcugcagcugaacaacagacagauuaggggccuggaggaagaauuacaguucucuuuaggguccaagauuaacguuaaagugggggggaacucuaaggggacacuaaagguucugaggacuuacaacguguuagauaugaaaaauacaacuugccaggaucugcagaucgaagugacugugaagggccacguagaguauacuauggaagcgaaugaggauuaugaggauuaugaauacgaugaacuaccugcaaaagacgaccccgacgcaccauugcagccagugaccccucuucaauuauucgaaggucggagaaauagaaggaggagagaggccccgaaagugguugaagaacaagaaaguaggguccauuacaccguguguaucuggcggaauggcaaggucggccugucaggaauggcuaucgccgacgugaccuugcugagcgguuuccacgcauugagagcagaucuggagaaauugacaagcuugucugauagauauguuucacacuuugaaaccgagggcccacauguucucuuauacuuugauucaguaccgacgucccgggaaugcgugggguuugaggcaguccaagaagucccuguuggccucguccagcccgcuucugccacucuguacgauuacuauaaccccgagagaagaugcaguguuuuuuauggcgcuccuagcaagucgcgacuucuggcaacacucuguagugcagaaguaugccaaugugcugaagggaaauguccccgucaaaggagagcucuggaacggggcuuacaagaugaggacggcuacagaaugaaguucgccugcuauuacccuagaguggaguauggcuuccaagugaagguucugcgggaagacuccagagccgcuuucaggcuguuugaaacaaaaauuacucaaguacugcauuuuacuaaagacgugaaagccgccgcaaaucagaugcgcaauuuccuggugagagcaucaugcaggcuacggcuggaacccgguaaagaauaccugauuaugggauuagacggggcaacauaugaucuggaaggacauccucaguaucuccuagacuccaauucauggaucgaggaaaugcccuccgagagacuuugccgaagcacuagacagagagccgcuugcgcgcaguugaacgacuuuuuacaggaauacggaacacaaggaugucagguuuag

SEQ ID NO: 85111 - RNA, 1536 nt, Artificial Sequence
  derived and/or modified sequence
auggccaagggacucucgguacagaacgauaagcaccccgguuaccagccagcacugcuacuuucaccuggagccccucuguuugccgacggaccagcuuaugcccuguuacauuuauugcugcacgaggggaaagcugaaauggcagaucaagccgccgccuggcugacucggcaggguuccuuccaagggggcuuccggucaacucaggauacagugauugccuuggacgcauuaagcgcuuacuggaucgcuucccacaccaccgaggaaagaggguuaaacgugacccugaguaguaccggccgcaaugguuucaaaagucaugcacugcagcugaacaaucgacaaauccgaggucuugaagaggagcugcaguucagccuugggagcaaaaucaauguaaaagucggagggaauaguaagggcacacucaaagugcugcggacuuacaauguucuggauaugaaaaauacuaccugccaagaucuacagauagaaguaacagugaaaggacacguugaguacacaauggaggcgaaugaagauuacgaggacuacgaauacgacgagcugcccgccaaggacgaucccgacgcuccucugcaacccgugacuccauugcagcuguuugagggcagaaggaacagacgcaggagggaagcaccaaaggucgucgaagaacaggagagccgaguacauuauaccguuuguauauggagaaacgggaaagugggucugucuggcauggcuaucgcagaugugacgcuacuguccggcuuucacgcucugagagcagaucuugaaaagcuuaccagccuuuccgacagguauguuucccauuucgagacugaaggcccucacgucuuauuguacuuugacagcgugccaacaucaagagagugcguuggauucgaagcaguccaggaggucccaguagggcucguccagcccgccuccgcuacacuauaugacuauuacaaccccgaacgcagauguuccgucuuuuacggcgcuccaagcaaaagucgccuauuagccacccuguguuccgccgaaguuugccaaugugcagagggcaaaugucccagacagagacgcgcccuggaacggggucugcaggacgaagacgguuaucguaugaaguucgcguguuacuacccacgcguugaguacggauuccaggucaaggugcuacgcgaggacucuagagccgccuuccgccucuucgagacaaagauuacccaaguacuccauuuuacaaaagauguaaaggccgcagccaaucagaugcgaaauuuucugguccgugccucuugucgguuaagacuugaaccuggaaaggaguaucuuaucaugggccucgauggcgcaacuuacgaccuggaaggacauccacaauauuuacuagauucuaacaguuggauagaagagaugccauccgaaaggcucugccgguccacacgccagcgggcagcuugcgcacagcuaaaugauuuucuucaagaauacggaacucagggcugccaaguauag

SEQ ID NO: 85112 - DNA, 570 bp, Artificial Sequence
  derived and/or modified sequence
ctgtctcagccagctgccctcctcctccaagctggctccacttctctaagcgccaacagcgatggaaataaatagcatgtgtacagacgcctggacccttgagaaactcagaatatttctgcatgccttcctagctcctctagcgctctagaaggtgccttggaatttgtgtcgctgagtcagcaagcctttcagatttgcccggtttttgttgtttgtggtttgtatcaagatgggaactcaaacaagtcattcctcctaaggagctggtgtcttcatccagaagggacagtttgtgccagctctccagagagaaaaggatctggtactgttctggagtggcctgtagcagacactgaaccaccagccagctgcatttgttgtcctggaagtcattgccaactctgccagtcacactggggtccccagagaagtcaagatctgccggaggcgctgggcaatgaccccgggactccaggccagaggggtctgaagctgtttgggaaagcagcgggactccttgggaagatggccatggccccaagcccttccctggtgcaggtgtacacc

SEQ ID NO: 85113 - protein, 317 aa, Artificial Sequence
  derived and/or modified sequence
MGYDVTRFQGDVDEDLICPICSGVLEEPVQAPHCEHAFCNACITQWFSQQQTCPVDRSVVTVAHLRPVPRIMRNMLSKLQIACDNAVFGCSAVVRLDNLMSHLSDCEHNPKRPVTCEQGCGLEMPKDELPNHNCIKHLRSVVQQQQTRIAELEKTSAEHKHQLAEQKRDIQLLKAYMRAIRSVNPNLQNLEETIEYNEILEWVNSLQPARVTRWGGMISTPDAVLQAVIKRSLVESGCPASIVNELIENAHERSWPQGLATLETRQMNRRYYENYVAKRIPGKQAVVVMACENQHMGDDMVQEPGLVMIFAHGVEEI

SEQ ID NO: 85114 - protein, 304 aa, Artificial Sequence
  derived and/or modified sequence
MGYDVTRFQGDVDEDLICPICSGVLEEPVQAPHCEHAFCNACITQWFSQQQTCPVPRIMRNMLSKLQIACDNAVFGCSAVVRLDNLMSHLSDCEHNPKRPVTCEQGCGLEMPKDELPNHNCIKHLRSVVQQQQTRIAELEKTSAEHKHQLAEQKRDIQLLKAYMRAIRSVNPNLQNLEETIEYNEILEWVNSLQPARVTRWGGMISTPDAVLQAVIKRSLVESGCPASIVNELIENAHERSWPQGLATLETRQMNRRYYENYVAKRIPGKQAVVVMACENQHMGDDMVQEPGLVMIFAHGVEEI

SEQ ID NO: 85115 - protein, 190 aa, Artificial Sequence
  derived and/or modified sequence
MGYDVTRFQGDVDEDLICPICSGVLEEPVQAPHCEHAFCNACITQWFSQQQTCPVDRSVVTVAHLRPVPRIMRNMLSKLQIACDNAVFGCSAVVRLDNLMSHLSDCEHNPKRPVTCEQGCGLEMPKDELPNHNCIKHLRSVVQQQQTRIAELEKTSAEHKHQLAEQKRDIQLLKAYMRAIRSVNPNLQNL

SEQ ID NO: 85116 - protein, 201 aa, Artificial Sequence
  derived and/or modified sequence
MGYDVTRFQGDVDEDLICPICSGVLEEPVQAPHCEHAFCNACITQWFSQQQTCPVDRSVVTVAHLRPVPRIMRNMLSKLQIACDNAVFGCSAVVRLDNLMSHLSDCEHNPKRPVTCEQGCGLEMPKDELPNHNCIKHLRSVVQQQQTRIAELEKTSAEHKHQLAEQKRDIQLLKAYMRAIRSVNPNLQNLEETIEYNEILE

SEQ ID NO: 85117 - DNA, 3286 bp, Artificial Sequence
  derived and/or modified sequence
ctgaggcggcgacgagtggtaggagtcttctttcccctccttcccctttcccttcccttcccgggagaggctgggacccggcaccagggcagtactgtggccgctgcggcctcagctccgactgggtcaggttgcggagactccaggccgcttccagggcgagtactcctgattgtgacatcacattcatcccctgggcgatggagcttgtcactgggaaggaatactcagtcggagaatagccaacaagatgggttactgggagaatctcttcagtggcactgagtggaggcatcagggggttggagccttgtgaacagggaacctgccccccaacacttggaaggacctgggtttcagtgatgagacatggggtatgatgtaacccgtttccagggggatgttgacgaagatcttatctgccctatttgcagtggagtcttggaggagccagtacaggcacctcattgtgaacatgctttctgcaacgcctgcatcacccagtggttctctcagcaacagacatgtccagtggaccgtagtgttgtgacggtcgcccatctgcgcccagtacctcggatcatgcggaacatgttgtcaaagctgcagattgcctgtgacaacgctgtgttcggctgtagtgccgttgtccggcttgacaacctcatgtctcacctcagcgactgtgagcacaacccgaagcggcctgtgacctgtgaacagggctgtggcctggagatgcccaaagatgagctgcccaaccataactgcattaagcacctgcgctcagtggtacagcagcagcagacacgcatcgcagagctggagaagacgtcagctgaacacaaacaccagctggcggagcagaagcgagacatccagctgctaaaggcatacatgcgtgcaatccgcagtgtcaaccccaaccttcagaacctggaggagacaattgaatacaacgagatcctagagtgggtgaactcccttcagccagcaagagtgacccgctggggagggatgatctcgactcctgatgctgtgctccaggctgtaatcaagcgctccctggtggagagtggctgtcctgcttctattgtcaacgagctgattgaaaatgcccacgagcgtagctggccccagggtctggccacactagagactagacagatgaaccgacgctactatgagaactacgtggccaagcgcatccctggcaagcaggctgttgtcgtgatggcctgtgagaaccagcacatgggggatgacatggtgcaagagccaggccttgtcatgatatttgcgcatggcgtggaagagatataagagaactcgactggctatcaggaagagatggaaatcagaaaatcccatcactccagcagctgggacctgagtcctacccaccattcttaatactgtggcttatacctgagccacacatctccctgcccttctggcactgaagggccttggggtagtttgctcagcctttcaggtgggaaacccagatttcctccctttgccatattcccctaaaatgtctataaattatcagtctgggtgggaaagcccccacctccatccattttcctgcttagggtccctggttccagttattttcagaaagcacaaagagattcaatttccctggaggatcaggacagaggaaggaatctctaatcgtccctctcctccaaaaccagggaatcagagcagtcaggcctgttgactctaagcagcagacatcctgaagaaatggtaagggtggagccaaatctctagaaataagtagtgaggccgttaattggccatcactgatggcccttagggaaagactggacctctgtgccaagcagtatccctgttcagcccaccttaaaggtgtaggcacccactgggtctaccagtatgcaggttgggatactgaaaatttccagatgagctcttctttcctacaagttttcataattagggaatgccagggtttagggtaggggttaatctgttgggggttgatgtgtttagcaagaagctactcctagcttttgctaaaatatggttggcactgcctcttgtggcacaggccataattgttccatagacccctctctagccctgtgactgtagttagttactttgataattttctttggccattgtttgtttatatttcacaaactccacctactgcccccccccctcttttttttaagaatggcctgatcatggctatctcagccacattgttggcaatttaatttatttacttcctttttttttttttaagaaaggaaaaaagaaaaaaaaatcaaacttgaaacttttcttttgatgttcctattgtgggggttctggatagggtgggacagggatgggggtgtgttttatattttttccttttcagcacaacctttggctttaatataggaagagccaagggagtcctcggctgaacttacgatatctgccccaaacctctgtaaccccaactgaaatgaggagcttcctctcttcctgtgaaggatatgacagtccagcatcgatgcctgtgccctctggaaaaatttcctcctagcccttccagggccttatcataaaactctggatttagagtattcattttgaaggcaactcccccttccccaagtttccttggagctgtatagctgggttctaagcttcaccatgcaaatcagaaattttatctctaagtacaggctgtgccgtgtctcacccacacccccctggggacttcagttccatttcaggttacctggggtataccttgatccctagagtgactggcagagtaagagaaggggagagataataggtgtgattattttaatatggaggtgggagtgtggttggagatagaaaggctcctccccaccatgtaatggcttcctctcagaattttattccaggctagcttgctgcaggtctgggtagttggatcatggctccactgggattggggtggaaagcttgaggggagtagggttccagctctgggacattgtgctcaggaatttgaaaacgctgctatacttactctggttactacatttcttccactcccctttcccctacctgccttaaccaaggctcatactgtcctgtccttaccctcagatggagccaggaagctcagtgaaaggcttccctaccctttgcactagtgtctctgcaggttgctggttgtgttgtatgtgctgttccatggtgttgactgcactaataataaaccttttactcaactctctaaaaaaaaaaaaaaaaaaaa

SEQ ID NO: 85118 - DNA, 954 bp, Artificial Sequence
  derived and/or modified sequence
atgggctacgacgtgaccagattccagggcgacgtggacgaggacctgatctgccccatctgcagcggcgtgctggaggagcccgtgcaggccccccactgcgagcacgccttctgcaacgcctgcatcacccagtggttcagccagcagcagacctgccccgtggacagaagcgtggtgaccgtggcccacctgagacccgtgcccagaatcatgagaaacatgctgagcaagctgcagatcgcctgcgacaacgccgtgttcggctgcagcgccgtggtgagactggacaacctgatgagccacctgagcgactgcgagcacaaccccaagagacccgtgacctgcgagcagggctgcggcctggagatgcccaaggacgagctgcccaaccacaactgcatcaagcacctgagaagcgtggtgcagcagcagcagaccagaatcgccgagctggagaagaccagcgccgagcacaagcaccagctggccgagcagaagagagacatccagctgctgaaggcctacatgagagccatcagaagcgtgaaccccaacctgcagaacctggaggagaccatcgagtacaacgagatcctggagtgggtgaacagcctgcagcccgccagagtgaccagatggggcggcatgatcagcacccccgacgccgtgctgcaggccgtgatcaagagaagcctggtggagagcggctgccccgccagcatcgtgaacgagctgatcgagaacgcccacgagagaagctggccccagggcctggccaccctggagaccagacagatgaacagaagatactacgagaactacgtggccaagagaatccccggcaagcaggccgtggtggtgatggcctgcgagaaccagcacatgggcgacgacatggtgcaggagcccggcctggtgatgatcttcgcccacggcgtggaggagatctag

SEQ ID NO: 85119 - DNA, 915 bp, Artificial Sequence
  derived and/or modified sequence
atgggctacgacgtgaccagattccagggcgacgtggacgaggacctgatctgccccatctgcagcggcgtgctggaggagcccgtgcaggccccccactgcgagcacgccttctgcaacgcctgcatcacccagtggttcagccagcagcagacctgccccgtgcccagaatcatgagaaacatgctgagcaagctgcagatcgcctgcgacaacgccgtgttcggctgcagcgccgtggtgagactggacaacctgatgagccacctgagcgactgcgagcacaaccccaagagacccgtgacctgcgagcagggctgcggcctggagatgcccaaggacgagctgcccaaccacaactgcatcaagcacctgagaagcgtggtgcagcagcagcagaccagaatcgccgagctggagaagaccagcgccgagcacaagcaccagctggccgagcagaagagagacatccagctgctgaaggcctacatgagagccatcagaagcgtgaaccccaacctgcagaacctggaggagaccatcgagtacaacgagatcctggagtgggtgaacagcctgcagcccgccagagtgaccagatggggcggcatgatcagcacccccgacgccgtgctgcaggccgtgatcaagagaagcctggtggagagcggctgccccgccagcatcgtgaacgagctgatcgagaacgcccacgagagaagctggccccagggcctggccaccctggagaccagacagatgaacagaagatactacgagaactacgtggccaagagaatccccggcaagcaggccgtggtggtgatggcctgcgagaaccagcacatgggcgacgacatggtgcaggagcccggcctggtgatgatcttcgcccacggcgtggaggagatctag

SEQ ID NO: 85120 - DNA, 573 bp, Artificial Sequence
  derived and/or modified sequence
atgggctacgacgtgaccagattccagggcgacgtggacgaggacctgatctgccccatctgcagcggcgtgctggaggagcccgtgcaggccccccactgcgagcacgccttctgcaacgcctgcatcacccagtggttcagccagcagcagacctgccccgtggacagaagcgtggtgaccgtggcccacctgagacccgtgcccagaatcatgagaaacatgctgagcaagctgcagatcgcctgcgacaacgccgtgttcggctgcagcgccgtggtgagactggacaacctgatgagccacctgagcgactgcgagcacaaccccaagagacccgtgacctgcgagcagggctgcggcctggagatgcccaaggacgagctgcccaaccacaactgcatcaagcacctgagaagcgtggtgcagcagcagcagaccagaatcgccgagctggagaagaccagcgccgagcacaagcaccagctggccgagcagaagagagacatccagctgctgaaggcctacatgagagccatcagaagcgtgaaccccaacctgcagaacctgtag

SEQ ID NO: 85121 - DNA, 606 bp, Artificial Sequence
  derived and/or modified sequence
atgggctacgacgtgaccagattccagggcgacgtggacgaggacctgatctgccccatctgcagcggcgtgctggaggagcccgtgcaggccccccactgcgagcacgccttctgcaacgcctgcatcacccagtggttcagccagcagcagacctgccccgtggacagaagcgtggtgaccgtggcccacctgagacccgtgcccagaatcatgagaaacatgctgagcaagctgcagatcgcctgcgacaacgccgtgttcggctgcagcgccgtggtgagactggacaacctgatgagccacctgagcgactgcgagcacaaccccaagagacccgtgacctgcgagcagggctgcggcctggagatgcccaaggacgagctgcccaaccacaactgcatcaagcacctgagaagcgtggtgcagcagcagcagaccagaatcgccgagctggagaagaccagcgccgagcacaagcaccagctggccgagcagaagagagacatccagctgctgaaggcctacatgagagccatcagaagcgtgaaccccaacctgcagaacctggaggagaccatcgagtacaacgagatcctggagtag

SEQ ID NO: 85122 - DNA, 954 bp, Artificial Sequence
  derived and/or modified sequence
atgggatatgacgttaccagattccagggcgacgtagacgaggacttgatttgcccaatttgctctggggtgctggaggagcccgtgcaggccccccactgtgagcatgccttttgtaatgcctgtataacacaatggttttcccagcagcagacctgccctgttgatcgctctgtggttacagtcgcacacctaaggcccgttcccagaatcatgagaaatatgctgagcaagctgcagatcgcgtgcgacaatgcggtgtttgggtgttctgcggtggtcaggctcgataatttaatgagccatctgtccgactgcgagcataaccccaagcgtcctgtcacctgcgaacagggctgcggcctcgagatgcctaaggacgaattacctaatcacaattgtatcaagcatctgcggtctgtcgttcagcagcagcaaacaaggatcgcagagttggagaagacatcagcagagcacaaacatcagctcgcggagcagaaacgggatatacagctcctgaaggcctatatgagggcgatccggtctgttaatcctaatctgcaaaacctcgaagagactatcgaatataacgaaatcctcgaatgggttaacagcctgcagcctgctcgggtgacaagatgggggggcatgatatctacgcctgatgctgtgctgcaggctgtaattaagagaagcttggttgaaagcgggtgtcccgcctccattgtgaatgagctaatcgaaaacgctcacgagagaagctggccccagggtttggccaccctggaaacccgccaaatgaataggcggtattatgagaactatgttgccaagcgaattcctggaaagcaggctgtcgttgtaatggcatgcgagaatcagcacatgggcgatgacatggtgcaagagccaggactcgtgatgatttttgctcacggcgtggaggagatatag

SEQ ID NO: 85123 - DNA, 915 bp, Artificial Sequence
  derived and/or modified sequence
atggggtacgatgtcacccggttccagggcgatgtagacgaggatctgatctgtcccatatgctcaggcgttctggaggaaccagtgcaggctccacactgcgaacatgccttctgtaatgcatgtatcacacagtggttctcccagcaacagacgtgccccgttccccgcatcatgcgaaacatgctatctaaactccagatagcctgcgacaacgccgtgtttggctgctctgccgtagttcgcctggacaacctgatgtcgcacctgtcagactgtgagcacaatcccaagcgcccagtgacttgcgaacagggctgcggactggaaatgcccaaagatgaacttcctaaccacaactgtataaaacatttgcgcagcgtcgtacagcaacaacagacacgcattgccgaactggagaagacatccgccgagcataagcatcagctggctgagcagaaaagggacattcaattactcaaggcttacatgcgggcaatacggagtgtgaatccgaatctgcaaaacctagaagagactattgagtataatgagatactggagtgggtcaactctcttcagcccgccagggtgaccagatggggcggaatgatatctacaccggacgccgtcttacaggctgtgatcaagcggtctttagtggaaagtggctgtccggcctccatcgtgaacgagctgatagagaatgcccacgaacgcagttggcctcagggcctcgcaactctcgagactaggcaaatgaatagaaggtactatgaaaattatgttgccaagcgaattcccggcaaacaagcagtggtcgtgatggcttgcgaaaaccagcatatgggcgatgacatggtccaggagccaggcctggtcatgatatttgctcacggcgtggaagaaatatag

SEQ ID NO: 85124 - DNA, 573 bp, Artificial Sequence
  derived and/or modified sequence
atgggctacgacgtaaccagattccagggagacgtggacgaggacctgatctgccctatttgtagtggcgtcctggaagaaccagtccaggcaccacattgcgagcacgcattctgtaatgcctgtattacacagtggtttagccagcaacagacatgccccgttgatcgcagcgtggtgaccgtggcccatctgagacctgtgcctagaattatgcggaacatgctctcaaagctccaaatcgcttgtgataatgctgtcttcggatgcagcgccgtggtgcggctcgacaacctgatgagtcacctcagtgattgcgaacacaatccgaagaggcccgtcacctgcgagcagggttgtggcctcgaaatgccaaaggatgagttgccgaatcataactgcataaaacacttgaggagcgtggtgcagcagcaacagactcggatcgccgagctggagaagacaagcgcagaacacaagcaccagctcgcagaacaaaaacgtgatatacagctgctaaaagcctacatgcgtgccatccgtagcgtgaatccgaatttacagaacctgtag

SEQ ID NO: 85125 - DNA, 606 bp, Artificial Sequence
  derived and/or modified sequence
atggggtacgatgtgaccaggtttcagggagatgttgacgaagacctgatatgtccgatctgttcgggagtcctagaggaacccgtacaggctcctcattgtgaacatgccttctgcaacgcttgtatcacgcagtggttcagccaacagcagacgtgccccgtggaccgcagcgtggtgacagttgcccatctccggcccgtgccaagaatcatgagaaacatgctgagcaaactccaaattgcctgcgacaacgccgtgttcggctgttccgcagtcgtgcggttggataatctcatgagtcacctgtccgattgtgagcataatcccaagcgtccagttacctgtgagcagggctgtggtctcgagatgccgaaagacgaacttcccaatcataactgcattaaacacctcagatctgtcgtgcagcagcaacagacacgaattgcagaactcgaaaagacctcagccgagcacaagcaccaactcgctgaacagaagcgggacatccagctcctcaaagcatatatgcgggcaatacgttctgtgaatcccaacctccagaacctcgaagagacgattgagtataacgaaatactggaatag

SEQ ID NO: 85126 - DNA, 954 bp, Artificial Sequence
  derived and/or modified sequence
atgggatatgacgtaacccgcttccagggcgacgtcgacgaggatctcatctgtcctatctgctccggagtactagaagaacctgtgcaggctccacattgtgaacatgctttctgcaatgcctgtatcacccaatggttctctcagcagcagacctgccccgtcgaccgctcagtggttaccgttgcgcacctacgaccagtgccacgaattatgagaaacatgctgagcaagttgcagattgcctgcgacaacgccgtatttggctgctcagccgtcgttcgcctcgataatctcatgtcgcatctgtctgactgcgagcataaccctaagaggcccgtgacctgcgagcaaggctgcgggctagagatgcccaaggacgaactgcccaaccataactgtattaagcacttacgttccgtggtccaacagcaacaaacaagaatcgccgaactggagaaaacttctgccgagcacaagcatcagctcgccgagcagaaaagagacatccagcttttgaaagcttatatgcgcgcgattaggtcggtcaaccccaatctccagaatctagaagagacaattgagtataacgaaattctggagtgggtgaacagcctgcagcctgctagagttaccaggtggggtgggatgatttccaccccagacgctgtgctgcaagctgtcatcaagcgttccctggtcgagtccgggtgtcctgccagcattgtcaacgaactgatcgaaaacgcgcacgaacggagctggccccagggtctcgccaccctcgagacgaggcagatgaatcgaagatactatgaaaattatgttgcaaagcgcataccaggcaaacaggctgtggttgttatggcatgcgaaaatcagcatatgggggacgacatggtccaggagccaggcctagtgatgatctttgctcacggagtggaagagatatag

SEQ ID NO: 85127 - DNA, 954 bp, Artificial Sequence
  derived and/or modified sequence
atgggctatgatgtgacccgcttccagggagatgtggatgaggacctgatctgccccatctgcagcggcgtgctggaggagcctgtgcaggccccccactgtgagcacgccttctgcaatgcctgcatcacccagtggttcagccagcagcagacctgccctgtggacagatctgtggtgacagtggcccacctgcggcctgtgccccgcatcatgaggaacatgctgagcaagctgcagatcgcctgtgacaatgctgtgtttggctgcagcgctgtggtgcggctggacaacctgatgagccacctgagtgactgtgagcacaaccccaagaggcctgtgacctgtgagcagggctgcggcctggagatgcccaaggatgagctgcccaaccacaactgcatcaagcacctgcggtctgtggtgcagcagcagcagaccagaattgctgagctggagaagaccagcgctgagcacaagcaccagctggccgagcagaagagggacatccagctgctgaaggcctacatgagggccatccgctctgtgaaccccaacctgcagaacctggaggagaccatcgagtacaatgagatcctggagtgggtgaacagcctgcagcctgcccgggtgacccgctggggcggcatgatcagcaccccagatgctgtgctgcaggccgtcatcaagaggagcctggtggagagcggctgcccagccagcatcgtgaatgagctgattgaaaatgcccacgagaggtcctggccccagggcctggccaccctggagacccggcagatgaacagacgctactatgaaaattatgtggccaagagaattcctgggaagcaggccgtggtggtgatggcctgtgagaaccagcacatgggagatgacatggtgcaggagcccggcctggtgatgatctttgcccacggcgtggaggagatctag

SEQ ID NO: 85128 - DNA, 915 bp, Artificial Sequence
  derived and/or modified sequence
atgggctatgatgtgacccgcttccagggagatgtggatgaggacctgatctgccccatctgcagcggcgtgctggaggagcctgtgcaggccccccactgtgagcacgccttctgcaatgcctgcatcacccagtggttcagccagcagcagacctgccctgtgccccgcatcatgaggaacatgctgagcaagctgcagatcgcctgtgacaatgctgtgtttggctgcagcgctgtggtgcggctggacaacctgatgagccacctgagtgactgtgagcacaaccccaagaggcctgtgacctgtgagcagggctgcggcctggagatgcccaaggatgagctgcccaaccacaactgcatcaagcacctgcggtctgtggtgcagcagcagcagaccagaattgctgagctggagaagaccagcgctgagcacaagcaccagctggccgagcagaagagggacatccagctgctgaaggcctacatgagggccatccgctctgtgaaccccaacctgcagaacctggaggagaccatcgagtacaatgagatcctggagtgggtgaacagcctgcagcctgcccgggtgacccgctggggcggcatgatcagcaccccagatgctgtgctgcaggccgtcatcaagaggagcctggtggagagcggctgcccagccagcatcgtgaatgagctgattgaaaatgcccacgagaggtcctggccccagggcctggccaccctggagacccggcagatgaacagacgctactatgagaactacgtggccaagagaattcctgggaagcaggccgtggtggtgatggcctgtgagaaccagcacatgggagatgacatggtgcaggagcccggcctggtgatgatctttgcccatggagtggaggagatctag

SEQ ID NO: 85129 - DNA, 573 bp, Artificial Sequence
  derived and/or modified sequence
atgggctatgatgtgacccgcttccagggagatgtggatgaggacctgatctgccccatctgcagcggcgtgctggaggagcctgtgcaggccccccactgtgagcacgccttctgcaatgcctgcatcacccagtggttcagccagcagcagacctgccctgtggacagatctgtggtgacagtggcccacctgcggcctgtgccccgcatcatgaggaacatgctgagcaagctgcagatcgcctgtgacaatgctgtgtttggctgcagcgctgtggtgcggctggacaacctgatgagccacctgagtgactgtgagcacaaccccaagaggcctgtgacctgtgagcagggctgcggcctggagatgcccaaggatgagctgcccaaccacaactgcatcaagcacctgcggtctgtggtgcagcagcagcagaccagaattgctgagctggagaagaccagcgctgagcacaagcaccagctggccgagcagaagagggacatccagctgctgaaggcctacatgagggccatccgctctgtgaaccccaacctgcagaacctgtag

SEQ ID NO: 85130 - DNA, 606 bp, Artificial Sequence
  derived and/or modified sequence
atgggctatgatgtgacccgcttccagggagatgtggatgaggacctgatctgccccatctgcagcggcgtgctggaggagcctgtgcaggccccccactgtgagcacgccttctgcaatgcctgcatcacccagtggttcagccagcagcagacctgccctgtggacagatctgtggtgacagtggcccacctgcggcctgtgccccgcatcatgaggaacatgctgagcaagctgcagatcgcctgtgacaatgctgtgtttggctgcagcgctgtggtgcggctggacaacctgatgagccacctgagtgactgtgagcacaaccccaagaggcctgtgacctgtgagcagggctgcggcctggagatgcccaaggatgagctgcccaaccacaactgcatcaagcacctgcggtctgtggtgcagcagcagcagaccagaattgctgagctggagaagaccagcgctgagcacaagcaccagctggccgagcagaagagggacatccagctgctgaaggcctacatgagggccatccgctctgtgaaccccaacctgcagaacctggaggagaccatcgagtacaatgagatcctggagtag

SEQ ID NO: 85131 - DNA, 954 bp, Artificial Sequence
  derived and/or modified sequence
atgggctacgacgtgacccggttccagggcgacgtggacgaggacttaatctgccccatttgctccggggtgctcgaggagcctgtgcaggcgcctcactgcgaacatgcattctgcaacgcatgcattacccaatggttctctcagcagcagacttgtccagtggacaggtctgtcgttaccgtcgcgcatctccgaccagtgcctaggattatgcggaatatgctgagcaaactccaaattgcctgtgacaacgcagttttcggctgtagtgcggtggtccggctggacaatcttatgagtcacctgtccgactgcgaacataatcctaagaggcccgtgacctgcgagcaggggtgtggtctggaaatgcctaaggatgaactcccaaaccataattgtatcaaacatctacggtccgtggtgcaacagcagcagactagaatcgcggagctggagaagacttcggccgagcataaacaccaactggccgaacaaaaacgagatatacaactgctcaaggcttacatgcgggcaatccgatctgtgaaccctaacctccagaacctggaggaaactatagagtacaatgagatcctggaatgggtgaacagtttgcagcccgctcgagtcactaggtggggggggatgattagtaccccagatgcggtgttacaagctgtgattaaaagaagtctcgtggaatccgggtgccctgcttcgatcgtcaatgagttgattgaaaacgcgcatgagagatcatggccacaaggactcgctacattggagactcgccagatgaaccgacgttactacgagaattacgttgccaaaaggatccccggcaagcaggcagtggttgtgatggcatgcgaaaatcagcatatgggcgatgacatggtgcaggagcctggcctggtcatgattttcgctcacggcgtcgaggagatatag

SEQ ID NO: 85132 - DNA, 915 bp, Artificial Sequence
  derived and/or modified sequence
atgggctacgacgtgacccggttccagggcgacgtggacgaggacctgatttgcccaatctgctccggcgttctcgaagaaccggtgcaggcccctcattgtgagcacgccttttgtaatgcatgtatcacccagtggttttcccagcagcagacatgccctgtgcctcggatcatgaggaacatgctgtcgaaactgcagatcgcatgcgataatgcggtattcggttgcagcgccgtggtgcgattggataacctcatgagccacctgtcagactgtgaacataacccaaaacgtccggtgacctgcgagcaaggttgcggactcgaaatgcccaaggacgagctcccaaaccacaattgcataaaacacctgagaagcgtggtccagcagcagcagactaggattgcggagttagagaaaacttctgctgagcataaacatcagttagccgaacagaaaagagatatccaattactgaaagcctacatgcgcgcaatacgctcagtgaaccctaacttgcagaacctggaggagacaatcgagtataacgaaatcctcgagtgggtgaacagtctacagccagccagggtgacccgctggggagggatgatttcaacccccgatgccgtgctccaggctgtcattaaaaggtcactggtggagtcgggctgccccgcatccatcgttaatgagttgattgagaacgcccacgagaggtcttggccccaaggtcttgcaacccttgagacacgccagatgaaccgcaggtactatgagaattatgtggccaagcggataccaggtaagcaggcagtggtagtgatggcctgtgaaaatcagcacatgggtgatgacatggtgcaggaacccgggttggtgatgattttcgcacatggggttgaagagatatag

SEQ ID NO: 85133 - DNA, 573 bp, Artificial Sequence
  derived and/or modified sequence
atgggctacgacgtgacccggttccagggcgacgtggacgaggaccttatctgccctatctgctccggcgtgctggaggagcctgtgcaggcgccgcactgcgaacatgcattttgcaatgcttgcatcacacagtggttttcgcagcagcagacctgccccgtggatagatcagttgtcaccgtggcccatctgcgcccggtgcctaggatcatgcgcaacatgctatccaaattgcagattgcatgtgacaatgcagtatttgggtgcagcgccgtcgtgaggcttgacaatctgatgtcacacctgagtgattgtgaacataacccaaagcgtcctgtaacatgtgaacagggttgtggccttgaaatgccaaaggacgagttgccaaatcacaattgcatcaaacatctgcgttctgtggtgcagcagcaacagactaggatcgcagagcttgagaagactagtgccgaacacaagcaccaactggccgagcagaagagagacattcagttgttgaaggcgtacatgcgggccatccgctctgtgaatcccaatttgcaaaatttgtag

SEQ ID NO: 85134 - DNA, 606 bp, Artificial Sequence
  derived and/or modified sequence
atgggctacgacgtgacccggttccagggcgacgtggacgaggacctgatatgtcctatttgtagtggcgtgttagaggaacctgtccaagcccctcattgtgagcacgccttttgcaatgcatgcatcacacagtggtttagccagcagcaaacctgtccagtggacagaagcgtcgtgacagtagcccacctgcggcccgttccacggattatgaggaacatgctgagcaaactccagattgcatgtgataatgctgtttttggttgcagtgcagtagttcgactggacaatctcatgagtcacttgagcgactgtgagcataacccaaaaagacccgtgacctgtgaacaaggctgcgggctggagatgcccaaagatgaactgcccaatcacaattgtatcaagcacctccgtagtgtcgtgcagcaacagcaaacccgaatagcagagttggagaaaaccagcgctgagcacaaacaccagctggcagagcaaaaacgagatatccagctcctgaaggcttatatgagggctatcagaagtgtaaaccctaacctacaaaatctggaagagacaatcgaatacaatgagattctggaatag

SEQ ID NO: 85135 - DNA, 954 bp, Artificial Sequence
  derived and/or modified sequence
atgggctacgacgtgacccggttccagggcgacgtggacgaggacctcatatgcccgatttgctctggagttctagaggagccagtgcaggccccacactgcgaacatgctttttgcaatgcatgcattacccagtggttcagccaacaacaaacctgtcccgtagatcgctccgtggttaccgttgctcatctacggccggtaccccgcataatgagaaacatgctgtccaagctccagatcgcctgtgacaatgccgtgttcgggtgctctgcagttgtgcgactggacaatttgatgtcgcatctgtctgattgcgaacacaacccaaagcgacccgtgacatgcgagcagggatgtgggttggagatgccaaaagatgagctgcctaaccataactgtattaaacacctgagaagcgtggtccagcaacagcaaaccagaatagccgaactggagaaaaccagtgcagagcacaagcaccagttggcggagcagaagcgcgacatccaactattaaaagcctatatgcgcgcgatccgttccgtaaatcccaatttgcagaaccttgaagagactattgagtataatgaaatcttagagtgggttaatagtctgcagcctgctcgggtgacccggtgggggggaatgatttccacaccagacgcagtactccaagcagtcatcaaaaggtcactcgtcgagtccgggtgtcccgccagcatcgtaaatgagcttattgagaatgcccatgagcgatcctggccacagggactggcaactctcgaaacgcggcaaatgaatagacgttactacgagaattacgttgccaaacggatccctgggaagcaggcagtggtggtcatggcttgcgaaaaccagcacatgggggacgacatggtgcaggaacccggccttgttatgattttcgcccacggtgtcgaggagatttag

SEQ ID NO: 85136 - DNA, 954 bp, Artificial Sequence
  derived and/or modified sequence
atgggttacgacgtgaccagattccagggtgacgtggatgaggatcttatttgccccatctgcagtggggtacttgaagagcccgtgcaagccccacactgtgaacacgcattttgtaacgcttgtatcacacagtggttcagccagcagcagacctgtcccgtggacagaagcgtggttacagttgcgcacctgaggccggtgccaagaattatgcgaaacatgctcagcaaactccagatcgcctgtgacaatgcggtgttcggatgtagcgcggtggtgcgcctggacaacctaatgtcccacctatcggactgtgaacataatcctaagcgccctgttacttgtgaacaaggttgcggcctggagatgcccaaggacgaattgcccaaccacaactgcatcaagcatctacgttctgtggtgcagcaacagcaaacccgcatagcagagttggagaagacctcggctgagcataagcaccaactcgccgagcaaaagcgggacatccagttattgaaggcttacatgcgggcaattcgcagcgtcaaccccaaccttcagaatctggaagaaacaattgagtacaatgagattctggaatgggtgaatagcctccaaccggcaagagtgactcggtgggggggaatgatatctacccctgatgctgtcttgcaagctgtgatcaagcgttctctcgtggaaagtggatgccctgcctccatagtgaacgagttaattgagaatgcccacgagcggagttggccacaggggctcgcaacgctggagacaaggcagatgaaccgtaggtattacgagaattacgtcgctaagcgaattcccggaaagcaggccgtggtcgtaatggcctgtgagaaccagcatatgggagatgatatggtgcaggagccagggctggttatgatatttgcccatggggtcgaggagatctag

SEQ ID NO: 85137 - DNA, 915 bp, Artificial Sequence
  derived and/or modified sequence
atgggttatgatgttacacggttccagggggatgtggatgaagacttgatctgtcctatttgttcaggagtgctcgaagaacctgtgcaggctccccactgtgagcatgccttctgtaatgcgtgcatcacccagtggttttctcagcagcaaacatgcccggtccccaggattatgaggaacatgctgtctaagctgcagattgcatgtgacaatgcagtgtttggttgtagtgcagttgtgaggctggataatctgatgagccatctctcagactgtgagcataatcccaaaaggcccgtgacctgcgagcagggctgcggtcttgaaatgcccaaggacgagctgcccaatcacaactgcataaagcacctgagaagtgtggtgcagcagcagcaaacccggatcgccgaacttgagaagacctcggctgagcataagcaccaactcgcggagcagaagagggatatacagttgctcaaggcttatatgagggctattagaagtgtcaacccaaatctccaaaacctagaggagaccatcgaatacaacgaaatactggagtgggttaacagtttgcagccagcaagagtaacgcgctggggcggaatgatcagcactcccgacgctgttctgcaggcggtaattaagcggagtttagtagaatctgggtgcccagcttctatagttaacgaactgatcgaaaacgctcatgaaagaagttggccccagggtctcgccaccttggagaccagacaaatgaacaggcgctactatgagaactacgtggcaaagcggattccaggaaaacaggctgtggtcgtgatggcttgtgagaaccaacatatgggcgacgatatggtccaggagcctggactagtgatgattttcgctcacggggtggaagagatctag

SEQ ID NO: 85138 - DNA, 573 bp, Artificial Sequence
  derived and/or modified sequence
atgggatatgatgttacccgatttcagggggacgtcgatgaggacctgatctgtcctatctgtagcggcgtcttagaagagcctgtgcaagcccctcactgtgagcacgccttctgcaatgcttgtatcacccaatggttcagccagcagcagacctgtccagttgatcggagcgtagtgactgtcgcacatcttaggccagtccctaggatcatgaggaatatgctgagcaagctgcaaatcgcgtgtgacaacgccgtctttggatgttcagcagtggtgcgcttggacaatcttatgtcccacctttctgactgcgagcacaatccaaaaaggcctgtgacttgtgagcaggggtgtgggttggagatgcccaaggatgagctgcctaatcataactgtatcaagcacctgaggtctgtggtccaacagcagcagactcgcatagcagagctggagaaaactagcgcggagcataagcaccagcttgccgagcagaaaagagacatacaactgctcaaggcatatatgcgggctatccggagtgtgaatcctaatttgcaaaatctttag

SEQ ID NO: 85139 - DNA, 606 bp, Artificial Sequence
  derived and/or modified sequence
atgggatacgacgtgaccagatttcaaggcgatgtggacgaggaccttatttgcccaatttgctctggagttctggaggagcctgtacaggcccctcattgcgaacatgctttttgtaacgcttgcataacacagtggttctcacagcaacaaacttgtcctgtagatcgatccgtggtgacagtggcgcatctcaggcctgtgccccgtattatgagaaacatgcttagcaagttacagatcgcttgtgacaacgctgtttttggctgtagtgcggtcgttaggctcgacaacctgatgagccacctgtctgactgtgagcacaatcctaaaagacccgtaacatgcgaacaggggtgcgggctagagatgcctaaggacgaattgccgaatcacaactgcattaaacacctccgctcagtggtccagcagcagcagacacgcatcgccgagttagaaaagactagtgccgaacacaaacatcagcttgccgaacagaagagagacatccagctgctcaaagcctacatgcgggctattcgatctgtgaaccctaatcttcagaatctcgaggagactattgaatataatgagatactagagtag

SEQ ID NO: 85140 - DNA, 954 bp, Artificial Sequence
  derived and/or modified sequence
atgggatacgatgtaaccaggttccagggggatgttgacgaagatcttatttgtcccatttgttctggcgtgctagaggagcccgtgcaggcccctcactgcgagcatgcattctgtaacgcttgcattacccaatggttcagtcaacagcagacctgccctgtcgatcggagcgtagtgaccgtagctcacctcaggcccgtgcctaggataatgcggaacatgctctccaagctccaaatcgcctgcgataatgccgtgtttggctgcagcgctgttgtgcgtctggacaaccttatgtcccacctgagtgactgtgaacataatcctaaaagaccagtcacgtgcgagcaaggctgtggtttggaaatgcctaaggatgagctgcctaatcacaactgcattaagcacttgcgtagcgtagttcagcagcagcaaacgagaatcgctgagctggagaagacatccgctgagcacaagcaccagctggccgagcaaaagcgcgacatacagcttctgaaggcttatatgcgggcaataaggagcgtcaatcccaatctgcagaacttggaagagactattgagtataacgagattctggaatgggtcaacagcctgcagccagccagagtgaccaggtggggcggaatgatttccactccagatgccgtgctgcaggccgtgatcaaaagatccttagtggagagcggttgccctgcgagtattgtcaacgagttgattgagaacgctcatgagcggagctggccacaggggttggccacactagaaacccgccaaatgaacagacgctattacgagaattacgttgccaaaagaattccaggcaagcaggctgtcgtcgtgatggcctgcgagaatcagcacatgggcgacgatatggtgcaagaaccaggcttggtgatgatatttgcacatggagtcgaagaaatctag

SEQ ID NO: 85141 - DNA, 3270 bp, Artificial Sequence
  derived and/or modified sequence
tctgaggcggcgacgagtggtaggagtcttctttcccctccttcccctttcccttcccttcccgggagaggctgggacccggcaccagggcagtactgtggccgctgcggcctcagctccgactgggtcaggttgcggagactccaggccgcttccagggcgagtactcctgattgtgacatcacattcatcccctgggcgatggagcttgtcactgggaaggaatactcagtcggagaatagccaacaagatgggttactgggagaatctcttcagtggcactgagtggaggcatcagggggttggagccttgtgaacagggaacctgccccccaacacttggaaggacctgggtttcagtgatgagacatggggtatgatgtaacccgtttccagggggatgttgacgaagatcttatctgccctatttgcagtggagtcttggaggagccagtacaggcacctcattgtgaacatgctttctgcaacgcctgcatcacccagtggttctctcagcaacagacatgtccagtggaccgtagtgttgtgacggtcgcccatctgcgcccagtacctcggatcatgcggaacatgttgtcaaagctgcagattgcctgtgacaacgctgtgttcggctgtagtgccgttgtccggcttgacaacctcatgtctcacctcagcgactgtgagcacaacccgaagcggcctgtgacctgtgaacagggctgtggcctggagatgcccaaagatgagctgcccaaccataactgcattaagcacctgcgctcagtggtacagcagcagcagacacgcatcgcagagctggagaagacgtcagctgaacacaaacaccagctggcggagcagaagcgagacatccagctgctaaaggcatacatgcgtgcaatccgcagtgtcaaccccaaccttcagaacctggaggagacaattgaatacaacgagatcctagagtgggtgaactcccttcagccagcaagagtgacccgctggggagggatgatctcgactcctgatgctgtgctccaggctgtaatcaagcgctccctggtggagagtggctgtcctgcttctattgtcaacgagctgattgaaaatgcccacgagcgtagctggccccagggtctggccacactagagactagacagatgaaccgacgctactatgagaactacgtggccaagcgcatccctggcaagcaggctgttgtcgtgatggcctgtgagaaccagcacatgggggatgacatggtgcaagagccaggccttgtcatgatatttgcgcatggcgtggaagagatataagagaactcgactggctatcaggaagagatggaaatcagaaaatcccatcactccagcagctgggacctgagtcctacccaccattcttaatactgtggcttatacctgagccacacatctccctgcccttctggcactgaagggccttggggtagtttgctcagcctttcaggtgggaaacccagatttcctccctttgccatattcccctaaaatgtctataaattatcagtctgggtgggaaagcccccacctccatccattttcctgcttagggtccctggttccagttattttcagaaagcacaaagagattcaatttccctggaggatcaggacagaggaaggaatctctaatcgtccctctcctccaaaaccagggaatcagagcagtcaggcctgttgactctaagcagcagacatcctgaagaaatggtaagggtggagccaaatctctagaaataagtagtgaggccgttaattggccatcactgatggcccttagggaaagactggacctctgtgccaagcagtatccctgttcagcccaccttaaaggtgtaggcacccactgggtctaccagtatgcaggttgggatactgaaaatttccagatgagctcttctttcctacaagttttcataattagggaatgccagggtttagggtaggggttaatctgttgggggttgatgtgtttagcaagaagctactcctagcttttgctaaaatatggttggcactgcctcttgtggcacaggccataattgttccatagacccctctctagccctgtgactgtagttagttactttgataattttctttggccattgtttgtttatatttcacaaactccacctactgcccccccccctcttttttttaagaatggcctgatcatggctatctcagccacattgttggcaatttaatttatttacttcctttttttttttttaagaaaggaaaaaagaaaaaaaaatcaaacttgaaacttttcttttgatgttcctattgtgggggttctggatagggtgggacagggatgggggtgtgttttatattttttccttttcagcacaacctttggctttaatataggaagagccaagggagtcctcggctgaacttacgatatctgccccaaacctctgtaaccccaactgaaatgaggagcttcctctcttcctgtgaaggatatgacagtccagcatcgatgcctgtgccctctggaaaaatttcctcctagcccttccagggccttatcataaaactctggatttagagtattcattttgaaggcaactcccccttccccaagtttccttggagctgtatagctgggttctaagcttcaccatgcaaatcagaaattttatctctaagtacaggctgtgccgtgtctcacccacacccccctggggacttcagttccatttcaggttacctggggtataccttgatccctagagtgactggcagagtaagagaaggggagagataataggtgtgattattttaatatggaggtgggagtgtggttggagatagaaaggctcctccccaccatgtaatggcttcctctcagaattttattccaggctagcttgctgcaggtctgggtagttggatcatggctccactgggattggggtggaaagcttgaggggagtagggttccagctctgggacattgtgctcaggaatttgaaaacgctgctatacttactctggttactacatttcttccactcccctttcccctacctgccttaaccaaggctcatactgtcctgtccttaccctcagatggagccaggaagctcagtgaaaggcttccctaccctttgcactagtgtctctgcaggttgctggttgtgttgtatgtgctgttccatggtgttgactgcactaataataaaccttttactcaactctctaaa

SEQ ID NO: 85142 - DNA, 2452 bp, Artificial Sequence
  derived and/or modified sequence
acgagtggtaggagtcttctttcccctccttcccctttcccttcccttcccgggagaggctgggacccggcaccagggcagtactgtggccgctgcggcctcagctccgactgggtcaggttgcggagactccaggccgcttccagggcgagtactcctgattgtgacatcacattcatcccctgggcgatggagcttgtcactgggaaggaatactcagtcggagaatagccaacaagatgggttactgggagaatctcttcagtggcactgagtggaggcatcagggggttggagccttgtgaacagggaacctgccccccaacacttggaaggacctgggtttcagtgatgagacatggggtatgatgtaacccgtttccagggggatgttgacgaagatcttatctgccctatttgcagtggagtcttggaggagccagtacagaccagcttttgatacagccatgcactctgcattttgatgtgaaagctgccaccttcaataggtcatttctctgccagccttgccagaccagagtcagttgtatcatcctggggcaagtatgaggagaagctcacgattaccaggcacctcattgtgaacatgctttctgcaacgcctgcatcacccagtggttctctcagcaacagacatgtccagtggaccgtagtgttgtgacggtcgcccatctgcgcccagtacctcggatcatgcggaacatgttgtcaaagctgcagattgcctgtgacaacgctgtgttcggctgtagtgccgttgtccggcttgacaacctcatgtctcacctcagcgactgtgagcacaacccgaagcggcctgtgacctgtgaacagggctgtggcctggagatgcccaaagatgagctgcccaaccataactgcattaagcacctgcgctcagtggtacagcagcagcagacacgcatcgcagagctggagaagacgtcagctgaacacaaacaccagctggcggagcagaagcgagacatccagctgctaaaggcatacatgcgtgcaatccgcagtgtcaaccccaaccttcagaacctggaggagacaattgaatacaacgagatcctagagtgggtgaactcccttcagccagcaagagtgacccgctggggagggatgatctcgactcctgatgctgtgctccaggctgtaatcaagcgctccctggtggagagtggctgtcctgcttctattgtcaacgagctgattgaaaatgcccacgagcgtagctggccccagggtctggccacactagagactagacagatgaaccgacgctactatgagaactacgtggccaagcgcatccctggcaagcaggctgttgtcgtgatggcctgtgagaaccagcacatgggggatgacatggtgcaagagccaggccttgtcatgatatttgcgcatggcgtggaagagatataagagaactcgactggctatcaggaagagatggaaatcagaaaatcccatcactccagcagctgggacctgagtcctacccaccattcttaatactgtggcttatacctgagccacacatctccctgcccttctggcactgaagggccttggggtagtttgctcagcctttcaggtgggaaacccagatttcctccctttgccatattcccctaaaatgtctataaattatcagtctgggtgggaaagcccccacctccatccattttcctgcttagggtccctggttccagttattttcagaaagcacaaagagattcaatttccctggaggatcaggacagaggaaggaatctctaatcgtccctctcctccaaaaccagggaatcagagcagtcaggcctgttgactctaagcagcagacatcctgaagaaatggtaagggtggagccaaatctctagaaataagtagtgaggccgttaattggccatcactgatggcccttagggaaagactggacctctgtgccaagcagtatccctgttcagcccaccttaaaggtgtaggcacccactgggtctaccagtatgcaggttgggatactgaaaatttccagatgagctcttctttcctacaagttttcataattagggaatgccagggtttagggtaggggttaatctgttgggggttgatgtgtttagcaagaagctactcctagcttttgctaaaatatggttggcactgcctcttgtggcacaggccataattgttccatagacccctctctagccctgtgactgtagttagttactttgataattttctttggccattgtttgtttatatttcacaaactccacctactgcccccccccctcttttttttaagaatggcctgatcatggctatctcagccacattgttggcaatttaatttatttacttcctttttttttttttaagaaaggaaaaaagaaaaaaaaatcaaacttgaaa

SEQ ID NO: 85143 - DNA, 1278 bp, Artificial Sequence
  derived and/or modified sequence
gcgtagcagcggtgggcggggcaaaggatccgtctgaggcggcgacgagtgagtactcctgattgtgacatcacattcatcccctgggcgatggagcttgtcactgggaaggaatactcagtcggagaatagccaacaagatgggttactgggagaatctcttcagtggcactgagtggaggcatcagggggttggagccttgtgaacagggaacctgccccccaacacttggaaggacctgggtttcagtgatgagacatggggtatgatgtaacccgtttccagggggatgttgacgaagatcttatctgccctatttgcagtggagtcttggaggagccagtacaggcacctcattgtgaacatgctttctgcaacgcctgcatcacccagtggttctctcagcaacagacatgtccagtacctcggatcatgcggaacatgttgtcaaagctgcagattgcctgtgacaacgctgtgttcggctgtagtgccgttgtccggcttgacaacctcatgtctcacctcagcgactgtgagcacaacccgaagcggcctgtgacctgtgaacagggctgtggcctggagatgcccaaagatgagctgcccaaccataactgcattaagcacctgcgctcagtggtacagcagcagcagacacgcatcgcagagctggagaagacgtcagctgaacacaaacaccagctggcggagcagaagcgagacatccagctgctaaaggcatacatgcgtgcaatccgcagtgtcaaccccaaccttcagaacctggaggagacaattgaatacaacgagatcctagagtgggtgaactcccttcagccagcaagagtgacccgctggggagggatgatctcgactcctgatgctgtgctccaggctgtaatcaagcgctccctggtggagagtggctgtcctgcttctattgtcaacgagctgattgaaaatgcccacgagcgtagctggccccagggtctggccacactagagactagacagatgaaccgacgctactatgagaactacgtggccaagcgcatccctggcaagcaggctgttgtcgtgatggcctgtgagaaccagcacatgggggatgacatggtgcaagagccaggccttgtcatgatatttgcgcatggcgtggaagagatataagagaactcgactggctatcaggaagagatggaaatcagaaaatcccatcactccagcagctgggacctgagtcctacccaccattcttaatactgtggcttata

SEQ ID NO: 85144 - DNA, 890 bp, Artificial Sequence
  derived and/or modified sequence
gatgtcccaggggtattggggcggggggttgaaataactggggttcaggaggagggatggtggtagagataaaaatgtgagaagggagcagcactggcgaggagtcgggagagtactcctgattgtgacatcacattcatcccctgggcgatggagcttgtcactgggaaggaatactcagtcggagaatagccaacaagatgggttactgggagaatctcttcagtggcactgagtggaggcatcagggggttggagccttgtgaacagggaacctgccccccaacacttggaaggacctgggtttcagtgatgagacatggggtatgatgtaacccgtttccagggggatgttgacgaagatcttatctgccctatttgcagtggagtcttggaggagccagtacaggcacctcattgtgaacatgctttctgcaacgcctgcatcacccagtggttctctcagcaacagacatgtccagtggaccgtagtgttgtgacggtcgcccatctgcgcccagtacctcggatcatgcggaacatgttgtcaaagctgcagattgcctgtgacaacgctgtgttcggctgtagtgccgttgtccggcttgacaacctcatgtctcacctcagcgactgtgagcacaacccgaagcggcctgtgacctgtgaacagggctgtggcctggagatgcccaaagatgagctgcccaaccataactgcattaagcacctgcgctcagtggtacagcagcagcagacacgcatcgcagagctggagaagacgtcagctgaacacaaacaccagctggcggagcagaagcgagacatccagctgctaaaggcatacatgcgtgcaatccgcagtgtcaaccccaaccttcagaacctgg

SEQ ID NO: 85145 - DNA, 582 bp, Artificial Sequence
  derived and/or modified sequence
gtctgaggcggcgacgagtggcacctcattgtgaacatgctttctgcaacgcctgcatcacccagtggttctctcagcaacagacatgtccagtggaccgtagtgttgtgacggtcgcccatctgcgcccagtacctcggatcatgcggaacatgttgtcaaagctgcagattgcctgtgacaacgctgtgttcggctgtagtgccgttgtccggcttgacaacctcatgtctcacctcagcgactgtgagcacaacccgaagcggcctgtgacctgtgaacagggctgtggcctggagatgcccaaagatgagctgcccaaccataactgcattaagcacctgcgctcagtggtacagcagcagcagacacgcatcgcagagctggagaagacgtcagctgaacacaaacaccagctggcggagcagaagcgagacatccagctgctaaaggcatacatgcgtgcaatccgcagtgtcaaccccaaccttcagaacctggaggagacaattgaatacaacgagatcctagagtgggtgaactcccttcagccagcaagagtgacccgctggggagggatga

SEQ ID NO: 85146 - DNA, 716 bp, Artificial Sequence
  derived and/or modified sequence
ccggcaccagggcagtactgtggccgctgcggcctcagctccgactgggtcaggttgcggagactccaggccgcttccagggcggacctgggtttcagtgatgagacatggggtatgatgtaacccgtttccagggggatgttgacgaagatcttatctgccctatttgcagtggagtcttggaggagccagtacaggcacctcattgtgaacatgctttctgcaacgcctgcatcacccagtggttctctcagcaacagacatgtccagtggaccgtagtgttgtgacggtcgcccatctgcgcccagtacctcggatcatgcggaacatgttgtcaaagctgcagattgcctgtgacaacgctgtgttcggctgtagtgccgttgtccggcttgacaacctcatgtctcacctcagcgactgtgagcacaacccgaagcggcctgtgacctgtgaacagggctgtggcctggagatgcccaaagatgagctgcccaaccataactgcattaagcacctgcgctcagtggtacagcagcagcagacacgcatcgcagagctggagaagacgtcagctgaacacaaacaccagctggcggagcagaagcgagacatccagctgctaaaggcatacatgcgtgcaatccgcagtgtcaaccccaaccttcagaacctggaggagacaattgaatacaacgagatcctagagtgagtg

SEQ ID NO: 85147 - DNA, 1193 bp, Artificial Sequence
  derived and/or modified sequence
gcaaaggatccgtctgaggcggcgacgagtgagtactcctgattgtgacatcacattcatcccctgggcgatggagcttgtcactgggaaggaatactcagtcggagaatagccaacaagatgggttactgggagaatctcttcagtggcactgagtggaggcatcagggggttggagccttgtgaacagggaacctgccccccaacacttggaaggacctgggtttcagtgatgagacatggggtatgatgtaacccgtttccagggggatgttgacgaagatcttatctgccctatttgcagtggagtcttggaggagccagtacaggcacctcattgtgaacatgctttctgcaacgcctgcatcacccagtggttctctcagcaacagacatgtccagtggaccgtagtgttgtgacggtcgcccatctgcgcccagtacctcggatcatgcggaacatgttgtcaaagctgcagattgcctgtgacaacgctgtgttcggctgtagtgccgttgtccggcttgacaacctcatgtctcacctcagcgactgtgagcacaacccgaagcggcctgtgacctgtgaacagggctgtggcctggagatgcccaaagatgagctgcccaaccataactgcattaagcacctgcgctcagtggtacagcagcagcagacacgcatcgcagagctggagaagacgtcagctgaacacaaacaccagctggcggagcagaagcgagacatccagctgctaaaggcatacatgcgtgcaatccgcagtgtcaaccccaaccttcagaacctggaggagacaattgaatacaacgagatcctagagtgggtgaactcccttcagccagcaagagtgacccgctggggagggatgatctcgactcctgatgctgtgctccaggctgtaatcaagcgctccctggtggagagtggctgtcctgcttctattgtcaacgagctgattgaaaatgcccacgagcgtagctggccccagggtctggccacactagagactagacagatgaaccgacgctactatgagaactacgtggccaagcgcatccctggcaagcaggctgttgtcgtgatggcctgtgagaaccagcacatgggggatgacatggtgcaagagccaggccttgtcatgatatttgcgcatggcgtggaagagatataa

SEQ ID NO: 85148 - DNA, 609 bp, Artificial Sequence
  derived and/or modified sequence
atggggtcaaaagagccgaacgccggccaccgcgctattgccgaatgtgagactaggcttggtaagcagggccggcgggtcgtggttattacccaaaacatagatgaactgcaccggaaagccgggacaaaaaatctgctggagatacacgggtctctgtttaaaacccgctgtacatcctgtggagtggtggccgagaactacaagtctcccatatgtcccgcacttagcggcaaaggcgctccggagcctggcactcaggatgcatccatacctgttgaaaaactgcctaggtgcgaagaggctggatgcggaggactgttgcggccccacgtggtctggttcggagagaatctggatcctgctatcctggaggaggtggatagagagctcgcacattgcgacctctgcctggtcgtgggcacctcttcagtggtttatcccgcagcaatgttcgccccacaagtggctgccagaggtgtgcctgttgctgaatttaacaccgaaacaacacccgccacaaaccggttcaggtttcactttcaaggcccatgcgggaccaccctgcccgaagcgctggcttgccacgagaatgaaacagtttcttag

SEQ ID NO: 85149 - DNA, 609 bp, Artificial Sequence
  derived and/or modified sequence
atgggcagcaaggagcccaatgccggccaccgggccatcgcagaatgtgagacccggctgggcaagcagggcagaagagtggtggtgatcacccagaacattgatgagctgcacaggaaggccggcaccaagaacctgctggagatccacggcagcctcttcaagacccgctgcaccagctgtggggtggtggccgagaactacaagagccccatctgcccagccctgtctggaaaaggagcccctgagcccggcacccaggatgccagcatccctgtggagaagctgccccgctgtgaggaggccggctgcggcggcctgctgcggccccacgtggtgtggtttggagagaacctggaccctgccatcctggaggaggtggaccgggagctggcccactgtgacctgtgcctggtggtgggcaccagctctgtggtgtacccagctgccatgtttgccccccaggtggccgcccggggcgtgcctgtggccgagttcaacacagagaccaccccagccaccaaccgcttccgcttccacttccagggcccctgtggcaccaccctgcctgaggccctggcctgccatgaaaatgagaccgtgtcctag

SEQ ID NO: 85150 - DNA, 609 bp, Artificial Sequence
  derived and/or modified sequence
atgggcagcaaggagcccaacgccggccaccgggccatcgccgagtgcgaaacacgcttgggcaaacagggtcgtagagtcgtggtgataactcagaacattgatgagctgcatcggaaggcaggcacaaagaatcttctggagatccatggctccctgttcaagactcggtgtacctcctgtggagtggtggcggagaactataagtcacccatttgccccgctctctccggcaagggagcacctgagccggggacccaggacgcgagtatccccgtagaaaaactccctagatgtgaagaggctggttgcggtggcctgctgcgccctcacgtggtgtggtttggggagaatctcgaccccgccatcctagaagaggttgaccgggagctcgcgcactgtgatctgtgcctggtagttgggacttccagcgtggtgtacccagcagctatgtttgccccccaggtggccgcacggggagtgcccgtagcggagttcaacacagagacaactcccgcgaccaatcgatttcgtttccattttcagggaccatgcggtaccactctgccggaggctctggcatgtcacgagaacgagactgtgagctag

SEQ ID NO: 85151 - DNA, 609 bp, Artificial Sequence
  derived and/or modified sequence
atgggatcgaaggaacctaatgctggccatagagccatcgcagagtgtgaaacgcggctaggcaagcagggacgccgtgtggtggtcatcacacaaaacattgatgaactccaccgcaaagcaggcacaaagaacctgctagaaatacatggcagcctatttaagacccgatgcacttcctgcggagtggtggcggagaactataagagtcctatatgcccagccctctcgggaaaaggggcaccagagcctggcacacaggacgcaagcatccccgtggagaagctgccacgttgtgaagaagctggatgtggcggtctcctgcggccacatgtggtgtggttcggcgaaaacctggaccctgcgattctcgaggaagttgaccgcgagctggcacactgtgacttgtgcttggttgtcggtacaagcagcgtggtgtatcccgcagctatgttcgccccacaagtcgccgctaggggtgtaccagtagctgaatttaacacagaaacaactcccgcaacaaaccgcttccgattccatttccaaggaccgtgcggtacaacactgcctgaagcactggcatgtcacgagaatgaaacggtgagttag

SEQ ID NO: 85152 - DNA, 609 bp, Artificial Sequence
  derived and/or modified sequence
atgggcagcaaggagcccaacgccggccacagagccatcgccgagtgcgagaccagactgggcaagcagggcagaagagtggtggtgatcacccagaacatcgacgagctgcacagaaaggccggcaccaagaacctgctggagatccacggcagcctgttcaagaccagatgcaccagctgcggcgtggtggccgagaactacaagagccccatctgccccgccctgagcggcaagggcgcccccgagcccggcacccaggacgccagcatccccgtggagaagctgcccagatgcgaggaggccggctgcggcggcctgctgagaccccacgtggtgtggttcggcgagaacctggaccccgccatcctggaggaggtggacagagagctggcccactgcgacctgtgcctggtggtgggcaccagcagcgtggtgtaccccgccgccatgttcgccccccaggtggccgccagaggcgtgcccgtggccgagttcaacaccgagaccacccccgccaccaacagattcagattccacttccagggcccctgcggcaccaccctgcccgaggccctggcctgccacgagaacgagaccgtgagctag

SEQ ID NO: 85153 - protein, 326 aa, Artificial Sequence
  derived and/or modified sequence
MEHFDASLSTYFKALLGPRDTRVKGWFLLDNYIPTFICSVIYLLIVWLGPKYMRNKQPFSCRGILVVYNLGLTLLSLYMFCESKREQPRRSACASRTDPSTQQQLPENRLVTGVWEGKYNFFCQGTRTAGESDMKIIRVLWWYYFSKLIEFMDTFFFILRKNNHQITVLHVYHHASMLNIWWFVMNWVPCGHSYFGATLNSFIHVLMYSYYGLSSVPSMRPYLWWKKYITQGQLLQFVLTIIQTSCGVIWPCTFPLGWLYFQIGYMISLIALFTNFYIQTYNKKGASRRKDHLKDHQNGSMAAVNGHTNSFSPLENNVKPRKLRKD

SEQ ID NO: 85154 - DNA, 981 bp, Artificial Sequence
  derived and/or modified sequence
atggagcactttgacgccagtctttcgacttattttaaggccctgctcggtccgagggacactagagttaagggttggttcctgctggataattacatacccacctttatctgcagcgtgatttatcttctcatagtctggctgggccctaagtatatgagaaataaacagccctttagctgtcgcggaatactggtggtgtacaatctgggacttacacttttgagcctctatatgttctgcgagtccaagcgtgagcagccaaggcggagtgcctgtgcctcgcgtacagatcctagcacacagcaacaacttccagaaaatagactggtgacgggggtctgggagggaaaatataacttcttttgtcagggtacaagaacagcaggtgagagcgatatgaaaattattcgggtcctctggtggtactacttttccaagctgatcgaattcatggacacatttttcttcatcttgcgcaagaacaaccatcagatcacagtgctccatgtgtaccaccatgcttccatgctgaacatctggtggtttgtcatgaactgggtgccatgcggtcattcctattttggcgcaacactaaattccttcatccacgtgctgatgtactcatactacggcttgagtagcgtgcccagtatgcgtccctatctttggtggaagaagtatatcacgcaaggccagctgctgcagtttgtgttaacaataattcagacatcttgtggcgttatttggccctgtacatttcctctgggctggctttactttcagataggctatatgatctcactgatagccctgtttaccaacttttatatacagacttataacaaaaaaggggctagccgcaggaaggatcatctcaaagatcaccagaacggctcaatggctgctgtgaatggccatacaaacagcttctctcccctagagaacaatgtgaagccccggaagcttcgtaaagactag

SEQ ID NO: 85155 - DNA, 981 bp, Artificial Sequence
  derived and/or modified sequence
atggagcactttgatgccagcctgagcacctacttcaaggccctgctgggcccccgggacaccagggtgaagggctggttcctgctggacaactacatccccaccttcatctgcagcgtcatctacctgctgattgtgtggctgggccccaagtacatgaggaacaagcagcccttcagctgccggggcatcctggtggtgtacaacctgggcctgaccctgctgagcctgtacatgttctgtgagagcaagcgggagcagcccaggagaagtgcctgtgccagcaggacagaccccagcacccagcagcagctgcctgaaaatcggctggtgactggagtgtgggagggcaagtacaacttcttctgccagggcaccaggacagctggggagagtgacatgaagatcatccgggtgctgtggtggtactacttcagcaagctgattgagttcatggacaccttcttcttcatcctgaggaagaacaaccaccagatcaccgtgctgcacgtgtaccaccacgcctccatgctgaacatctggtggtttgtgatgaactgggtgccctgtggccacagctactttggagccaccctgaacagcttcatccacgtgctgatgtacagctactacggcctgagctctgtgcccagcatgaggccctacctgtggtggaagaagtacatcacccagggccagctgctgcagtttgtgctgaccatcatccagaccagctgtggggtcatctggccctgcaccttccccctgggctggctgtacttccagatcggctacatgatcagcctcatcgccctcttcaccaacttctacatccagacctacaacaagaagggggccagcaggaggaaggaccacctgaaggaccaccagaatggctccatggctgctgtgaatggccacaccaacagcttcagccccctggagaacaacgtgaagcccaggaagctgaggaaggactag

SEQ ID NO: 85156 - DNA, 981 bp, Artificial Sequence
  derived and/or modified sequence
atggagcacttcgacgccagcctgagcacctacttcaaggccctgctgggccccagggacacacgcgtaaaggggtggttcctgcttgacaactacattccgacctttatctgcagtgttatttatttgctgatcgtatggcttgggccaaaatatatgcgaaataaacagcccttttcgtgtagaggtattctggtggtgtacaatttgggactgacactattgagcctctatatgttctgcgaaagcaaacgggaacagccgcgcaggtcagcttgtgcctccagaactgacccatcaacacagcagcagttaccagagaaccgacttgtaaccggagtgtgggagggtaagtataacttcttctgccaaggcacaagaactgcgggagagtccgacatgaagattatccgcgtcttatggtggtactattttagtaaattgattgagtttatggatacctttttcttcatcctgagaaaaaacaaccatcagattaccgtccttcacgtctaccaccatgccagcatgctaaacatctggtggtttgttatgaactgggtaccctgcgggcactcttattttggcgcaaccctaaactctttcatacatgtgttgatgtacagctattatggcctgagctcagtcccttcaatgcgcccctacctatggtggaaaaaatatattacacagggccaacttctccaatttgttctaactataattcagacctcgtgtggcgtcatctggccatgcaccttccctctcggctggctttacttccaaatcggttatatgatcagcttgattgcgctgtttactaatttttatattcagacctacaacaagaagggcgcaagccgccgcaaggaccatcttaaggaccaccagaacggtagtatggcggctgtgaacggccacaccaattccttctcacctcttgaaaacaatgtgaaaccccgcaagctgcggaaggactag

SEQ ID NO: 85157 - DNA, 981 bp, Artificial Sequence
  derived and/or modified sequence
atggaacacttcgatgctagcctgtcaacgtatttcaaagctttacttggtccacgcgatacaagagttaagggatggtttctgctcgataactacatcccgaccttcatctgctctgttatttacttactcattgtctggctagggccaaagtacatgcggaacaagcagccctttagttgcaggggaattctggtcgtgtacaacctcggtctgaccctactgtcattatatatgttttgtgaatccaaacgggagcagcctcgcagatctgcttgcgcgtctcggactgatcctagtacccagcagcagctaccagagaatcgcctggtgactggcgtgtgggaaggaaaatacaattttttctgtcaggggactcggacagcaggtgaatctgacatgaaaataataagagtgctttggtggtactatttttctaagttgattgaatttatggacacattcttctttatactccgtaaaaacaaccatcagatcacagtcctacacgtgtatcatcatgcctccatgctgaacatttggtggttcgttatgaactgggtgccctgcgggcacagttactttggcgctacacttaacagcttcatccatgtcttaatgtatagttattatggcctgtcaagtgtccccagcatgagaccttatttgtggtggaagaaatacattacacaggggcagttgcttcagttcgttttgactattattcagacatcctgtggggtgatttggccctgtacgttccctctggggtggctgtatttccagatcgggtacatgatttctctgattgccctgtttaccaacttttatatccaaacatacaataaaaaaggtgcatctaggcgaaaggatcatctaaaagatcaccaaaatggttcaatggctgctgtgaacggtcatactaattctttctcccccctggaaaataatgtgaaacctcggaagctccgaaaggattag

SEQ ID NO: 85158 - DNA, 981 bp, Artificial Sequence
  derived and/or modified sequence
atggagcacttcgacgccagcctgagcacctacttcaaggccctgctgggccccagagacaccagagtgaagggctggttcctgctggacaactacatccccaccttcatctgcagcgtgatctacctgctgatcgtgtggctgggccccaagtacatgagaaacaagcagcccttcagctgcagaggcatcctggtggtgtacaacctgggcctgaccctgctgagcctgtacatgttctgcgagagcaagagagagcagcccagaagaagcgcctgcgccagcagaaccgaccccagcacccagcagcagctgcccgagaacagactggtgaccggcgtgtgggagggcaagtacaacttcttctgccagggcaccagaaccgccggcgagagcgacatgaagatcatcagagtgctgtggtggtactacttcagcaagctgatcgagttcatggacaccttcttcttcatcctgagaaagaacaaccaccagatcaccgtgctgcacgtgtaccaccacgccagcatgctgaacatctggtggttcgtgatgaactgggtgccctgcggccacagctacttcggcgccaccctgaacagcttcatccacgtgctgatgtacagctactacggcctgagcagcgtgcccagcatgagaccctacctgtggtggaagaagtacatcacccagggccagctgctgcagttcgtgctgaccatcatccagaccagctgcggcgtgatctggccctgcaccttccccctgggctggctgtacttccagatcggctacatgatcagcctgatcgccctgttcaccaacttctacatccagacctacaacaagaagggcgccagcagaagaaaggaccacctgaaggaccaccagaacggcagcatggccgccgtgaacggccacaccaacagcttcagccccctggagaacaacgtgaagcccagaaagctgagaaaggactag

SEQ ID NO: 85159 - DNA, 1491 bp, Artificial Sequence
  derived and/or modified sequence
ctcttcccatcgcgcgggtcctagccaccggtgtctccttctacatccgcctctgcgccggctgccacccgcgctccctccgccgccgccgccttgctgctgctcaaagctgctgccgccccttgggctaaaaggttttcaaatggaacattttgatgcatcacttagtacctatttcaaggcattgctaggccctcgagatactagagtaaaaggatggtttcttctggacaattatatacccacatttatctgctctgtcatatatttactaattgtatggctgggaccaaaatacatgaggaataaacagccattctcttgccgggggattttagtggtgtataaccttggactcacactgctgtctctgtatatgttctgtgagtccaaaagggagcaaccccgtcgatctgcctgtgcctcacgaactgatccttcgactcagcagcagctgccagaaaacaggttagtaacaggagtatgggaaggcaaatacaacttcttctgtcagggcacacgcaccgcaggagaatcagatatgaagattatccgtgtcctctggtggtactacttctccaaactcatagaatttatggacactttcttcttcatcctgcgcaagaacaaccaccagatcacggtcctgcacgtctaccaccatgcctcgatgctgaacatctggtggtttgtgatgaactgggtcccctgcggccactcttattttggtgccacacttaatagcttcatccacgtcctcatgtactcttactatggtttgtcgtcagtcccttccatgcgtccatacctctggtggaagaagtacatcactcaggggcagctgcttcagtttgtgctgacaatcatccagaccagctgcggggtcatctggccgtgcacattccctcttggttggttgtatttccagattggatacatgatttccctgattgctctcttcacaaacttctacattcagacctacaacaagaaaggggcctcccgaaggaaagaccacctgaaggaccaccagaatgggtccatggctgctgtgaatggacacaccaacagcttttcacccctggaaaacaatgtgaagccaaggaagctgcggaaggattgaagtcaaagaattgaaaccctccaaaccacgtcatctgattgtaagcacaatatgagttgtgccccaatgctcgttaacagctgctgtaactagtctggcctacaatagtgtgattcatgtaggacttctttcatcaattcaaaacccctagaaaacgtatacagattatataagtagggataagatttctaacatttctgggctctctgacccctgcgctagactgtggaaagggagtattattatagtatacaacactgctgttgccttattagttataacatgataggtgctgaattgtgattcacaatttaaaaacactgtaatccaaacttttttttttaactgtagatcatgcatgtgattgt

SEQ ID NO: 85160 - protein, 441 aa, Artificial Sequence
  derived and/or modified sequence
MCVCQTMEVGQYGKNASRAGDRGVLLEPFIHQVGGHSSMMRYDDHTVCKPLISREQRFYESLPPEMKEFTPEYKGVVSVCFEGDSDGYINLVAYPYVESETVEQDDTTEREQPRRKHSRRSLHRSGSGSDHKEEKASLSLETSESSQEAKSPKVELHSHSEVPFQMLDGNSGLSSEKISHNPWSLRCHKQQLSRMRSESKDRKLYKFLLLENVVHHFKYPCVLDLKMGTRQHGDDASAEKAARQMRKCEQSTSATLGVRVCGMQVYQLDTGHYLCRNKYYGRGLSIEGFRNALYQYLHNGLDLRRDLFEPILSKLRGLKAVLERQASYRFYSSSLLVIYDGKECRAESCLDRRSEMRLKHLDMVLPEVASSCGPSTSPSNTSPEAGPSSQPKVDVRMIDFAHSTFKGFRDDPTVHDGPDRGYVFGLENLISIMEQMRDENQ

SEQ ID NO: 85161 - protein, 276 aa, Artificial Sequence
  derived and/or modified sequence
MLDGNSGLSSEKISHNPWSLRCHKQQLSRMRSESKDRKLYKFLLLENVVHHFKYPCVLDLKMGTRQHGDDASAEKAARQMRKCEQSTSATLGVRVCGMQVYQLDTGHYLCRNKYYGRGLSIEGFRNALYQYLHNGLDLRRDLFEPILSKLRGLKAVLERQASYRFYSSSLLVIYDGKECRAESCLDRRSEMRLKHLDMVLPEVASSCGPSTSPSNTSPEAGPSSQPKVDVRMIDFAHSTFKGFRDDPTVHDGPDRGYVFGLENLISIMEQMRDENQ

SEQ ID NO: 85162 - DNA, 1326 bp, Artificial Sequence
  derived and/or modified sequence
atgtgtgtgtgtcagacgatggaggtgggccagtatgggaagaatgcatcgagagcaggcgaccggggggtcctgttggagcccttcattcaccaggtgggcgggcattccagtatgatgagatacgacgatcatacggtgtgtaaaccactgatatctcgcgagcaaaggttctacgaaagcctgcctccggagatgaaggaattcactcccgaatataagggcgttgtgagcgtgtgtttcgagggtgattccgatggatacatcaatcttgtagcctacccatacgtcgaatctgaaactgtggagcaggatgataccacggagagagagcagcctcgaaggaaacactcccggagatccctacacagatcaggctctggatcagaccataaagaggagaaggccagccttagcctggagaccagtgaatcctctcaagaggctaagagtcccaaggtggaactgcacagccactccgaagtcccttttcaaatgctagacggaaattccggactgagcagcgagaagatctctcacaacccatggtcgctgaggtgtcacaagcaacaacttagtaggatgcgcagcgagagcaaagaccgtaagctctacaaatttttgctcctcgagaatgttgtccatcattttaagtacccttgcgtcctggatttgaaaatgggtaccagacagcacggggatgacgcatctgccgagaaggcagcccgccagatgcgaaaatgtgaacagagtacctctgccacgctaggcgtaagagtctgcggaatgcaggtttatcagctggacaccggccactatctgtgccgtaataaatattacggacgaggcctgtccatagagggatttcgcaatgccctctaccagtacctgcataatggtcttgacctgaggagggacctcttcgagcctattttgtctaagctccggggactgaaggccgtacttgaaaggcaggctagttacagattttactcttcgagcctgctcgttatttatgatggtaaggaatgtcgcgccgaatcatgcctggatcggagaagcgaaatgaggctgaaacacctggacatggtgttgccggaagtggcctcatcttgtggtccaagtacatccccaagcaacacgtctccggaggcgggtccttcgtcacagcccaaggtggatgtacgaatgatcgatttcgctcactctacgtttaaagggtttagggacgacccaacagtccatgatgggcccgaccgaggctacgtctttgggctagaaaacttgatcagtatcatggaacaaatgcgagacgagaatcagtag

SEQ ID NO: 85163 - DNA, 4456 bp, Artificial Sequence
  derived and/or modified sequence
gttgatccgtacccagtgggcagcgccgggagctggaccaagcggccggtgagaggccgctgtagcggtgctcagccacctgtgctgcctgccagggggcgggccgaaacctggaggcccggggggcccagctcccgtagggagccgtgggcgctcggtgcccgggccgggcaggacagaataataagctgaatagaatctgaccattggctttcacctggccaggaccttctatgtagctctccttttgtggcccatgtgctgcatcctctgccctcagtgtgcaactggcccccaacgcaatgtgtgtttgtcaaaccatggaagtggggcagtatggcaagaatgcaagtcgggctggagaccggggagtcctcctggagcccttcatccaccaagtaggcggacacagcagcatgatgcgttacgacgatcacactgtgtgcaagcccctcatctcccgggaacagcgcttttacgagtccctccctcccgaaatgaaggagttcacccctgaatacaaaggcgtggtatctgtctgttttgagggggacagtgatggttacatcaacttagtggcctatccttatgtggaaagtgagactgtggaacaggatgacacaacagaacgggagcaacctcggcgcaaacactcccgccggagcctgcaccggtcaggcagtggcagtgaccacaaggaggagaaagccagcctgtcccttgagacctctgagagctcacaggaggcaaagagtccgaaggtggagctgcacagccactcagaggtccctttccagatgctagatggcaacagtggcttgagttctgagaagatcagccacaacccctggagcctgcgttgtcacaagcagcagctgagccgcatgcgctccgagtccaaggaccgaaagctctacaagttcctcctgcttgagaacgtggtgcaccacttcaagtacccctgcgtgttggacctgaagatgggcacgcggcagcatggcgatgacgcgtcagctgagaaggcagcccggcagatgcggaaatgcgagcagagcacatcagccacgctgggcgtcagggtctgcggcatgcaggtgtaccagctggacacagggcattacctctgcaggaacaagtactatggccgtgggctctccattgaaggcttccgcaatgccctctatcaatatctgcacaatggcctggacctgcgacgtgacctgtttgagcctatcctgagcaaactgcggggcctgaaagctgtgctggagcggcaggcctcttaccgcttctactccagttccctgcttgtcatctatgatggcaaggagtgccgggctgagtcctgcctggaccgccggtctgagatgcgtctcaagcacctggacatggtgctccctgaggtggcgtcatcctgtggccccagcaccagccccagcaacaccagccccgaggcgggtccctcctctcagcccaaggtggatgtccgcatgattgactttgcacacagcacattcaagggcttccgggatgaccccaccgtgcatgatgggccagacagaggctacgtgtttggcctggagaacctcatcagcatcatggaacagatgcgggacgagaaccagtaggccctgttctgggcccccagaaccccttcctctccactgcaggcagggaccattgttctgaacttgccgtgaggacacacagacttgcttttaaagggttatatttctctttggtgtaaactaaaagaaatgtttttagctgtagcctggaatccatatatataaagtgaaggagggcagaccacacgccctctcagccaggctcctcagctttgtggctctgactggtgtgtccaggctgccttaggaaggaagaggtgcccctggtgggcttggcagcagggacagggtgcccttggacattggtttctcttgtctagatctttgagatctgtggctgcagggccctgctgattgtaaggtaaagccctgggctggtgcagggcccctccacgcccactcttcccttgttccccagaagtagagggctctgggtgcccatttcttgggggctttccagtcttatgctgtgggtgtcagctagctctttaataggtgccctcagggcaccacagggctgactgcacaaagctggacccatccttcggtctgaccttagcatggggctagattaatgaagctgggctgaggccaacttatggcagagggcggcgcctgggttccccaggcacctgttggcacgtgacaggttggcacctgtcctattcctgaaacagcctctctcaccaagttcccttgcctaagaaggccactccctcccaccccactgaagtgggggatagtcggtgtcctagcaggcctcagggcctctggtggctctggcccagacagtatttgcagttcttgtgctatgggtgggagtcttcttcctcaagtttcggcagctgtgctgctgctggatgggctgctcctcccagggctcaagggctgtggtccgctcagggtctcatttccccaggccaagttcaaggcagcagccctttgtgaggcgctcttggccctgggcctggagggagaactttaagcttttttgctcacagggacgtggtatgggccctgggtgcaggtgcccacattctgctaatgagagctttgtctgatcagtcctgggtccatcagtttgtccatgtgtccggctgccagcccgtcccttgggatccttcccctggggtgtagccttgttcattagtatatactcattccttcatgctttcctcagcagaacacttccacttctgaggtgagcttttgccccatgcccttcctccacaggtgttgcctttttataaagacctgatagcagaataaattggtgtttccctgttgacccagcaccatttctgtgggcctagaatatggccctcaacccttagagtggggcagtgagggcttgaggagtgacccttcctttctcatggttttagtcattttggctgccagcccttaatggcacagatctgctgcttctaacagatggccaggaggtgacaccgatttcagccattgccaaggttagcaccctctcctttgagcctagggccacactgttcattgtcactttaggcaagtgcctgtttggctttaaaggtaagcctgccagctgtgagaagccttggtaactgatggactcatttcctggtccttaaagatgcagcctcttaagggctccttgatggatgccatctctcctagcccccagccctggtgccactggtgggcaggttcccattctttggggctgggagggacagcttgcctgtttctggtcacaaattacagtcttctctcctgtaccattctgtggcttcagccatgggggcagtagcccttcattagtgtagatagtcattccctggtagggtggagggtaagacatagggtctggaactgtttgggaccttttggggatgtcctgtgcctcccagattcctcgattctgggaggagaggctgccgcattctgctgctcctcacagcgagcaaagctgcacccacttacattcagtattttcctggcactacaaagagtgggaaggcctgggatttgctgctgctcccttagagcagggcccctcttttcagcactttggacacctggagacccagccctgttatttaatggtagtgggcaagtgtgtgtgcatactgtctgccactgctttctccctgccccatgccagagagccctgtccctgccaggcccagccttcttagccccaacttgggaacaaagtgcaacatgggatcatgggttggggtgctcaggtgagccctctctatagtgcttccctgggccaagctgacaccagcccctgagggtggggtgggacgggtggtgcttaaaagaggaaggggaccagtgtagcaacttgccagggaccccacccctccctctctgggcctgtgcagtgagcatggggattcccatcaaggggcctggcacctgtgctagttacgtagccgctgctcacgcgctcactcctgaccacatgcacgttccctagatgcagactgctttgaactttaaagctgtacaatttggttatgtttgtgctgacttaaaatatattttaatgaggaaaaaataatggagaaccctgggaaggacctggttcttttgcttctcggggaactgtaagccctcgcgttctgggaatcgctctctgctgctctttcctggaagctaagcctgtctccaccgcccgaggcctgcgccggtggctcccgccgcagttgcgtttgctttggaccttgcgtgcgggggagggggtgctcggtccgagcccgctcctttctgtacacctagcgctgcccgccccgcttgtgtctgaggtcgtgtatgtcaaaaataaagccgctagaaacgga

SEQ ID NO: 85164 - DNA, 4117 bp, Artificial Sequence
  derived and/or modified sequence
ccgccatcttgttgttgatccgtacccagtgggcagcgccgggagctggaccaagcggccggtgagaggccgctgtagcggtgctcagccacctgtgctgcctgccagggggcgggccgaaacctggaggcccggggggcccagctcccgtagggagccgtgggcgctcggtgcccgggccgggcaggcgtggtatctgtctgttttgagggggacagtgatggttacatcaacttagtggcctatccttatgtggaaagtgagactgtggaacaggatgacacaacagaacgggagcaacctcggcgcaaacactcccgccggagcctgcaccggtcaggcagtggcagtgaccacaaggaggagaaagccagcctgtcccttgagacctctgagagctcacaggaggcaaagagtccgaaggtggagctgcacagccactcagaggtccctttccagatgctagatggcaacagtggcttgagttctgagaagatcagccacaacccctggagcctgcgttgtcacaagcagcagctgagccgcatgcgctccgagtccaaggaccgaaagctctacaagttcctcctgcttgagaacgtggtgcaccacttcaagtacccctgcgtgttggacctgaagatgggcacgcggcagcatggcgatgacgcgtcagctgagaaggcagcccggcagatgcggaaatgcgagcagagcacatcagccacgctgggcgtcagggtctgcggcatgcaggtgtaccagctggacacagggcattacctctgcaggaacaagtactatggccgtgggctctccattgaaggcttccgcaatgccctctatcaatatctgcacaatggcctggacctgcgacgtgacctgtttgagcctatcctgagcaaactgcggggcctgaaagctgtgctggagcggcaggcctcttaccgcttctactccagttccctgcttgtcatctatgatggcaaggagtgccgggctgagtcctgcctggaccgccggtctgagatgcgtctcaagcacctggacatggtgctccctgaggtggcgtcatcctgtggccccagcaccagccccagcaacaccagccccgaggcgggtccctcctctcagcccaaggtggatgtccgcatgattgactttgcacacagcacattcaagggcttccgggatgaccccaccgtgcatgatgggccagacagaggctacgtgtttggcctggagaacctcatcagcatcatggaacagatgcgggacgagaaccagtaggccctgttctgggcccccagaaccccttcctctccactgcaggcagggaccattgttctgaacttgccgtgaggacacacagacttgcttttaaagggttatatttctctttggtgtaaactaaaagaaatgtttttagctgtagcctggaatccatatatataaagtgaaggagggcagaccacacgccctctcagccaggctcctcagctttgtggctctgactggtgtgtccaggctgccttaggaaggaagaggtgcccctggtgggcttggcagcagggacagggtgcccttggacattggtttctcttgtctagatctttgagatctgtggctgcagggccctgctgattgtaaggtaaagccctgggctggtgcagggcccctccacgcccactcttcccttgttccccagaagtagagggctctgggtgcccatttcttgggggctttccagtcttatgctgtgggtgtcagctagctctttaataggtgccctcagggcaccacagggctgactgcacaaagctggacccatccttcggtctgaccttagcatggggctagattaatgaagctgggctgaggccaacttatggcagagggcggcgcctgggttccccaggcacctgttggcacgtgacaggttggcacctgtcctattcctgaaacagcctctctcaccaagttcccttgcctaagaaggccactccctcccaccccactgaagtgggggatagtcggtgtcctagcaggcctcagggcctctggtggctctggcccagacagtatttgcagttcttgtgctatgggtgggagtcttcttcctcaagtttcggcagctgtgctgctgctggatgggctgctcctcccagggctcaagggctgtggtccgctcagggtctcatttccccaggccaagttcaaggcagcagccctttgtgaggcgctcttggccctgggcctggagggagaactttaagcttttttgctcacagggacgtggtatgggccctgggtgcaggtgcccacattctgctaatgagagctttgtctgatcagtcctgggtccatcagtttgtccatgtgtccggctgccagcccgtcccttgggatccttcccctggggtgtagccttgttcattagtatatactcattccttcatgctttcctcagcagaacacttccacttctgaggtgagcttttgccccatgcccttcctccacaggtgttgcctttttataaagacctgatagcagaataaattggtgtttccctgttgacccagcaccatttctgtgggcctagaatatggccctcaacccttagagtggggcagtgagggcttgaggagtgacccttcctttctcatggttttagtcattttggctgccagcccttaatggcacagatctgctgcttctaacagatggccaggaggtgacaccgatttcagccattgccaaggttagcaccctctcctttgagcctagggccacactgttcattgtcactttaggcaagtgcctgtttggctttaaaggtaagcctgccagctgtgagaagccttggtaactgatggactcatttcctggtccttaaagatgcagcctcttaagggctccttgatggatgccatctctcctagcccccagccctggtgccactggtgggcaggttcccattctttggggctgggagggacagcttgcctgtttctggtcacaaattacagtcttctctcctgtaccattctgtggcttcagccatgggggcagtagcccttcattagtgtagatagtcattccctggtagggtggagggtaagacatagggtctggaactgtttgggaccttttggggatgtcctgtgcctcccagattcctcgattctgggaggagaggctgccgcattctgctgctcctcacagcgagcaaagctgcacccacttacattcagtattttcctggcactacaaagagtgggaaggcctgggatttgctgctgctcccttagagcagggcccctcttttcagcactttggacacctggagacccagccctgttatttaatggtagtgggcaagtgtgtgtgcatactgtctgccactgctttctccctgccccatgccagagagccctgtccctgccaggcccagccttcttagccccaacttgggaacaaagtgcaacatgggatcatgggttggggtgctcaggtgagccctctctatagtgcttccctgggccaagctgacaccagcccctgagggtggggtgggacgggtggtgcttaaaagaggaaggggaccagtgtagcaacttgccagggaccccacccctccctctctgggcctgtgcagtgagcatggggattcccatcaaggggcctggcacctgtgctagttacgtagccgctgctcacgcgctcactcctgaccacatgcacgttccctagatgcagactgctttgaactttaaagctgtacaatttggttatgtttgtgctgacttaaaatatattttaatgaggaaaaaataatggagaaccctgggaaggacctggttcttttgcttctcggggaactgtaagccctcgcgttctgggaatcgctctctgctgctctttcctggaagctaagcctgtctccaccgcccgaggcctgcgccggtggctcccgccgcagttgcgtttgctttggaccttgcgtgcgggggagggggtgctcggtccgagcccgctcctttctgtacacctagcgctgcccgccccgcttgtgtctgaggtcgtgtatgtcaaaaataaagccgctagaaacgg

SEQ ID NO: 85165 - DNA, 1260 bp, Artificial Sequence
  derived and/or modified sequence
agccgccatcttgttgttgatccgtacccagtgggcagcgccgggagctggaccaagcggccggcgtggtatctgtctgttttgagggggacagtgatggttacatcaacttagtggcctatccttatgtggaaagtgagactgtggaacaggatgacacaacagaacgggagcaacctcggcgcaaacactcccgccggagcctgcaccggtcaggcagtggcagtgaccacaaggaggagaaagccagcctgtcccttgagacctctgagagctcacaggaggcaaagagtccgaaggtggagctgcacagccactcagaggtccctttccagatgctagatggcaacagtggcttgagttctgagaagatcagccacaacccctggagcctgcgttgtcacaagcagcagctgagccgcatgcgctccgagtccaaggaccgaaagctctacaagttcctcctgcttgagaacgtggtgcaccacttcaagtacccctgcgtgttggacctgaagatgggcacgcggcagcatggcgatgacgcgtcagctgagaaggcagcccggcagatgcggaaatgcgagcagagcacatcagccacgctgggcgtcagggtctgcggcatgcaggtgtaccagctggacacagggcattacctctgcaggaacaagtactatggccgtgggctctccattgaaggcttccgcaatgccctctatcaatatctgcacaatggcctggacctgcgacgtgacctgtttgagcctatcctgagcaaactgcggggcctgaaagctgtgctggagcggcaggcctcttaccgcttctactccagttccctgcttgtcatctatgatggcaaggagtgccgggctgagtcctgcctggaccgccggtctgagatgcgtctcaagcacctggacatggtgctccctgaggtggcgtcatcctgtggccccagcaccagccccagcaacaccagccccgaggcgggtccctcctctcagcccaaggtggatgtccgcatgattgactttgcacacagcacattcaagggcttccgggatgaccccaccgtgcatgatgggccagacagaggctacgtgtttggcctggagaacctcatcagcatcatggaacagatgcgggacgagaaccagtaggccctgttctgggcccccagaaccccttcctctccactgcaggcagggaccattgttctgaacttgccgtgaggacacacagacttgcttttaa

SEQ ID NO: 85166 - DNA, 1326 bp, Artificial Sequence
  derived and/or modified sequence
atgtgtgtgtgccagaccatggaggtgggccagtatggcaagaatgccagcagagctggggacagaggagtgctgctggagcccttcatccaccaggtgggcggccacagctccatgatgagatatgatgaccacacagtgtgcaagcccctcatcagccgggagcagcgcttctatgagagcctgcccccagagatgaaggagttcaccccagagtacaagggcgtggtgtctgtgtgctttgaaggagacagtgatggctacatcaacctggtggcctacccctacgtggagagcgagaccgtggagcaggatgacaccacagagcgggagcagcccaggaggaagcacagcagaagaagcctgcacaggagcggcagcggcagtgaccacaaggaggagaaggccagcctgagcctggagaccagcgagagcagccaggaggccaagagccccaaggtggagctgcacagccacagcgaggtgcccttccagatgctggatggcaacagcggcctgagcagcgagaagatcagccacaacccctggagcctgcgctgccacaagcagcagctgagcaggatgaggtctgagagcaaggacaggaagctgtacaagttcctgctgctggagaatgtggtgcaccacttcaagtacccctgtgtgctggacctgaagatgggcacccggcagcacggagatgatgccagcgctgagaaggccgcccggcagatgaggaaatgtgagcagagcaccagcgccaccctgggcgtgcgggtgtgtggcatgcaggtgtaccagctggacaccggccactacctgtgcaggaacaagtactacggccggggcctgagcattgagggcttcagaaatgccctgtaccagtacctgcacaacggcctggacctgcggcgggacctgtttgagcccatcctgagcaagctgcggggcctgaaggctgtgctggagcggcaggccagctaccgcttctacagcagcagcctgctggtgatctatgatggcaaggaatgtagagctgagagctgcctggaccggcgctctgagatgaggctgaagcacctggacatggtgctgcctgaggtggccagcagctgtggccccagcaccagccccagcaacaccagccctgaggccggccccagcagccagcccaaggtggatgtgaggatgattgactttgcccacagcaccttcaagggcttcagagatgaccccaccgtgcatgatggccctgaccggggctacgtgtttggcctggagaacctgatcagcatcatggagcagatgagagatgagaaccagtag

SEQ ID NO: 85167 - DNA, 1326 bp, Artificial Sequence
  derived and/or modified sequence
atgtgcgtgtgccagaccatggaggtgggccagtacggcaagaacgcaagccgtgccggggaccggggcgtgctgctggagccgttcatccaccaggtggggggccattcttcaatgatgcggtatgacgaccacaccgtgtgcaaacctctcatctcccgggaacagcgtttttacgaaagtctgccacctgaaatgaaggagtttacgccagaatataagggcgtggtgagtgtctgctttgaaggggactccgacggttacataaatttggtggcctacccatatgtcgagtccgaaaccgtagaacaggacgatactactgagagagagcagccacggcgaaagcattcccggagaagtctgcatcggagcggttccggaagtgatcacaaggaggaaaaagcgagccttagtctggagaccagcgaaagctcccaagaggcgaagtcccctaaagtggaactgcattctcattcggaagtacctttccagatgttagacggcaactctggactgagtagtgaaaagataagccataacccatggtctttgcgctgtcacaagcagcaactctcgagaatgcggagcgagtctaaggaccggaagctgtacaaatttctcctgttggaaaacgtcgtgcatcactttaaatacccctgtgtgctggaccttaagatgggaacgcgccagcatggcgacgacgcaagcgccgaaaaagccgctcggcagatgagaaagtgtgagcagtctacctctgcaactctgggggtcagggtatgtggaatgcaggtgtaccagctggacaccggacactatctgtgtagaaacaaatactacgggcggggactgtcaatagaagggtttaggaatgccctctaccagtacctccataacggtctagatctccgacgagacctattcgagcccattttgagcaagctccgcggtctgaaagcagtgctggagcgccaggcaagctatagattctactcttcctctctgctcgtcatttacgatggtaaagaatgtcgggcagagagttgcttggataggcgaagcgaaatgcgtctcaagcacttggatatggtactgcccgaggttgctagtagctgcggaccttcgaccagcccttccaacaccagcccagaggcagggccatctagccaacctaaagtggatgtgagaatgatcgacttcgcccacagcacttttaagggattccgagatgatccaacggtgcacgatggaccggaccgcggatacgttttcggtcttgagaaccttatcagcatcatggagcaaatgcgtgacgagaaccagtag

SEQ ID NO: 85168 - DNA, 1326 bp, Artificial Sequence
  derived and/or modified sequence
atgtgtgtctgtcagacgatggaagtaggtcagtacgggaagaacgcctcccgagccggtgataggggtgtgcttctagagccattcatccaccaggtgggcggacactcctctatgatgcggtacgatgaccacacagtttgtaaacccctgatttcccgcgaacagaggttctacgaaagcttgcctcccgagatgaaggagttcacacctgagtataaaggagtggtgagcgtgtgctttgaaggcgactccgatgggtacattaacctggtcgcatacccatacgtggaaagtgaaactgtggaacaggatgacactactgagcgtgaacagcctagacgcaaacattctagacggtccctacacaggagcggctcgggatctgaccacaaagaggagaaggcctcactatccttagagaccagcgagtcttcccaggaagctaagtctccaaaagtagagctacatagccactccgaggttccctttcaaatgttagacgggaatagtggcctaagtagtgaaaaaatctctcacaacccttggtcccttagatgccataagcagcaattgtccagaatgagaagcgaatcaaaggaccggaaactttacaagtttttgctcctagagaatgttgtccatcacttcaaatacccatgcgtgctcgatctcaagatgggaacacgccagcatggagacgacgcgtctgctgaaaaggccgcaaggcaaatgcggaagtgcgagcagtctacaagtgccaccttgggggtccgcgtctgcggcatgcaggtctaccagctggataccggacactacctttgtcggaacaagtattacggcagagggctcagcattgagggatttagaaacgctctgtatcagtatttacataacggtctagatttgagaagggacttgtttgaacccattctttctaaactccgcggactcaaagctgtgctggagcgtcaggccagttataggttctacagcagtagccttctggtgatctacgacggaaaagaatgtcgcgcagaatcatgtcttgatcgccgaagcgaaatgagactcaagcatcttgatatggtgctccccgaagtggcatcctcatgtggaccctctacaagcccaagcaatacgtcgcctgaagcaggcccaagctctcagcctaaggtggatgttaggatgattgacttcgcgcattctacgtttaagggcttcagagatgatcctacagtgcatgacggaccagaccgtgggtatgtctttggactcgagaatctgatctctatcatggagcagatgagagatgagaaccagtag

SEQ ID NO: 85169 - DNA, 1326 bp, Artificial Sequence
  derived and/or modified sequence
atgtgcgtgtgccagaccatggaggtgggccagtacggcaagaacgccagcagagccggcgacagaggcgtgctgctggagcccttcatccaccaggtgggcggccacagcagcatgatgagatacgacgaccacaccgtgtgcaagcccctgatcagcagagagcagagattctacgagagcctgccccccgagatgaaggagttcacccccgagtacaagggcgtggtgagcgtgtgcttcgagggcgacagcgacggctacatcaacctggtggcctacccctacgtggagagcgagaccgtggagcaggacgacaccaccgagagagagcagcccagaagaaagcacagcagaagaagcctgcacagaagcggcagcggcagcgaccacaaggaggagaaggccagcctgagcctggagaccagcgagagcagccaggaggccaagagccccaaggtggagctgcacagccacagcgaggtgcccttccagatgctggacggcaacagcggcctgagcagcgagaagatcagccacaacccctggagcctgagatgccacaagcagcagctgagcagaatgagaagcgagagcaaggacagaaagctgtacaagttcctgctgctggagaacgtggtgcaccacttcaagtacccctgcgtgctggacctgaagatgggcaccagacagcacggcgacgacgccagcgccgagaaggccgccagacagatgagaaagtgcgagcagagcaccagcgccaccctgggcgtgagagtgtgcggcatgcaggtgtaccagctggacaccggccactacctgtgcagaaacaagtactacggcagaggcctgagcatcgagggcttcagaaacgccctgtaccagtacctgcacaacggcctggacctgagaagagacctgttcgagcccatcctgagcaagctgagaggcctgaaggccgtgctggagagacaggccagctacagattctacagcagcagcctgctggtgatctacgacggcaaggagtgcagagccgagagctgcctggacagaagaagcgagatgagactgaagcacctggacatggtgctgcccgaggtggccagcagctgcggccccagcaccagccccagcaacaccagccccgaggccggccccagcagccagcccaaggtggacgtgagaatgatcgacttcgcccacagcaccttcaagggcttcagagacgaccccaccgtgcacgacggccccgacagaggctacgtgttcggcctggagaacctgatcagcatcatggagcagatgagagacgagaaccagtag

SEQ ID NO: 85170 - protein, 88 aa, Artificial Sequence
  derived and/or modified sequence
MEHFDASLSTYFKALLGPRGISSSVLRMGPPLHTVVGWLQQLQAAHSEEEEKMFHLCGFKHKEVVSQSSLPAVIPQNSLATIASHAPA

SEQ ID NO: 85171 - DNA, 267 bp, Artificial Sequence
  derived and/or modified sequence
atggaacactttgacgcctcactgtccacttatttcaaggcactgctgggaccgagaggaatcagcagtagtgtgttaaggatgggacctcctcttcacaccgttgtcgggtggcttcagcagctccaggcagcccatagcgaggaggaagaaaaaatgttccacctgtgtggctttaagcataaagaagtggtgtcccagagctcgcttccagccgtgatcccacagaactccctggcaactatcgcatctcacgcacctgcttag

SEQ ID NO: 85172 - DNA, 267 bp, Artificial Sequence
  derived and/or modified sequence
atggagcactttgatgccagcctgagcacctacttcaaggccctgctgggcccccggggcatcagcagctctgtgctgaggatgggcccccccctgcacacagtggtgggctggctgcagcagctgcaggccgcccacagcgaggaggaggagaagatgttccacctgtgtggcttcaagcacaaggaggtggtgtcccagagcagcctgcctgctgtgatcccccagaacagcctggccaccatcgccagccacgccccagcctag

SEQ ID NO: 85173 - DNA, 267 bp, Artificial Sequence
  derived and/or modified sequence
atggagcacttcgacgccagcctgagcacctacttcaaggccctgctgggtcccaggggaattagctcatcagtgcttaggatggggcccccattacatacagtcgtgggatggcttcagcagctccaagcagcccatagcgaggaagaagagaagatgttccacctgtgcggcttcaaacataaagaggtggtctctcagtcttcactccccgccgtaatacctcagaactcactagcaaccattgcatcccatgcaccagcctag

SEQ ID NO: 85174 - DNA, 267 bp, Artificial Sequence
  derived and/or modified sequence
atggagcattttgacgcaagtctgtctacatacttcaaagccttactaggtcctagaggcatcagctcctccgtcctcagaatggggcctcctctgcacacagttgtcggatggctgcaacagctgcaggcagcccattccgaagaggaagaaaaaatgtttcacctgtgtggcttcaagcacaaagaggtcgtgagccagtcttctctgccggcagttatcccgcaaaatagcctagccaccatcgcttctcatgcgccagcctag

SEQ ID NO: 85175 - DNA, 267 bp, Artificial Sequence
  derived and/or modified sequence
atggagcacttcgacgccagcctgagcacctacttcaaggccctgctgggccccagaggcatcagcagcagcgtgctgagaatgggcccccccctgcacaccgtggtgggctggctgcagcagctgcaggccgcccacagcgaggaggaggagaagatgttccacctgtgcggcttcaagcacaaggaggtggtgagccagagcagcctgcccgccgtgatcccccagaacagcctggccaccatcgccagccacgcccccgcctag

SEQ ID NO: 85176 - DNA, 580 bp, Artificial Sequence
  derived and/or modified sequence
ccaccggtgtctccttctacatccgcctctgcgccggctgccacccgcgctccctccgccgccgccgccttgctgctgctcaaagctgctgccgccccttgggctaaaaggttttcaaatggaacattttgatgcatcacttagtacctatttcaaggcattgctaggccctcgaggtatcagcagctctgtcctcagaatgggtcccccacttcacacagttgtaggatggctacagcagctccaagcagcacattcagaggaagaagaaaaaatgtttcatttgtgtggttttaagcataaagaagttgtttcccagagctctttgccagctgtcatccctcaaaactcactggccacaattgcttcacatgcccctgcctgaaccagccaccagagggggttaggaccaccacagattgactagatcctaaggattctctacctggggctggagttcgggtcaggtgcccgggaagcactgtgcggtgtgggaggatgaatatgtgccaatttggaaagatgagtatttgtgggaaaatgaataaagcaaagtgtaaatcagaggtttaagttaaaa

SEQ ID NO: 85177 - protein, 414 aa, Artificial Sequence
  derived and/or modified sequence
MQVGGNANATAFFRQHGCTANDANTKYNSRAAQMYREKIRQLGSAALARHGTDPPAWDAPATEPSGTQQPAPSTESSGLAQPEHGPNTDLLGTSPKASLELKSSIIGKKKPAAAKKGLGAKKGLGAQKVSSQSFSEIERQAQVAEKLREQQAADAKKQAEESMVASMRLAYQELQIDRKKEEKKLQNLEGKKREQAERLGMGLVSRSSVSHSVLSEMQVIEQETPVSAKSSRSQLDLFDDVGTFASGPPKYKDNPFSLGESFGSRWDTDAAWGMDRVEEKEPEVTISSIRPISERATNRREVESRSSGLESSEARQKFAGAKAISSDMFFGREVDAEYEARSRLQQLSGSSAISSSDLFGDMDGAHGAGSVSLGNVLPTADIAQFKQGVKSVAGKMAVLANGVMNSLQDRYGSY

SEQ ID NO: 85178 - DNA, 759 bp, Artificial Sequence
  derived and/or modified sequence
atggtggccagcatgagactggcttaccaagaactgcaaatagatagaaaaaaggaagaaaagaagctgcagaatctggagggaaagaaacgggagcaggccgagaggctggggatgggcctggtcagcagatcttctgtgagtcacagcgttctgagcgaaatgcaggttatcgagcaggaaacacccgtgtcagcaaagtctagtagatctcagttggacctgttcgatgatgtcggaacattcgcaagcggcccgccgaagtacaaggataaccccttttcacttggagaaagctttgggagccgctgggacaccgatgcggcatggggaatggatagggtggaggagaaagaacccgaagttaccatctctagcataaggccaatatccgagcgcgccactaaccgcagagaagtggaatctagatcatctggacttgaatcttccgaggctagacagaagttcgcaggtgcaaaagccatatcaagcgatatgtttttcggcagagaggtagacgccgagtacgaggcccgcagtcgtttgcagcaactgtctggctcgtctgcaatcagttcttcagatctctttggtgatatggatggggcgcatggagcaggatctgtgagtttaggtaacgtattacctacagcagacattgcccagttcaaacaaggcgtcaaatccgtggccggaaaaatggccgtgctcgccaatggcgtgatgaacagtcttcaggaccgctacgggtcctactag

SEQ ID NO: 85179 - DNA, 1245 bp, Artificial Sequence
  derived and/or modified sequence
atgcaagttggtgggaacgccaacgccaccgcttttttcaggcaacacgggtgtaccgcaaatgacgctaacaccaaatacaattcgagagccgcccagatgtaccgggagaagatcaggcagctgggctctgccgccttggccaggcacggtacggatcccccggcatgggacgccccagccactgagccttccggtacacaacaacctgccccctccactgagtcaagtggcctggcacagcccgaacacggaccaaacaccgacctgttagggacaagtcccaaggcttcattagaacttaagagcagtatcatcggaaaaaaaaaaccggccgctgcaaagaagggactcggcgcaaagaagggcctgggggcccagaaagtgagctcacagtctttctcggaaatagaacgccaggcccaagttgccgaaaaattgcgcgagcagcaggcggctgatgccaaaaagcaggccgaagagtctatggtggccagtatgcgtctggcttaccaagaactgcagatcgatcgcaagaaggaagaaaaaaaactccagaatctggagggtaaaaaacgggagcaggctgaacggctaggcatgggcctggtgtcccgaagctctgtgagccactcagtcctctccgagatgcaggtcatcgagcaggaaacaccagtgtctgccaagtcatcacggtcacaactggacctatttgacgatgttggtacttttgcatcaggcccacccaagtataaggataatcccttcagcttgggcgagtcctttggctctcgctgggataccgatgctgcgtgggggatggaccgcgtcgaagagaaagagcccgaggtgaccatcagtagtattaggcctatatctgagcgggcaacaaatcggagggaagtggagtcccggtccagcggcttggagagcagcgaagcccgccagaagtttgcaggagcgaaggcaatctcttccgatatgttttttggccgcgaggtggacgccgagtacgaggcgcgttccaggctgcagcaactgagcggaagcagtgccatttcatcctccgatctatttggcgacatggacggtgcacacggagccgggagcgtaagtctcggcaatgttctccctacagccgacattgcacaattcaagcagggggtgaagtccgtggccggtaaaatggccgtactggccaatggtgtgatgaacagtctccaagaccgatatggatcttattag

SEQ ID NO: 85180 - DNA, 1158 bp, Artificial Sequence
  derived and/or modified sequence
atggctgcagagcccaacaaaaccgaaatccagactctctttaagaggctaagggccgtccccactaataaggcatgttttgattgtggagctaaaaatccttcatgggcatccataacatatggagtcttcttgtgtatcgactgctccggggtgcacagaagtctaggcgtgcatttgagcttcataaggtctacagaacttgactccaattggaactggttccagctccggtgcatgcaggtcggcggcaatgctaacgctttaggcgcaaaaaagggattaggagcacagaaagtgtcatctcaatccttctccgaaattgagcgtcaggcccaggttgctgagaaactgagggagcagcaggctgctgacgcaaaaaaacaagctgaggaaagtatggttgctagcatgaggctggcttaccaggagctacagatcgataggaaaaaagaagaaaagaaacttcagaacctggagggcaagaagcgggagcaggccgagagactgggcatgggcctcgtgtcacgttcttcagtgtcccactccgtgctgtccgaaatgcaggtaatcgaacaggaaactccagtgagtgccaagtcgagccgctctcagctggatctgttcgacgacgtcggaacatttgccagcgggccacctaagtacaaggataaccccttcagcctgggagaatccttcggatccagatgggacaccgatgccgcatggggaatggatagagtcgaggagaaggagcccgaggtcaccatatctagcattaggccaatcagtgagagagccaccaataggagggaggtggagagtcgttctagcgggctggagtcttctgaggctagacagaaatttgccggggcaaaggctattagctcagacatgtttttcggacgagaggtggatgctgaatatgaggcccgatcaagactgcaacaactctccggcagttccgccatttctagttccgacttgttcggggatatggacggtgcacatggggctggatccgtctctctggggaatgtcctaccaacagcagatatagcccagtttaagcagggagtgaaaagcgtggctgggaaaatggccgtactggcaaacggcgtgatgaactctcttcaagacaggtacgggagctattag

SEQ ID NO: 85181 - DNA, 1306 bp, Artificial Sequence
  derived and/or modified sequence
gtgtctgggaaggagagaaaatggcggcggagccgaacaagaccgaaatccagactctttttaagaggcttcgcgcagttccaaccaacaaggcctgtttcgactgcggcgccaagaatccgagttgggccagcatcacgtacggtgttttcttgtgcattgactgttccggggtgcaccgctccctgggcgtccatctgagcttcatcagctgggtgccaagaaaggcctaggggcccagaaggtgagcagccagagcttcagtgagattgagcggcaggctcaggtggcagagaagctccgtgagcagcaggcagccgatgccaagaagcaggcggaggagtccatggtcgcctccatgcgtctggcctaccaggagctccagattgatcgtaagaaagaggaaaagaagctacagaatctggaagggaagaagcgagagcaggcagaaaggttgggcatgggcttggtatcccgaagctctgtctcccactccgtgctgtctgagatgcaggtgattgagcaggaaaccccagtgagtgcaaaatcctctcgctcgcagctggacttgtttgacgatgttggtactttcgcctctggacccccaaagtacaaggacaatcccttttccttaggggaaagctttggctcccgctgggatacagatgctgcctggggtatggacagggtagaggagaaggagccagaagtgaccatctcaagcatccggcctatttcagaaagagccacaaaccggagggaagtggagagccggagctcaggcctcgagtctagtgaggcgcgtcagaaattcgcaggagccaaagccatctcatctgacatgttctttgggcgggaggtggatgcagagtatgaggccaggtctcggctgcagcagctctcaggcagcagtgccatcagctcttcagacctctttggggacatggatggagctcacggagcaggaagtgtatctctggggaacgtgctgcctacagcggacattgcccagtttaagcagggtgtcaagtctgtggctgggaaaatggctgtgctggccaatggtgtgatgaattccttgcaggatcgctacggttcctactgatccgagctctgtgactcaggcttacgatggtgacggcaacaagaactccacagttcccaggctggggatgctttgccttgtggaagctggggaggatttgttacttcgtatgtgtggtgtgtgtgtggggtggcctttgaggcgctcactcctgtgaggggaatggtcagtaccagcccttgtcctctgcctgtggactga

SEQ ID NO: 85182 - DNA, 1565 bp, Artificial Sequence
  derived and/or modified sequence
gaaatccagactctttttaagaggcttcgcgcagttccaaccaacaaggcctgtttcgactgcggcgccaagaatccgagttgggccagcatcacgtacggtgttttcttgtgcattgactgttccggggtgcaccgctccctgggcgtccatctgagcttcatcaggtccacagagttggattccaactggaactggttccagctgaggtgtatgcaggtcggcgggaatgccaatgcgacggctttttttcgccaacatggatgcacagccaatgatgccaacaccaaatataatagccgagctgcccagatgtaccgggagaagatccggcagctggggagtgcggccctggctaggcatggcactgatccccctgcctgggatgcgccagccactgagccttcagggacccagcagccagccccgtctacagagagcagtggcctggcacagccggagcatggccccaacacagacctgcttggcacctcacccaaagcctcactggaactgaaaagctccatcattggcaagaagaagccagcagcagctaagaaagggctgggtgccaagaaaggcctaggggcccagaaggtgagcagccagagcttcagtgagattgagcggcaggctcaggtggcagagaagctccgtgagcagcaggcagccgatgccaagaagcaggcggaggagtccatggtcgcctccatgcgtctggcctaccaggagctccagattgatcgtaagaaagaggaaaagaagctacagaatctggaagggaagaagcgagagcaggcagaaaggttgggcatgggcttggtatcccgaagctctgtctcccactccgtgctgtctgagatgcaggtgattgagcaggaaaccccagtgagtgcaaaatcctctcgctcgcagctggacttgtttgacgatgttggtactttcgcctctggacccccaaagtacaaggacaatcccttttccttaggggaaagctttggctcccgctgggatacagatgctgcctggggtatggacagggtagaggagaaggagccagaagtgaccatctcaagcatccggcctatttcagaaagagccacaaaccggagggaagtggagagccggagctcaggcctcgagtctagtgaggcgcgtcagaaattcgcaggagccaaagccatctcatctgacatgttctttgggcgggaggtggatgcagagtatgaggccaggtctcggctgcagcagctctcaggcagcagtgccatcagctcttcagacctctttggggacatggatggagctcacggagcaggaagtgtatctctggggaacgtgctgcctacagcggacattgcccagtttaagcagggtgtcaagtctgtggctgggaaaatggctgtgctggccaatggtgtgatgaattccttgcaggatcgctacggttcctactgatccgagctctgtgactcaggcttacgatggtgacggcaacaagaactccacagttcccaggctggggatgctttgccttgtggaagctggggaggatttgttacttc

SEQ ID NO: 85183 - DNA, 2369 bp, Artificial Sequence
  derived and/or modified sequence
gcggttgtgtctgggaaggagagaaaatggcggcggagccgaacaagaccgaaatccagactctttttaagaggcttcgcgcagttccaaccaacaaggcctgtttcgactgcggcgccaagaatccgagttgggccagcatcacgtacggtgttttcttgtgcattgactgttccggggtgcaccgctccctgggcgtccatctgagcttcatcaggtccacagagttggattccaactggaactggttccagctgaggtgtatgcaggtcggcgggaatgccaatgcgctgggtgccaagaaaggcctaggggcccagaaggtgagcagccagagcttcagtgagattgagcggcaggctcaggtggcagagaagctccgtgagcagcaggcagccgatgccaagaagcaggcggaggagtccatggtcgcctccatgcgtctggcctaccaggagctccagattgatcgtaagaaagaggaaaagaagctacagaatctggaagggaagaagcgagagcaggcagaaaggttgggcatgggcttggtatcccgaagctctgtctcccactccgtgctgtctgagatgcaggtgattgagcaggaaaccccagtgagtgcaaaatcctctcgctcgcagctggacttgtttgacgatgttggtactttcgcctctggacccccaaagtacaaggacaatcccttttccttaggggaaagctttggctcccgctgggatacagatgctgcctggggtatggacagggtagaggagaaggagccagaagtgaccatctcaagcatccggcctatttcagaaagagccacaaaccggagggaagtggagagccggagctcaggcctcgagtctagtgaggcgcgtcagaaattcgcaggagccaaagccatctcatctgacatgttctttgggcgggaggtggatgcagagtatgaggccaggtctcggctgcagcagctctcaggcagcagtgccatcagctcttcagacctctttggggacatggatggagctcacggagcaggaagtgtatctctggggaacgtgctgcctacagcggacattgcccagtttaagcagggtgtcaagtctgtggctgggaaaatggctgtgctggccaatggtgtgatgaattccttgcaggatcgctacggttcctactgatccgagctctgtgactcaggcttacgatggtgacggcaacaagaactccacagttcccaggctggggatgctttgccttgtggaagctggggaggatttgttacttcgtatgtgtggtgtgtgtgtggggtggcctttgaggcgctcactcctgtgaggggaatggtcagtaccagcccttgtcctctgcctgtggactgagccctttattccctctcacaccaccctccgtgtgttagactcttgtccttctgtcctgcccccacagctgctgctcacttatcctgccatactgggaaagggggttcccccacgatggcttattctgggtccagactttccccaggtagggaaagcggaaggtagaaggctttttttgctggctctagggttcttctagttcgaggccttgggtccccatcctctggaaccagggggaggcctggaaggagttcactgtagacccgtcccatggggaaagaggctgcggacttgctgctgctgctgctgccagtggcctcttctgggtgccaggagaggggaaggacctttgtctgggcgttaccaagggctggaaactttacctggtacctaaaggtttcatttgggatcagaccggagacccttgggttctcccgtctcaccacccctttctacagtaagcacttggaagattgtttcagggtgtctcagggtccctctgtaccatctgctgtggaatgcaggaccctctgtgacattctttatcccttcttccccgggttggtggccatggagggtcttgtctgctgtgattcgactctggatgctgtgagcttgatgctggccagggaagcagaggatgtgagaggcagaggcaggctcctggggctgagctccttcctctgcatcattctgggcttggcctggacagcacccgccagtgagagctgtgggcctcaccctctggcagctgagccaagcactgtcattcttggtgccatcttcccctgccgcaccggcagtctcagcccagcccccacctttgggttgtaggttgggctcccaagcaacacagaccactcttccccttgcccctcccccagagggacttgactttctttctggactgtttgtattgaaacaaagtggtgtcaaaataaagcccctgcagggcctggctccctgttggtctgagtgaagcag

SEQ ID NO: 85184 - DNA, 759 bp, Artificial Sequence
  derived and/or modified sequence
atggtggcctccatgaggctggcctaccaggagctgcagattgacaggaagaaggaggagaagaagctgcagaacctggagggcaagaagcgggagcaggccgagcggctgggcatgggcctggtgagccgcagctctgtgagccacagcgtgctgtctgagatgcaggtgattgagcaggagacccctgtgtctgccaagagcagccgcagccagctggacctgtttgatgatgtgggcacctttgccagcggcccccccaagtacaaggacaaccccttcagcctgggggagagctttggcagccgctgggacacagatgctgcctggggcatggacagagtggaggagaaggagcctgaggtgaccatcagcagcatccggcccatcagcgagcgggccaccaacagaagagaggtggagagccgcagcagcggcctggagagcagcgaggcccggcagaagtttgctggggccaaggccatcagcagtgacatgttcttcggccgggaggtggatgctgaatatgaggcccggagccggctgcagcagctgagcggcagcagcgccatcagcagcagtgacctgtttggagacatggatggagcccacggggccggctctgtgtccctgggcaatgtgctgcccacagctgacatcgcccagttcaagcagggcgtgaagtctgtggccggcaagatggctgtgctggccaatggagtgatgaacagcctgcaggacagatatggcagctactag

SEQ ID NO: 85185 - DNA, 1245 bp, Artificial Sequence
  derived and/or modified sequence
atgcaggtgggcggcaatgccaatgccacagccttcttccggcagcacggctgcacagccaatgatgccaacaccaagtacaacagcagagctgcccagatgtaccgggagaagatccggcagctgggcagcgctgccctggcccggcacggcacagaccccccagcctgggatgccccagccacagagcccagcggcacccagcagcctgcccccagcacagagagcagcggcctggcccagcctgagcacggccccaacacagacctgctgggcaccagccccaaggccagcctggagctgaagagcagcatcatcggcaagaagaagccagctgctgccaagaagggcctgggcgccaagaagggcctgggcgcccagaaggtgagcagccagagcttcagcgagattgagcggcaggcccaggtggccgagaagctgcgggagcagcaggccgcagatgccaagaagcaggccgaggagagcatggtggcctccatgaggctggcctaccaggagctgcagattgacaggaagaaggaggagaagaagctgcagaacctggagggcaagaagcgggagcaggccgagcggctgggcatgggcctggtgagccgcagctctgtgagccacagcgtgctgtctgagatgcaggtgattgagcaggagacccctgtgtctgccaagagcagccgcagccagctggacctgtttgatgatgtgggcacctttgccagcggcccccccaagtacaaggacaaccccttcagcctgggggagagctttggcagccgctgggacacagatgctgcctggggcatggacagagtggaggagaaggagcctgaggtgaccatcagcagcatccggcccatcagcgagcgggccaccaacagaagagaggtggagagccgcagcagcggcctggagagcagcgaggcccggcagaagtttgctggggccaaggccatcagcagtgacatgttcttcggccgggaggtggatgctgaatatgaggcccggagccggctgcagcagctgagcggcagcagcgccatcagcagcagtgacctgtttggagacatggatggagcccacggggccggctctgtgtccctgggcaatgtgctgcccacagctgacatcgcccagttcaagcagggcgtgaagtctgtggccggcaagatggctgtgctggccaatggagtgatgaacagcctgcaggacagatatggcagctactag

SEQ ID NO: 85186 - DNA, 1158 bp, Artificial Sequence
  derived and/or modified sequence
atggctgctgagcccaacaagacagagatccagaccctcttcaagaggctgcgggctgtgcccaccaacaaggcctgctttgactgtggggccaagaaccccagctgggccagcatcacctatggagtcttcctgtgcatcgactgcagcggcgtgcacaggagcctgggcgtgcacctgtccttcatccgcagcacagagctggacagcaactggaactggttccagctgcgctgcatgcaggtgggcggcaatgccaatgccctgggcgccaagaagggcctgggcgcccagaaggtgagcagccagagcttcagcgagattgaaaggcaggcccaggtggccgagaagctgcgggagcagcaggccgcagatgccaagaagcaggccgaggagagcatggtggcctccatgaggctggcctaccaggagctgcagattgacaggaagaaggaggagaagaagctgcagaacctggagggcaagaagcgggagcaggccgagcggctgggcatgggcctggtgagccgcagctctgtgagccacagcgtgctgtctgagatgcaggtgattgagcaggagacccctgtgtctgccaagagcagccgcagccagctggacctgtttgatgatgtgggcacctttgccagcggcccccccaagtacaaggacaaccccttcagcctgggggagagctttggcagccgctgggacacagatgctgcctggggcatggacagagtggaggagaaggagcctgaggtgaccatcagcagcatccggcccatcagcgagcgggccaccaacagaagagaggtggagagccgcagcagcggcctggagagcagcgaggcccggcagaagtttgctggggccaaggccatcagcagtgacatgttcttcggccgggaggtggatgctgaatatgaggcccggagccggctgcagcagctgagcggcagcagcgccatcagcagcagtgacctgtttggagacatggatggagcccatggagctggctctgtgtccctgggcaatgtgctgcccacagctgacatcgcccagttcaagcagggcgtgaagtctgtggccggcaagatggctgtgctggccaacggggtgatgaacagcctgcaggacagatatggcagctactag

SEQ ID NO: 85187 - DNA, 759 bp, Artificial Sequence
  derived and/or modified sequence
atggtggccagcatgcggctggcctaccaggagctgcagatcgacagaaagaaagaggagaaaaagctgcagaacttagaaggcaaaaaacgtgagcaggccgaacggctgggaatgggtctcgtgtcgaggagttccgttagccactctgtcctgtccgagatgcaagtgattgaacaagaaactcctgtcagcgcgaagtctagtagaagccagctagatctgttcgacgacgtcggtaccttcgcttctggtccacccaagtataaagataaccccttcagtctgggcgagtctttcggatcccgatgggataccgacgccgcgtgggggatggatagagtagaagagaaggaaccagaggtgaccattagttccatacggcctatctctgagcgcgccacaaataggcgagaggtcgaatctcggtcttccgggcttgagtcctctgaggcacgccagaaattcgccggcgccaaagccatcagcagcgatatgtttttcggacgcgaagtcgatgctgagtacgaagcaaggagccgcctacagcagctttccggttccagcgccatttcaagtagtgatctattcggtgacatggacggagcacatggcgctggcagtgtttcactggggaacgtcctaccgaccgcagacatcgctcagtttaaacaaggggtgaaaagtgttgcaggaaagatggctgtgctagctaatggggttatgaattcacttcaggacaggtatgggtcctattag

SEQ ID NO: 85188 - DNA, 1245 bp, Artificial Sequence
  derived and/or modified sequence
atgcaggtgggcggcaacgccaacgccaccgccttcttccggcagcacggctgcacagctaatgatgcgaacaccaaatataactcgcgtgccgcccagatgtatagggagaaaatcaggcagctcggatctgccgctctcgcaagacacgggacagatccacccgcctgggacgctcccgctacagagccttctggaacacagcaaccggctccaagcacagagtcctcaggacttgcccagcctgagcatgggcccaataccgatctacttggtacgtctccaaaggccagtcttgagctgaaaagcagcatcataggtaaaaagaagccggccgcggccaaaaagggcttaggcgcgaaaaaaggactgggcgctcagaaggtgagcagtcagagttttagcgagatagaacggcaagcacaggtagccgagaagctcagggaacaacaggccgccgacgccaagaagcaggcagaagagagtatggtggcgtctatgagactcgcatatcaggagctgcagatagatcgaaagaaagaggaaaagaaactgcagaatctggaaggaaagaagagagagcaagccgagcgcctcgggatggggctcgtctctaggtccagcgtcagccatagcgtgctatctgagatgcaggttattgaacaggaaacaccagtttccgcaaaaagcagcagaagccagctcgacctgttcgatgatgtcggcaccttcgcctccggcccacccaagtataaggataatccctttagcctcggcgagagcttcgggagtaggtgggacaccgacgccgcgtggggtatggatagagtggaggagaaggaacccgaagtaactatctcaagcattcgcccaatcagcgaaagggccacgaatagacgcgaggtggagtccagatcaagtggcctggagtcctctgaggcccggcagaaatttgctggcgcaaaggccatatcatccgatatgttttttggacgggaagtcgacgcagagtacgaggccagatccagactgcagcagctgtccggatcctcggccatcagcagtagtgatttatttggcgacatggatggagctcatggagcaggatcagtctccctggggaacgtccttcccaccgccgatattgcacagttcaagcagggagtcaagtcagtcgccgggaagatggccgtcctggccaatggcgttatgaactccctgcaggatcggtacggctcctattag

SEQ ID NO: 85189 - DNA, 1158 bp, Artificial Sequence
  derived and/or modified sequence
atggccgccgagcccaacaagaccgagatccagaccctgttcaagagactgcgagcagtgcccacaaacaaggcttgcttcgactgtggtgctaagaatccctcatgggcttctatcacatacggggtgttcctctgcattgactgcagcggagtacacaggtctctaggcgtccatctcagctttatcagatcaacagagctcgactctaattggaattggtttcagctacgctgcatgcaagtcggcggaaatgccaatgcccttggtgctaaaaagggattaggggcgcaaaaggtgtcctctcagagcttttccgagatcgaacgtcaggctcaggtagcagagaagctgagggagcagcaggctgcagatgctaagaagcaggccgaggaatctatggtggcctccatgcggctggcctaccaggaactgcagattgacagaaaaaaggaagaaaagaaactccagaatttggaagggaagaagagggagcaggctgaaagactaggcatgggcctagtcagccgcagcagcgtatcacattcagtcctgagcgaaatgcaggtgatcgaacaggagacacccgtgagtgctaaaagcagtcgatcccagttagatttgtttgacgacgtaggaacatttgccagcggcccacctaaatacaaggacaatcccttttcactcggcgagagctttggctctcggtgggacactgatgctgcctgggggatggacagggtagaggagaaggaaccggaggttaccattagctctataagacccatatctgagcgggcaacgaataggagggaggtcgagagccggtcttctggtcttgagagttccgaggctcgacagaagtttgctggagcaaaagccatatcctctgatatgttcttcgggcgtgaggtagacgctgagtacgaagctaggtcacgacttcagcagcttagcggctcgagcgctatttcttctagcgaccttttcggagatatggatggcgcccacggggcaggatccgtttccctgggaaatgtgctacccactgctgatatcgcacagttcaaacagggggttaaaagtgtggctggcaaaatggcagtgcttgcgaacggcgtcatgaacagtctgcaggatagatacggttcttattag

SEQ ID NO: 85190 - DNA, 759 bp, Artificial Sequence
  derived and/or modified sequence
atggtggcgagtatgaggttggcttaccaggagttacagatcgatcggaaaaaagaggagaaaaagctgcaaaacctggaagggaagaaacgggagcaagccgagaggctaggcatgggcctggtgagccggagttctgtgagccactcggtgttgagcgagatgcaggtaattgagcaagaaacacccgtgtctgctaagagttcccgcagccagttggacctattcgacgatgtcgggacatttgccagcggtccaccgaagtataaagataatcctttcagtctgggcgagagcttcggcagtcgctgggatacagacgccgcatggggaatggaccgggtagaggaaaaagagcccgaagttaccatcagctccattaggcctatttcagagagggcaacgaatcgtcgagaagtggaaagtagatcctccggcttggaatcttcggaggcacgacagaaatttgccggagccaaagctattagctctgatatgttttttggcagagaagtggatgcagagtatgaggcccgttcgcgcctgcagcagctgagtgggtcctcagccatttcgagctctgacctgtttggggatatggatggagcccacggggctggctctgtatctctcgggaatgtcttgcctaccgctgatatcgcccagttcaagcagggagtcaagtctgtcgccggaaaaatggctgtgctcgctaacggagtgatgaattctctccaagatcggtacgggtcttactag

SEQ ID NO: 85191 - DNA, 1245 bp, Artificial Sequence
  derived and/or modified sequence
atgcaggtcggagggaacgctaacgcgacagcatttttcagacagcacgggtgtacagccaatgacgcaaataccaaatacaactcccgagccgctcaaatgtacagagagaaaatcaggcagctgggaagcgccgctctggctcgccacggaaccgacccacctgcctgggatgctcccgcaaccgaacctagcgggactcagcaacctgcaccgtctaccgagtcttcaggccttgcccagcctgaacatggcccaaataccgacttgctcggcactagccccaaggcttcactggaactcaaaagctcaataatcggcaaaaagaaaccagccgctgcaaagaagggactgggtgcaaagaaggggctgggtgcacagaaggtgagctcgcagtcgttcagtgaaatcgagcggcaggcgcaggtagctgaaaaactgagggaacagcaagcagccgacgccaagaaacaggcagaagaaagcatggtggcttcaatgcggctggcctatcaggaactgcagattgatcgaaagaaggaggagaagaagctgcagaatcttgaggggaaaaaacgcgaacaggctgagcgcctcggaatgggcctcgtatccagatcttcagtgtctcattccgtgctcagtgagatgcaggtgattgaacaggaaacacccgtctctgctaagagttccaggtcccaactggacctcttcgatgacgttggcaccttcgccagtgggccacccaaatataaggataacccattctccctcggagagtcattcggttcacggtgggatactgatgctgcttggggaatggatagggtcgaagagaaggaaccggaggtcaccattagctctatacgcccaattagcgaaagagcgactaatagaagagaagtggaatcccggtcatccggcctcgagtctagcgaggcacgacagaagtttgctggagctaaggctatctccagtgacatgttcttcgggagagaggtggacgccgagtacgaagcaaggtccagactccagcagctgtcaggcagttcagccatttcaagttccgacttattcggtgacatggatggcgcacacggagcaggttccgtcagcttggggaatgttctcccaacagccgacattgcacaatttaaacagggagttaaatccgtagccggaaaaatggccgtcctggctaatggagtcatgaactcactccaggatcggtacggttcttattag

SEQ ID NO: 85192 - DNA, 1158 bp, Artificial Sequence
  derived and/or modified sequence
atggcggctgaaccaaataaaaccgagattcaaacgttgtttaagcgactccgtgccgtgcccacgaataaagcttgctttgactgcggagccaagaatccctcctgggcatcgataacatacggtgtatttctgtgcatagactgctctggggtccatcgctcattaggagtacatctatccttcatcaggtcaaccgagctggactcgaactggaattggtttcagctccgatgtatgcaggtcgggggaaacgccaacgccctgggtgccaaaaagggtttgggagctcagaaagtgagtagtcaatcattctcggagattgagcgacaggcccaagtggccgaaaagctgcgggagcagcaggcagccgatgctaagaagcaagccgaagagagtatggttgcttctatgaggctggcctatcaagaattgcagatcgataggaagaaagaagaaaaaaagctccagaatctggaggggaaaaagcgtgagcaagcagagcggctgggaatggggctggtgtccagaagcagcgtatcacatagcgtcctatccgagatgcaggtcatcgaacaagaaacgcccgtcagcgccaaaagtagcaggtctcaactcgacctgtttgacgacgtcgggacatttgcttcaggtcctccaaagtacaaagacaacccgttctccttaggggaaagcttcgggagccgctgggacactgatgctgcatggggcatggatcgagttgaggagaaggaaccagaggtgacaatatctagcatcaggcccatcagtgaaagggcaacgaaccggagagaggtggaatccaggagttccggcctcgagtcgtctgaggcccgacaaaaattcgccggtgcgaaagccattagttccgatatgttctttgggagagaggtggatgcagaatacgaagccaggtcaagactccagcagctctccggatcttctgcaatctcctcgagcgatctgttcggagatatggatggggcacacggagctggtagcgtgtctctggggaacgtactccctaccgcagatattgcccaattcaaacagggcgtcaagtcggtcgccggaaaaatggcagtgttggccaatggggtcatgaactcactgcaggaccggtacggctcctactag

SEQ ID NO: 85193 - DNA, 759 bp, Artificial Sequence
  derived and/or modified sequence
atggtggccagcatgagactggcctaccaggagctgcagatcgacagaaagaaggaggagaagaagctgcagaacctggagggcaagaagagagagcaggccgagagactgggcatgggcctggtgagcagaagcagcgtgagccacagcgtgctgagcgagatgcaggtgatcgagcaggagacccccgtgagcgccaagagcagcagaagccagctggacctgttcgacgacgtgggcaccttcgccagcggcccccccaagtacaaggacaaccccttcagcctgggcgagagcttcggcagcagatgggacaccgacgccgcctggggcatggacagagtggaggagaaggagcccgaggtgaccatcagcagcatcagacccatcagcgagagagccaccaacagaagagaggtggagagcagaagcagcggcctggagagcagcgaggccagacagaagttcgccggcgccaaggccatcagcagcgacatgttcttcggcagagaggtggacgccgagtacgaggccagaagcagactgcagcagctgagcggcagcagcgccatcagcagcagcgacctgttcggcgacatggacggcgcccacggcgccggcagcgtgagcctgggcaacgtgctgcccaccgccgacatcgcccagttcaagcagggcgtgaagagcgtggccggcaagatggccgtgctggccaacggcgtgatgaacagcctgcaggacagatacggcagctactag

SEQ ID NO: 85194 - DNA, 1245 bp, Artificial Sequence
  derived and/or modified sequence
atgcaggtgggcggcaacgccaacgccaccgccttcttcagacagcacggctgcaccgccaacgacgccaacaccaagtacaacagcagagccgcccagatgtacagagagaagatcagacagctgggcagcgccgccctggccagacacggcaccgacccccccgcctgggacgcccccgccaccgagcccagcggcacccagcagcccgcccccagcaccgagagcagcggcctggcccagcccgagcacggccccaacaccgacctgctgggcaccagccccaaggccagcctggagctgaagagcagcatcatcggcaagaagaagcccgccgccgccaagaagggcctgggcgccaagaagggcctgggcgcccagaaggtgagcagccagagcttcagcgagatcgagagacaggcccaggtggccgagaagctgagagagcagcaggccgccgacgccaagaagcaggccgaggagagcatggtggccagcatgagactggcctaccaggagctgcagatcgacagaaagaaggaggagaagaagctgcagaacctggagggcaagaagagagagcaggccgagagactgggcatgggcctggtgagcagaagcagcgtgagccacagcgtgctgagcgagatgcaggtgatcgagcaggagacccccgtgagcgccaagagcagcagaagccagctggacctgttcgacgacgtgggcaccttcgccagcggcccccccaagtacaaggacaaccccttcagcctgggcgagagcttcggcagcagatgggacaccgacgccgcctggggcatggacagagtggaggagaaggagcccgaggtgaccatcagcagcatcagacccatcagcgagagagccaccaacagaagagaggtggagagcagaagcagcggcctggagagcagcgaggccagacagaagttcgccggcgccaaggccatcagcagcgacatgttcttcggcagagaggtggacgccgagtacgaggccagaagcagactgcagcagctgagcggcagcagcgccatcagcagcagcgacctgttcggcgacatggacggcgcccacggcgccggcagcgtgagcctgggcaacgtgctgcccaccgccgacatcgcccagttcaagcagggcgtgaagagcgtggccggcaagatggccgtgctggccaacggcgtgatgaacagcctgcaggacagatacggcagctactag

SEQ ID NO: 85195 - DNA, 1158 bp, Artificial Sequence
  derived and/or modified sequence
atggccgccgagcccaacaagaccgagatccagaccctgttcaagagactgagagccgtgcccaccaacaaggcctgcttcgactgcggcgccaagaaccccagctgggccagcatcacctacggcgtgttcctgtgcatcgactgcagcggcgtgcacagaagcctgggcgtgcacctgagcttcatcagaagcaccgagctggacagcaactggaactggttccagctgagatgcatgcaggtgggcggcaacgccaacgccctgggcgccaagaagggcctgggcgcccagaaggtgagcagccagagcttcagcgagatcgagagacaggcccaggtggccgagaagctgagagagcagcaggccgccgacgccaagaagcaggccgaggagagcatggtggccagcatgagactggcctaccaggagctgcagatcgacagaaagaaggaggagaagaagctgcagaacctggagggcaagaagagagagcaggccgagagactgggcatgggcctggtgagcagaagcagcgtgagccacagcgtgctgagcgagatgcaggtgatcgagcaggagacccccgtgagcgccaagagcagcagaagccagctggacctgttcgacgacgtgggcaccttcgccagcggcccccccaagtacaaggacaaccccttcagcctgggcgagagcttcggcagcagatgggacaccgacgccgcctggggcatggacagagtggaggagaaggagcccgaggtgaccatcagcagcatcagacccatcagcgagagagccaccaacagaagagaggtggagagcagaagcagcggcctggagagcagcgaggccagacagaagttcgccggcgccaaggccatcagcagcgacatgttcttcggcagagaggtggacgccgagtacgaggccagaagcagactgcagcagctgagcggcagcagcgccatcagcagcagcgacctgttcggcgacatggacggcgcccacggcgccggcagcgtgagcctgggcaacgtgctgcccaccgccgacatcgcccagttcaagcagggcgtgaagagcgtggccggcaagatggccgtgctggccaacggcgtgatgaacagcctgcaggacagatacggcagctactag

SEQ ID NO: 85196 - protein, 369 aa, Artificial Sequence
  derived and/or modified sequence
MPECWDGVGEGNAGAVKLAGLGDPRWSPGHLLSPGHQEHDIETPYGLLHVVIRGSPKGNRPAILTYHDVGLNHKLCFNTFFNFEDMQEITKHFVVCHVDAPGQQVGASQFPQGYQFPSMEQLAAMLPSVVQHFGFKYVIGIGVGAGAYVLAKFALIFPDLVEGLVLVNIDPNGKGWIDWAATKLSGLTSTLPDTVLSHLFSQEELVNNTELVQSYRQQIGNVVNQANLQLFWNMYNSRRDLDINRPGTVPNAKTLRCPVMLVVGDNAPAEDGVVECNSKLDPTTTTFLKMADSGGLPQVTQPGKLTEAFKYFLQGMGYMPSASMTRLARSRTASLTSASSVDGSRPQACTHSESSEGLGQVNHTMEVSC

SEQ ID NO: 85197 - DNA, 1110 bp, Artificial Sequence
  derived and/or modified sequence
atgcccgagtgctgggacggcgtgggcgagggcaacgccggcgccgtgaagctggccggcctgggcgaccccagatggagccccggccacctgctgagccccggccaccaggagcacgacatcgagaccccctacggcctgctgcacgtggtgatcagaggcagccccaagggcaacagacccgccatcctgacctaccacgacgtgggcctgaaccacaagctgtgcttcaacaccttcttcaacttcgaggacatgcaggagatcaccaagcacttcgtggtgtgccacgtggacgcccccggccagcaggtgggcgccagccagttcccccagggctaccagttccccagcatggagcagctggccgccatgctgcccagcgtggtgcagcacttcggcttcaagtacgtgatcggcatcggcgtgggcgccggcgcctacgtgctggccaagttcgccctgatcttccccgacctggtggagggcctggtgctggtgaacatcgaccccaacggcaagggctggatcgactgggccgccaccaagctgagcggcctgaccagcaccctgcccgacaccgtgctgagccacctgttcagccaggaggagctggtgaacaacaccgagctggtgcagagctacagacagcagatcggcaacgtggtgaaccaggccaacctgcagctgttctggaacatgtacaacagcagaagagacctggacatcaacagacccggcaccgtgcccaacgccaagaccctgagatgccccgtgatgctggtggtgggcgacaacgcccccgccgaggacggcgtggtggagtgcaacagcaagctggaccccaccaccaccaccttcctgaagatggccgacagcggcggcctgccccaggtgacccagcccggcaagctgaccgaggccttcaagtacttcctgcagggcatgggctacatgcccagcgccagcatgaccagactggccagaagcagaaccgccagcctgaccagcgccagcagcgtggacggcagcagaccccaggcctgcacccacagcgagagcagcgagggcctgggccaggtgaaccacaccatggaggtgagctgctag

SEQ ID NO: 85198 - DNA, 1110 bp, Artificial Sequence
  derived and/or modified sequence
atgccggagtgttgggacggtgtcggcgagggcaacgcaggcgcagtgaagctcgcaggactcggcgaccccagatggtcccctggccatctgctgtcgccaggacaccaggaacacgatattgagaccccgtatggcctgttacatgttgtgattagaggatcccctaagggcaacaggccagcgattcttacataccatgacgtgggactgaatcataaattatgctttaatactttcttcaatttcgaggacatgcaggagatcacaaaacattttgtcgtatgccatgtggacgcacctggccagcaggtaggcgcgagtcagtttccacagggataccagtttccatctatggaacagttggccgccatgcttccatccgtggtgcagcacttcggattcaagtacgttattggtattggcgtgggggcaggggcctatgtgctggctaagtttgccttaattttccctgatctcgtcgagggactcgtgcttgtcaacattgacccaaatggcaaaggctggattgattgggctgcgacaaaactctcggggctgacctccacactgcctgatacagtgctgagtcacttattttcccaggaagaacttgtgaataacactgaattggtacaaagttatcgccaacagatcggcaacgtggtgaatcaggctaacctgcagcttttttggaatatgtataacagcagaagagatttagatattaaccggcctgggactgtgccaaatgcaaaaaccctaagatgtccagttatgctggtggtgggggacaatgcgcctgccgaggatggcgtggtcgaatgtaattcaaagttggatcctaccacgactactttcttaaaaatggccgacagcggaggcttgccacaagtgactcagccaggcaaactgaccgaggccttcaagtactttcttcagggtatgggatacatgccctccgccagcatgaccagactggcgcgcagccggaccgcatctcttacgagcgcctcctcagtggatggatcacgcccgcaggcctgtacccacagcgaaagctctgaagggctgggccaggtaaaccacaccatggaggtgtcctgttag

SEQ ID NO: 85199 - DNA, 1110 bp, Artificial Sequence
  derived and/or modified sequence
atgcctgagtgctgggatggagtgggggagggcaatgctggagctgtgaagctggccggcctgggggacccccgctggagccctggccacctgctgagccctggccaccaggagcatgacatcgagaccccctacggcctgctgcacgtggtgatccggggcagccccaagggcaacagacctgccatcctgacctaccatgatgtgggcctgaaccacaagctgtgcttcaacaccttcttcaactttgaggacatgcaggagatcaccaagcactttgtggtgtgccacgtggatgcccctggccagcaggtgggcgccagccagttcccccagggctaccagttccccagcatggagcagctggccgccatgctgcccagcgtggtgcagcacttcggcttcaagtatgtgattggaattggagtgggcgctggggcctacgtgctggccaagtttgccctgatcttcccagacctggtggagggcctggtgctggtgaacatcgaccccaacgggaagggctggattgactgggccgccaccaagctgagcggcctgaccagcaccctgcctgacacagtgctgagccacctgttcagccaggaggagctggtgaacaacacagagctggtgcagagctaccggcagcagattggaaatgtggtgaaccaggccaacctgcagctgttctggaacatgtacaacagccggcgggacctggacatcaaccggcccggcaccgtgcccaatgccaagaccctgcgctgccctgtgatgctggtggtgggggacaatgccccagcagaagatggagtggtggagtgcaacagcaagctggaccccaccaccaccaccttcctgaagatggctgacagcggcggcctgccccaggtgacccagcccgggaagctgacagaggccttcaagtacttcctgcagggcatgggctacatgcccagcgcctccatgacccggctggcccggagcaggacagccagcctgaccagcgccagctctgtggatggcagccggccccaggcctgcacccacagcgagagcagcgagggcctgggccaggtgaaccacaccatggaggtgtcctgctag

SEQ ID NO: 85200 - DNA, 1110 bp, Artificial Sequence
  derived and/or modified sequence
atgcccgagtgctgggacggcgtgggcgagggcaacgccggcgccgttaaactggcaggtctcggcgatcctcgctggagtccaggacacctgctgtcccctggccatcaggagcatgacattgagacgccatatggtctgcttcatgtggtcatccggggaagccctaagggtaaccgccctgctattctgacatatcacgacgtgggtttgaatcacaagctgtgttttaatacttttttcaattttgaggacatgcaggagatcacaaagcactttgtggtctgccacgtggacgccccgggtcagcaggtcggggccagccaatttcctcagggctatcagtttcctagtatggaacagttagctgcaatgctgccttctgtggttcagcactttggctttaaatacgtcatagggatcggggttggtgcaggtgcttacgttcttgctaagtttgcacttatttttcctgacctagtggagggtctggtcctagtcaatatagaccctaatggaaaaggatggatagactgggctgcaactaaacttagtggcctgacctcaactttacccgatacagttctttcacatttattttctcaggaggagttggttaacaatactgaactcgtccagagttacagacagcagattggaaatgttgtgaaccaggcaaacctccagctcttctggaatatgtataattctaggcgcgatcttgacatcaaccgccccggaaccgtacctaacgccaaaactctgcggtgtcccgtaatgcttgtcgttggtgacaacgcacctgcggaggatggcgtcgtggagtgcaattccaagttggatcccaccacaacgacattcctgaagatggccgacagcggaggattgcctcaggtgactcaacctggaaagctgacagaggccttcaagtactttcttcagggaatgggatacatgccttcagcctcaatgacccggctggcgagaagccgtactgcttccctgacttctgcatcctctgttgacggttcaaggccccaggcctgtacacactccgaatcctcagaggggcttggacaagtcaaccatacaatggaagtcagctgttag

SEQ ID NO: 85201 - DNA, 1375 bp, Artificial Sequence
  derived and/or modified sequence
acagagccgaccatctcccactcgagctgcccccgccctctggacccgagtgactcaggcctttgtttgtccttcctggtagaggcgggttccctccctcggcaagatgccggagtgctgggatggggtgggggaaggcaacgctggagccgtgaagctggcagggctaggggaccccaggtggagcccagggcacctcctctcgccggggcatcaggaacatgacatcgagacaccctacggccttctgcatgtagtgatccggggctcccccaaggggaaccgcccagccatcctcacctaccatgatgtgggcctcaaccacaaactatgcttcaacaccttcttcaacttcgaggacatgcaggagatcaccaagcactttgtggtgtgtcacgtggatgcccctggacaacaggtgggggcgtcgcagtttcctcaggggtaccagttcccctccatggagcagctggctgccatgctccccagcgtggtgcagcatttcgggttcaagtatgtgattggcatcggagtgggcgccggagcctatgtgctggccaagtttgcactcatcttccccgacctggtggaggggctggtgctggtgaacatcgaccccaatggcaaaggctggatagactgggctgccaccaagctctccggcctaactagcactttacccgacacggtgctctcccacctcttcagccaggaggagctggtgaacaacacagagttggtgcagagctaccggcagcagattgggaacgtggtgaaccaggccaacctgcagctcttctggaacatgtacaacagccgcagagacctggacattaaccggcctggaacggtgcccaatgccaagacgctccgctgccccgtgatgctggtggttggggataatgcacccgctgaggacggggtggtggagtgcaactccaaactggacccgaccactacgaccttcctgaagatggcagactctggagggctgccccaggtcacacagccagggaagctgactgaagccttcaaatacttcctgcaaggcatgggctacatgccctcagccagcatgacccgcctggcacgctcccgcactgcatccctcaccagtgccagctcggtggatggcagccgcccacaggcctgcacccactcagagagcagcgaggggctgggccaggtcaaccacaccatggaggtgtcctgttgaagcccttgatcccgctgacgacgcccacgtcgaggccccaccgccatccttgcgccggctcatgttccctttagtttatttttgtgagggcaaaggggaggaaatggggttctgtttgaaaaaaatgaggggatcttagatgctgcagcagaacagtct

SEQ ID NO: 85202 - DNA, 1110 bp, Artificial Sequence
  derived and/or modified sequence
atgccagagtgctgggatggggtgggggagggcaatgccggagctgtaaagctggccggacttggagaccctcggtggagtcctggccatctcttgtctcctggtcaccaggaacatgacatcgaaactccatacgggttgctacatgttgtgattagaggaagccctaagggcaaccggccagcaatcttgacgtaccacgacgtcggactgaatcacaagctttgtttcaacacttttttcaactttgaagatatgcaggaaattaccaaacattttgttgtctgtcacgtcgacgcacccggtcaacaggtcggtgctagtcagtttccacaggggtaccaatttcctagcatggaacaattagcagctatgctcccctccgttgtccagcacttcggctttaagtacgtcatcggcatcggggtgggagcaggagcttatgtgctcgccaagtttgcactcatctttcctgacctcgtggaggggctagtacttgttaatatcgatccaaatggaaagggatggatagactgggcggcaaccaaactcagcggcttgacttccacccttccggacactgttttgagtcatctcttttcacaagaagaattagtcaacaacacggagctggtgcagtcatatagacagcagatcggcaatgtggtgaatcaggcaaatcttcagcttttctggaatatgtacaatagccgacgagatcttgacataaatagacctggaacggtgcccaatgctaagactctccgttgtccagtcatgcttgtggtcggcgacaatgcccctgccgaagacggagtggtcgagtgcaattctaagttagatccaacaactactaccttcctgaagatggctgactctggtggtctgcctcaggttacccagccgggaaaactgaccgaggccttcaaatactttctgcagggcatgggctacatgcccagtgcctccatgacacgattggcccgtagtagaacggcttccctaacctcggctagcagtgtggacgggagccggccacaggcatgcacacactccgaatcctctgaaggcctggggcaggtgaaccataccatggaggtgtcatgctag

SEQ ID NO: 85203 - protein, 352 aa, Artificial Sequence
  derived and/or modified sequence
MPECWDGEHDIETPYGLLHVVIRGSPKGNRPAILTYHDVGLNHKLCFNTFFNFEDMQEITKHFVVCHVDAPGQQVGASQFPQGYQFPSMEQLAAMLPSVVQHFGFKYVIGIGVGAGAYVLAKFALIFPDLVEGLVLVNIDPNGKGWIDWAATKLSGLTSTLPDTVLSHLFSQEELVNNTELVQSYRQQIGNVVNQANLQLFWNMYNSRRDLDINRPGTVPNAKTLRCPVMLVVGDNAPAEDGVVECNSKLDPTTTTFLKMADSGGLPQVTQPGKLTEAFKYFLQGMGYIAYLKDRRLSGGAVPSASMTRLARSRTASLTSASSVDGSRPQACTHSESSEGLGQVNHTMEVSC

SEQ ID NO: 85204 - DNA, 894 bp, Artificial Sequence
  derived and/or modified sequence
atgcaggagatcaccaagcacttcgtggtgtgccacgtggacgcccccggccagcaggtgggcgccagccagttcccccagggctaccagttccccagcatggagcagctggccgccatgctgcccagcgtggtgcagcacttcggcttcaagtacgtgatcggcatcggcgtgggcgccggcgcctacgtgctggccaagttcgccctgatcttccccgacctggtggagggcctggtgctggtgaacatcgaccccaacggcaagggctggatcgactgggccgccaccaagctgagcggcctgaccagcaccctgcccgacaccgtgctgagccacctgttcagccaggaggagctggtgaacaacaccgagctggtgcagagctacagacagcagatcggcaacgtggtgaaccaggccaacctgcagctgttctggaacatgtacaacagcagaagagacctggacatcaacagacccggcaccgtgcccaacgccaagaccctgagatgccccgtgatgctggtggtgggcgacaacgcccccgccgaggacggcgtggtggagtgcaacagcaagctggaccccaccaccaccaccttcctgaagatggccgacagcggcggcctgccccaggtgacccagcccggcaagctgaccgaggccttcaagtacttcctgcagggcatgggctacatcgcctacctgaaggacagaagactgagcggcggcgccgtgcccagcgccagcatgaccagactggccagaagcagaaccgccagcctgaccagcgccagcagcgtggacggcagcagaccccaggcctgcacccacagcgagagcagcgagggcctgggccaggtgaaccacaccatggaggtgagctgctag

SEQ ID NO: 85205 - DNA, 1059 bp, Artificial Sequence
  derived and/or modified sequence
atgcccgagtgctgggacggcgagcacgacatcgagaccccctacggcctgctgcacgtggtgatcagaggcagccccaagggcaacagacccgccatcctgacctaccacgacgtgggcctgaaccacaagctgtgcttcaacaccttcttcaacttcgaggacatgcaggagatcaccaagcacttcgtggtgtgccacgtggacgcccccggccagcaggtgggcgccagccagttcccccagggctaccagttccccagcatggagcagctggccgccatgctgcccagcgtggtgcagcacttcggcttcaagtacgtgatcggcatcggcgtgggcgccggcgcctacgtgctggccaagttcgccctgatcttccccgacctggtggagggcctggtgctggtgaacatcgaccccaacggcaagggctggatcgactgggccgccaccaagctgagcggcctgaccagcaccctgcccgacaccgtgctgagccacctgttcagccaggaggagctggtgaacaacaccgagctggtgcagagctacagacagcagatcggcaacgtggtgaaccaggccaacctgcagctgttctggaacatgtacaacagcagaagagacctggacatcaacagacccggcaccgtgcccaacgccaagaccctgagatgccccgtgatgctggtggtgggcgacaacgcccccgccgaggacggcgtggtggagtgcaacagcaagctggaccccaccaccaccaccttcctgaagatggccgacagcggcggcctgccccaggtgacccagcccggcaagctgaccgaggccttcaagtacttcctgcagggcatgggctacatcgcctacctgaaggacagaagactgagcggcggcgccgtgcccagcgccagcatgaccagactggccagaagcagaaccgccagcctgaccagcgccagcagcgtggacggcagcagaccccaggcctgcacccacagcgagagcagcgagggcctgggccaggtgaaccacaccatggaggtgagctgctag

SEQ ID NO: 85206 - DNA, 894 bp, Artificial Sequence
  derived and/or modified sequence
atgcaggagataacgaaacacttcgttgtttgtcatgtcgatgctccgggccagcaggtgggagctagccaatttccacagggctaccaattccccagcatggagcaactagccgctatgcttcccagcgtggtccaacacttcggcttcaagtacgttatcggaataggggttggcgccggagcttatgtgctggcaaagttcgctttgatctttcctgacctcgtcgaaggcctggtgctggtaaacattgaccctaatggcaaaggctggatcgattgggccgccactaagctgtccgggctgacatcaaccttgcccgacacggtgctctcccatctctttagtcaggaagagctagtgaacaacacagagctggtccagagttaccggcaacagatcggtaatgtcgtgaaccaggctaacctgcagctgttttggaacatgtacaattctcgcagagatctggatatcaaccggcctgggacggtaccgaatgctaagacactccgatgtccagtcatgttggtggtgggtgataatgctccagccgaagacggcgtggtggagtgcaactctaagctcgatcctaccacaaccacgttcttaaaaatggcggactccggcggcctgccacaggtgacccagccggggaagctgactgaggctttcaaatattttctgcagggcatgggatacatcgcttacctgaaggaccgtcgactgtcagggggagcagtgccctctgcttccatgactcgcctggccagatctcgcacagcttctctcacttctgcttccagtgtggatggatccagaccccaggcctgcactcactccgagagttcagagggcctgggccaggtcaatcacacaatggaagtgtcttgctag

SEQ ID NO: 85207 - DNA, 1059 bp, Artificial Sequence
  derived and/or modified sequence
atgcccgagtgctgggacggggaacacgacatcgaaactccttacggactgcttcacgtagtgatcagaggcagccccaaaggaaaccgccctgccattctcacttatcacgatgttggtcttaatcataagctatgctttaatacgttttttaacttcgaggacatgcaagagataaccaaacactttgtagtatgccacgttgacgcacccgggcaacaggttggcgcctcacagtttccacagggctatcagttcccctccatggagcagctcgcagccatgctgccttctgtagttcagcacttcggctttaagtatgtcattgggatcggcgttggtgccggggcctatgtgctcgcaaagttcgccttaatctttccagacctggtagagggactggtccttgtcaatattgacccaaacggcaaggggtggattgattgggcagcgacaaagctttccgggcttacaagtacactgccggacactgtgctttcccaccttttttcacaggaagagctcgtgaataataccgaacttgtgcagagctaccgccagcagatagggaacgtggtgaaccaggccaacctgcaactattctggaacatgtataatagccggagggatctcgatataaataggccggggactgtgcctaacgcaaaaacactgaggtgcccggtaatgttggttgtcggcgataacgcaccagcggaagatggcgtggttgaatgcaactcaaagctcgatcccacaacaaccactttcctgaaaatggctgattcaggcggcttgccccaagtcactcaacctggcaaactgactgaagctttcaagtatttcctacaggggatgggctacatcgcctatctgaaagataggcgtctgtctggcggagctgtgccctccgcctctatgactaggttggctcgcagcagaacggcctctttaacatcagcaagtagcgttgacggcagtcggcctcaggcctgtacccactctgaatcgagcgaaggcttgggtcaggtgaatcataccatggaagtgagttgctag

SEQ ID NO: 85208 - DNA, 894 bp, Artificial Sequence
  derived and/or modified sequence
atgcaggagatcaccaagcactttgtggtgtgccacgtggatgcccctggccagcaggtgggcgccagccagttcccccagggctaccagttccccagcatggagcagctggccgccatgctgcccagcgtggtgcagcacttcggcttcaagtatgtgattggcatcggcgtgggcgctggggcctacgtgctggccaagtttgccctgatcttcccagacctggtggagggcctggtgctggtgaacatcgaccccaacgggaagggctggattgactgggccgccaccaagctgagcggcctgaccagcaccctgcctgacacagtgctgagccacctgttcagccaggaggagctggtgaacaacacagagctggtgcagagctaccggcagcagattggaaatgtggtgaaccaggccaacctgcagctgttctggaacatgtacaacagcagaagagacctggacatcaacagacctggcaccgtgcccaatgccaagaccctgcgctgccctgtgatgctggtggtgggggacaatgccccagcagaagatggagtggtggagtgcaacagcaagctggaccccaccaccaccaccttcctgaagatggctgacagcggcggcctgccccaggtgacccagcccgggaagctgacagaggccttcaagtacttcctgcagggcatgggctacatcgcctacctgaaggaccggcggctgtctggaggagctgtgcccagcgcctccatgacccggctggcccggagcaggacagccagcctgaccagcgccagctctgtggatggcagccggccccaggcctgcacccacagcgagagcagcgagggcctgggccaggtgaaccacaccatggaggtgtcctgctag

SEQ ID NO: 85209 - DNA, 1059 bp, Artificial Sequence
  derived and/or modified sequence
atgcctgagtgctgggatggagaacatgacatcgagaccccctacggcctgctgcacgtggtgatccggggcagccccaagggcaacagacctgccatcctgacctaccatgatgtgggcctgaaccacaagctgtgcttcaacaccttcttcaactttgaggacatgcaggagatcaccaagcactttgtggtgtgccacgtggatgcccctggccagcaggtgggcgccagccagttcccccagggctaccagttccccagcatggagcagctggccgccatgctgcccagcgtggtgcagcacttcggcttcaagtatgtgattggaattggagtgggcgctggggcctacgtgctggccaagtttgccctgatcttcccagacctggtggagggcctggtgctggtgaacatcgaccccaacgggaagggctggattgactgggccgccaccaagctgagcggcctgaccagcaccctgcctgacacagtgctgagccacctgttcagccaggaggagctggtgaacaacacagagctggtgcagagctaccggcagcagattggaaatgtggtgaaccaggccaacctgcagctgttctggaacatgtacaacagccggcgggacctggacatcaaccggcccggcaccgtgcccaatgccaagaccctgcgctgccctgtgatgctggtggtgggggacaatgccccagcagaagatggagtggtggagtgcaacagcaagctggaccccaccaccaccaccttcctgaagatggctgacagcggcggcctgccccaggtgacccagcccgggaagctgacagaggccttcaagtacttcctgcagggcatgggctacatcgcctacctgaaggaccggcggctgagcggcggcgctgtgcccagcgcctccatgacccggctggcccggagcaggacagccagcctgaccagcgccagctctgtggatggcagccggccccaggcctgcacccacagcgagagcagcgagggcctgggccaggtgaaccacaccatggaggtgtcctgctag

SEQ ID NO: 85210 - DNA, 894 bp, Artificial Sequence
  derived and/or modified sequence
atgcaggagatcaccaagcacttcgtggtgtgccacgtggacgcccctgggcagcaggtgggagccagtcagttccctcagggttatcagtttcccagtatggagcaactggcggccatgctgccaagcgtcgtccagcactttggcttcaagtacgtgattggcattggcgtgggagccggagcatacgtactcgcgaagtttgctcttattttccccgacttagtggagggtcttgtgctggtcaatatagaccccaatggaaaaggttggatcgattgggccgcaaccaaattgtcaggtctgacctctacccttccagataccgtgttgtctcatctgttctcacaggaggagctggttaacaacacagagctcgtccagagctatcgccaacagatcggtaacgtcgtaaaccaagccaatctacagctcttctggaacatgtacaacagccgcagagatttggatattaacagacctggaactgtgcccaatgcaaagactttaaggtgccccgtgatgctggttgtgggagacaacgccccggccgaggacggcgttgtggagtgcaatagcaaattggaccctacgacgactacattcctgaaaatggccgactccggtgggctcccccaagtgactcagccaggcaaacttaccgaagcattcaagtacttcctccagggcatggggtacattgcctacctcaaggacagacgactcagtggtggcgccgtgcccagtgccagtatgactcgcctcgctaggtctcgtacggcatcactgacatcggcttcgtctgtcgacgggtcccgcccccaggcctgtactcattcggaatcatctgaggggctgggccaagtgaaccacaccatggaagtcagttgctag

SEQ ID NO: 85211 - DNA, 1059 bp, Artificial Sequence
  derived and/or modified sequence
atgcccgagtgctgggacggcgagcacgacatcgagaccccctacgggctgctccacgtggtaattcggggcagtcccaaggggaatcgcccggctattttgacctaccacgacgtgggcctgaatcataaattgtgctttaacaccttctttaattttgaggacatgcaggagattactaaacactttgtggtttgtcacgttgacgcgccaggccagcaggtgggcgcttcacagttcccacagggctaccaatttccctccatggagcaactggccgctatgctgccaagtgttgtgcagcactttggcttcaagtacgtcataggtatcggcgttggggcaggcgcatatgtgcttgcgaagttcgctctgatctttcctgatctggtcgagggactcgttctggtcaacatagatccaaacggcaaaggctggattgactgggcggccacaaagttgtctggcctaacttcaaccctgcctgataccgtgctatcccacctcttcagccaggaggaactcgtgaacaacaccgaactggtccagagctaccgtcagcagatcgggaatgtggtgaaccaggctaatttgcagctgttctggaatatgtataatagtcggcgggacttggacattaatcgcccagggaccgtccccaacgccaagactctgcgatgccccgtcatgcttgtggtcggtgataatgctcccgccgaggacggggttgtcgagtgtaattccaagctggatccaacaacaaccaccttccttaagatggccgattcagggggcttgccacaggtaacacagcctggaaagcttactgaggccttcaagtacttcctgcagggcatgggctatattgcatatctgaaggatcgccgactctccggcggggctgttccctcagcctccatgacacggctcgcccgaagccgtaccgcttctctgacctcagccagttctgttgacggctctaggccccaggcctgcactcattccgagagttccgagggcctgggccaagtcaatcatacaatggaggtgtcttgttag

SEQ ID NO: 85212 - DNA, 3207 bp, Artificial Sequence
  derived and/or modified sequence
acagagccgaccatctcccactcgagctgcccccgccctctggacccgagtgactcaggcctttgtttgtccttcctggtagaggcgggttccctccctcggcaagatgccggagtgctgggatggggaacatgacatcgagacaccctacggccttctgcatgtagtgatccggggctcccccaaggggaaccgcccagccatcctcacctaccatgatgtgggcctcaaccacaaactatgcttcaacaccttcttcaacttcgaggacatgcaggagatcaccaagcactttgtggtgtgtcacgtggatgcccctggacaacaggtgggggcgtcgcagtttcctcaggggtaccagttcccctccatggagcagctggctgccatgctccccagcgtggtgcagcatttcgggttcaagtatgtgattggcatcggagtgggcgccggagcctatgtgctggccaagtttgcactcatcttccccgacctggtggaggggctggtgctggtgaacatcgaccccaatggcaaaggctggatagactgggctgccaccaagctctccggcctaactagcactttacccgacacggtgctctcccacctcttcagccaggaggagctggtgaacaacacagagttggtgcagagctaccggcagcagattgggaacgtggtgaaccaggccaacctgcagctcttctggaacatgtacaacagccgcagagacctggacattaaccggcctggaacggtgcccaatgccaagacgctccgctgccccgtgatgctggtggttggggataatgcacccgctgaggacggggtggtggagtgcaactccaaactggacccgaccactacgaccttcctgaagatggcagactctggagggctgccccaggtcacacagccagggaagctgactgaagccttcaaatacttcctgcaaggcatgggctacattgcgtacttgaaggaccgaaggctgagtggaggagcagtgccctcagccagcatgacccgcctggcacgctcccgcactgcatccctcaccagtgccagctcggtggatggcagccgcccacaggcctgcacccactcagagagcagcgaggggctgggccaggtcaaccacaccatggaggtgtcctgttgaagcccttgatcccgctgacgacgcccacgtcgaggccccaccgccatccttgcgccggctcatgttccctttagtttatttttgtgagggcaaaggggaggaaatggggttctgtttgaaaaaaatgaggggatcttagatgctgcagcagaacagtctccaggtgttttaaggggctcagtcctcctcatcccatctcactctccgtggtaacttagccaacttgacccctctcatcccactcccggcggcccaggcacagaagggcagggccatagggagggagattcgctacggatccaggccattcctgggtgagcccttgggcaggcatgtttggagatgagagaggcttcgagagggtgggtgctgggccacaggggtgcggggccagctcaggcactggcgtgggagccctgggagaccccttcccccaccctccaccaagcacacctgtttctgtctcatagcacatgtgacaatcatctggacaacagccacaagggggcgctcggaccaggcagccactttcctggtgctctctgggcccagctggtgctgtagggccacgcaggcaggggcgtcaaggggtttctctgcccaaggaagacagaacatggagaaccgtcagggcaggaaccccacagactgtcccttccagcccacactctgccacctcctggccctgtcccaattctgagccaaggcctccccgaggcagaagttgcctggtcctctgtccccacagtgacctgactgggggtgagggagaaggaggagagagcccatgtgtggtgtgtgtgcccctgagaacttcgtggtgactgcctttgggagcccgcaggtggccagaggcaggggtagctgagttcctggagaccccttttttgcccccaggttccccagagggcaacgccatcagtagcagtgtggtgtttcaggcagagctctggccaggctgtgccagtgtgtcccggacgcatcactaaggaagagagagtttatttagtcaactggcccaaggcagcgaggcttctacagtcccacaccccatagccgcctgggctggggcttactgggggctgaaggttctggacatgaacaagggtcaggtagaagagaaaggcttcccctacaccccagcctcctgctgtcccctgaagcccaggactgcgttgtatgctttccatccactcaccttaccccatagcatcttgcggcccagaaaccagagccatttgtctcagaccctaaatcaataatcacaaaccccaaaacgggagagagcagtgaaaacatgcagggctgtggacgggggaagggttgtggcgggtgttctgaggctgagaggacacctatatgcgtatttcctctacacacatcaccccccttctataatcttaagccatgactagcctggtggcgtgttagtttctgcccagttctaccccctcatgtgcttcttctgaatactgaatgtgactgtttgaaagctggtagaattcatccctcttactgtagataacactgcaaatcttggaattttgttttttgctgtttccagatgtatctataaatatctatacattatatgtgtgtgtgtgtgtgtgtgtgtgtgtgtacatcgggtcctcccatgtgtggtgttcttctggaggttgtctctttggtcaaggtgaacttttaatgtttattattttcttctccgcacaaagtaaagagcctaattttgtgtattctggtggctgctgtcatgagatgataaaatgtaaaacaaaactctagtcaacgtagaaagagttaactgtgctgaaaaactaataaagaacctaagaagaattccagtgtggtgatgccatgcccatcatgggaggcttttggagaaacagaatgtttgggcaggggctgctggtgctgcttgggttttgggttgagggtgctaggagaggatggtctccacccatctttctatttccagtacacgtcacattattttaccggtgagatgagaatgtcacaaacattaaaagccttatgtgctc

SEQ ID NO: 85213 - DNA, 894 bp, Artificial Sequence
  derived and/or modified sequence
atgcaggagattacgaagcatttcgtggtgtgccacgtcgacgctcccggacagcaagttggtgcttcacaatttccccaggggtatcaattcccttcaatggagcagttggctgcgatgctaccttctgtcgtccaacatttcggcttcaagtacgttatcggcatcggggtcggggctggagcatacgtgctcgcgaaatttgctctgatcttcccagacctcgtggaggggctggtcctggtcaacattgatccgaatggcaaaggctggattgattgggcggctaccaagttgagcgggctgacctccaccttacccgataccgtcctgtcgcatctgttttcacaggaagagctggtcaataacaccgagcttgtccagtcttatcggcagcaaattggaaatgtggttaatcaggccaacctgcagttgttctggaacatgtacaatagccgcagagatttggatattaatcggcctggcacggttcctaacgcgaaaacactccggtgcccagtcatgctggtagtgggagacaatgcccctgccgaagacggagttgtcgagtgcaattcaaaactcgatccaactaccacaacattcttaaagatggccgacagcggcggacttccccaggtcacacagccaggcaaattgaccgaagcctttaagtattttctgcagggtatggggtacatagcatacttgaaagacagacgactttcaggcggagccgtgccgagcgcttctatgacgaggctggcgagaagtcggaccgcaagcctgacaagcgccagctccgtggacggaagccggccacaagcttgtacccatagcgagagctctgagggtctcggacaagtcaatcatactatggaggtctcttgttag

SEQ ID NO: 85214 - DNA, 1059 bp, Artificial Sequence
  derived and/or modified sequence
atgcctgagtgctgggatggagaacacgacatagagacaccttacgggctgctccacgtggtaatacgtggttcccctaagggcaaccgacctgccattttaacctatcatgacgtgggcctcaatcataagctgtgttttaataccttctttaattttgaagatatgcaggagatcactaagcatttcgtcgtctgtcacgtggatgcgccaggtcaacaggtgggcgcatcgcagttcccccagggataccagtttccaagcatggagcagctggccgctatgctccctagcgtggtacagcattttggctttaagtacgtgattgggatcggcgtcggcgcaggtgcctacgtactagctaaattcgcgcttatctttcctgacctggtggagggcctcgttctggtgaacatcgatcctaacggcaagggctggattgactgggctgccacgaagttgtctgggctgacatcaacattacccgacacagtcctgagccatctgtttagtcaggaggagttggttaataataccgagctggtccagtcctaccgacaacagatcggcaacgtagtgaaccaagccaatctccagcttttttggaacatgtataatagtagaagggacctcgatataaacaggccaggaacagtgccgaacgcaaaaaccctcaggtgtccggtcatgctcgtggtaggcgacaatgcacccgctgaagacggagtggtggagtgtaatagcaaattagaccctaccacaacgacgtttcttaaaatggccgactctggaggccttccacaggtgacacagcccggaaaattgacggaggctttcaagtattttctgcaggggatgggctatattgcctatcttaaggacagacggcttagcgggggagccgtgccatctgccagcatgacaaggctggccaggtccagaaccgcttccctaaccagcgcaagctccgtcgatggcagccggccacaggcctgtacacacagcgaaagcagtgaggggttgggccaggtgaaccacaccatggaagtgtcctgctag

SEQ ID NO: 85215 - protein, 339 aa, Artificial Sequence
  derived and/or modified sequence
MPECWDGEHDIETPYGLLHVVIRGSPKGNRPAILTYHDVGLNHKLCFNTFFNFEDMQEITKHFVVCHVDAPGQQVGASQFPQGYQFPSMEQLAAMLPSVVQHFGFKYVIGIGVGAGAYVLAKFALIFPDLVEGLVLVNIDPNGKGWIDWAATKLSGLTSTLPDTVLSHLFSQEELVNNTELVQSYRQQIGNVVNQANLQLFWNMYNSRRDLDINRPGTVPNAKTLRCPVMLVVGDNAPAEDGVVECNSKLDPTTTTFLKMADSGGLPQVTQPGKLTEAFKYFLQGMGYMPSASMTRLARSRTASLTSASSVDGSRPQACTHSESSEGLGQVNHTMEVSC

SEQ ID NO: 85216 - DNA, 1020 bp, Artificial Sequence
  derived and/or modified sequence
atgcccgagtgctgggacggcgagcacgacatcgagaccccctacggcctgctgcacgtggtgatcagaggcagccccaagggcaacagacccgccatcctgacctaccacgacgtgggcctgaaccacaagctgtgcttcaacaccttcttcaacttcgaggacatgcaggagatcaccaagcacttcgtggtgtgccacgtggacgcccccggccagcaggtgggcgccagccagttcccccagggctaccagttccccagcatggagcagctggccgccatgctgcccagcgtggtgcagcacttcggcttcaagtacgtgatcggcatcggcgtgggcgccggcgcctacgtgctggccaagttcgccctgatcttccccgacctggtggagggcctggtgctggtgaacatcgaccccaacggcaagggctggatcgactgggccgccaccaagctgagcggcctgaccagcaccctgcccgacaccgtgctgagccacctgttcagccaggaggagctggtgaacaacaccgagctggtgcagagctacagacagcagatcggcaacgtggtgaaccaggccaacctgcagctgttctggaacatgtacaacagcagaagagacctggacatcaacagacccggcaccgtgcccaacgccaagaccctgagatgccccgtgatgctggtggtgggcgacaacgcccccgccgaggacggcgtggtggagtgcaacagcaagctggaccccaccaccaccaccttcctgaagatggccgacagcggcggcctgccccaggtgacccagcccggcaagctgaccgaggccttcaagtacttcctgcagggcatgggctacatgcccagcgccagcatgaccagactggccagaagcagaaccgccagcctgaccagcgccagcagcgtggacggcagcagaccccaggcctgcacccacagcgagagcagcgagggcctgggccaggtgaaccacaccatggaggtgagctgctag

SEQ ID NO: 85217 - DNA, 1020 bp, Artificial Sequence
  derived and/or modified sequence
atgccagagtgttgggacggcgagcacgacatcgagacaccctacgggttactgcacgtggtgattagggggtcacccaagggcaacagacctgccattctgacctaccacgacgtggggctgaaccataaattatgtttcaacacgtttttcaattttgaggacatgcaagaaataacaaagcattttgtcgtgtgtcacgtcgacgcccccggccagcaagtcggcgcctcgcagtttccacaaggttaccagttcccttcgatggagcagctggcggcgatgttgccgtcagtcgtgcagcattttggattcaagtacgtgatcggaatcggcgtaggtgctggcgcctacgtcctcgctaagtttgcattgatctttcccgacttggtagaggggttggtcttggtgaatattgacccgaatgggaaggggtggattgattgggctgccactaaactctccggactcacgtcaacccttcccgataccgtgctttcacaccttttctcccaggaggagctggtgaacaacaccgaattagtccagtcctatagacagcaaatcggaaatgtcgtgaatcaggccaacctgcagctgttttggaacatgtacaactcccgtcgggatctggacatcaataggccagggacagtccctaatgctaagacactccggtgtcctgtgatgctcgtggtcggggacaatgctcccgcagaggacggggttgtcgagtgcaattccaaactagaccctaccacaacgacctttctcaagatggctgattcgggaggcctcccgcaggtcacacaaccaggaaagctgacagaggcatttaaatactttttgcaagggatggggtacatgccttcggcaagcatgactcggcttgctcggagtcggaccgcaagtctgacttctgcctcctctgtggacggctcaaggccccaggcttgtacacactctgagagctccgagggcctgggccaagtcaatcataccatggaggtaagctgttag

SEQ ID NO: 85218 - DNA, 1020 bp, Artificial Sequence
  derived and/or modified sequence
atgcctgagtgctgggatggagaacatgacatcgagaccccctacggcctgctgcacgtggtgatccggggcagccccaagggcaacagacctgccatcctgacctaccatgatgtgggcctgaaccacaagctgtgcttcaacaccttcttcaactttgaggacatgcaggagatcaccaagcactttgtggtgtgccacgtggatgcccctggccagcaggtgggcgccagccagttcccccagggctaccagttccccagcatggagcagctggccgccatgctgcccagcgtggtgcagcacttcggcttcaagtatgtgattggaattggagtgggcgctggggcctacgtgctggccaagtttgccctgatcttcccagacctggtggagggcctggtgctggtgaacatcgaccccaacgggaagggctggattgactgggccgccaccaagctgagcggcctgaccagcaccctgcctgacacagtgctgagccacctgttcagccaggaggagctggtgaacaacacagagctggtgcagagctaccggcagcagattggaaatgtggtgaaccaggccaacctgcagctgttctggaacatgtacaacagccggcgggacctggacatcaaccggcccggcaccgtgcccaatgccaagaccctgcgctgccctgtgatgctggtggtgggggacaatgccccagcagaagatggagtggtggagtgcaacagcaagctggaccccaccaccaccaccttcctgaagatggctgacagcggcggcctgccccaggtgacccagcccgggaagctgacagaggccttcaagtacttcctgcagggcatgggctacatgcccagcgcctccatgacccggctggcccggagcaggacagccagcctgaccagcgccagctctgtggatggcagccggccccaggcctgcacccacagcgagagcagcgagggcctgggccaggtgaaccacaccatggaggtgtcctgctag

SEQ ID NO: 85219 - DNA, 1020 bp, Artificial Sequence
  derived and/or modified sequence
atgcccgagtgctgggacggcgagcacgacatcgagaccccctacggattgctgcacgttgtgatccgcggttcacctaagggcaacaggccagccattttaacatatcacgatgtgggactcaatcacaaactgtgctttaatacgttctttaatttcgaggatatgcaggaaataacaaagcatttcgttgtgtgtcatgtagacgctcccggccagcaggtcggagcctcacagtttccccaggggtatcagtttccttctatggagcaactcgctgcgatgctcccttcagttgtgcagcatttcggattcaaatacgtgataggtatcggggtaggggcaggggcatacgtgctggcaaagtttgccctgatatttcccgatctagtggaggggttggttctggtgaacatcgacccaaacggcaagggctggattgactgggcggctacgaagctgtccggactgacttctactcttccagatactgtcctgagccacctgttttctcaagaggaactggttaacaacacggagctggtgcagtcatatcgacagcagattggcaatgtggtaaaccaagccaatctacagttgttttggaatatgtataactcaaggagagacctggacatcaatcgacctggaaccgtgccaaatgccaaaacgctccgttgccctgttatgctggtggtaggtgacaatgcaccggcggaagatggagtggtggaatgtaactctaaactggaccctactactaccacctttttgaaaatggccgattcaggaggccttcctcaggtgactcagccaggcaagcttacagaggccttcaaatatttccttcaggggatgggatatatgccaagcgctagcatgacccgcctggctcgcagccgcactgcatctttgacttctgcctcaagcgtagatggcagtcggccgcaagcctgcactcactcagagagctctgagggcctcgggcaggtcaatcatacaatggaagtgagttgttag

SEQ ID NO: 85220 - DNA, 3265 bp, Artificial Sequence
  derived and/or modified sequence
gtaagcgagtggctgctcagaaaccctgcggggaggaggggctagctaggctgggccaggatccctgtataaatggcccaggagctgtgccccatcacagagccgaccatctcccactcgagctgcccccgccctctggacccgagtgactcaggcctttgtttgtccttcctggtagaggcgggttccctccctcggcaagatgccggagtgctgggatggggaacatgacatcgagacaccctacggccttctgcatgtagtgatccggggctcccccaaggggaaccgcccagccatcctcacctaccatgatgtgggcctcaaccacaaactatgcttcaacaccttcttcaacttcgaggacatgcaggagatcaccaagcactttgtggtgtgtcacgtggatgcccctggacaacaggtgggggcgtcgcagtttcctcaggggtaccagttcccctccatggagcagctggctgccatgctccccagcgtggtgcagcatttcgggttcaagtatgtgattggcatcggagtgggcgccggagcctatgtgctggccaagtttgcactcatcttccccgacctggtggaggggctggtgctggtgaacatcgaccccaatggcaaaggctggatagactgggctgccaccaagctctccggcctaactagcactttacccgacacggtgctctcccacctcttcagccaggaggagctggtgaacaacacagagttggtgcagagctaccggcagcagattgggaacgtggtgaaccaggccaacctgcagctcttctggaacatgtacaacagccgcagagacctggacattaaccggcctggaacggtgcccaatgccaagacgctccgctgccccgtgatgctggtggttggggataatgcacccgctgaggacggggtggtggagtgcaactccaaactggacccgaccactacgaccttcctgaagatggcagactctggagggctgccccaggtcacacagccagggaagctgactgaagccttcaaatacttcctgcaaggcatgggctacatgccctcagccagcatgacccgcctggcacgctcccgcactgcatccctcaccagtgccagctcggtggatggcagccgcccacaggcctgcacccactcagagagcagcgaggggctgggccaggtcaaccacaccatggaggtgtcctgttgaagcccttgatcccgctgacgacgcccacgtcgaggccccaccgccatccttgcgccggctcatgttccctttagtttatttttgtgagggcaaaggggaggaaatggggttctgtttgaaaaaaatgaggggatcttagatgctgcagcagaacagtctccaggtgttttaaggggctcagtcctcctcatcccatctcactctccgtggtaacttagccaacttgacccctctcatcccactcccggcggcccaggcacagaagggcagggccatagggagggagattcgctacggatccaggccattcctgggtgagcccttgggcaggcatgtttggagatgagagaggcttcgagagggtgggtgctgggccacaggggtgcggggccagctcaggcactggcgtgggagccctgggagaccccttcccccaccctccaccaagcacacctgtttctgtctcatagcacatgtgacaatcatctggacaacagccacaagggggcgctcggaccaggcagccactttcctggtgctctctgggcccagctggtgctgtagggccacgcaggcaggggcgtcaaggggtttctctgcccaaggaagacagaacatggagaaccgtcagggcaggaaccccacagactgtcccttccagcccacactctgccacctcctggccctgtcccaattctgagccaaggcctccccgaggcagaagttgcctggtcctctgtccccacagtgacctgactgggggtgagggagaaggaggagagagcccatgtgtggtgtgtgtgcccctgagaacttcgtggtgactgcctttgggagcccgcaggtggccagaggcaggggtagctgagttcctggagaccccttttttgcccccaggttccccagagggcaacgccatcagtagcagtgtggtgtttcaggcagagctctggccaggctgtgccagtgtgtcccggacgcatcactaaggaagagagagtttatttagtcaactggcccaaggcagcgaggcttctacagtcccacaccccatagccgcctgggctggggcttactgggggctgaaggttctggacatgaacaagggtcaggtagaagagaaaggcttcccctacaccccagcctcctgctgtcccctgaagcccaggactgcgttgtatgctttccatccactcaccttaccccatagcatcttgcggcccagaaaccagagccatttgtctcagaccctaaatcaataatcacaaaccccaaaacgggagagagcagtgaaaacatgcagggctgtggacgggggaagggttgtggcgggtgttctgaggctgagaggacacctatatgcgtatttcctctacacacatcaccccccttctataatcttaagccatgactagcctggtggcgtgttagtttctgcccagttctaccccctcatgtgcttcttctgaatactgaatgtgactgtttgaaagctggtagaattcatccctcttactgtagataacactgcaaatcttggaattttgttttttgctgtttccagatgtatctataaatatctatacattatatgtgtgtgtgtgtgtgtgtgtgtgtgtgtacatcgggtcctcccatgtgtggtgttcttctggaggttgtctctttggtcaaggtgaacttttaatgtttattattttcttctccgcacaaagtaaagagcctaattttgtgtattctggtggctgctgtcatgagatgataaaatgtaaaacaaaactctagtcaacgtagaaagagttaactgtgctgaaaaactaataaagaacctaagaagaattccagtgtggtgatgccatgcccatcatgggaggcttttggagaaacagaatgtttgggcaggggctgctggtgctgcttgggttttgggttgagggtgctaggagaggatggtctccacccatctttctatttccagtacacgtcacattattttaccggtgagatgagaatgtcacaaacattaaaagccttatgtgctca

SEQ ID NO: 85221 - DNA, 1020 bp, Artificial Sequence
  derived and/or modified sequence
atgcccgagtgttgggacggcgaacacgacatcgagacgccgtacgggctgctgcatgtcgttatcagaggctcacctaaaggcaatcgcccagccattcttacgtaccatgacgtgggtctgaaccacaagctctgtttcaatacctttttcaacttcgaggatatgcaggaaatcactaaacattttgtcgtgtgccacgtcgacgctccgggtcagcaagtgggcgcttcgcaattccctcaggggtaccagttcccctccatggaacagctggctgccatgttgccatcagtggtccaacatttcggattcaagtacgtgataggtatcggggtgggagcaggcgcttatgttctcgccaagttcgcgctaattttccccgatctggtcgagggcctcgtgttggtaaatatcgacccaaatgggaaggggtggattgactgggccgctactaagctgtctggacttactagcaccctgccagatactgtgctctcacacttgttcagtcaagaagaactcgtgaacaacactgagttggtgcagtcgtatcgacagcaaattggtaacgtagtgaatcaggctaacctccagttattttggaatatgtacaactcacggcgtgatctggacattaacagacccggtacagtcccaaatgccaagacgttgcgctgtcctgtgatgttggtcgtgggtgataacgctcccgctgaagacggggtggtcgagtgtaattctaaactcgatcctactactacaacctttctgaaaatggccgacagtggtgggctcccccaggtgacccagccaggcaagttgactgaagctttcaaatattttttgcaggggatgggatacatgccctccgccagtatgacaagactcgcccgatctagaacagcatccctgacgagcgccagttctgtggacgggtcccgcccacaagcctgcacacatagcgagtcctccgagggcctgggccaggtcaaccatactatggaggtgtcatgttag

SEQ ID NO: 85222 - protein, 241 aa, Artificial Sequence
  derived and/or modified sequence
MLRRPLAGLAAAALGRAPPDGMSGPRPVVLSGPSGAGKSTLLKRLLQEHSGIFGFSVSHTTRNPRPGEENGKDYYFVTREVMQRDIAAGDFIEHAEFSGNLYGTSKVAVQAVQAMNRICVLDVDLQGVRNIKATDLRPIYISVQPPSLHVLEQRLRQRNTETEESLVKRLAAAQADMESRNQESSKDRRLRLAVCSRHPGPIQDQGSSIEPPPWQAIRQLCALGQHVEWRRCCPCGWNILG

SEQ ID NO: 85223 - DNA, 726 bp, Artificial Sequence
  derived and/or modified sequence
atgcttcgaagaccattagctggcttggccgccgccgccctcgggcgggctccgcctgacgggatgagtggaccccggccagtcgtacttagcggtccaagcggcgcaggcaagtctaccctactgaagaggttgctccaggaacactcagggattttcggattcagcgtctcgcacaccaccaggaacccccgcccaggcgaggagaatggtaaggactactacttcgtcacacgggaagtcatgcagagggacatcgcagccggagacttcattgaacacgcagagttctccggaaatctgtatggaacatctaaggtagccgtccaggctgtccaggccatgaaccgtatttgtgtgctggacgtggatcttcaaggcgtcagaaacatcaaagcgaccgacctgcgccccatttacatcagcgtccagccgcctagcctgcatgtcctggaacagcgtctaagacagcgtaataccgagaccgaagagtccctcgtcaaacgacttgctgcagcgcaggcagacatggagtcgagaaatcaggaatcaagtaaggaccggaggctgaggctggcagtctgttccagacaccctggtcctattcaggaccaggggtcttctattgagccccctccatggcaggctatcaggcagctctgcgctctgggccaacatgtcgagtggcggaggtgttgtccgtgtggatggaatattttgggctag

SEQ ID NO: 85224 - DNA, 842 bp, Artificial Sequence
  derived and/or modified sequence
gaggtggccccggatgctgcggcgcccgctggccgggctggctgcggccgccctgggccgggccccaccggacggcatgtcgggccccaggcctgtggtgctgagcgggccttcgggagctgggaagagcaccctgctgaagaggctgctccaggagcacagcggcatctttggcttcagcgtgtcccataccacgaggaacccgaggcccggcgaggagaacggcaaagattactactttgtaaccagggaggtgatgcagcgtgacatagcagccggcgacttcatcgagcatgccgagttctcggggaacctgtatggcacgagcaaggtggcggtgcaggccgtgcaggccatgaaccgcatctgtgtgctggacgtggacctgcagggtgtgcggaacatcaaggccaccgatctgcggcccatctacatctctgtgcagccgccttcactgcacgtgctggagcagcggctgcggcagcgcaacactgaaaccgaggagagcctggtgaagcggctggctgctgcccaggccgacatggagagcagaaatcaagaaagctcaaaggaccggcgcctgaggcttgctgtctgttctcggcaccccgggcccatacaggaccagggcagcagcattgagccacccccttggcaggcgatacggcagctctgtgcccttggccagcatgtggagtggaggagatgctgcccctgtggttggaacatcctggggtgacccccgacccagcctcgctgggctgtcccctgtccctatctctcactctggacccagggctgacatcctaataaaataactgttggattagaaactccataaa

SEQ ID NO: 85225 - DNA, 726 bp, Artificial Sequence
  derived and/or modified sequence
atgctgcggcggcccctggccggcctggccgccgccgccctgggccgggcccccccagatggcatgagcggccccaggcctgtggtgctgagcggccccagcggggccggcaagagcaccctgctgaagaggctgctgcaggagcacagcggcatcttcggcttctctgtgagccacaccaccaggaaccccaggcctggagaagaaaatggcaaggactactactttgtgacccgggaggtgatgcagagggacattgctgctggggacttcatcgagcacgccgagttcagcggcaacctgtatggcaccagcaaggtggccgtgcaggccgtgcaggccatgaaccgcatctgtgtgctggatgtggacctgcagggcgtgaggaacatcaaggccacagacctgcggcccatctacatctctgtgcagccccccagcctgcacgtgctggagcagaggctgcggcagaggaacacagaaacagaggagagcctggtgaagaggctggccgccgcccaggccgacatggagagcaggaaccaggagagcagcaaggaccggcggctgcggctggccgtgtgcagccgccaccctggccccatccaggaccagggcagcagcattgagcccccaccctggcaggccatccggcagctgtgtgccctgggccagcacgtggagtggaggcgctgctgcccctgtggctggaacatcctgggctag

SEQ ID NO: 85226 - DNA, 726 bp, Artificial Sequence
  derived and/or modified sequence
atgctgcggcggcccctggccggcctggccgccgccgccctgggcagggctccccccgacgggatgagcggccctcgcccagtggtcctgagtggaccttccggcgccggcaagtctaccttactgaaacgtctgctccaagaacactcagggatatttggcttctccgtctctcataccactcgtaacccgaggcccggtgaagagaatgggaaggactattactttgtcacccgggaggtgatgcagcgcgatattgcagcaggggatttcattgagcacgcggagttttctgggaatctctatgggactagcaaagttgccgtacaagcagtccaggctatgaaccggatctgcgtactcgatgtcgatctgcagggagttcggaacattaaagcgacagatctgcggccaatctatatttccgttcagccacccagcctccacgtgctggaacagcgattgcgacagagaaacacagaaactgaggagagcctcgtgaaacgcctggcagccgcccaggctgacatggagagccggaaccaagaatcctcaaaggatcgtaggctcaggctggctgtgtgcagtcgtcatcctgggcccatccaggaccagggttcttccatcgaaccccctccgtggcaggccattaggcagttatgcgctcttgggcagcacgttgagtggaggcgatgttgcccctgtgggtggaatattctgggatag

SEQ ID NO: 85227 - DNA, 726 bp, Artificial Sequence
  derived and/or modified sequence
atgcttcgcagacccttggctggtcttgcagccgctgccttgggaagggcacctccggacggcatgtcggggcctaggccagtggtgctgtctggaccgtccggcgcaggtaaatcaacgctgctgaagaggctcctgcaggaacatagcggtattttcgggttctccgtgtctcacacaactaggaatcccaggccaggggaggagaatggcaaagactattatttcgtgaccagagaggtgatgcagcgagacatagcggcaggtgactttattgaacacgccgaattcagtggcaatctgtatggcacaagcaaagtggccgttcaagctgtgcaggctatgaatagaatctgtgtcttggatgtggatctgcagggcgtgaggaacattaaagccacagacctgcgcccaatctacatctctgttcagcctccgtccttacacgtcctcgaacaaaggttaagacaacgaaataccgagaccgaggagagcttggttaagcgcctggctgcggctcaagcagacatggaatccagaaaccaggaaagctcaaaggataggcggctgagattggccgtttgcagtcgacaccccggaccgatccaggaccagggctcctccatagagccgcctccttggcaagctatacgtcagctgtgtgcacttgggcaacacgtggaatggcgtcgctgctgcccatgcggctggaatattctcggatag

SEQ ID NO: 85228 - DNA, 726 bp, Artificial Sequence
  derived and/or modified sequence
atgctgagaagacccctggccggcctggccgccgccgccctgggcagagccccccccgacggcatgagcggccccagacccgtggtgctgagcggccccagcggcgccggcaagagcaccctgctgaagagactgctgcaggagcacagcggcatcttcggcttcagcgtgagccacaccaccagaaaccccagacccggcgaggagaacggcaaggactactacttcgtgaccagagaggtgatgcagagagacatcgccgccggcgacttcatcgagcacgccgagttcagcggcaacctgtacggcaccagcaaggtggccgtgcaggccgtgcaggccatgaacagaatctgcgtgctggacgtggacctgcagggcgtgagaaacatcaaggccaccgacctgagacccatctacatcagcgtgcagccccccagcctgcacgtgctggagcagagactgagacagagaaacaccgagaccgaggagagcctggtgaagagactggccgccgcccaggccgacatggagagcagaaaccaggagagcagcaaggacagaagactgagactggccgtgtgcagcagacaccccggccccatccaggaccagggcagcagcatcgagccccccccctggcaggccatcagacagctgtgcgccctgggccagcacgtggagtggagaagatgctgcccctgcggctggaacatcctgggctag

SEQ ID NO: 85229 - protein, 359 aa, Artificial Sequence
  derived and/or modified sequence
MMAGCGEIDHSINMLPTNRKANESCSNTAPSLTVPECAICLQTCVHPVSLPCKHVFCYLCVKGASWLGKRCALCRQEIPEDFLDKPTLLSPEELKAASRGNGEYAWYYEGRNGWWQYDERTSRELEDAFSKGKKNTEMLIAGFLYVADLENMVQYRRNEHGRRRKIKRDIIDIPKKGVAGLRLDCDANTVNLARESSADGADSVSAQSGASVQPLVSSVRPLTSVDGQLTSPATPSPDASTSLEDSFAHLQLSGDNTAERSHRGEGEEDHESPSSGRVPAPDTSIEETESDASSDSEDVSAVVAQHSLTQQRLLVSNANQTVPDRSDRSGTDRSVAGGGTVSVSVRSRRPDGQCTVTEV

SEQ ID NO: 85230 - DNA, 1080 bp, Artificial Sequence
  derived and/or modified sequence
atgatggccggttgtggcgagattgatcattcaatcaacatgctgcctacaaataggaaagctaacgaatcctgttccaatacggctccttcgctgactgtgcccgagtgcgccatctgcctgcagacttgcgttcaccctgtcagtctaccgtgcaagcatgtcttctgctacctctgcgttaagggggcttcgtggctcggtaagcggtgtgccctgtgtaggcaggagattcccgaggacttcctggataaaccgacattgctgtcgcccgaggagttgaaggctgcatccaggggcaacggggagtatgcctggtactatgaagggcggaatggctggtggcagtatgacgagcgcacaagcagagaactcgaggacgccttcagtaaaggcaaaaaaaacaccgagatgctcatagctggtttcctgtacgttgccgatctggagaacatggtgcagtatagacggaacgaacatggccggcgcagaaaaatcaaaagggatattatcgacattcctaagaaaggcgtcgcaggtctgcggctcgactgcgacgctaacaccgttaacttagcccgtgagtcctccgccgatggagccgactccgtatctgcgcagagcggagccagcgtccagccactcgtttcctctgtgaggccactgacatcagtcgacgggcaactgacaagtcccgccaccccgtccccagatgcttccacgagcctggaggattcctttgcccatctccaattaagcggcgacaatactgccgaaagatctcacagaggggagggagaggaagatcatgaatcccctagttctgggcgcgttcccgcccccgatacctcaattgaggagaccgagtctgatgcctccagcgattccgaagatgtatctgctgtggtggctcagcattctcttacccagcagagattgcttgtttcaaacgcgaatcagactgtacctgatagatcagacaggagtggcaccgaccgaagcgtggctggaggcggcaccgtaagtgttagcgtgcgttcaaggaggccagacggacagtgtactgtcacagaagtctag

SEQ ID NO: 85231 - DNA, 1080 bp, Artificial Sequence
  derived and/or modified sequence
atgatggccggctgtggggagattgaccacagcatcaacatgctgcccaccaacaggaaggccaatgaaagctgcagcaacacagcccccagcctgactgtgcctgaatgtgccatctgcctgcagacctgtgtgcaccctgtgtccctgccctgcaagcacgtgttctgctacctgtgtgtgaagggggcctcctggctgggcaagagatgtgccctgtgccggcaggagatccctgaggacttcctggacaagcccaccctgctgagccctgaggagctgaaggccgccagcagaggaaatggagaatatgcctggtactatgagggcagaaatggctggtggcagtatgatgagaggaccagccgggagctggaggatgccttcagcaagggcaagaagaacacagagatgctgattgctggcttcctgtatgtggccgacctggagaacatggtgcagtacagaagaaatgagcacggcagaagaaggaagatcaagagggacatcatcgacatccccaagaagggcgtggccggcctgcggctggactgtgatgccaacacagtgaacctggcccgggagagcagcgcagatggagctgacagcgtgtctgcccagagcggggcctctgtgcagcccctggtgtcctctgtgcggcccctgacctctgtggatggccagctgaccagccctgccacccccagcccagatgccagcaccagcctggaggacagctttgcccacctgcagctgagcggggacaacacagctgagaggagccacagaggagagggggaggaggaccacgagagccccagcagcggccgggtgcctgccccagacaccagcattgaggagacagaaagtgatgccagcagtgacagtgaagatgtgtctgctgtggtggcccagcacagcctgacccagcagaggctgctggtgtccaatgccaaccagacagtgcctgacagaagtgacagaagtggcacagacagatctgtggccggcggcggcaccgtgtctgtgtctgtgcgcagccggcggccagatggccagtgcaccgtgacagaggtgtag

SEQ ID NO: 85232 - DNA, 1080 bp, Artificial Sequence
  derived and/or modified sequence
atgatggccggctgcggcgagatcgaccacagcatcaacatgctgcctaccaaccgcaaggccaacgaaagctgctccaatacggccccaagtttgaccgtgcccgaatgtgctatttgccttcaaacttgtgtccatcctgtgtctctcccctgcaaacacgttttctgttatctttgtgtaaaaggtgccagctggctcggaaagcgctgcgccctctgcaggcaggagattcccgaggacttcctggacaaacctacactgctctctcccgaagaactgaaagccgcttcacggggcaatggggaatatgcatggtattacgagggccgaaatggttggtggcagtacgatgaaaggacttcgcgcgaactggaagacgcattctccaagggtaaaaagaatacggagatgctgatcgctggatttttatatgtcgccgatctcgagaacatggtccagtaccggagaaacgaacatgggcgaagacggaagattaaacgtgatataatcgacatccctaaaaagggggtggcaggcctcagacttgactgcgacgccaataccgtgaacttggcccgggagagctcagccgacggcgccgattccgtctccgcccagtctggggcatccgttcagccattggtgtccagcgtgcggccacttacctctgtggatggacagctgacctcgcccgccactccctctccagatgcatccaccagcctggaggactcttttgcccaccttcagctgagtggcgacaatacagccgaaagatcacaccggggcgagggggaagaggatcatgaaagcccttcatccggaagagtcccagcccccgacactagcatcgaggagactgagagcgacgccagctccgactccgaggatgtttcagccgtcgtagcgcagcactccttaacacagcagagactcctggtatccaatgctaatcagacggtgcctgaccggtctgaccgcagcggcaccgatcgcagcgtcgcaggcggtggaaccgttagtgtttcagtccggtcccggaggccggatgggcagtgcaccgtaactgaggtctag

SEQ ID NO: 85233 - DNA, 1080 bp, Artificial Sequence
  derived and/or modified sequence
atgatggccggatgcggggagattgatcattcaatcaacatgttgcctaccaatcggaaggcgaacgaatcgtgtagcaatacggccccatcccttaccgtaccagagtgcgccatatgtctccaaacctgcgttcaccccgtgagtctcccttgtaaacatgtgttctgttacctgtgtgtgaaaggcgctagctggcttgggaagagatgtgccctttgccgccaagaaatacctgaggactttttggacaagcccacacttctcagcccagaggaactgaaggccgcaagtaggggaaatggcgagtacgcctggtactacgaaggtcgaaacggttggtggcagtatgacgagcggaccagccgggaattggaagacgcattcagtaaggggaaaaagaacacggaaatgctcattgccggatttctgtacgtggcggacttagagaatatggtgcaatacagaaggaatgagcacggacggaggcgcaaaatcaaaagagatataatcgacatacccaaaaaaggggtggctgggctgaggttggactgcgatgccaatacggtaaaccttgctcgggagagttccgctgacggcgcagactccgttagtgctcagtccggagccagtgtgcagccgctagtttcgtccgtgcgccctttaacttctgtggacgggcagctgacctcaccagccactccgtcccctgacgcgtccacaagtctggaagatagcttcgcacaccttcagctgtccggcgataataccgctgagcgatcccacagaggcgaaggggaggaggaccacgaatctccatcctccggacgtgttccagcaccagacacatcaatagaggagacagagagcgatgcgtcatcagacagtgaagacgtctctgcagtggttgcacagcactctctgacccagcagcggctcctggtcagcaatgccaatcagactgttcccgaccggagcgatagatctgggacagatagaagtgtggccggaggaggaaccgtaagtgtctctgtgaggtccaggcggccagacggtcagtgcactgtaaccgaggtatag

SEQ ID NO: 85234 - DNA, 2369 bp, Artificial Sequence
  derived and/or modified sequence
tggaactgcactctttcagagcctctgggccctaatacaaagcaagcacactctaaagaagccagaagaatgcaagcagcgaagtcgccgctccccacaggcaagagagtaccggcagacagcggcgcgagacaggggcagaacgatgaggcgccggagttagctcgccggtgcgggtgcgggtgcgcggcgcgtcgcggcccctcctccgcgacgcgccgggtggtcacgtgacggccgcgcgcgttcccggcagctgcgggctccgaggccagagagaaaagactgcgaggtggccgcagctgtggccggagagcacaaagaatgaaccagcagtggaagagaaaatactgtaagctggctgactgctggtgaagaaaatgctttatttttgtggcaggcatctgtgggatctgtaatagaaatgatggctggctgtggtgaaattgatcattcaataaacatgcttcctacaaacaggaaagcgaacgagtcctgttctaatactgcaccttctttaaccgtccctgaatgtgccatttgtctgcaaacatgtgttcatccagtcagtctgccctgtaagcacgttttctgctatctatgtgtaaaaggagcttcatggcttggaaagcggtgtgctctttgtcgacaagaaattcccgaggatttccttgacaagccaaccttgttgtcaccagaagaactcaaggcagcaagtagaggaaatggtgaatatgcatggtattatgaaggaagaaatgggtggtggcagtacgatgagcgcactagtagagagctggaagatgctttttccaaaggtaaaaagaacactgaaatgttaattgctggctttctgtatgtcgctgatcttgaaaacatggttcaatataggagaaatgaacatggacgtcgcaggaagattaagcgagatataatagatataccaaagaagggagtagctggacttaggctagactgtgatgctaataccgtaaacctagcaagagagagctctgctgacggagcggacagtgtatcagcacagagtggagcttctgttcagcccctagtgtcttctgtaaggcccctaacatcagtagatggtcagttaacaagccctgcaacaccatcccctgatgcaagcacttctctggaagactcttttgctcatttacaactcagtggagacaacacagctgaaaggagtcataggggagaaggagaagaagatcatgaatcaccatcttcaggcagggtaccagcaccagacacctccattgaagaaactgaatcagatgccagtagtgatagtgaggatgtatctgcagttgttgcacagcactccttgacccaacagagacttttggtttctaatgcaaaccagacagtacccgatcgatcagatcgatcgggaactgatcgatcagtagcagggggtggaacagtgagtgtcagtgtcagatctagaaggcctgatggacagtgcacagtaactgaagtttaaataaaaatgtcttcagctccatgctcaaggttgaaagggttacctgtaaatttctgcccacataacattatactcatccctagtagtgcattttgggagttggggtgggaaggggtatgggaaggatagactcataattaaaatgtctaacatgtctctgttgagaaatttatttaatgtaaggaacttgggtgttaatagttgagagctgtttagtaataacccagttttcttgaggtctgtttactttatactttttaaaaacttctgtagttcttttggccagtgtgtttgtattatctgtgcattaatggtcctcatctgactcctgcattgtgtcttatttttctgcatggattggcataagaccattactaaaatttggcacctgtgagatgtttgatattatgaacaggaaacataatttaatgtatgaatagatgtgaatttgggatttcaaaatagatgaataacaactattttatagtaaagttattgaaatggaaatgaaaacagccagtaacttatgtttcagaatgtttgtaacacacttcatggtgttcccataggctttgctgtctagtcttatagtttgaggtttttttggtctgcatttttctttttgattacaaaatttataatttaataaatactagagtttatcaaaaacagtttgtctcttgtttgagggtggaaagggtgtggaaacattttgacatttgtgaccaaaggtcacttaaaaagtggtggttttaattggttgttttcagcttaatcacctgctcagaaaagtttgatttttttcttagagattatttaaacagaatctataggcagtgtgtatataataaacatgtatggaaat

SEQ ID NO: 85235 - DNA, 1080 bp, Artificial Sequence
  derived and/or modified sequence
atgatggccggctgcggcgagatcgaccacagcatcaacatgctgcccaccaacagaaaggccaacgagagctgcagcaacaccgcccccagcctgaccgtgcccgagtgcgccatctgcctgcagacctgcgtgcaccccgtgagcctgccctgcaagcacgtgttctgctacctgtgcgtgaagggcgccagctggctgggcaagagatgcgccctgtgcagacaggagatccccgaggacttcctggacaagcccaccctgctgagccccgaggagctgaaggccgccagcagaggcaacggcgagtacgcctggtactacgagggcagaaacggctggtggcagtacgacgagagaaccagcagagagctggaggacgccttcagcaagggcaagaagaacaccgagatgctgatcgccggcttcctgtacgtggccgacctggagaacatggtgcagtacagaagaaacgagcacggcagaagaagaaagatcaagagagacatcatcgacatccccaagaagggcgtggccggcctgagactggactgcgacgccaacaccgtgaacctggccagagagagcagcgccgacggcgccgacagcgtgagcgcccagagcggcgccagcgtgcagcccctggtgagcagcgtgagacccctgaccagcgtggacggccagctgaccagccccgccacccccagccccgacgccagcaccagcctggaggacagcttcgcccacctgcagctgagcggcgacaacaccgccgagagaagccacagaggcgagggcgaggaggaccacgagagccccagcagcggcagagtgcccgcccccgacaccagcatcgaggagaccgagagcgacgccagcagcgacagcgaggacgtgagcgccgtggtggcccagcacagcctgacccagcagagactgctggtgagcaacgccaaccagaccgtgcccgacagaagcgacagaagcggcaccgacagaagcgtggccggcggcggcaccgtgagcgtgagcgtgagaagcagaagacccgacggccagtgcaccgtgaccgaggtgtag

SEQ ID NO: 85236 - protein, 331 aa, Artificial Sequence
  derived and/or modified sequence
MATSGDCPRSESQGEEPAECSEAGLLQEGVQPEEFVAIADYAATDETQLSFLRGEKILILRQTTADWWWGERAGCCGYIPANHVGKHVDEYDPEDTWQDEEYFGSYGTLKLHLEMLADQPRTTKYHSVILQNKESLTDKVILDVGCGTGIISLFCAHYARPRAVYAVEASEMAQHTGQLVLQNGFADIITVYQQKVEDVVLPEKVDVLVSEWMGTCLLTLRGELRFDIRKAGTLHGFTAWFSVHFQSLQEGQPPQVLSTGPFHPTTHWKQTLFMMDDPVPVHTGDVVTGSVVLQRNPVWRRHMSVALSWAVTSRQDPTSQKVGEKVFPIWR

SEQ ID NO: 85237 - DNA, 996 bp, Artificial Sequence
  derived and/or modified sequence
atggccacctccggcgattgtcccagatccgaatcccaaggggaggagcccgcagaatgttctgaagcaggcctgctgcaagaaggcgtgcagccagaagagtttgtcgccatagctgactacgctgctaccgacgagacccagttgtccttccttcggggggagaaaatcttgatcctccggcagacgactgctgactggtggtggggcgagagggctggctgttgcggctatattcctgcaaaccacgtgggtaagcacgtggatgaatacgatcctgaggatacatggcaggatgaggaatattttggctcgtatggcactttgaagctccatcttgaaatgctggccgatcaaccacgtactactaagtaccatagtgtcatcttgcagaacaaggaatcattgactgataaagtcatcttagacgtcggatgtggaaccggcattatttcactcttctgcgctcattacgcacgccctcgggctgtgtatgcagttgaggccagtgagatggcacaacacactggccagctggtgctgcagaacggtttcgccgacatcataacagtgtaccagcagaaggttgaagacgtcgtcctgccagagaaagtggacgtcctggtgtcggaatggatgggcacttgtctccttaccctgaggggcgaattgagattcgacattagaaaggccggcacactgcatggcttcacagcctggttttcagtgcacttccagtccctgcaggaagggcagcccccccaagtgctttccacaggccctttccacccaacaacccactggaaacagacgctctttatgatggacgaccctgttcctgtgcacacgggggacgtggtcaccggctccgtcgtgttgcaacgcaacccggtttggagaagacatatgtcagttgctttaagttgggcagtgactagcagacaagatccaacttcacaaaaagtgggagaaaaagtgttccccatatggagatag

SEQ ID NO: 85238 - DNA, 996 bp, Artificial Sequence
  derived and/or modified sequence
atggccaccagcggggactgccccaggtctgagagccagggcgaggagccagcagaatgttctgaggccggcctgctgcaggagggcgtgcagcctgaggagtttgtggccatcgctgactatgctgccacagatgagacccagctgtccttcctgcggggggagaagatcctgatcctgcggcagaccacagctgactggtggtggggcgagagagctggctgctgcggctacatcccagccaaccacgtgggcaagcacgtggatgaatatgaccctgaggacacctggcaggatgaggagtacttcggcagctatggcaccctgaagctgcacctggagatgctggccgaccagcccaggaccaccaagtaccacagcgtcatcctgcagaacaaggagagcctgacagacaaggtgatcctggatgtgggctgcggcaccggcatcatcagcctcttctgtgcccactacgcccggcccagggctgtgtatgctgtggaggccagcgagatggcccagcacacaggccagctggtgctgcagaatggatttgctgacatcatcaccgtgtaccagcagaaggtggaggatgtggtgctgcctgagaaggtggatgtgctggtgtctgagtggatgggcacctgcctgctgaccctgcggggggagctgcgctttgacatcaggaaggccggcaccctgcacggcttcaccgcctggttctctgtgcacttccagagcctgcaggagggccagcccccccaggtgctgagcacaggccccttccaccccaccacccactggaagcagaccctcttcatgatggatgatcctgtgcctgtgcacactggagatgtggtgacaggctctgtggtgctgcagagaaatcctgtgtggaggaggcacatgtctgtggccctgtcctgggccgtgaccagccggcaggaccccaccagccagaaggtgggggagaaggtgttccccatctggaggtag

SEQ ID NO: 85239 - DNA, 996 bp, Artificial Sequence
  derived and/or modified sequence
atggccaccagcggcgactgcccccggagcgagagccagggcgaggaacctgcagaatgctccgaagcaggcttgcttcaagaaggggtacagcccgaggagtttgtcgcaatcgccgactacgctgcaaccgatgagacccagcttagttttctcaggggagagaagatattaatcctgcgacagactaccgcagactggtggtggggagagcgggctggctgctgtggctatatccccgctaatcatgttgggaaacatgttgacgagtacgacccagaagacacttggcaagacgaggagtactttggctcatatggcactctgaagttgcacctggaaatgctggccgaccagccaaggactacaaagtaccattccgtgatcctgcagaacaaggagtctctgaccgacaaggtgatcttggatgtgggatgtggtactggtattataagcctcttctgcgctcactatgccagacctcgtgctgtgtacgccgttgaggcgtcagaaatggcccaacacacaggccagctggtactccagaatggctttgccgatatcatcacggtttaccaacagaaggtcgaagacgtggtgcttcctgaaaaagtggacgtcctggtaagcgaatggatgggcacatgtctgctgacattgaggggcgagctgaggttcgacatcagaaaagctggaactctccacgggtttactgcctggtttagtgttcattttcagtctctgcaagaaggacagccgccacaggttcttagcacaggtcctttccaccccacaacacactggaagcagaccctcttcatgatggatgatcctgtgccagtccataccggtgatgtggtgaccggcagcgtggttctgcaacgtaatcctgtgtggcgtcggcatatgtctgtggccttaagctgggcggtgacaagtcgacaagacccgacatctcagaaagtgggtgagaaggtgttccccatttggcgatag

SEQ ID NO: 85240 - DNA, 996 bp, Artificial Sequence
  derived and/or modified sequence
atggccacaagtggagactgtcctaggtcagaatcccagggagaggagccagccgagtgctccgaggccggactgttgcaggagggcgttcagcctgaagagttcgtcgctattgccgactatgcagcaactgatgaaacacaactttctttcctgagaggggaaaagattctcattttaaggcagaccacggcagactggtggtggggcgaaagggccggatgttgcggctatattcctgcgaaccacgttggcaaacatgtggacgagtatgatcctgaggatacttggcaggacgaggaatactttggatcctacggaactctgaagctccatctcgaaatgctggctgatcagccacgaaccaccaaatatcattccgtaatcctgcagaacaaagagagtcttaccgacaaagtgatcctcgacgtgggatgtggtaccggcataatatcactgttctgcgcgcattatgctcggccaagagcggtctatgctgtggaagcaagcgaaatggcgcagcacactggtcagttggtgttgcagaacggctttgctgacattatcaccgtctaccaacagaaagtagaggacgttgtgctcccggaaaaggtggacgttcttgtctccgagtggatgggcacttgtttgttaactctgcggggtgaactcagattcgacatcaggaaggccggaactctccacggctttactgcctggttttctgtccattttcagagtctgcaggaaggccagccgcctcaagtcctgagcacagggccattccacccgacaacgcattggaaacagacactgtttatgatggacgacccggtcccagtgcacacaggcgacgtggtgactggtagtgtggttctacagcgaaatccagtctggaggagacacatgtctgtggctttgtcttgggcggttacctcacgccaggatcctacgagtcagaaagttggtgaaaaagtattccctatctggcggtag

SEQ ID NO: 85241 - DNA, 1932 bp, Artificial Sequence
  derived and/or modified sequence
gtggctcaggctcctggaaaggaccgtccacccctccgcgctggcggtgtggacgcggaactcagcggagaaacgcgattgagaaatggaaaagaaaatgaaataaatcagcagttatgaggcagagcctaagagaactatggcaacatcaggtgactgtcccagaagtgaatcgcagggagaagagcctgctgagtgcagtgaggccggtctcctgcaggagggagtacagccagaggagtttgtggccatcgcggactacgctgccaccgatgagacccagctcagttttttgagaggagaaaaaattcttatcctgagacaaaccactgcagattggtggtggggtgagcgtgcgggctgctgtgggtacattccggcaaaccatgtggggaagcacgtggatgagtacgaccccgaggacacgtggcaggatgaagagtacttcggcagctatggaactctgaaactccacttggagatgttggcagaccagccacgaacaactaaataccacagtgtcatcctgcagaataaagaatccctgacggataaagtcatcctggacgtgggctgtgggactgggatcatcagtctcttctgtgcacactatgcgcggcctagagcggtgtacgcggtggaggccagtgagatggcacagcacacggggcagctggtcctgcagaacggctttgctgacatcatcaccgtgtaccagcagaaggtggaggatgtggtgctgcccgagaaggtggacgtgctggtgtctgagtggatggggacctgcctgctgaccctgaggggcgagctgcgcttcgacatcaggaaggcggggaccctgcacggcttcacggcctggtttagcgtccacttccagagcctgcaggaggggcagccgccgcaggtgctcagcaccgggcccttccaccccaccacacactggaagcagacgctgttcatgatggacgacccagtccctgtccatacaggagacgtggtcacgggttcagttgtgttgcagagaaacccagtgtggagaaggcacatgtctgtggctctgagctgggctgtcacttccagacaagaccccacatctcaaaaagttggagaaaaagtcttccccatctggagatgacagttgatgctttatttggaaagcagtgtgcatatcttgaggggtgatgaacacaagcaaaccaagttgcacctggcttctgcacactcctgcgaaagtcggtgaacattcactccacattgacccctccctagcctggcaggtgacgtcagggtccttcacagacaaacacgcttgggctcggcaggagctgccgtggccacccccgctgcccagtgtctgccctctagaagtaggctgtgtttccaggtgttcacccgtggtgcccacagtgccgacccgtggctgggtcggagctccatgttcctaagctaggtctaggtctacactcctaggacgcacgcatatcagcccgtgtaccctgtgacagtgactgtccccacctcctatgttagtggtgcccttactgccgtcgctcatccactcgtgtgggacgtaggattgcacagggctgtgccagtggcgtgtagggaacactgccctggctcagcgtgcgagctaaggtggtgatgtatgcgatgggactctgcatgggatagtacagttgtgtagacgtcttccaaataaattatgtgttggtccatcgcacatgctcaataaatatttttaaatgagtgaatgtcattgtgtatcctgttttatgcatatatgttattttttgtaattacaggatcatactatatgcattgctttataagtttttctcaatattgtgaaaaaacttccacatcagtagatacatgtccataatttttttttgtattgttttgatttttattaaattttattgaaatata

SEQ ID NO: 85242 - DNA, 996 bp, Artificial Sequence
  derived and/or modified sequence
atggccaccagcggcgactgccccagaagcgagagccagggcgaggagcccgccgagtgcagcgaggccggcctgctgcaggagggcgtgcagcccgaggagttcgtggccatcgccgactacgccgccaccgacgagacccagctgagcttcctgagaggcgagaagatcctgatcctgagacagaccaccgccgactggtggtggggcgagagagccggctgctgcggctacatccccgccaaccacgtgggcaagcacgtggacgagtacgaccccgaggacacctggcaggacgaggagtacttcggcagctacggcaccctgaagctgcacctggagatgctggccgaccagcccagaaccaccaagtaccacagcgtgatcctgcagaacaaggagagcctgaccgacaaggtgatcctggacgtgggctgcggcaccggcatcatcagcctgttctgcgcccactacgccagacccagagccgtgtacgccgtggaggccagcgagatggcccagcacaccggccagctggtgctgcagaacggcttcgccgacatcatcaccgtgtaccagcagaaggtggaggacgtggtgctgcccgagaaggtggacgtgctggtgagcgagtggatgggcacctgcctgctgaccctgagaggcgagctgagattcgacatcagaaaggccggcaccctgcacggcttcaccgcctggttcagcgtgcacttccagagcctgcaggagggccagcccccccaggtgctgagcaccggccccttccaccccaccacccactggaagcagaccctgttcatgatggacgaccccgtgcccgtgcacaccggcgacgtggtgaccggcagcgtggtgctgcagagaaaccccgtgtggagaagacacatgagcgtggccctgagctgggccgtgaccagcagacaggaccccaccagccagaaggtgggcgagaaggtgttccccatctggagatag

SEQ ID NO: 85243 - protein, 284 aa, Artificial Sequence
  derived and/or modified sequence
MATSGDCPRSESQGEEPAECSEAGLLQEGVQPEEFVAIADYAATDETQLSFLRGEKILILRQTTADWWWGERAGCCGYIPANHVGKHVDEYDPEDTWQDEEYFGSYGTLKLHLEMLADQPRTTKYHSVILQNKESLTDKVILDVGCGTGIISLFCAHYARPRAVYAVEASEMAQHTGQLVLQNGFADIITVYQQKVEDVVLPEKVDVLVSEWMGTCLLAAPLLSCRILPCTCASGPLHVLLACCLPLPCTCASVPLHVLLACCLPVLRAPQPSGLHLSWPIFLL

SEQ ID NO: 85244 - DNA, 855 bp, Artificial Sequence
  derived and/or modified sequence
atggccacaagtggagattgcccacggtccgagagccagggcgaagaaccagctgagtgctccgaagcggggctgctccaggaaggagtgcagcccgaggagtttgtagctatagctgactacgcggcgaccgacgagacgcagctaagtttcctccgcggcgagaaaattttgatactccgccaaacaacggccgattggtggtggggcgagcgtgcaggatgttgtgggtatataccagccaaccatgtgggtaagcacgtggatgagtacgaccccgaggatacatggcaggatgaggagtattttggttcctatggaacactgaagttgcatctagaaatgctggccgatcagccgcgcacaactaaataccacagtgtgatcctgcagaacaaggaatccttaacggataaggtgatacttgacgttggatgcggcacagggatcatcagcttgttttgcgcccattacgccaggccacgagccgtctatgctgtggaagctagtgaaatggcccagcacaccggtcagctggtattacagaacgggtttgctgacattatcacggtttaccaacagaaggtggaggacgtagttctgcctgagaaggttgatgtgctggtgtctgaatggatggggacttgtctgctcgccgcacctcttttgtcttgtaggatactcccctgtacctgtgctagcggacccctgcatgtgctcttagcttgctgtcttccacttccttgtacatgcgcttcggttcctctgcacgtactgttagcttgctgcctgccggtactcagagctcctcaaccctccggattgcacctgagctggcctattttcttgctgtag

SEQ ID NO: 85245 - DNA, 855 bp, Artificial Sequence
  derived and/or modified sequence
atggccaccagcggggactgccccaggtctgagagccagggcgaggagccagcagaatgttctgaggccggcctgctgcaggagggcgtgcagcctgaggagtttgtggccatcgctgactatgctgccacagatgagacccagctgtccttcctgcggggggagaagatcctgatcctgcggcagaccacagctgactggtggtggggcgagagagctggctgctgcggctacatcccagccaaccacgtgggcaagcacgtggatgaatatgaccctgaggacacctggcaggatgaggagtacttcggcagctatggcaccctgaagctgcacctggagatgctggccgaccagcccaggaccaccaagtaccacagcgtcatcctgcagaacaaggagagcctgacagacaaggtgatcctggatgtgggctgcggcaccggcatcatcagcctcttctgtgcccactacgcccggcccagggctgtgtatgctgtggaggccagcgagatggcccagcacacaggccagctggtgctgcagaatggatttgctgacatcatcaccgtgtaccagcagaaggtggaggatgtggtgctgcctgagaaggtggatgtgctggtgtctgagtggatgggcacctgcctgctggccgcccccctgctgagctgccgcatcctgccctgcacctgtgccagcggccccctgcacgtgctgctggcctgctgcctgcccctgccctgcacctgtgcctctgtgcccctgcacgtgctgctggcctgctgcctgcctgtgctgcgggccccccagcccagcggcctgcacctgtcctggcccatcttcctgctgtag

SEQ ID NO: 85246 - DNA, 855 bp, Artificial Sequence
  derived and/or modified sequence
atggccaccagcggcgactgcccccggagcgagagccagggcgaggagcccgccgaatgctccgaggcaggacttctccaggagggcgtgcagccagaggaatttgtggccattgcagactatgcagcaactgacgagacacagctgtcgtttctgagaggtgagaagattctcatcctccgtcaaacaaccgccgattggtggtggggagaaagggccggatgttgcggttacatcccagccaatcacgtcggcaaacatgtggatgagtatgatccagaggacacctggcaagacgaggagtattttggatcttatggcacattaaagttgcatctggagatgttggctgaccaaccccgcactaccaagtaccacagcgttatactgcagaacaaggagagcctcaccgataaagtcatccttgacgttgggtgcggaaccgggatcatcagccttttttgcgcacattatgccaggcctagggccgtctatgctgtggaagctagcgagatggcgcagcacacgggacaactggtgctgcagaacgggttcgccgacatcatcacagtttaccaacagaaagttgaggatgttgtacttcccgaaaaagttgacgtccttgtgagcgagtggatgggcacttgcttgcttgcggcccccctcctctcatgccgtatcttgccgtgcacctgtgcctccggcccactgcacgtgttgctggcttgttgtctgcccctcccttgcacatgtgcaagtgtgccactgcatgtcttgctcgcctgttgtcttcctgttcttagggcaccacagccgtccggcctgcatctgtcctggcccatctttctcctatag

SEQ ID NO: 85247 - DNA, 855 bp, Artificial Sequence
  derived and/or modified sequence
atggcaacctcaggcgactgcccccgaagcgagtcccagggcgaggaaccggctgagtgctcagaggccggactgctccaggaaggggtccagcctgaagaatttgttgctatagctgattacgcagccacagatgagactcagctgtcgtttctccgtggcgagaagatactgattttacgacagacaactgcggattggtggtggggagaaagagccggttgctgtggctacattccggcaaaccacgtgggtaagcatgttgatgagtatgacccagaagacacatggcaggatgaagagtattttggctcttatggcacgttgaaattacacctcgaaatgcttgcagaccagccacggaccacgaaataccatagcgtcatcttacaaaataaggagtctctgaccgacaaagtgattctggatgtggggtgcggaaccggcattatttccctcttctgtgcccactacgcacgcccacgcgctgtgtatgccgttgaggcaagtgaaatggcgcagcacactggccaactggttcttcagaatggctttgcagatataataactgtgtaccaacagaaggtcgaggacgttgtcttgcctgagaaggtggacgtccttgtctctgaatggatgggaacatgtctgctagcagcccctctcttgtcatgtaggattctcccgtgtacgtgcgcctctggccctctgcacgtgctgttagcctgctgtctgcccctgccctgcacatgcgcatctgtcccgctccacgtacttctggcctgctgccttcccgtactaagagccccacagcccagtgggctgcatctcagttggccaattttcctgctgtag

SEQ ID NO: 85248 - DNA, 1334 bp, Artificial Sequence
  derived and/or modified sequence
tgcactgcgcttgcgcgggttgagggcggtggctcaggctcctggaaaggaccgtccacccctccgcgctggcggtgtggacgcggaactcagcggagaaacgcgattgagaaatggaaaagaaaatgaaataaatcagcagttatgaggcagagcctaagagaactatggcaacatcaggtgactgtcccagaagtgaatcgcagggagaagagcctgctgagtgcagtgaggccggtctcctgcaggagggagtacagccagaggagtttgtggccatcgcggactacgctgccaccgatgagacccagctcagttttttgagaggagaaaaaattcttatcctgagacaaaccactgcagattggtggtggggtgagcgtgcgggctgctgtgggtacattccggcaaaccatgtggggaagcacgtggatgagtacgaccccgaggacacgtggcaggatgaagagtacttcggcagctatggaactctgaaactccacttggagatgttggcagaccagccacgaacaactaaataccacagtgtcatcctgcagaataaagaatccctgacggataaagtcatcctggacgtgggctgtgggactgggatcatcagtctcttctgtgcacactatgcgcggcctagagcggtgtacgcggtggaggccagtgagatggcacagcacacggggcagctggtcctgcagaacggctttgctgacatcatcaccgtgtaccagcagaaggtggaggatgtggtgctgcccgagaaggtggacgtgctggtgtctgagtggatggggacctgcctgctggctgcgcctctcctgagctgccgcattctcccctgcacctgtgcgtctggccctcttcacgtcctcctggcctgctgtctgcctctcccctgcacctgtgcgtctgtccctcttcatgtcctccttgcctgctgtctgcctgttctcagagcccctcagccctcaggccttcatctctcctggcccatcttcctactctgacgctgacatgtagtaaaagtctgaagacagagaagagtgcatgtgcgtttagcataggaggggcagctttcagtcagtgcagcaagggcatgtagttgttcagagatggtgctggaacgactgatttggagaaaagaggcccttcttcacaccatctgctaaaataaacctcagatgggctcaagagttaaatatttaagaaaaggaggaaacaaaaaaattgctacaagtttatttgttgttaggatgggaaaggtttttctaagaaccaagttcataatgaagctgtcaaataaaatacttgacaaaaaa

SEQ ID NO: 85249 - DNA, 855 bp, Artificial Sequence
  derived and/or modified sequence
atggccaccagcggcgactgccccagaagcgagagccagggcgaggagcccgccgagtgcagcgaggccggcctgctgcaggagggcgtgcagcccgaggagttcgtggccatcgccgactacgccgccaccgacgagacccagctgagcttcctgagaggcgagaagatcctgatcctgagacagaccaccgccgactggtggtggggcgagagagccggctgctgcggctacatccccgccaaccacgtgggcaagcacgtggacgagtacgaccccgaggacacctggcaggacgaggagtacttcggcagctacggcaccctgaagctgcacctggagatgctggccgaccagcccagaaccaccaagtaccacagcgtgatcctgcagaacaaggagagcctgaccgacaaggtgatcctggacgtgggctgcggcaccggcatcatcagcctgttctgcgcccactacgccagacccagagccgtgtacgccgtggaggccagcgagatggcccagcacaccggccagctggtgctgcagaacggcttcgccgacatcatcaccgtgtaccagcagaaggtggaggacgtggtgctgcccgagaaggtggacgtgctggtgagcgagtggatgggcacctgcctgctggccgcccccctgctgagctgcagaatcctgccctgcacctgcgccagcggccccctgcacgtgctgctggcctgctgcctgcccctgccctgcacctgcgccagcgtgcccctgcacgtgctgctggcctgctgcctgcccgtgctgagagccccccagcccagcggcctgcacctgagctggcccatcttcctgctgtag

SEQ ID NO: 85250 - DNA, 486 bp, Artificial Sequence
  derived and/or modified sequence
atgttggccgatcagcctcgaactacaaaataccatagtgtgatcttacagaacaaagaaagtctgagaatcaagtcctcctggacatgggccgttggcctcggttctagcgttagttcagttcatacgatgcgcggactagaacgtgtatacgctgtggaagccagcgagatggcccagcatacaggtcagctcgtactgcagaacggattcgctgatatcatcaccgtataccagcaaaaagtggaagatgtggtgctgcctgagaaagtggacgtgctggtgagtgaatggatgggaacttgcctgctatttgaatttatgatcgagagtatcttgtacgcccgggacgcctggttgaaggaaactgggtcttttggccctccatggctcaggtgtacgttgtgtcctgcagtcctcattcggatcattgtggccagatgttcttctggcacgaccagaacctcttctacttccgccttgtag

SEQ ID NO: 85251 - DNA, 486 bp, Artificial Sequence
  derived and/or modified sequence
atgctggccgaccagcccaggaccaccaagtaccacagcgtcatcctgcagaacaaggagagcctgcgcatcaagagctcctggacctgggccgtgggcctgggcagctctgtgtcctctgtgcacaccatgaggggcctggagcgggtgtatgctgtggaggccagcgagatggcccagcacacaggccagctggtgctgcagaatggatttgctgacatcatcaccgtgtaccagcagaaggtggaggatgtggtgctgcctgagaaggtggatgtgctggtgtctgagtggatgggcacctgcctgctgtttgagttcatgattgagagcatcctgtatgccagagatgcctggctgaaggagaccggcagctttggccccccctggctgcgctgcaccctgtgcccagctgtgctgatccgcatcatcgtggcccgctgcagcagcggcaccaccaggaccagcagcaccagcgccctgtag

SEQ ID NO: 85252 - DNA, 486 bp, Artificial Sequence
  derived and/or modified sequence
atgctggccgaccagccccggaccaccaagtaccacagcgtgatcctacaaaataaggaatctctgcgcatcaagagctcctggacctgggccgtgggtctgggctccagtgttagttctgtgcacaccatgagggggctcgagagggtgtacgccgtggaggcaagcgagatggcccagcacaccggtcagttggttcttcaaaacggtttcgctgacataattactgtataccagcagaaagtcgaagatgtggttctgccagagaaggtggacgtgctggtgtctgagtggatgggtacctgtcttctattcgagttcatgattgagtccatcctatatgcaagggatgcctggttaaaagagacaggtagctttggtcctccttggttaagatgcactctgtgtcccgccgtgctaattcggattattgttgccagatgttccagcggaactacgcgcaccagcagcaccagcgccctttag

SEQ ID NO: 85253 - DNA, 486 bp, Artificial Sequence
  derived and/or modified sequence
atgttggccgaccagccgaggaccacgaaataccacagtgttattctgcaaaacaaggagtcgctccggattaaatcatcctggacctgggcagtcggactgggaagttctgtgtcttctgttcacaccatgcggggacttgaacgagtttacgcggtggaggcttccgagatggcccagcatactggacaactggttctgcagaatggattcgctgatatcattactgtgtatcagcagaaggtcgaagacgtggtgctgcccgagaaggtcgatgtattagtgtccgaatggatgggaacttgccttcttttcgaatttatgattgagagtattctgtatgcaagggacgcatggctgaaagaaacaggaagctttggccctccttggctgcgttgtactctctgtcccgctgtcttaataagaattattgtagcaagatgctccagcgggacaactcggacttcatctacatccgccctctag

SEQ ID NO: 85254 - DNA, 1301 bp, Artificial Sequence
  derived and/or modified sequence
gggagaagagcctgctgagtgcagtgaggccggtctcctgcaggagggagtacagccagaggagtttgtggccatcgcggactacgctgccaccgatgagacccagctcagttttttgagaggagaaaaaattcttatcctgagacaaaccactgcagattggtggtggggtgagcgtgcgggctgctgtgggtacattccggcaaaccatgtggggaagcacgtggatgagtacgaccccgaggacacgtggcaggatgaagagtacttcggcagctatggaactctgaaactccacttggagatgttggcagaccagccacgaacaactaaataccacagtgtcatcctgcagaataaagaatccctgcggataaagtcatcctggacgtgggctgtgggactgggatcatcagtctcttctgtgcacactatgcgcggcctagagcgggtgtacgcggtggaggccagtgagatggcacagcacacggggcagctggtcctgcagaacggctttgctgacatcatcaccgtgtaccagcagaaggtggaggatgtggtgctgcccgagaaggtggacgtgctggtgtctgagtggatggggacctgcctgctgtttgagttcatgatcgagtccatcctgtatgcccgggatgcctggctgaaggagacggggtcatttggcccaccatggctgcgttgcaccttgtgccctgcagtgctgataaggattatcgtagcaaggtgctcttctgggacaacgcgtacgagttcaacctcagcgctctgaagtaagtgtccacagctgggactggcaccgtcttgtggggcctcctggtccacagtctgcaggtgggccaaggccctgggagatcccatacgacggttggataaatgagggtacctgtgcacccagataggacaatctgttgtagcattggagtaattaaagcagtatggtgctataacaagacagatgggcagagcagggtagaatgcaaggaacaaaaattttcgtatgtgaaaaaggtggcattacgattaggagggagtgagggccaagtcagcaaattattctggagcagttgattagcccttgttctctcacgccatacgtgaaaacttaattctgcatggaatcagcgtcagcgacagacatccatgggggcctgtgtgcaccatcttaggtggagaaatgagcagcaacaatggatggaatggaccctgggctagatagaatctggcagtctatgtggcagaaatcagcaaaaacacgattgtaaaagcaaacaagtaattag

SEQ ID NO: 85255 - DNA, 486 bp, Artificial Sequence
  derived and/or modified sequence
atgctggccgaccagcccagaaccaccaagtaccacagcgtgatcctgcagaacaaggagagcctgagaatcaagagcagctggacctgggccgtgggcctgggcagcagcgtgagcagcgtgcacaccatgagaggcctggagagagtgtacgccgtggaggccagcgagatggcccagcacaccggccagctggtgctgcagaacggcttcgccgacatcatcaccgtgtaccagcagaaggtggaggacgtggtgctgcccgagaaggtggacgtgctggtgagcgagtggatgggcacctgcctgctgttcgagttcatgatcgagagcatcctgtacgccagagacgcctggctgaaggagaccggcagcttcggccccccctggctgagatgcaccctgtgccccgccgtgctgatcagaatcatcgtggccagatgcagcagcggcaccaccagaaccagcagcaccagcgccctgtag

SEQ ID NO: 85256 - protein, 438 aa, Artificial Sequence
  derived and/or modified sequence
MSLTVVSMACVGFFLLQGAWPLMGGQDKPFLSARPSTVVPRGGHVALQCHYRRGFNNFMLYKEDRSHVPIFHGRIFQESFIMGPVTPAHAGTYRCRGSRPHSLTGWSAPSNPLVIMVTGNHRKPSLLAHPGPLLKSGETVILQCWSDVMFEHFFLHREGISEDPSRLVGQIHDGVSKANFSIGPLMPVLAGTYRCYGSVPHSPYQLSAPSDPLDIVITGLYEKPSLSAQPGPTVQAGENVTLSCSSWSSYDIYHLSREGEAHERRLRAVPKVNRTFQADFPLGPATHGGTYRCFGSFRALPCVWSNSSDPLLVSVTGICRHLHVLIGTSVVIFLFILLLFFLLYRWCSNKKNAAVMDQEPAGDRTVNRQDSDEQDPQEVTYAQLDHCVFIQRKISRPSQRPKTPLTDTSVYTELPNAEPRSKVVSCPRAPQSGLEGVF

SEQ ID NO: 85257 - DNA, 1834 bp, Artificial Sequence
  derived and/or modified sequence
ggggcgcggcctcctgtctgcaccggcagcaccatgtcgctcacggtcgtcagcatggcgtgcgttgggttcttcttgctgcagggggcctggccactcatgggtggtcaggacaaacccttcctgtctgcccggcccagcactgtggtgcctcgaggaggacacgtggctcttcagtgtcactatcgtcgtgggtttaacaatttcatgctgtacaaagaagacagaagccacgttcccatcttccacggcagaatattccaggagagcttcatcatgggccctgtgaccccagcacatgcagggacctacagatgtcggggttcacgcccacactccctcactgggtggtcggcacccagcaaccccctggtgatcatggtcacaggaaaccacagaaaaccttccctcctggcccacccagggcccctgctgaaatcaggagagacagtcatcctgcaatgttggtcagatgtcatgtttgagcacttctttctgcacagagaggggatctctgaggacccctcacgcctcgttggacagatccatgatggggtctccaaggccaacttctccatcggtcccttgatgcctgtccttgcaggaacctacagatgttatggttctgttcctcactccccctatcagttgtcagctcccagtgaccccctggacatcgtgatcacaggtctatatgagaaaccttctctctcagcccagccgggccccacggttcaggcaggagagaacgtgaccttgtcctgtagctcctggagctcctatgacatctaccatctgtccagggaaggggaggcccatgaacgtaggctccgtgcagtgcccaaggtcaacagaacattccaggcagactttcctctgggccctgccacccacggagggacctacagatgcttcggctctttccgtgccctgccctgcgtgtggtcaaactcaagtgacccactgcttgtttctgtcacaggtatctgcagacacctgcatgttctgattgggacctcagtggtcatcttcctcttcatcctcctcctcttctttctcctttatcgctggtgctccaacaaaaagaatgctgctgtaatggaccaagagcctgcgggggacagaacagtgaataggcaggactctgatgaacaagaccctcaggaggtgacgtacgcacagttggatcactgcgttttcatacagagaaaaatcagtcgcccttctcagaggcccaagacacccctaacagataccagcgtgtacacggaacttccaaatgctgagcccagatccaaagttgtctcctgcccacgagcaccacagtcaggtcttgagggggttttctagggagacaacagccctgtctcaaaaccaggttgccagatccaatgaaccagcagctggaatctgaaggcatcagtctgcatcttaggggatcgctcttcctcacaccacgaatctgaacatgcctctctcttgcttacaaatgcctaaggtcgccactgcctgctgcagagaaaacacactcctttgcttagcccacaagtatctatttcacttgacccctgcccacctctccaacctaactggcttacttcctagtcctacttgaggctgcaatcacactgaggaactcacaattccaaacatacaagaggctccctcttaacacggcacttacacacttgctgttccaccttccctcatgctgttccacctcccctcagactatctttcagccttctgtcatcagtaaaatttataaattttttttataacttcagtgtagctctctcctcttcaaataaacatgtctgccctcatggtttcg

SEQ ID NO: 85258 - protein, 891 aa, Artificial Sequence
  derived and/or modified sequence
MVAPVLETSHVFCCPNRVRGVLNWSSGPRGLLAFGTSCSVVLYDPLKRVVVTNLNGHTARVNCIQWICKQDGSPSTELVSGGSDNQVIHWEIEDNQLLKAVHLQGHEGPVYAVHAVYQRRTSDPALCTLIVSAAADSAVRLWSKKGPEVMCLQTLNFGNGFALALCLSFLPNTDVTWKTGQVERGRAWKPPASLALCSRSCDSMVSCYASILCKALWKEKLHTFWHHNRISFLPSAFRPIPILACGNDDCRIHIFAQQNDQFQKVLSLCGHEDWIRGVEWAAFGRDLFLASCSQDCLIRIWKLYIKSTSLETQDDDNIRLKENTFTIENESVKIAFAVTLETVLAGHENWVNAVHWQPVFYKDGVLQQPVRLLSASMDKTMILWAPDEESGVWLEQVRVGEVGGNTLGFYDCQFNEDGSMIIAHAFHGALHLWKQNTVNPREWTPEIVISGHFDGVQDLVWDPEGEFIITVGTDQTTRLFAPWKRKDQSQVTWHEIARPQIHGYDLKCLAMINRFQFVSGADEKVLRVFSAPRNFVENFCAITGQSLNHVLCNQDSDLPEGATVPALGLSNKAVFQGDIASQPSDEEELLTSTGFEYQQVAFQPSILTEPPTEDHLLQNTLWPEVQKLYGHGYEIFCVTCNSSKTLLASACKAAKKEHAAIILWNTTSWKQVQNLVFHSLTVTQMAFSPNEKFLLAVSRDRTWSLWKKQDTISPEFEPVFSLFAFTNKITSVHSRIIWSCDWSPDSKYFFTGSRDKKVVVWGECDSTDDCIEHNIGPCSSVLDVGGAVTAVSVCPVLHPSQRYVVAVGLECGKICLYTWKKTDQVPEINDWTHCVETSQSQSHTLAIRKLCWKNCSGKTEQKEAEGAEWLHFASCGEDHTVKIHRVNKCAL

SEQ ID NO: 85259 - DNA, 2676 bp, Artificial Sequence
  derived and/or modified sequence
atggtggcccccgtgctggagaccagccacgtgttctgctgccccaacagagtgagaggcgtgctgaactggagcagcggccccagaggcctgctggccttcggcaccagctgcagcgtggtgctgtacgaccccctgaagagagtggtggtgaccaacctgaacggccacaccgccagagtgaactgcatccagtggatctgcaagcaggacggcagccccagcaccgagctggtgagcggcggcagcgacaaccaggtgatccactgggagatcgaggacaaccagctgctgaaggccgtgcacctgcagggccacgagggccccgtgtacgccgtgcacgccgtgtaccagagaagaaccagcgaccccgccctgtgcaccctgatcgtgagcgccgccgccgacagcgccgtgagactgtggagcaagaagggccccgaggtgatgtgcctgcagaccctgaacttcggcaacggcttcgccctggccctgtgcctgagcttcctgcccaacaccgacgtgacctggaagaccggccaggtggagagaggcagagcctggaagccccccgccagcctggccctgtgcagcagaagctgcgacagcatggtgagctgctacgccagcatcctgtgcaaggccctgtggaaggagaagctgcacaccttctggcaccacaacagaatcagcttcctgcccagcgccttcagacccatccccatcctggcctgcggcaacgacgactgcagaatccacatcttcgcccagcagaacgaccagttccagaaggtgctgagcctgtgcggccacgaggactggatcagaggcgtggagtgggccgccttcggcagagacctgttcctggccagctgcagccaggactgcctgatcagaatctggaagctgtacatcaagagcaccagcctggagacccaggacgacgacaacatcagactgaaggagaacaccttcaccatcgagaacgagagcgtgaagatcgccttcgccgtgaccctggagaccgtgctggccggccacgagaactgggtgaacgccgtgcactggcagcccgtgttctacaaggacggcgtgctgcagcagcccgtgagactgctgagcgccagcatggacaagaccatgatcctgtgggcccccgacgaggagagcggcgtgtggctggagcaggtgagagtgggcgaggtgggcggcaacaccctgggcttctacgactgccagttcaacgaggacggcagcatgatcatcgcccacgccttccacggcgccctgcacctgtggaagcagaacaccgtgaaccccagagagtggacccccgagatcgtgatcagcggccacttcgacggcgtgcaggacctggtgtgggaccccgagggcgagttcatcatcaccgtgggcaccgaccagaccaccagactgttcgccccctggaagagaaaggaccagagccaggtgacctggcacgagatcgccagaccccagatccacggctacgacctgaagtgcctggccatgatcaacagattccagttcgtgagcggcgccgacgagaaggtgctgagagtgttcagcgcccccagaaacttcgtggagaacttctgcgccatcaccggccagagcctgaaccacgtgctgtgcaaccaggacagcgacctgcccgagggcgccaccgtgcccgccctgggcctgagcaacaaggccgtgttccagggcgacatcgccagccagcccagcgacgaggaggagctgctgaccagcaccggcttcgagtaccagcaggtggccttccagcccagcatcctgaccgagccccccaccgaggaccacctgctgcagaacaccctgtggcccgaggtgcagaagctgtacggccacggctacgagatcttctgcgtgacctgcaacagcagcaagaccctgctggccagcgcctgcaaggccgccaagaaggagcacgccgccatcatcctgtggaacaccaccagctggaagcaggtgcagaacctggtgttccacagcctgaccgtgacccagatggccttcagccccaacgagaagttcctgctggccgtgagcagagacagaacctggagcctgtggaagaagcaggacaccatcagccccgagttcgagcccgtgttcagcctgttcgccttcaccaacaagatcaccagcgtgcacagcagaatcatctggagctgcgactggagccccgacagcaagtacttcttcaccggcagcagagacaagaaggtggtggtgtggggcgagtgcgacagcaccgacgactgcatcgagcacaacatcggcccctgcagcagcgtgctggacgtgggcggcgccgtgaccgccgtgagcgtgtgccccgtgctgcaccccagccagagatacgtggtggccgtgggcctggagtgcggcaagatctgcctgtacacctggaagaagaccgaccaggtgcccgagatcaacgactggacccactgcgtggagaccagccagagccagagccacaccctggccatcagaaagctgtgctggaagaactgcagcggcaagaccgagcagaaggaggccgagggcgccgagtggctgcacttcgccagctgcggcgaggaccacaccgtgaagatccacagagtgaacaagtgcgccctgtag

SEQ ID NO: 85260 - DNA, 2676 bp, Artificial Sequence
  derived and/or modified sequence
atggtggcaccagtgctggagactagccacgtgttctgctgtcccaatcgtgtgcgaggagtcttgaactggtcctcaggtccccgaggattgctggctttcggaacatcttgctcggttgttctctatgaccccctgaaacgggtagttgtgacaaacctcaacggccacacagccagagtaaattgtatacagtggatctgcaagcaggatggtagcccgtcaaccgagttggtgagcggcggctcagataatcaggtaattcactgggaaattgaggacaaccagctgctgaaggccgtccacctgcagggacatgaaggcccggtgtacgctgttcatgcggtgtatcagcggcggaccagtgatccagcactatgcactttgattgtgtctgctgccgccgatagtgccgtcaggttatggagcaagaagggacctgaagtcatgtgcctccagacccttaactttggaaacgggttcgcgctggcgctgtgcctctcatttctgcccaacacagatgtgacatggaagacagggcaagtcgaacgaggccgggcttggaagccccctgcaagccttgcactgtgcagccgctcctgcgactctatggtgtcatgctacgcaagcattttgtgcaaagcactgtggaaagagaagctgcacactttctggcaccacaaccggatttcgttccttcccagcgcttttagacccattcccatcctggcctgtggcaacgatgattgcagaatccacatttttgctcagcaaaacgaccaattccagaaggtcctgtccctttgtgggcatgaagactggatcagaggcgtggagtgggctgccttcggcagagatctgttcttggctagttgtagccaagactgtttgatccggatctggaaactttacatcaagtccacttccttggaaacccaggacgatgacaacatccgcctcaaggagaatacattcacaatagaaaatgagtctgtgaaaatcgcgtttgcagtcactctcgagacagtgctggccggccacgagaactgggtgaatgcagtgcactggcagcctgtgttttataaagatggcgtgctccaacagccagttaggttgctcagtgcgtctatggataagaccatgattctctgggccccggacgaggaatcaggcgtatggctggaacaagtgagggttggagaggtcgggggcaacaccctcggattttatgactgccagttcaacgaggacggctctatgattatagcgcacgctttccatggagctttgcatctgtggaagcaaaataccgtgaaccctagggagtggacccctgagattgttattagcggccactttgacggagtgcaggatctggtatgggaccccgaaggggaatttataataaccgttggcaccgaccagacaacacgactgttcgcaccatggaagcgaaaagaccagtctcaggtgacatggcacgagatagcgaggccacagatccatgggtatgaccttaagtgcctggcaatgatcaataggttccaatttgttagcggagcggacgagaaagtgctccgggtcttttctgctccacgaaatttcgtcgagaatttttgtgccatcactgggcagagcttaaaccacgtgttatgtaaccaggatagcgacttacccgagggcgccactgtccctgccctgggtctcagtaacaaggccgtttttcagggtgacattgccagccagccaagcgatgaggaggaacttttgacgagtacaggatttgagtaccagcaagtcgcatttcagccgtctattcttactgaacccccgaccgaagaccatctgctgcaaaacacattatggccggaggtgcagaagctctacggacacggatacgaaatcttttgcgtcacgtgcaacagctccaaaacacttcttgcttctgcttgcaaggcagcaaagaaggagcatgcagccattatcttatggaacactacttcgtggaaacaagttcagaacctagtgtttcacagtctcaccgtgacccaaatggcattctcacccaatgagaaatttttgctcgcagtttctcgggaccgtacttggagtttatggaagaagcaagacacaatctcgcccgagttcgagccagtgttctcactttttgcgttcactaacaaaatcacttccgttcactcaaggatcatctggtcctgcgactggtctccagactcaaagtacttcttcaccggatcacgagataagaaggtagtggtgtggggcgagtgcgatagcactgatgattgtattgaacacaatatcggaccgtgcagcagcgtcttagacgttggcggagcagtgactgcagtgtcggtgtgtccagtgctgcatcccagccagcggtacgtggtggctgttggccttgagtgcggtaaaatttgcctctatacctggaagaagaccgaccaggtcccggagatcaatgactggacccattgcgttgaaaccagtcagagccagagccacaccctagccattcgaaagctgtgttggaaaaattgttcgggcaaaacagagcagaaagaggctgaaggggccgagtggctacatttcgcgagctgcggagaagatcacactgtgaagatacacagagtcaacaagtgcgccctgtag

SEQ ID NO: 85261 - DNA, 2676 bp, Artificial Sequence
  derived and/or modified sequence
atggtggcccctgtgctggagaccagccacgtgttctgctgccccaacagagtgcggggcgtgctgaactggagcagcggcccccggggcctgctggccttcggcaccagctgcagcgtggtgctgtatgaccccctgaagagggtggtggtgaccaacctgaatggccacacagcccgggtgaactgcatccagtggatctgcaagcaggacggcagccccagcacagagctggtgtctgggggcagtgacaaccaggtgatccactgggagattgaggacaaccagctgctgaaggctgtgcacctgcagggccacgagggccctgtgtatgctgtgcatgctgtgtaccagaggaggaccagtgaccctgccctgtgcaccctcatcgtgtctgctgctgctgacagcgctgtgcggctgtggagcaagaagggccctgaggtgatgtgcctgcagaccctgaactttggaaatggatttgccctggccctgtgcctgtccttcctgcccaacacagatgtgacctggaagacaggccaggtggagcggggccgggcctggaagcccccagccagcctggccctgtgcagccgcagctgtgacagcatggtgtcctgctacgccagcatcctgtgcaaggccctgtggaaggagaagctgcacaccttctggcaccacaaccgcatctccttcctgcccagcgccttccggcccatccccatcctggcctgtggaaatgatgactgccgcatccacatctttgcccagcagaatgaccagttccagaaggtgctgagcctgtgtggccacgaggactggatccggggcgtggagtgggccgccttcggccgggacctcttcctggccagctgcagccaggactgcctgatccgcatctggaagctgtacatcaagagcaccagcctggagacccaggatgatgacaacatccggctgaaggagaacaccttcaccattgaaaatgaatctgtgaagatcgcctttgctgtgaccctggagaccgtgctggccggccacgagaactgggtgaatgctgtgcactggcagcccgtcttctacaaggatggagtgctgcagcagcctgtgcggctgctgagcgcctccatggacaagaccatgatcctgtgggccccagatgaggagagcggcgtgtggctggagcaggtgcgggtgggggaggtgggcggcaacaccctgggcttctatgactgccagttcaatgaagatggctccatgatcatcgcccacgccttccatggagccctgcacctgtggaagcagaacacagtgaacccccgggagtggaccccagaaattgtcatcagcggccactttgatggagtgcaggacctggtgtgggaccctgagggggagttcatcatcaccgtgggcacagaccagaccacccggctgtttgccccctggaagaggaaggaccagagccaggtgacctggcatgagatcgcccggccccagatccacggctatgacctgaagtgcctggccatgatcaaccgcttccagtttgtgtctggagcagatgagaaggtgctgcgggtcttcagcgcccccaggaactttgtggagaacttctgtgccatcaccggccagagcctgaaccacgtgctgtgcaaccaggacagcgacctgcctgagggcgccaccgtgcctgccctgggcctgagcaacaaggctgtgttccagggcgacatcgccagccagcccagtgatgaggaggagctgctgaccagcactggatttgagtaccagcaggtggccttccagcccagcatcctgacagagcccccaacagaggaccacctgctgcagaacaccctgtggccagaggtgcagaagctgtatggccacggctatgagatcttctgtgtgacctgcaacagcagcaagaccctgctggccagcgcctgcaaggccgccaagaaggagcacgccgccatcatcctgtggaacaccacctcctggaagcaggtgcagaacctggtgttccacagcctgactgtgacccagatggccttcagccccaatgagaagttcctgctggccgtgtcccgggacaggacctggagcctgtggaagaagcaggacaccatcagccctgagtttgagcccgtcttcagcctgtttgccttcaccaacaagatcacctctgtgcacagccgcatcatctggagctgtgactggagcccagacagcaagtacttcttcaccggcagccgggacaagaaggtggtggtgtggggagaatgtgacagcacagatgactgcatcgagcacaacatcggcccctgcagctctgtgctggatgtgggcggcgctgtgacagctgtgtctgtgtgccctgtgctgcaccccagccagagatatgtggtggccgtgggcctggagtgtgggaagatctgcctgtacacctggaagaagacagaccaggtgcctgagatcaatgactggacccactgtgtggagaccagccagagccagagccacaccctggccatcaggaagctgtgctggaagaactgcagcggcaagacagagcagaaggaggccgagggcgctgagtggctgcactttgccagctgtggggaggaccacacagtgaagatccaccgggtgaacaagtgtgccctgtag

SEQ ID NO: 85262 - DNA, 2676 bp, Artificial Sequence
  derived and/or modified sequence
atggtggcccccgtgctggagaccagccacgtgttctgctgccccaaccgcgtcagaggcgtgctgaattggtcttccgggcctcgcggtctgcttgccttcggaaccagttgcagcgtggtgctttacgacccactgaagcgcgtggtggttactaatctcaacgggcatacagcgcgcgtgaactgtatccaatggatttgtaaacaggacggctctccatctaccgagctggtgagtgggggttccgacaatcaggtcatccactgggagatcgaggacaaccagttgctgaaggcagtgcacctgcaaggacatgaagggcccgtgtacgccgtgcacgccgtgtatcagcggcgcacttccgatcccgctttgtgtacgctcatcgttagcgctgccgctgattcagcagtccgcctttggagtaagaaagggcccgaggtgatgtgccttcaaacgctcaattttgggaacggttttgcacttgccctgtgcctgtccttcctccccaatactgacgtgacctggaaaacagggcaggttgaacgggggcgggcctggaaacccccggcctctctcgccttgtgtagccggtcctgcgattccatggtgtcttgttacgcttcaattctgtgcaaggcactgtggaaggagaaactacataccttttggcaccacaatagaatttccttcttgccgtcggcatttagacctatccctatcttagcctgcggcaacgatgattgcaggattcatatcttcgcccagcaaaatgaccagtttcaaaaggtcctgagcttgtgtggacatgaggactggattagaggagttgagtgggcagcctttggcagggacttgttcctagccagctgttcccaggactgcctgatcagaatttggaaactgtacatcaaatccacttctcttgagacacaagacgacgataacataagactgaaagaaaatacgttcaccattgaaaatgagtctgtgaagatcgcatttgcagtgactctcgagacagtattggcaggacacgaaaactgggtgaacgctgttcattggcagcccgttttctacaaggacggcgtgctgcaacaaccagtgagactcctatcagcttccatggacaagactatgatcttatgggcgccggacgaagaatccggcgtgtggctcgagcaggtgcgcgttggagaggtaggcggcaacaccctcggtttttacgactgtcagtttaacgaggacggcagtatgattatagcgcacgctttccacggagccctgcacctgtggaaacagaacacagtgaatcctcgcgagtggacccctgagatagtaatatcagggcatttcgacggtgtacaggacctcgtgtgggacccagagggagagtttattatcacagtgggaacggaccagaccacgaggctctttgcgccgtggaagaggaaggaccaaagccaggttacatggcatgagatcgccagaccccaaattcatggatacgatctgaaatgtttggccatgatcaaccgtttccagtttgtgtccggagcagatgaaaaggtcctgcgcgtcttctcagctccgcgaaatttcgtggagaatttttgcgcaataacaggtcagtctctcaaccatgtcctgtgcaaccaggattccgacctgcctgagggcgcgacagtgccagctctggggctttcgaacaaagccgtattccagggcgacatcgcctctcagccatctgacgaagaagagctcttgacaagtaccgggtttgagtaccagcaggtggcgtttcagccgtccatcttgacagaaccgcctacagaagaccacctgcttcagaacactttatggcctgaggtgcagaaactctatggccatggatatgagattttttgtgtgacttgcaatagttcgaaaaccctcttggccagcgcgtgcaaagccgccaagaaggaacacgctgcgattatcttgtggaacacgacctcctggaagcaggtgcagaatttggtatttcactccctcacagtgacccagatggcctttagccccaacgaaaaattcctgcttgccgtgtcccgggaccggacctggagtctttggaaaaaacaggatacaatttcacctgaattcgaacccgtcttttctctttttgcttttacgaacaagataacctcggtacactccagaatcatctggagctgcgattggtcccctgacagtaaatatttttttaccggtagtcgcgataagaaggtggtcgtgtggggcgagtgtgattccactgacgactgtattgaacataacattggaccttgctcctcagtcctggatgtgggtggggcagtcactgccgtgtctgtctgtcccgttcttcaccctagccagcgatatgtcgtggctgtcggcttggaatgtgggaaaatttgtttgtacacctggaaaaagacggatcaagtgcctgaaattaacgactggacacactgcgtcgaaacttctcaatcccaaagccacactcttgccatccgaaaactctgttggaagaactgttccgggaaaaccgagcagaaagaggccgagggcgcggaatggctgcacttcgcgtcctgcggtgaggatcacactgttaagatccaccgggtcaacaagtgcgccttgtag

SEQ ID NO: 85263 - DNA, 2676 bp, Artificial Sequence
  derived and/or modified sequence
atggtagcaccagtgctggaaacttcccacgttttttgttgccccaatcgtgttagaggggttttaaactggtcctctggcccacggggtctgctggctttcggcaccagctgctctgtggtgctgtacgatcccctgaagcgcgtggtagtcactaacctgaatgggcacaccgcccgtgtaaactgtatccagtggatttgcaagcaagatgggtctccgtcaacagagttggtgagcggaggctcagataaccaggtcatccactgggaaatcgaggataatcagctcctgaaggccgtacacctccaagggcacgagggcccagtctatgctgtgcacgctgtgtaccagagacgaacttctgatcccgctttatgcaccctgatcgtgtctgccgctgccgattctgcagtacgtctgtggagcaaaaagggccctgaggtaatgtgtcttcagactcttaatttcgggaacggattcgcactggcactttgcctcagttttttgcctaacactgacgtaacctggaaaaccggacaggtggagcgagggagagcttggaagcctccggcttctcttgccctgtgttcgcgcagttgcgattctatggtgtcttgctatgcaagcattctgtgtaaggcactgtggaaggagaaactgcataccttctggcatcataacagaatcagcttcctaccgagtgcatttcgaccgattcccattttagcttgtggaaatgacgattgtcgcatacacattttcgcacagcaaaatgatcagttccaaaaagtgctgagtctctgcgggcatgaagattggatcagaggcgtggagtgggccgcattcggacgtgatctgttcctcgcgtcgtgctcccaggattgcctaatccgaatttggaaactgtatatcaagtcaactagcctggagacccaagacgatgacaacattcgcctgaaggaaaacacctttaccatagagaacgagtctgtcaagatcgcgttcgcagtgacacttgagactgtccttgccggtcacgaaaattgggtcaacgcggtgcattggcaaccggtcttttacaaggatggagtgctgcaacagcctgtgaggcttctcagcgcctccatggacaagactatgatcctgtgggccccagacgaggaatcaggggtttggttggaacaggtgcgtgtgggggaggtgggtggtaatactctcggtttctatgactgtcagttcaacgaagatggcagtatgattatcgcccacgctttccacggggcactgcatctatggaagcagaatacagttaatccccgtgagtggacccccgaaatcgtgatatcaggccatttcgacggtgtacaagatcttgtctgggatccagagggagagtttattatcacagtaggaactgaccagactactcggttgttcgcaccatggaaacgtaaggaccagagccaggttacatggcatgagattgccagaccacagatccacggctatgacctgaagtgccttgccatgatcaataggttccaatttgtttccggggcagacgagaaggtgctgagagtatttagcgccccaagaaatttcgtagaaaacttttgtgcgattaccgggcagagtctgaatcatgtgctgtgcaaccaggattctgacctccccgagggcgcaactgtgcctgcgctgggactaagcaacaaggcagtgttccagggagatatcgcttcgcagccatcagacgaggaggagctgttaacatcaactggctttgagtatcagcaggtggcgttccagccatccatccttactgaaccaccaacagaggatcaccttctgcagaacacgctctggcccgaagtccagaagttgtatggccacggctacgagattttctgcgtgacctgtaatagcagcaaaactctgctcgcatccgcctgcaaggcagcgaagaaggagcatgctgccatcattctatggaacacaactagttggaagcaggttcagaatctggtgtttcactccttaacagttacccaaatggctttcagccctaacgaaaagttcctgctggccgtgtccagagataggacatggtcactgtggaagaaacaggataccatctccccagaatttgagccggtcttctcattgtttgctttcacaaataaaatcacttctgtacactcccgaatcatttggagttgtgattggtcccccgatagtaagtacttcttcaccggcagtagagacaaaaaggtagtagtgtggggagagtgcgactctacagacgactgtatcgagcacaatattggcccttgctctagtgttttagatgttgggggtgcagtaacggccgtgtctgtatgccctgtactccaccctagccagaggtacgtggtcgcagtaggcctcgagtgcgggaagatatgcctgtatacttggaagaagactgatcaggttcctgagatcaatgactggacccattgtgtagagacaagtcaatcacagtcccataccctggccattcgcaagctgtgctggaagaattgttccgggaagactgagcagaaggaggccgagggggcagagtggcttcacttcgcatcctgcggtgaggaccacactgttaaaattcaccgcgtgaacaagtgcgcactgtag

SEQ ID NO: 85264 - DNA, 2722 bp, Artificial Sequence
  derived and/or modified sequence
cgcgtctcttgtttgtgcggctgaccagttggcgacatggtggcacccgtgctggagacttctcacgtgttttgctgcccaaaccgggtgcggggagtcctgaactggagctctgggcccagaggacttctggcctttggcacgtcctgctccgtggtgctctatgaccccctgaaaagggttgttgttaccaacttgaatggtcacaccgcccgagtcaattgcatacagtggatttgtaaacaggatggctccccttctactgaattagtttctggaggatctgataatcaagtgattcactgggaaatagaggataatcagcttttaaaagcagtgcatcttcaaggccatgaaggacctgtttatgcggtgcatgctgtttaccagaggaggacatcagatcctgcattatgtacactgatcgtttctgcagctgcagattctgctgttcgactctggtctaaaaagggtccagaagtaatgtgccttcagactttaaactttggaaatggatttgctttggctctctgcttatcttttttgccaaatactgatgttacctggaagactggccaggtggaacgaggcagggcctggaagccaccagcctctctcgccctctgtagcaggagctgcgactctatggtttcatgttacgcttccattctgtgcaaggctctgtggaaggagaagctgcacacattctggcatcataacagaatttcatttcttccatctgcattcaggccaataccaatattagcatgtggcaatgatgattgcagaattcacatatttgctcaacaaaatgatcagtttcagaaagtgctttctctctgtggacatgaggattggattagaggagtggaatgggcagcctttggtagagatcttttcctagcaagctgttcacaagattgcctgataagaatatggaagctgtatataaagtcaacatctttagaaactcaggatgacgataacataagactgaaagaaaatacttttaccatagaaaatgaaagtgttaaaatagcatttgctgttactctggagacagtgctagccggtcatgaaaactgggtaaatgcagttcactggcaacctgtgttttacaaagatggtgtcctacagcagccagtgagattattatctgcttccatggataaaaccatgattctctgggctccagatgaagagtcaggagtttggctagaacaggttcgagtaggtgaagtaggtgggaatactttgggattttatgattgccagttcaatgaagatggctccatgatcattgctcatgctttccacggagcgttgcacctttggaaacagaatacagttaacccaagagagtggactccagagattgtcatttcaggacactttgatggtgtccaagacctagtctgggatccagaaggagaatttattatcactgttggtactgatcagacaactagactttttgctccatggaagagaaaagaccaatcacaggtgacttggcatgaaattgcaaggcctcagatacatgggtatgacctgaaatgtttggcaatgattaatcggtttcagtttgtatctggagcagatgaaaaagttcttcgggttttttctgcacctcggaattttgtggaaaatttttgtgccattacaggacaatcactgaatcatgtgctctgtaatcaagatagtgatcttccagaaggagccactgtccctgcattgggattatcaaataaagctgtctttcagggagatatagcttctcagccttctgatgaagaggagctgttaactagtactggttttgagtatcagcaggtggcctttcagccctccatacttactgagcctcccactgaggatcatcttctgcagaatactttgtggcctgaagttcaaaaactatatgggcacggttatgaaatattttgtgttacttgtaacagttcaaagactctgcttgcctcagcttgtaaggcagctaagaaagagcatgcagctatcattctttggaacactacatcttggaaacaggtgcagaatttagttttccacagtttgacagtcacgcagatggccttctcacctaatgagaagttcttactagctgtttccagagatcgaacctggtcattgtggaaaaagcaggatacaatctcacctgagttcgagccagtttttagtctttttgccttcaccaacaaaattacttctgtgcacagtagaattatttggtcttgtgattggagtcctgacagcaagtatttcttcactgggagtcgagacaaaaaggtggttgtctggggtgagtgcgactccactgatgactgtattgagcacaacattggcccctgctcctcagtcctggacgtgggtggggctgtgacagctgtcagcgtctgcccagtgctccacccttctcaacgatacgtggttgcagtaggattggagtgtggaaagatttgcttatatacctggaaaaagactgatcaagttccagaaataaatgactggacccactgtgtagaaacaagtcaaagccaaagtcatacactggctatcagaaaattatgctggaagaattgcagtggaaaaactgaacagaaggaagcagaaggtgctgagtggttacactttgcaagctgtggtgaagatcacactgtgaagatacacagagtcaataaatgtgcactgtaatggacttaat

SEQ ID NO: 85265 - protein, 821 aa, Artificial Sequence
  derived and/or modified sequence
MVAPVLETSHVFCCPNRVRGVLNWSSGPRGLLAFGTSCSVVLYDPLKRVVVTNLNGHTARVNCIQWICKQDGSPSTELVSGGSDNQVIHWEIEDNQLLKAVHLQGHEGPVYAVHAVYQRRTSDPALCTLIVSAAADSAVRLWSKKGPEVTWKTGQVERGRAWKPPASLALCSRSCDSMVSCYASILCKALWKEKLHTFWHHNRISFLPSAFRPIPILACGNDDCRIHIFAQQNDQFQKVLSLCGHEDWIRGVEWAAFGRDLFLASCSQDCLIRIWKLYIKSTSLETQDDDNIRLKENTFTIENESVKIAFAVTLETVLAGHENWVNAVHWQPVFYKDGVLQQPVRLLSASMDKTMILWAPDEESGVWLEQREWTPEIVISGHFDGVQDLVWDPEGEFIITVGTDQTTRLFAPWKRKDQSQVTWHEIARPQIHGYDLKCLAMINRFQFVSGADEKVLRVFSAPRNFVENFCAITGQSLNHVLCNQDSDLPEGATVPALGLSNKAVFQGDIASQPSDEEELLTSTGFEYQQVAFQPSILTEPPTEDHLLQNTLWPEVQKLYGHGYEIFCVTCNSSKTLLASACKAAKKEHAAIILWNTTSWKQVQNLVFHSLTVTQMAFSPNEKFLLAVSRDRTWSLWKKQDTISPEFEPVFSLFAFTNKITSVHSRIIWSCDWSPDSKYFFTGSRDKKVVVWGECDSTDDCIEHNIGPCSSVLDVGGAVTAVSVCPVLHPSQRYVVAVGLECGKICLYTWKKTDQVPEINDWTHCVETSQSQSHTLAIRKLCWKNCSGKTEQKEAEGAEWLHFASCGEDHTVKIHRVNKCAL

SEQ ID NO: 85266 - DNA, 2466 bp, Artificial Sequence
  derived and/or modified sequence
atggtggcccccgtgctggagaccagccacgtgttctgctgccccaacagagtgagaggcgtgctgaactggagcagcggccccagaggcctgctggccttcggcaccagctgcagcgtggtgctgtacgaccccctgaagagagtggtggtgaccaacctgaacggccacaccgccagagtgaactgcatccagtggatctgcaagcaggacggcagccccagcaccgagctggtgagcggcggcagcgacaaccaggtgatccactgggagatcgaggacaaccagctgctgaaggccgtgcacctgcagggccacgagggccccgtgtacgccgtgcacgccgtgtaccagagaagaaccagcgaccccgccctgtgcaccctgatcgtgagcgccgccgccgacagcgccgtgagactgtggagcaagaagggccccgaggtgacctggaagaccggccaggtggagagaggcagagcctggaagccccccgccagcctggccctgtgcagcagaagctgcgacagcatggtgagctgctacgccagcatcctgtgcaaggccctgtggaaggagaagctgcacaccttctggcaccacaacagaatcagcttcctgcccagcgccttcagacccatccccatcctggcctgcggcaacgacgactgcagaatccacatcttcgcccagcagaacgaccagttccagaaggtgctgagcctgtgcggccacgaggactggatcagaggcgtggagtgggccgccttcggcagagacctgttcctggccagctgcagccaggactgcctgatcagaatctggaagctgtacatcaagagcaccagcctggagacccaggacgacgacaacatcagactgaaggagaacaccttcaccatcgagaacgagagcgtgaagatcgccttcgccgtgaccctggagaccgtgctggccggccacgagaactgggtgaacgccgtgcactggcagcccgtgttctacaaggacggcgtgctgcagcagcccgtgagactgctgagcgccagcatggacaagaccatgatcctgtgggcccccgacgaggagagcggcgtgtggctggagcagagagagtggacccccgagatcgtgatcagcggccacttcgacggcgtgcaggacctggtgtgggaccccgagggcgagttcatcatcaccgtgggcaccgaccagaccaccagactgttcgccccctggaagagaaaggaccagagccaggtgacctggcacgagatcgccagaccccagatccacggctacgacctgaagtgcctggccatgatcaacagattccagttcgtgagcggcgccgacgagaaggtgctgagagtgttcagcgcccccagaaacttcgtggagaacttctgcgccatcaccggccagagcctgaaccacgtgctgtgcaaccaggacagcgacctgcccgagggcgccaccgtgcccgccctgggcctgagcaacaaggccgtgttccagggcgacatcgccagccagcccagcgacgaggaggagctgctgaccagcaccggcttcgagtaccagcaggtggccttccagcccagcatcctgaccgagccccccaccgaggaccacctgctgcagaacaccctgtggcccgaggtgcagaagctgtacggccacggctacgagatcttctgcgtgacctgcaacagcagcaagaccctgctggccagcgcctgcaaggccgccaagaaggagcacgccgccatcatcctgtggaacaccaccagctggaagcaggtgcagaacctggtgttccacagcctgaccgtgacccagatggccttcagccccaacgagaagttcctgctggccgtgagcagagacagaacctggagcctgtggaagaagcaggacaccatcagccccgagttcgagcccgtgttcagcctgttcgccttcaccaacaagatcaccagcgtgcacagcagaatcatctggagctgcgactggagccccgacagcaagtacttcttcaccggcagcagagacaagaaggtggtggtgtggggcgagtgcgacagcaccgacgactgcatcgagcacaacatcggcccctgcagcagcgtgctggacgtgggcggcgccgtgaccgccgtgagcgtgtgccccgtgctgcaccccagccagagatacgtggtggccgtgggcctggagtgcggcaagatctgcctgtacacctggaagaagaccgaccaggtgcccgagatcaacgactggacccactgcgtggagaccagccagagccagagccacaccctggccatcagaaagctgtgctggaagaactgcagcggcaagaccgagcagaaggaggccgagggcgccgagtggctgcacttcgccagctgcggcgaggaccacaccgtgaagatccacagagtgaacaagtgcgccctgtag

SEQ ID NO: 85267 - DNA, 2487 bp, Artificial Sequence
  derived and/or modified sequence
gaccagttggcgacatggtggcacccgtgctggagacttctcacgtgttttgctgcccaaaccgggtgcggggagtcctgaactggagctctgggcccagaggacttctggcctttggcacgtcctgctccgtggtgctctatgaccccctgaaaagggttgttgttaccaacttgaatggtcacaccgcccgagtcaattgcatacagtggatttgtaaacaggatggctccccttctactgaattagtttctggaggatctgataatcaagtgattcactgggaaatagaggataatcagcttttaaaagcagtgcatcttcaaggccatgaaggacctgtttatgcggtgcatgctgtttaccagaggaggacatcagatcctgcattatgtacactgatcgtttctgcagctgcagattctgctgttcgactctggtctaaaaagggtccagaagttacctggaagactggccaggtggaacgaggcagggcctggaagccaccagcctctctcgccctctgtagcaggagctgcgactctatggtttcatgttacgcttccattctgtgcaaggctctgtggaaggagaagctgcacacattctggcatcataacagaatttcatttcttccatctgcattcaggccaataccaatattagcatgtggcaatgatgattgcagaattcacatatttgctcaacaaaatgatcagtttcagaaagtgctttctctctgtggacatgaggattggattagaggagtggaatgggcagcctttggtagagatcttttcctagcaagctgttcacaagattgcctgataagaatatggaagctgtatataaagtcaacatctttagaaactcaggatgacgataacataagactgaaagaaaatacttttaccatagaaaatgaaagtgttaaaatagcatttgctgttactctggagacagtgctagccggtcatgaaaactgggtaaatgcagttcactggcaacctgtgttttacaaagatggtgtcctacagcagccagtgagattattatctgcttccatggataaaaccatgattctctgggctccagatgaagagtcaggagtttggctagaacagagagagtggactccagagattgtcatttcaggacactttgatggtgtccaagacctagtctgggatccagaaggagaatttattatcactgttggtactgatcagacaactagactttttgctccatggaagagaaaagaccaatcacaggtgacttggcatgaaattgcaaggcctcagatacatgggtatgacctgaaatgtttggcaatgattaatcggtttcagtttgtatctggagcagatgaaaaagttcttcgggttttttctgcacctcggaattttgtggaaaatttttgtgccattacaggacaatcactgaatcatgtgctctgtaatcaagatagtgatcttccagaaggagccactgtccctgcattgggattatcaaataaagctgtctttcagggagatatagcttctcagccttctgatgaagaggagctgttaactagtactggttttgagtatcagcaggtggcctttcagccctccatacttactgagcctcccactgaggatcatcttctgcagaatactttgtggcctgaagttcaaaaactatatgggcacggttatgaaatattttgtgttacttgtaacagttcaaagactctgcttgcctcagcttgtaaggcagctaagaaagagcatgcagctatcattctttggaacactacatcttggaaacaggtgcagaatttagttttccacagtttgacagtcacgcagatggccttctcacctaatgagaagttcttactagctgtttccagagatcgaacctggtcattgtggaaaaagcaggatacaatctcacctgagttcgagccagtttttagtctttttgccttcaccaacaaaattacttctgtgcacagtagaattatttggtcttgtgattggagtcctgacagcaagtatttcttcactgggagtcgagacaaaaaggtggttgtctggggtgagtgcgactccactgatgactgtattgagcacaacattggcccctgctcctcagtcctggacgtgggtggggctgtgacagctgtcagcgtctgcccagtgctccacccttctcaacgatacgtggttgcagtaggattggagtgtggaaagatttgcttatatacctggaaaaagactgatcaagttccagaaataaatgactggacccactgtgtagaaacaagtcaaagccaaagtcatacactggctatcagaaaattatgctggaagaattgcagtggaaaaactgaacagaaggaagcagaaggtgctgagtggttacactttgcaagctgtggtgaagatcacactgtgaagatacacagagtcaataaatgtgcactgtaatggactt

SEQ ID NO: 85268 - DNA, 2466 bp, Artificial Sequence
  derived and/or modified sequence
atggttgccccggtgttagagacaagtcatgtcttttgttgcccaaatagagtgcgaggagtcctcaattggtctagcggcccccgcgggctgctggcattcggcacctcttgcagtgtggtgctttacgatcccctcaaaagagtggtcgttactaacctgaatggccacaccgcacgcgtgaactgtattcagtggatttgtaaacaagacgggtctccttccaccgagttggtgtctggcgggtccgacaaccaagttatacattgggaaattgaggataaccagctgttaaaggccgtgcacctacagggacacgagggcccagtttacgctgtgcacgcagtgtatcaacgcagaacctccgatccggcgctgtgtacccttattgtgtcagccgcggcagatagtgctgtcaggttatggtccaagaaagggccagaggtgacctggaagactggtcaggtggaacgcggcagagcatggaaaccgccagcaagtctagctctatgttccagatcatgtgatagtatggtctcatgttacgcgtccatattgtgcaaggccctttggaaggaaaaactgcacactttctggcaccacaaccgcatctccttccttccttctgcatttcgacctataccaattttagcgtgtggtaacgacgactgccgtattcatattttcgctcagcagaatgaccagttccagaaagtcctgagcttgtgtggccacgaggattggatacggggtgttgaatgggcggcattcggcagagatctgtttctggcttcatgtagccaggactgcctgattcggatatggaaactttacattaagagcacctcccttgaaactcaagatgatgacaatatccgcctgaaggaaaacacttttaccatcgaaaatgagtccgtcaagatcgcattcgctgtcacactcgagaccgtgttagcagggcatgaaaactgggtgaacgccgtgcactggcaacccgtgttctataaggatggtgtcttacagcagccagtgaggctgctatccgcctctatggacaagaccatgattctctgggcacctgacgaggaatcaggcgtgtggctggaacagcgcgaatggacccccgagatcgtcattagcggacattttgacggagtgcaagacctcgtctgggaccccgaaggggaattcatcattacagtgggcacggaccaaaccacccgtctgttcgcaccatggaaacggaaggaccagagccaggtcacgtggcacgagattgcgcgaccgcagatccacggatacgacctgaagtgtttggccatgattaatagattccagtttgtgtccggtgccgacgagaaagtcctgcgggtttttagtgccccaagaaatttcgtcgagaatttctgcgccatcactggacagagcctaaatcacgtgctgtgtaatcaggatagtgatctcccagaaggggcaactgtgcccgctctgggcctgagtaataaggctgtcttccagggcgatattgcaagccaaccatccgatgaagaagagttactgacctctactgggttcgaatatcaacaggttgctttccagcctagtatcctgaccgagccacctacagaggaccacctcctgcagaatactctgtggccagaagtgcagaaactctacggtcacggctacgaaatattctgcgtaacctgcaatagttctaagactctattagcttccgcctgcaaggcagctaagaaggagcatgccgcaatcatcctgtggaatacaacatcctggaagcaggtgcaaaatctggtgtttcatagtctgaccgtcactcagatggccttttctccaaatgaaaagttcctgctggccgtgtcccgcgatcgcacatggagcttgtggaagaagcaggacacaatttcacccgagttcgagccagtcttctccctgtttgcctttacaaataagattactagcgtgcattctcggatcatctggagttgcgattggtccccagactctaagtacttctttacgggcagcagggataaaaaggtggtcgtgtggggagaatgtgattcaaccgacgattgtatcgaacataacatcggcccctgctcctccgtgctggacgtcgggggtgccgtgaccgctgtatccgtgtgtccagttctgcacccatcacagcggtatgtggttgccgtcggcctggaatgcggcaagatatgtctgtacacatggaaaaagaccgaccaggtcccagagataaacgactggactcactgcgtggaaacgagccagtcgcagtcacataccctcgccatcaggaagctatgttggaagaactgtagtgggaaaaccgagcaaaaggaagccgagggagccgagtggcttcacttcgcctcgtgcggtgaagaccacacagtgaaaattcaccgcgtgaacaagtgcgccctctag

SEQ ID NO: 85269 - DNA, 2466 bp, Artificial Sequence
  derived and/or modified sequence
atggtggcccctgtgctggagaccagccacgtgttctgctgccccaacagagtgcggggcgtgctgaactggagcagcggcccccggggcctgctggccttcggcaccagctgcagcgtggtgctgtatgaccccctgaagagggtggtggtgaccaacctgaatggccacacagcccgggtgaactgcatccagtggatctgcaagcaggacggcagccccagcacagagctggtgtctgggggcagtgacaaccaggtgatccactgggagattgaggacaaccagctgctgaaggctgtgcacctgcagggccacgagggccctgtgtatgctgtgcatgctgtgtaccagaggaggaccagtgaccctgccctgtgcaccctcatcgtgtctgctgctgctgacagcgctgtgcggctgtggagcaagaagggccctgaggtgacctggaagacaggccaggtggagcggggccgggcctggaagcccccagccagcctggccctgtgcagccgcagctgtgacagcatggtgtcctgctacgccagcatcctgtgcaaggccctgtggaaggagaagctgcacaccttctggcaccacaaccgcatctccttcctgcccagcgccttccggcccatccccatcctggcctgtggaaatgatgactgccgcatccacatctttgcccagcagaatgaccagttccagaaggtgctgagcctgtgtggccacgaggactggatccggggcgtggagtgggccgccttcggccgggacctcttcctggccagctgcagccaggactgcctgatccgcatctggaagctgtacatcaagagcaccagcctggagacccaggatgatgacaacatccggctgaaggagaacaccttcaccattgaaaatgaatctgtgaagatcgcctttgctgtgaccctggagaccgtgctggccggccacgagaactgggtgaatgctgtgcactggcagcccgtcttctacaaggatggagtgctgcagcagcctgtgcggctgctgagcgcctccatggacaagaccatgatcctgtgggccccagatgaggagagcggcgtgtggctggagcagcgggagtggaccccagaaattgtcatcagcggccactttgatggagtgcaggacctggtgtgggaccctgagggggagttcatcatcaccgtgggcacagaccagaccacccggctgtttgccccctggaagaggaaggaccagagccaggtgacctggcatgagatcgcccggccccagatccacggctatgacctgaagtgcctggccatgatcaaccgcttccagtttgtgtctggagcagatgagaaggtgctgcgggtcttcagcgcccccaggaactttgtggagaacttctgtgccatcaccggccagagcctgaaccacgtgctgtgcaaccaggacagcgacctgcctgagggcgccaccgtgcctgccctgggcctgagcaacaaggctgtgttccagggcgacatcgccagccagcccagtgatgaggaggagctgctgaccagcactggatttgagtaccagcaggtggccttccagcccagcatcctgacagagcccccaacagaggaccacctgctgcagaacaccctgtggccagaggtgcagaagctgtatggccacggctatgagatcttctgtgtgacctgcaacagcagcaagaccctgctggccagcgcctgcaaggccgccaagaaggagcacgccgccatcatcctgtggaacaccacctcctggaagcaggtgcagaacctggtgttccacagcctgactgtgacccagatggccttcagccccaatgagaagttcctgctggccgtgtcccgggacaggacctggagcctgtggaagaagcaggacaccatcagccctgagtttgagcccgtcttcagcctgtttgccttcaccaacaagatcacctctgtgcacagccgcatcatctggagctgtgactggagcccagacagcaagtacttcttcaccggcagccgggacaagaaggtggtggtgtggggagaatgtgacagcacagatgactgcatcgagcacaacatcggcccctgcagctctgtgctggatgtgggcggcgctgtgacagctgtgtctgtgtgccctgtgctgcaccccagccagagatatgtggtggccgtgggcctggagtgtgggaagatctgcctgtacacctggaagaagacagaccaggtgcctgagatcaatgactggacccactgtgtggagaccagccagagccagagccacaccctggccatcaggaagctgtgctggaagaactgcagcggcaagacagagcagaaggaggccgagggcgctgagtggctgcactttgccagctgtggggaggaccacacagtgaagatccaccgggtgaacaagtgtgccctgtag

SEQ ID NO: 85270 - DNA, 2466 bp, Artificial Sequence
  derived and/or modified sequence
atggtggcccccgtgctggagaccagccacgtgttctgctgccccaacagagtacgcggagtcctaaattggagcagtggaccaagagggcttctggcatttgggaccagctgttcagtggtgctgtacgacccattgaaacgcgttgttgtgactaacctaaacggccataccgctcgggtgaattgcattcagtggatttgcaaacaggatgggagccctagtacagaacttgtatccgggggctctgataaccaggtgatccactgggaaatagaggataatcagcttctgaaggccgtacatttacagggacatgaaggccccgtttatgccgtgcacgcggtttaccagcggagaacctccgacccagctctgtgcacactcatcgtgagtgccgctgctgactccgccgtgaggctatggtcaaagaagggtcctgaagtgacctggaaaacaggccaggtggaaagaggcagagcttggaaacctccggcttccttggcgctatgttctcggtcctgtgatagtatggtctcatgttatgcttccattctgtgtaaggccctctggaaggagaagctccacaccttttggcaccacaatcgaatctcctttcttccatccgcttttcgacccatccctattctggcctgcgggaatgacgactgccgcattcacatattcgcacaacaaaacgatcagtttcagaaagttctgagcctctgcgggcacgaagattggatccgcggggtggagtgggccgcatttggcagagacctgtttctagcctcgtgctctcaggattgcctgattaggatttggaagctctacattaagtcgacaagtttggaaacacaggatgacgacaatatcaggctcaaagagaatacattcacaatcgagaacgagagtgtgaaaattgccttcgctgtgacgctagaaaccgtgttggccggccacgagaattgggtaaacgcagtgcactggcaacccgtgttctacaaggacggcgtgttgcaacagcccgtccggctgctttccgcttcgatggacaaaaccatgatattatgggctcccgacgaagaatccggcgtgtggctggagcagagagagtggacccctgagatcgtcatctctggacacttcgacggagtgcaagacctcgtatgggatcccgagggcgaattcatcatcactgtaggaaccgatcaaactactaggttgttcgccccatggaaacgcaaggaccaaagccaagtgacgtggcatgaaatcgccaggccccaaatacacgggtacgacctcaagtgcctggccatgatcaaccgattccaatttgtctctggggcagacgagaaggtattacgcgtgttctccgcccccagaaactttgtggagaatttctgcgccatcaccgggcaaagcctgaaccacgtgctttgtaaccaggattccgatctgcccgagggtgcaaccgttcctgcccttggcctctccaacaaagctgtgtttcagggagacatcgcttcgcagccttccgatgaagaggagctcttaacttccacaggctttgaatatcagcaagtggcctttcagccttccatcttgacagaaccacctacagaggaccacctgctgcagaatacactgtggccagaggtccagaagctatatggccatgggtatgagattttttgtgtgacgtgtaacagtagcaagacccttctggccagtgcctgcaaggccgcgaagaaggaacacgccgccatcatcctttggaatacaactagttggaaacaggttcagaatctcgtttttcattcattaactgtcacccaaatggcattctctcctaacgagaaattcctgctcgccgtttccagagatcgaacttggtctctgtggaaaaaacaggataccattagcccagagtttgagcctgtatttagcctcttcgcctttacaaataaaatcacttctgtccactcacggatcatatggagttgcgactggtctcccgacagtaagtatttcttcacaggaagccgcgataaaaaggtggtcgtttggggggaatgcgattctaccgacgattgtattgagcacaacattggaccatgttcaagtgtgctggacgttgggggcgctgtgactgcagtgagcgtttgccctgtgttacatccctcacaaaggtatgtggtggccgtcggtctggaatgtggaaagatctgtctctacacgtggaagaagaccgaccaggtgcctgagatcaacgattggactcactgtgtggagactagtcagagccagtcccacactcttgccataagaaagctgtgttggaagaactgtagtggcaagaccgagcaaaaagaggccgagggcgccgaatggctgcactttgcatcttgtggggaggatcacacggttaagatacaccgggtgaacaaatgcgctctttag

SEQ ID NO: 85271 - DNA, 2466 bp, Artificial Sequence
  derived and/or modified sequence
atggtcgcccctgtccttgagacttcacacgttttttgttgccctaatagagtgcgaggcgttctgaattggtccagcgggcctaggggcttgctggcattcgggacttcatgttccgtagtgctgtatgatcctctgaagcgcgtggtcgtgactaacctgaatggccacactgctagagtgaactgcatccagtggatctgtaagcaggatggcagtcctagcacagaactcgtctcaggtggttctgataaccaggtcattcactgggaaattgaagataaccagcttctgaaggcggtgcacctgcagggccatgagggacccgtgtacgctgtgcatgcggtgtaccaaagacgcacttctgaccccgctctgtgcaccctgattgtgagtgccgcagcagacagcgctgtccgactgtggtccaagaagggacccgaagtcacctggaagacgggccaagtggagcggggacgagcctggaaaccaccagcgtccctcgcattgtgcagccgatcatgcgacagtatggtaagttgctatgcatcaatactttgcaaggcgttgtggaaggagaagctgcatactttctggcaccataaccgaatttctttcctgccatccgcttttcgccctatcccaattctcgcatgcggaaacgatgattgccgtattcacatctttgctcaacagaacgaccagtttcagaaagtgctaagtctatgtggacatgaggattggatccgaggcgtggagtgggctgccttcggacgcgatctgttcctggcttcttgctctcaggattgcctcattaggatttggaaactgtatatcaaaagtacctctctcgaaacgcaagatgatgacaatatccgactgaaagaaaatacttttactattgaaaacgagtccgtgaagatagctttcgccgtgaccttggagaccgtgttagctggccacgaaaactgggttaacgccgttcactggcagcccgtgttctacaaggacggtgttctgcaacaacctgttagactgctcagcgcctcaatggacaaaaccatgatcttatgggccccagacgaggaatccggcgtgtggctggaacagcgggagtggacgccggagattgtcatctcagggcatttcgatggtgtgcaagacctcgtgtgggacccagaaggggagtttataataactgtggggaccgatcaaactaccagactgtttgctccctggaagagaaaggaccagagtcaggtgacttggcacgagatcgccagaccgcaaatccacggctacgacctgaagtgcttggccatgatcaacaggttccaatttgtctctggagccgatgagaaagtgcttcgtgtgttcagcgcaccgcgtaacttcgttgagaatttttgcgccataactgggcaaagtctgaaccacgttctgtgcaaccaagacagcgacctgcctgaaggggctacagtgccggcacttggcctaagcaacaaagccgtgtttcaaggagacattgcctctcaaccctccgatgaggaggagcttttgacatctaccggatttgagtaccagcaggtggctttccagccctctatcctaacagaaccgcctacggaagaccatctattgcagaacacattgtggcccgaagttcagaagctgtacggccacggatatgaaatattctgtgttacctgtaattccagcaagaccctcctggcaagtgcttgcaaggctgcaaagaaagagcacgccgctattatcctgtggaacactacttcgtggaaacaggtgcagaatctggtttttcactcgctgaccgtgactcaaatggccttctctccaaatgagaaattcctccttgctgttagcagagacagaacttggtccctgtggaagaaacaagacacgataagccccgagtttgagcctgtcttttccctgttcgccttcaccaacaagatcacatctgtgcactctcggataatctggagctgcgattggagtccggatagtaaatactttttcacgggttctagggataagaaggtcgtagtctggggggagtgtgatagtacggatgattgtatcgagcacaatatcggcccttgtagcagcgttttggacgtagggggagcagttaccgcggtgagcgtgtgccctgtcctgcacccatcacagcggtatgtggtcgccgtggggctggagtgtggaaagatttgcctctacacatggaaaaagacagaccaggtccccgagataaacgactggacccactgcgtcgaaacatcccagtcgcagtcccatactctggcaattagaaaattatgttggaagaactgttccggcaaaaccgaacaaaaggaagctgagggagccgaatggctgcatttcgcgtcttgcggcgaagaccatacagtgaagattcacagggtgaataaatgtgccctgtag

SEQ ID NO: 85272 - protein, 800 aa, Artificial Sequence
  derived and/or modified sequence
MVAPVLETSHVFCCPNRVRGVLNWSSGPRGLLAFGTSCSVVLYDPLKRVVVTNLNGHTARVNCIQWICKQDGSPSTELVSGGSDNQVIHWEIEDNQLLKAVHLQGHEGPVYAVHAVYQRRTSDPALCTLIVSAAADSAVRLWSKKGPEVPILACGNDDCRIHIFAQQNDQFQKVLSLCGHEDWIRGVEWAAFGRDLFLASCSQDCLIRIWKLYIKSTSLETQDDDNIRLKENTFTIENESVKIAFAVTLETVLAGHENWVNAVHWQPVFYKDGVLQQPVRLLSASMDKTMILWAPDEESGVWLEQVRVGEVGGNTLGFYDCQFNEDGSMIIAHAFHGALHLWKQNTVNPREWTPEIVISGHFDGVQDLVWDPEGEFIITVGTDQTTRLFAPWKRKDQSQVTWHEIARPQIHGYDLKCLAMINRFQFVSGADEKVLRVFSAPRNFVENFCAITGQSLNHVLCNQDSDLPEGATVPALGLSNKAVFQGDIASQPSDEEELLTSTGFEYQQVAFQPSILTEPPTEDHLLQNTLWPEVQKLYGHGYEIFCVTCNSSKTLLASACKAAKKEHAAIILWNTTSWKQVQNLVFHSLTVTQMAFSPNEKFLLAVSRDRTWSLWKKQDTISPEFEPVFSLFAFTNKITSVHSRIIWSCDWSPDSKYFFTGSRDKKVVVWGECDSTDDCIEHNIGPCSSVLDVGGAVTAVSVCPVLHPSQRYVVAVGLECGKICLYTWKKTDQVPEINDWTHCVETSQSQSHTLAIRKLCWKNCSGKTEQKEAEGAEWLHFASCGEDHTVKIHRVNKCAL

SEQ ID NO: 85273 - DNA, 2403 bp, Artificial Sequence
  derived and/or modified sequence
atggtggcccccgtgctggagaccagccacgtgttctgctgccccaacagagtgagaggcgtgctgaactggagcagcggccccagaggcctgctggccttcggcaccagctgcagcgtggtgctgtacgaccccctgaagagagtggtggtgaccaacctgaacggccacaccgccagagtgaactgcatccagtggatctgcaagcaggacggcagccccagcaccgagctggtgagcggcggcagcgacaaccaggtgatccactgggagatcgaggacaaccagctgctgaaggccgtgcacctgcagggccacgagggccccgtgtacgccgtgcacgccgtgtaccagagaagaaccagcgaccccgccctgtgcaccctgatcgtgagcgccgccgccgacagcgccgtgagactgtggagcaagaagggccccgaggtgcccatcctggcctgcggcaacgacgactgcagaatccacatcttcgcccagcagaacgaccagttccagaaggtgctgagcctgtgcggccacgaggactggatcagaggcgtggagtgggccgccttcggcagagacctgttcctggccagctgcagccaggactgcctgatcagaatctggaagctgtacatcaagagcaccagcctggagacccaggacgacgacaacatcagactgaaggagaacaccttcaccatcgagaacgagagcgtgaagatcgccttcgccgtgaccctggagaccgtgctggccggccacgagaactgggtgaacgccgtgcactggcagcccgtgttctacaaggacggcgtgctgcagcagcccgtgagactgctgagcgccagcatggacaagaccatgatcctgtgggcccccgacgaggagagcggcgtgtggctggagcaggtgagagtgggcgaggtgggcggcaacaccctgggcttctacgactgccagttcaacgaggacggcagcatgatcatcgcccacgccttccacggcgccctgcacctgtggaagcagaacaccgtgaaccccagagagtggacccccgagatcgtgatcagcggccacttcgacggcgtgcaggacctggtgtgggaccccgagggcgagttcatcatcaccgtgggcaccgaccagaccaccagactgttcgccccctggaagagaaaggaccagagccaggtgacctggcacgagatcgccagaccccagatccacggctacgacctgaagtgcctggccatgatcaacagattccagttcgtgagcggcgccgacgagaaggtgctgagagtgttcagcgcccccagaaacttcgtggagaacttctgcgccatcaccggccagagcctgaaccacgtgctgtgcaaccaggacagcgacctgcccgagggcgccaccgtgcccgccctgggcctgagcaacaaggccgtgttccagggcgacatcgccagccagcccagcgacgaggaggagctgctgaccagcaccggcttcgagtaccagcaggtggccttccagcccagcatcctgaccgagccccccaccgaggaccacctgctgcagaacaccctgtggcccgaggtgcagaagctgtacggccacggctacgagatcttctgcgtgacctgcaacagcagcaagaccctgctggccagcgcctgcaaggccgccaagaaggagcacgccgccatcatcctgtggaacaccaccagctggaagcaggtgcagaacctggtgttccacagcctgaccgtgacccagatggccttcagccccaacgagaagttcctgctggccgtgagcagagacagaacctggagcctgtggaagaagcaggacaccatcagccccgagttcgagcccgtgttcagcctgttcgccttcaccaacaagatcaccagcgtgcacagcagaatcatctggagctgcgactggagccccgacagcaagtacttcttcaccggcagcagagacaagaaggtggtggtgtggggcgagtgcgacagcaccgacgactgcatcgagcacaacatcggcccctgcagcagcgtgctggacgtgggcggcgccgtgaccgccgtgagcgtgtgccccgtgctgcaccccagccagagatacgtggtggccgtgggcctggagtgcggcaagatctgcctgtacacctggaagaagaccgaccaggtgcccgagatcaacgactggacccactgcgtggagaccagccagagccagagccacaccctggccatcagaaagctgtgctggaagaactgcagcggcaagaccgagcagaaggaggccgagggcgccgagtggctgcacttcgccagctgcggcgaggaccacaccgtgaagatccacagagtgaacaagtgcgccctgtag

SEQ ID NO: 85274 - DNA, 2453 bp, Artificial Sequence
  derived and/or modified sequence
ggaagtgcgcgtctcttgtttgtgcggctgaccagttggcgacatggtggcacccgtgctggagacttctcacgtgttttgctgcccaaaccgggtgcggggagtcctgaactggagctctgggcccagaggacttctggcctttggcacgtcctgctccgtggtgctctatgaccccctgaaaagggttgttgttaccaacttgaatggtcacaccgcccgagtcaattgcatacagtggatttgtaaacaggatggctccccttctactgaattagtttctggaggatctgataatcaagtgattcactgggaaatagaggataatcagcttttaaaagcagtgcatcttcaaggccatgaaggacctgtttatgcggtgcatgctgtttaccagaggaggacatcagatcctgcattatgtacactgatcgtttctgcagctgcagattctgctgttcgactctggtctaaaaagggtccagaagtaccaatattagcatgtggcaatgatgattgcagaattcacatatttgctcaacaaaatgatcagtttcagaaagtgctttctctctgtggacatgaggattggattagaggagtggaatgggcagcctttggtagagatcttttcctagcaagctgttcacaagattgcctgataagaatatggaagctgtatataaagtcaacatctttagaaactcaggatgacgataacataagactgaaagaaaatacttttaccatagaaaatgaaagtgttaaaatagcatttgctgttactctggagacagtgctagccggtcatgaaaactgggtaaatgcagttcactggcaacctgtgttttacaaagatggtgtcctacagcagccagtgagattattatctgcttccatggataaaaccatgattctctgggctccagatgaagagtcaggagtttggctagaacaggttcgagtaggtgaagtaggtgggaatactttgggattttatgattgccagttcaatgaagatggctccatgatcattgctcatgctttccacggagcgttgcacctttggaaacagaatacagttaacccaagagagtggactccagagattgtcatttcaggacactttgatggtgtccaagacctagtctgggatccagaaggagaatttattatcactgttggtactgatcagacaactagactttttgctccatggaagagaaaagaccaatcacaggtgacttggcatgaaattgcaaggcctcagatacatgggtatgacctgaaatgtttggcaatgattaatcggtttcagtttgtatctggagcagatgaaaaagttcttcgggttttttctgcacctcggaattttgtggaaaatttttgtgccattacaggacaatcactgaatcatgtgctctgtaatcaagatagtgatcttccagaaggagccactgtccctgcattgggattatcaaataaagctgtctttcagggagatatagcttctcagccttctgatgaagaggagctgttaactagtactggttttgagtatcagcaggtggcctttcagccctccatacttactgagcctcccactgaggatcatcttctgcagaatactttgtggcctgaagttcaaaaactatatgggcacggttatgaaatattttgtgttacttgtaacagttcaaagactctgcttgcctcagcttgtaaggcagctaagaaagagcatgcagctatcattctttggaacactacatcttggaaacaggtgcagaatttagttttccacagtttgacagtcacgcagatggccttctcacctaatgagaagttcttactagctgtttccagagatcgaacctggtcattgtggaaaaagcaggatacaatctcacctgagttcgagccagtttttagtctttttgccttcaccaacaaaattacttctgtgcacagtagaattatttggtcttgtgattggagtcctgacagcaagtatttcttcactgggagtcgagacaaaaaggtggttgtctggggtgagtgcgactccactgatgactgtattgagcacaacattggcccctgctcctcagtcctggacgtgggtggggctgtgacagctgtcagcgtctgcccagtgctccacccttctcaacgatacgtggttgcagtaggattggagtgtggaaagatttgcttatatacctggaaaaagactgatcaagttccagaaataaatgactggacccactgtgtagaaacaagtcaaagccaaagtcatacactggctatcagaaaattatgctggaagaattgcagtggaaaaactgaacagaaggaagcagaaggtgctgagtggttacactttgcaagctgtggtgaagatcacactgtgaagatacacagagtcaataaatgtgcactgtaatggactt

SEQ ID NO: 85275 - DNA, 2403 bp, Artificial Sequence
  derived and/or modified sequence
atggtagcacctgtgttagagacctctcacgttttctgctgccccaatagagtgcggggggtacttaattggtcctcgggaccccggggactcctcgcctttggaacaagctgctcagtggtcctctacgatccactcaaacgagtggttgttacaaacctcaatgggcatacggcacgcgtcaattgcatccaatggatttgcaagcaggacggtagtccttcgacagagttggtatccggagggtctgataaccaggtgatccactgggaaatcgaggacaaccagcttctcaaagcggtgcacctgcaggggcatgagggccctgtatacgcagtgcacgccgtttaccagcgcaggactagcgatcctgcactttgtaccttaatcgtctctgctgccgcagattccgcggttcgactttggtctaagaaggggcccgaagttccaattctcgcctgtggaaacgacgactgcaggatccacatatttgcccagcagaatgatcagttccagaaagttttgagcctctgcgggcacgaggactggatcaggggcgtagagtgggctgcttttggccgggacctgttcctggcttcatgtagccaggactgcttgatcagaatctggaagctctatatcaaatcaacgtcccttgagacccaggatgatgataatatcagacttaaagagaacaccttcaccattgagaatgagagtgttaagattgcctttgccgttacattggagacagtgctagctgggcacgagaactgggtcaacgcagtgcattggcagcccgttttctacaaggacggcgtgctccagcaacctgtccgactgctgagcgcctcaatggacaagactatgattctgtgggcccccgacgaagaaagcggtgtgtggctggagcaagtgcgagtaggcgaagttggcggtaacacactgggtttctacgactgtcagtttaatgaggacggttcaatgatcatagcccacgcatttcacggcgccctgcatctctggaaacagaacaccgtgaatccaagagagtggacgccagaaatcgtcatcagcggccactttgatggagtgcaggatctcgtatgggacccagaaggcgagtttattataacagtcggaacagatcagaccacgaggttatttgccccctggaaacgaaaagaccagtcacaggtcacatggcacgagattgcccgcccccagatccacggatacgacctgaagtgtctggctatgatcaatcgctttcagtttgtgtctggggcagacgaaaaggttctgcgggtgttcagcgcccccaggaacttcgtggaaaatttctgtgctattactggacagtccctcaatcatgtgttatgtaaccaggattcagatctgcccgagggggctaccgtgccggccctggggctcagtaacaaggcagtgttccagggtgatatcgcatcccagccctccgatgaagaagaattgttgacctcaaccggatttgaatatcagcaggttgcatttcagcccagtattctaaccgaaccccccacagaggaccacctgttacagaacaccttgtggccggaggttcagaaactctacggacacggctatgagatattctgcgttacttgtaactcctccaagaccctcctggcttcagcctgcaaagctgccaaaaaggaacacgccgcaataatcctttggaataccacgagctggaagcaggttcagaatctagtcttccattcccttacggtgactcagatggcctttagccccaatgaaaagtttctcctcgcagtgtcacgggatcggacctggtctctctggaaaaaacaggatactatcagcccagagtttgagcctgtcttttcactgttcgcttttaccaataaaatcacgtctgttcactccagaatcatttggtcatgtgattggtctcccgattccaagtatttcttcacgggctccagggataaaaaggttgtggtttggggggagtgcgactctacagacgactgtattgagcataatattggaccctgcagttccgtgctcgacgttggcggtgccgttacagccgtgagtgtgtgccccgttctgcatccttcccagaggtacgtcgtcgccgtgggtctggagtgcggtaagatatgcttgtacacctggaagaagactgaccaagttccggagataaacgattggactcattgtgttgagacatcacagagtcagtctcacacactcgccatccgtaaactgtgctggaagaattgcagcgggaagactgaacagaaggaggccgaaggcgctgagtggctacattttgcaagttgcggggaagaccataccgttaaaattcaccgagttaataagtgtgccctatag

SEQ ID NO: 85276 - DNA, 2403 bp, Artificial Sequence
  derived and/or modified sequence
atggtggcccctgtgctggagaccagccacgtgttctgctgccccaacagagtgcggggcgtgctgaactggagcagcggcccccggggcctgctggccttcggcaccagctgcagcgtggtgctgtatgaccccctgaagagggtggtggtgaccaacctgaatggccacacagcccgggtgaactgcatccagtggatctgcaagcaggacggcagccccagcacagagctggtgtctgggggcagtgacaaccaggtgatccactgggagattgaggacaaccagctgctgaaggctgtgcacctgcagggccacgagggccctgtgtatgctgtgcatgctgtgtaccagaggaggaccagtgaccctgccctgtgcaccctcatcgtgtctgctgctgctgacagcgctgtgcggctgtggagcaagaagggccctgaggtgcccatcctggcctgtggaaatgatgactgccgcatccacatctttgcccagcagaatgaccagttccagaaggtgctgagcctgtgtggccacgaggactggatccggggcgtggagtgggccgccttcggccgggacctcttcctggccagctgcagccaggactgcctgatccgcatctggaagctgtacatcaagagcaccagcctggagacccaggatgatgacaacatccggctgaaggagaacaccttcaccattgaaaatgaatctgtgaagatcgcctttgctgtgaccctggagaccgtgctggccggccacgagaactgggtgaatgctgtgcactggcagcctgtgttctacaaggatggagtgctgcagcagcctgtgcggctgctgagcgcctccatggacaagaccatgatcctgtgggccccagatgaggagagcggcgtgtggctggagcaggtgcgggtgggggaggtgggcggcaacaccctgggcttctatgactgccagttcaatgaagatggctccatgatcatcgcccacgccttccacggggccctgcacctgtggaagcagaacacagtgaacccccgggagtggaccccagagatcgtcatcagcggccactttgatggagtgcaggacctggtgtgggaccctgagggggagttcatcatcaccgtgggcacagaccagaccacccggctgtttgccccctggaagaggaaggaccagagccaggtgacctggcatgaaattgcccggccccagatccacggctatgacctgaagtgcctggccatgatcaaccgcttccagtttgtgtctggagcagatgagaaggtgctgcgggtcttcagcgcccccaggaactttgtggagaacttctgtgccatcaccggccagagcctgaaccacgtgctgtgcaaccaggacagcgacctgcctgagggcgccaccgtgcctgccctgggcctgagcaacaaggctgtgttccagggcgacatcgccagccagcccagtgatgaggaggagctgctgaccagcacaggctttgagtaccagcaggtggccttccagcccagcatcctgacagagcccccaacagaggaccacctgctgcagaacaccctgtggccagaggtgcagaagctgtatggccacggctatgagatcttctgtgtgacctgcaacagcagcaagaccctgctggccagcgcctgcaaggccgccaagaaggagcacgccgccatcatcctgtggaacaccacctcctggaagcaggtgcagaacctggtgttccacagcctgactgtgacccagatggccttcagccccaatgagaagttcctgctggccgtgtcccgggacaggacctggagcctgtggaagaagcaggacaccatcagccctgagtttgagcctgtgttcagcctgtttgccttcaccaacaagatcacctctgtgcacagccgcatcatctggagctgtgactggagcccagacagcaagtacttcttcaccggcagccgggacaagaaggtggtggtgtggggagaatgtgacagcacagatgactgcatcgagcacaacatcggcccctgcagctctgtgctggatgtgggcggcgctgtgacagctgtgtctgtgtgccctgtgctgcaccccagccagcgctacgtggtggccgtgggcctggagtgtgggaagatctgcctgtacacctggaagaagacagaccaggtgcctgagatcaatgactggacccactgtgtggagaccagccagagccagagccacaccctggccatcaggaagctgtgctggaagaactgcagcggcaagacagagcagaaggaggccgagggcgctgagtggctgcactttgccagctgtggggaggaccacacagtgaagatccaccgggtgaacaagtgtgccctgtag

SEQ ID NO: 85277 - DNA, 2403 bp, Artificial Sequence
  derived and/or modified sequence
atggtggcccccgtgctggagaccagccacgtgttctgctgccccaatagggtgcgcggcgtcctgaactggagttcaggacctagggggctgctggcttttggcacttcatgcagtgtagtactctatgatccacttaagcgtgtggtcgtgacaaatttgaatggccacacagcgagagttaactgcatacaatggatctgcaaacaggacggttccccttccacagaactggtgagcggcggatccgacaatcaagtgatccattgggagatcgaagacaatcagctgctgaaggccgtgcatcttcagggacacgagggaccagtgtacgccgtgcacgcagtgtaccaacgcaggacatctgaccccgcgctttgtacgctgatcgtatcagccgctgccgatagtgccgttcgactgtggagtaaaaaggggccggaagtcccgatcctagcttgcggtaacgacgattgccgaatccacatattcgcacagcagaatgatcagtttcagaaagtgcttagcttgtgcggtcacgaagattggatacgcggcgtggagtgggctgcattcggccgcgacctcttcctggccagctgctcacaggactgtctcatcagaatctggaagctgtatataaagtccactagcttggaaacccaagacgacgataatatccggctgaaggaaaacacctttacaatcgagaacgaatctgtgaagatagccttcgcagttactttggagactgtgctggcgggccacgaaaactgggtgaacgcagttcactggcagcccgtcttctataaggatggcgtgctacaacagcctgtgcgtctcctatccgccagcatggacaaaacaatgattctatgggcacctgatgaggagtccggtgtatggttggagcaagtccgcgtcggcgaggtggggggtaacacactcggattctatgattgtcagttcaacgaggacggctcgatgattattgcccacgcttttcatggcgcacttcacctttggaaacagaacacagtgaacccacgcgagtggacccccgagatcgtgattagtgggcattttgatggtgttcaggaccttgtctgggaccccgagggcgaattcatcattactgtcgggaccgaccagacgacaagactgttcgcaccctggaaacgtaaggatcagtcccaagtgacctggcatgagatcgcccgtcctcaaattcatggctacgacttgaagtgcctcgccatgatcaaccgatttcaatttgttagcggggcggatgagaaagtgctgagggtgttttccgccccacgtaacttcgtcgagaacttttgtgccatcacgggtcaatccctgaaccacgtcctgtgcaaccaggatagcgacctgcccgagggagctactgtcccggcactcggacttagtaacaaagccgtgttccaaggcgatatcgccagtcagccatccgacgaggaggagctacttacctctaccggttttgaataccagcaagtggccttccagcccagcatccttaccgaaccaccgaccgaggatcacctgctgcagaacactctgtggcctgaggtgcaaaagctgtatgggcacggctatgagatcttttgtgtgacgtgcaatagttctaagacattgctagcgtctgcctgtaaggccgccaaaaaggagcatgccgctataatcctatggaacactacttcatggaagcaggtccaaaacctggtcttccatagcctcaccgtgactcagatggccttttcgcctaacgagaagttcctgctggcagtttctcgggaccgcacctggtcactgtggaagaagcaggatacaatctctcccgaattcgaaccagtgttctcattatttgctttcaccaacaaaatcaccagcgtccactcaagaataatttggtcgtgcgactggagtcccgattccaaatactttttcactggctcccgggacaaaaaagtggtcgtttggggagagtgtgattccacagacgactgtattgagcataatattggcccttgttcatccgtgctggacgtgggcggcgccgtcaccgctgtatcagtgtgcccggtgctccacccgtcccagagatacgtcgtggccgtgggcttagaatgtgggaagatttgcctgtacacttggaaaaagactgatcaggtgccggagatcaatgactggacccactgcgtggagacctcccagtcccaaagccacacactggccatcagaaagctttgctggaagaattgtagcggaaaaactgaacagaaggaggcagaaggggccgagtggcttcactttgcgtcctgcggggaagaccacaccgtgaaaattcaccgcgtgaataagtgcgccctctag

SEQ ID NO: 85278 - DNA, 2403 bp, Artificial Sequence
  derived and/or modified sequence
atggtcgctccggtgctggagaccagccatgtcttttgctgcccgaatagggttcggggagtgctcaactggagctccggtcctagggggttgctggcctttggtacctcctgttcggtggtgctctacgatcccctgaaacgcgtggtagtaacaaacctcaatgggcatactgcccgtgtgaactgtatccaatggatttgtaagcaggatggctccccctctactgaactggtaagtggaggatctgacaatcaggtcatccactgggaaattgaagataaccaattgcttaaggctgtgcacctgcaaggccacgaaggccctgtgtatgccgtgcacgctgtgtaccagcgccgtacttccgatcctgcattatgcacactcattgtctccgccgcagccgatagcgctgtgaggttgtggtctaagaaaggaccggaagtacccattttagcctgcggtaatgatgattgcaggattcacatttttgctcaacagaacgaccagtttcagaaggtcctctcgttgtgtggacacgaagattggatcagaggcgtagagtgggccgcattcggacgagaccttttcctagccagttgttctcaggactgcctgatacgcatatggaaattgtatatcaaatctacctccctggaaacacaagacgatgataacatccgactgaaagaaaacacttttacaatcgagaacgagagcgttaaaattgcttttgccgtgacactggaaacagtactggctggacacgaaaactgggtgaacgccgtgcattggcagccagtcttctataaggacggcgtcctgcagcagcccgtgagactgcttagcgccagcatggataaaacaatgattctgtgggccccagatgaggaaagtggcgtgtggttggaacaggtgagggtcggtgaagttggcggaaacaccttggggttctatgattgtcaattcaatgaggacgggagcatgattattgctcatgcgttccatggtgccctgcatctctggaagcagaacaccgtcaatcccagggaatggaccccggaaatcgtgatttctggacactttgatggcgtgcaggaccttgtttgggatcctgagggtgagttcatcattacggtggggactgaccaaacaacacgcttgtttgctccttggaaaaggaaagaccagtcccaggtcacttggcacgaaattgccaggcctcagatccatggatacgatcttaagtgcctggcaatgattaaccggtttcagttcgtgagcggcgctgatgaaaaagtgctgcgagtgttttccgcccctcggaactttgtggagaacttctgcgccatcacgggacagagtctgaatcatgtactctgcaatcaggactccgaccttcccgagggcgcaaccgtacccgctctgggcttgtcaaataaggccgtgttccaaggcgacatagcttcacaaccaagcgacgaggaagaattattgacgtccaccgggttcgagtaccaacaagtcgccttccaacctagcatcttgaccgaacccccaacggaggatcatctccttcaaaatactctgtggcctgaggttcagaagttgtacggacacggctatgagattttctgtgtaacatgcaattccagtaaaaccctgctggccagtgcctgcaaggcggcaaaaaaagaacacgccgcaatcatactctggaacaccacctcttggaagcaagttcagaaccttgtattccattccttgacggtgactcagatggcctttagcccgaacgaaaaatttctgcttgctgtctctagagaccgtacctggagcttgtggaaaaagcaagacaccatttcgccagagttcgaaccggtattctccctgttcgccttcacaaataaaattacgagcgtgcatagccgcatcatctggagttgtgattggagccccgatagcaagtattttttcactggcagcagagataagaaagtggtcgtgtggggcgaatgcgactccactgacgactgtatcgagcataatatcgggccatgttcctccgtcctggacgtgggtggcgctgtgacagccgtgagtgtgtgcccagtgctgcacccctcccagagatatgtggtcgccgttggcctggaatgcgggaagatctgcctttatacctggaagaaaaccgaccaggtccccgaaattaatgattggacacattgcgttgagacctctcagtcccagagccacacgctggcaattagaaagttatgctggaagaattgctctggcaaaacagagcagaaagaagccgaaggagcagaatggttacacttcgcttcatgcggagaagatcatactgtgaaaatccatcgtgttaacaagtgcgcactctag

SEQ ID NO: 85279 - protein, 756 aa, Artificial Sequence
  derived and/or modified sequence
MVAPVLETSHVFCCPNRVRGVLNWSSGPRGLLAFGTSCSVVLYDPLKRVVVTNLNGHTARVNCIQWICKQDGSPSTELVSGGSDNQVIHWEIEDNQLLKAVHLQGHEGPVYAVHAVYQRRTSDPALCTLIVSAAADSAVRLWSKKGPEVPILACGNDDCRIHIFAQQNDQFQKVLSLCGHEDWIRGVEWAAFGRDLFLASCSQDCLIRIWKLYIKSTSLETQDDDNIRLKENTFTIENESVKIAFAVTLETVLAGHENWVNAVHWQPVFYKDGVLQQPVRLLSASMDKTMILWAPDEESGVWLEQREWTPEIVISGHFDGVQDLVWDPEGEFIITVGTDQTTRLFAPWKRKDQSQVTWHEIARPQIHGYDLKCLAMINRFQFVSGADEKVLRVFSAPRNFVENFCAITGQSLNHVLCNQDSDLPEGATVPALGLSNKAVFQGDIASQPSDEEELLTSTGFEYQQVAFQPSILTEPPTEDHLLQNTLWPEVQKLYGHGYEIFCVTCNSSKTLLASACKAAKKEHAAIILWNTTSWKQVQNLVFHSLTVTQMAFSPNEKFLLAVSRDRTWSLWKKQDTISPEFEPVFSLFAFTNKITSVHSRIIWSCDWSPDSKYFFTGSRDKKVVVWGECDSTDDCIEHNIGPCSSVLDVGGAVTAVSVCPVLHPSQRYVVAVGLECGKICLYTWKKTDQVPEINDWTHCVETSQSQSHTLAIRKLCWKNCSGKTEQKEAEGAEWLHFASCGEDHTVKIHRVNKCAL

SEQ ID NO: 85280 - DNA, 2271 bp, Artificial Sequence
  derived and/or modified sequence
atggtggcccccgtgctggagaccagccacgtgttctgctgccccaacagagtgagaggcgtgctgaactggagcagcggccccagaggcctgctggccttcggcaccagctgcagcgtggtgctgtacgaccccctgaagagagtggtggtgaccaacctgaacggccacaccgccagagtgaactgcatccagtggatctgcaagcaggacggcagccccagcaccgagctggtgagcggcggcagcgacaaccaggtgatccactgggagatcgaggacaaccagctgctgaaggccgtgcacctgcagggccacgagggccccgtgtacgccgtgcacgccgtgtaccagagaagaaccagcgaccccgccctgtgcaccctgatcgtgagcgccgccgccgacagcgccgtgagactgtggagcaagaagggccccgaggtgcccatcctggcctgcggcaacgacgactgcagaatccacatcttcgcccagcagaacgaccagttccagaaggtgctgagcctgtgcggccacgaggactggatcagaggcgtggagtgggccgccttcggcagagacctgttcctggccagctgcagccaggactgcctgatcagaatctggaagctgtacatcaagagcaccagcctggagacccaggacgacgacaacatcagactgaaggagaacaccttcaccatcgagaacgagagcgtgaagatcgccttcgccgtgaccctggagaccgtgctggccggccacgagaactgggtgaacgccgtgcactggcagcccgtgttctacaaggacggcgtgctgcagcagcccgtgagactgctgagcgccagcatggacaagaccatgatcctgtgggcccccgacgaggagagcggcgtgtggctggagcagagagagtggacccccgagatcgtgatcagcggccacttcgacggcgtgcaggacctggtgtgggaccccgagggcgagttcatcatcaccgtgggcaccgaccagaccaccagactgttcgccccctggaagagaaaggaccagagccaggtgacctggcacgagatcgccagaccccagatccacggctacgacctgaagtgcctggccatgatcaacagattccagttcgtgagcggcgccgacgagaaggtgctgagagtgttcagcgcccccagaaacttcgtggagaacttctgcgccatcaccggccagagcctgaaccacgtgctgtgcaaccaggacagcgacctgcccgagggcgccaccgtgcccgccctgggcctgagcaacaaggccgtgttccagggcgacatcgccagccagcccagcgacgaggaggagctgctgaccagcaccggcttcgagtaccagcaggtggccttccagcccagcatcctgaccgagccccccaccgaggaccacctgctgcagaacaccctgtggcccgaggtgcagaagctgtacggccacggctacgagatcttctgcgtgacctgcaacagcagcaagaccctgctggccagcgcctgcaaggccgccaagaaggagcacgccgccatcatcctgtggaacaccaccagctggaagcaggtgcagaacctggtgttccacagcctgaccgtgacccagatggccttcagccccaacgagaagttcctgctggccgtgagcagagacagaacctggagcctgtggaagaagcaggacaccatcagccccgagttcgagcccgtgttcagcctgttcgccttcaccaacaagatcaccagcgtgcacagcagaatcatctggagctgcgactggagccccgacagcaagtacttcttcaccggcagcagagacaagaaggtggtggtgtggggcgagtgcgacagcaccgacgactgcatcgagcacaacatcggcccctgcagcagcgtgctggacgtgggcggcgccgtgaccgccgtgagcgtgtgccccgtgctgcaccccagccagagatacgtggtggccgtgggcctggagtgcggcaagatctgcctgtacacctggaagaagaccgaccaggtgcccgagatcaacgactggacccactgcgtggagaccagccagagccagagccacaccctggccatcagaaagctgtgctggaagaactgcagcggcaagaccgagcagaaggaggccgagggcgccgagtggctgcacttcgccagctgcggcgaggaccacaccgtgaagatccacagagtgaacaagtgcgccctgtag

SEQ ID NO: 85281 - DNA, 2271 bp, Artificial Sequence
  derived and/or modified sequence
atggtcgcccccgtcctggagacgtcacacgtgttctgttgccccaatagagtgagaggggtactaaattggagctctggacctcgtgggttactggcgttcggcaccagctgctccgttgttctttatgacccccttaagagggtagtggttacaaacctaaacggacacacagctcgggtcaattgtatccagtggatctgcaaacaggacggctcaccatccacggaactggttagtggtgggtcagacaaccaggtcattcactgggagatcgaagataaccagcttctcaaggccgtccacctgcaggggcatgagggcccagtgtacgctgttcatgccgtgtatcagagaagaacctccgaccctgcactgtgcaccctcatcgtcagcgccgccgcggattctgctgtccgattatggagtaagaaagggcccgaagtccccattttagcttgcggcaatgacgactgtagaatccacatctttgctcagcagaacgatcagttccagaaagtgcttagcttgtgcggccatgaagattggatacgaggggtggaatgggccgcgtttggccgggatctattcctggcctcatgttctcaagactgcctgatccgaatttggaaactgtatatcaagagtacctctctggagactcaggatgacgacaacatacggctgaaagagaacacattcaccatagaaaacgaaagcgtgaagattgccttcgccgtgacactggagacagttctggcagggcatgagaactgggtcaacgccgtgcactggcaaccagtgttctataaggacggggtgttgcagcaaccggtgcgcctgctgtctgcctcaatggataagactatgatcctttgggcacctgatgaagaaagcggggtgtggcttgagcagagggagtggacccccgaaattgtcatatcgggccattttgacggagttcaggacctggtgtgggaccccgagggggagttcatcattacggtgggaactgaccaaactaccagactatttgctccctggaaaaggaaggatcagagccaagtgacctggcacgagatcgcacggccacaaatccacgggtacgacctgaaatgtctcgcgatgatcaatagatttcagtttgtgagtggtgccgacgagaaggtgctgcgcgtgttcagcgccccaaggaacttcgtggaaaacttctgtgcaataacaggtcagtccctgaaccacgtcctctgcaaccaggactccgacctgcccgagggcgcgactgtgcctgcattagggctctcaaataaagccgttttccagggcgacatcgctagccagcctagcgacgaggaagagctgcttaccagtaccggcttcgagtatcaacaggtggcatttcagccttcaattttaactgaaccacctacagaggatcatctgctgcagaatacgctgtggcccgaggtgcaaaaactgtatggccacggctacgaaattttttgcgtaacctgtaactcctccaaaaccctgttggcatctgcttgcaaggccgccaaaaaggagcatgctgcaatcatcctgtggaataccacaagctggaagcaggttcaaaatctcgtgtttcacagtctcaccgtgacacagatggcattttcccccaacgagaagtttcttcttgccgtttctcgcgataggacatggagtctttggaagaaacaggacactataagcccagagtttgagcctgtgttctctcttttcgcatttacaaacaaaattaccagcgtccattctcgaataatctggagttgtgattggtcccctgactctaaatacttctttaccggaagccgtgataaaaaggtggtggtttggggggagtgcgatagcacagatgattgcatcgagcacaacatcggtccttgcagttcggtcctggatgtgggcggggccgtgactgctgtgagcgtctgccctgtgctgcacccctctcagcgctatgtagttgcagtggggctggagtgcggaaagatctgcttgtatacatggaagaagactgatcaggtgcctgaaatcaatgactggacccactgcgtcgagactagtcagagccagagtcataccctagcaatacggaagctgtgctggaagaactgtagtggaaagacagagcaaaaggaggccgagggagcagaatggctacactttgcttcttgtggagaggaccacaccgtaaaaattcatagggttaacaaatgcgctctgtag

SEQ ID NO: 85282 - DNA, 2271 bp, Artificial Sequence
  derived and/or modified sequence
atggtggcccctgtgctggagaccagccacgtgttctgctgccccaacagagtgcggggcgtgctgaactggagcagcggcccccggggcctgctggccttcggcaccagctgcagcgtggtgctgtatgaccccctgaagagggtggtggtgaccaacctgaatggccacacagcccgggtgaactgcatccagtggatctgcaagcaggacggcagccccagcacagagctggtgtctgggggcagtgacaaccaggtgatccactgggagattgaggacaaccagctgctgaaggctgtgcacctgcagggccacgagggccctgtgtatgctgtgcatgctgtgtaccagaggaggaccagtgaccctgccctgtgcaccctcatcgtgtctgctgctgctgacagcgctgtgcggctgtggagcaagaagggccctgaggtgcccatcctggcctgtggaaatgatgactgccgcatccacatctttgcccagcagaatgaccagttccagaaggtgctgagcctgtgtggccacgaggactggatccggggcgtggagtgggccgccttcggccgggacctcttcctggccagctgcagccaggactgcctgatccgcatctggaagctgtacatcaagagcaccagcctggagacccaggatgatgacaacatccggctgaaggagaacaccttcaccattgaaaatgaatctgtgaagatcgcctttgctgtgaccctggagaccgtgctggccggccacgagaactgggtgaatgctgtgcactggcagcctgtgttctacaaggatggagtgctgcagcagcctgtgcggctgctgagcgcctccatggacaagaccatgatcctgtgggccccagatgaggagagcggcgtgtggctggagcagcgggagtggaccccagagatcgtcatcagcggccactttgatggagtgcaggacctggtgtgggaccctgagggggagttcatcatcaccgtgggcacagaccagaccacccggctgtttgccccctggaagaggaaggaccagagccaggtgacctggcatgaaattgcccggccccagatccacggctatgacctgaagtgcctggccatgatcaaccgcttccagtttgtgtctggagcagatgagaaggtgctgcgggtcttcagcgcccccaggaactttgtggagaacttctgtgccatcaccggccagagcctgaaccacgtgctgtgcaaccaggacagcgacctgcctgagggcgccaccgtgcctgccctgggcctgagcaacaaggctgtgttccagggcgacatcgccagccagcccagtgatgaggaggagctgctgaccagcacaggctttgagtaccagcaggtggccttccagcccagcatcctgacagagcccccaacagaggaccacctgctgcagaacaccctgtggccagaggtgcagaagctgtatggccacggctatgagatcttctgtgtgacctgcaacagcagcaagaccctgctggccagcgcctgcaaggccgccaagaaggagcacgccgccatcatcctgtggaacaccacctcctggaagcaggtgcagaacctggtgttccacagcctgactgtgacccagatggccttcagccccaatgagaagttcctgctggccgtgtcccgggacaggacctggagcctgtggaagaagcaggacaccatcagccctgagtttgagcctgtgttcagcctgtttgccttcaccaacaagatcacctctgtgcacagccgcatcatctggagctgtgactggagcccagacagcaagtacttcttcaccggcagccgggacaagaaggtggtggtgtggggagaatgtgacagcacagatgactgcatcgagcacaacatcggcccctgcagctctgtgctggatgtgggcggcgctgtgacagctgtgtctgtgtgccctgtgctgcaccccagccagcgctacgtggtggccgtgggcctggagtgtgggaagatctgcctgtacacctggaagaagacagaccaggtgcctgagatcaatgactggacccactgtgtggagaccagccagagccagagccacaccctggccatcaggaagctgtgctggaagaactgcagcggcaagacagagcagaaggaggccgagggcgctgagtggctgcactttgccagctgtggggaggaccacacagtgaagatccaccgggtgaacaagtgtgccctgtag

SEQ ID NO: 85283 - DNA, 2271 bp, Artificial Sequence
  derived and/or modified sequence
atggtggcccccgtgctggagaccagccacgtgttctgctgccccaacagggtacggggagtactaaattggtcctcaggcccacgcggcctgctagcgttcggcactagctgcagtgtcgttttgtacgatcccctgaaacgcgtggtggtaactaacctcaacggccacacggctcgggttaattgtattcagtggatttgcaagcaggatggctccccctcgacagaactggtttcgggcggaagcgacaatcaagtaatccattgggagatcgaagacaatcaactattgaaagcagtccatctgcagggacacgaaggaccagtgtacgccgtgcatgccgtttatcagcgtcgcacatctgacccggcattgtgtaccttgatcgtatccgccgcagccgatagcgccgtgcgcctctggagcaaaaagggccccgaagtccccatccttgcctgtggaaacgacgattgccgcatccacatatttgcccagcagaacgaccagttccagaaagtcctgtctctatgtgggcatgaggattggatacgcggagtagagtgggccgcctttggccgtgaccttttcttagctagttgcagccaggattgtctgattcgaatttggaaactttatatcaaaagcacgtccctggagactcaggatgacgacaatatccgactgaaggagaacacctttaccatagagaacgaatccgtcaagatcgcctttgcggtgacactcgagacagtgcttgccgggcacgaaaattgggtcaacgctgtgcattggcagcctgttttttataaggacggtgtgctgcagcagcccgttcgcctgctgagcgcatccatggacaaaaccatgattctatgggcccctgacgaagagtccggggtatggctggagcaaagggagtggacccctgagatcgtgatatccggccacttcgacggagttcaggatttagtgtgggacccagagggagaattcattatcacagttggaaccgaccagacaacaaggctttttgccccgtggaaacgaaaagaccaatcacaagttacctggcatgaaattgcgcgacctcagattcacggatatgacttgaagtgcctggctatgatcaaccgatttcagttcgttagtggcgctgacgagaaagttcttcgcgtcttcagtgctccgcgcaatttcgtggagaacttctgcgccatcacaggccagtccctcaaccacgtcctgtgcaatcaggattcagatctgcccgaaggcgcaaccgtgccggcgctgggactttctaacaaggctgtgttccagggtgatattgcatcccagccgtcagatgaggaagagctgctgacatcaacaggatttgagtaccagcaggttgcatttcaaccatccatactgaccgagcccccaacagaagatcaccttctgcagaatactctctggcccgaggttcagaagctgtacggtcacggttacgagattttttgcgtgacctgtaacagctccaagaccttgctggcctccgcctgtaaagctgccaagaaggagcacgcagctattatcctgtggaacaccaccagctggaagcaggtccagaaccttgtttttcacagccttactgtcacacaaatggccttctcccctaacgaaaagttcctgctcgctgtctccagagataggacatggtccttgtggaaaaaacaggatacaatctcgccggagtttgaaccggttttcagtctgtttgcttttaccaataaaattactagtgttcactctcgaattatttggtcttgtgactggtcacctgattcaaaatatttttttaccgggtccagggataaaaaggtggtggtttggggggagtgcgactctactgacgattgtattgagcacaatattggtccatgcagcagtgtgctggacgtaggcggtgcagtgacagctgtgtccgtgtgcccagtccttcatccctcccagcgatacgtagtcgcagtcggactcgaatgcggtaagatttgcctgtatacgtggaagaagaccgaccaggtccccgagattaacgactggactcactgtgtggaaacctctcagtcacaatctcacacccttgcaattaggaaactgtgctggaaaaactgtagcggtaaaactgagcaaaaggaagccgagggcgcagaatggctgcacttcgccagttgcggcgaggatcataccgttaagattcaccgagtgaataaatgcgccctatag

SEQ ID NO: 85284 - DNA, 2271 bp, Artificial Sequence
  derived and/or modified sequence
atggttgcccctgtcctcgagacctcacatgtgttctgctgccctaacagagtgcgaggtgtcttgaattggtctagcggacctcgcggtttgctcgccttcggtacctcctgttctgtagtgctgtacgaccccctgaaaagagtcgttgtgaccaacttgaacgggcacaccgcaagggtcaattgtatccagtggatttgcaaacaggacgggtcgcctagtacagagctggtgtcagggggttccgacaaccaggtgatccattgggagattgaggacaatcagcttctcaaggcggtgcacctgcagggacatgagggtcctgtctatgccgtccacgcagtatatcagcgacgaacttccgaccccgcattgtgcactcttattgtatccgcagccgcagacagtgccgtgagactctggtccaagaaaggaccagaagtgccaatcctcgcttgtggtaacgatgactgtcgcatccacatcttcgctcagcaaaacgatcaatttcagaaagtgctcagcctctgcggccacgaagactggatccggggagtcgaatgggctgcgttcgggagagatttatttctcgcgtcctgcagccaggattgcctgataaggatatggaaactgtacataaaaagcacctcactggagacacaagacgacgataatatccggctcaaagaaaacactttcacgatcgagaacgagagtgtcaagatagccttcgccgtcaccctggaaacagttctagccggtcacgagaactgggtgaatgccgtccactggcagcccgttttctataaagatggagtcctgcaacagcctgtgcgcctgctgagtgcctctatggacaagacaatgatcctgtgggctcccgacgaagaatctggcgtgtggcttgagcagcgcgagtggactccggaaattgtgattagcggccacttcgacggggtccaggatttagtatgggaccccgagggcgaatttatcataaccgtcggcacggatcaaactacccgcctttttgccccatggaagcgcaaggatcagagccaggtgacatggcatgaaatcgcgagaccacaaattcatggttacgatcttaaatgtctcgctatgatcaatagatttcagtttgtcagcggggctgatgaaaaggtccttagggtattcagtgccccaaggaacttcgtggaaaatttttgcgccattacagggcaatccttgaaccacgttctctgtaaccaggattctgacctgcctgaaggggctacagtaccagcgttaggactgagtaataaagcggtctttcagggtgacattgcttcccaacccagcgatgaagaagaattactcactagcacgggcttcgagtatcaacaggtcgcattccagcctagcattcttacggagcccccaacagaggaccatttgctgcagaacacattatggcctgaagtgcagaaactgtacggacatggatacgaaattttctgtgtgacatgtaacagctcaaagacactcctagctagtgcgtgtaaagccgctaagaaagaacatgccgctatcattctgtggaatacaactagctggaaacaagttcagaacctggtttttcactctctcacagtgactcagatggctttctctcccaatgagaagttcctgctcgctgtgagcagggacaggacttggagcttatggaagaaacaggatacaatttcccccgagttcgagcctgtcttcagcctgtttgcatttacaaataaaatcacttccgtgcacagccggatcatctggagttgcgattggagcccggactcaaaatatttctttactggaagccgggataagaaagtagttgtatggggcgaatgcgactcgacggacgattgcatagagcataacattggtccttgttcaagcgtcttagacgtgggcggagccgttactgccgtgtcagtatgtcccgtgttacatccatctcaacggtacgttgtcgcagttggcctcgaatgtggtaaaatttgcctttacacctggaaaaagaccgatcaagtgcctgagatcaacgattggacgcactgcgtggagactagtcaaagtcagtctcatactctcgcgatccgcaagttgtgttggaaaaactgcagcgggaagacagaacaaaaagaagccgagggcgcagaatggctgcacttcgcctcgtgcggagaagatcataccgtgaagatccaccgcgtcaacaagtgtgcattgtag

SEQ ID NO: 85285 - DNA, 2288 bp, Artificial Sequence
  derived and/or modified sequence
agttggcgacatggtggcacccgtgctggagacttctcacgtgttttgctgcccaaaccgggtgcggggagtcctgaactggagctctgggcccagaggacttctggcctttggcacgtcctgctccgtggtgctctatgaccccctgaaaagggttgttgttaccaacttgaatggtcacaccgcccgagtcaattgcatacagtggatttgtaaacaggatggctccccttctactgaattagtttctggaggatctgataatcaagtgattcactgggaaatagaggataatcagcttttaaaagcagtgcatcttcaaggccatgaaggacctgtttatgcggtgcatgctgtttaccagaggaggacatcagatcctgcattatgtacactgatcgtttctgcagctgcagattctgctgttcgactctggtctaaaaagggtccagaagtaccaatattagcatgtggcaatgatgattgcagaattcacatatttgctcaacaaaatgatcagtttcagaaagtgctttctctctgtggacatgaggattggattagaggagtggaatgggcagcctttggtagagatcttttcctagcaagctgttcacaagattgcctgataagaatatggaagctgtatataaagtcaacatctttagaaactcaggatgacgataacataagactgaaagaaaatacttttaccatagaaaatgaaagtgttaaaatagcatttgctgttactctggagacagtgctagccggtcatgaaaactgggtaaatgcagttcactggcaacctgtgttttacaaagatggtgtcctacagcagccagtgagattattatctgcttccatggataaaaccatgattctctgggctccagatgaagagtcaggagtttggctagaacagagagagtggactccagagattgtcatttcaggacactttgatggtgtccaagacctagtctgggatccagaaggagaatttattatcactgttggtactgatcagacaactagactttttgctccatggaagagaaaagaccaatcacaggtgacttggcatgaaattgcaaggcctcagatacatgggtatgacctgaaatgtttggcaatgattaatcggtttcagtttgtatctggagcagatgaaaaagttcttcgggttttttctgcacctcggaattttgtggaaaatttttgtgccattacaggacaatcactgaatcatgtgctctgtaatcaagatagtgatcttccagaaggagccactgtccctgcattgggattatcaaataaagctgtctttcagggagatatagcttctcagccttctgatgaagaggagctgttaactagtactggttttgagtatcagcaggtggcctttcagccctccatacttactgagcctcccactgaggatcatcttctgcagaatactttgtggcctgaagttcaaaaactatatgggcacggttatgaaatattttgtgttacttgtaacagttcaaagactctgcttgcctcagcttgtaaggcagctaagaaagagcatgcagctatcattctttggaacactacatcttggaaacaggtgcagaatttagttttccacagtttgacagtcacgcagatggccttctcacctaatgagaagttcttactagctgtttccagagatcgaacctggtcattgtggaaaaagcaggatacaatctcacctgagttcgagccagtttttagtctttttgccttcaccaacaaaattacttctgtgcacagtagaattatttggtcttgtgattggagtcctgacagcaagtatttcttcactgggagtcgagacaaaaaggtggttgtctggggtgagtgcgactccactgatgactgtattgagcacaacattggcccctgctcctcagtcctggacgtgggtggggctgtgacagctgtcagcgtctgcccagtgctccacccttctcaacgatacgtggttgcagtaggattggagtgtggaaagatttgcttatatacctggaaaaagactgatcaagttccagaaataaatgactggacccactgtgtagaaacaagtcaaagccaaagtcatacactggctatcagaaaattatgctggaagaattgcagtggaaaaactgaacagaaggaagcagaaggtgctgagtggttacactttgcaagctgtggtgaagatcacactgtgaagatacacagagtcaataaatgtgcactgtaatggactt

SEQ ID NO: 85286 - protein, 756 aa, Artificial Sequence
  derived and/or modified sequence
MVAPVLETSHVFCCPNRVRGVLNWSSGPRGLLAFGTSCSVVLYDPLKRVVVTNLNGHTARVNCIQWICKQDGSPSTELVSGGSDNQVIHWEIEDNQLLKAVHLQGHEGPVYAVHAVYQRRTSDPALCTLIVSAAADSAVRLWSKKGPEGRDLFLASCSQDCLIRIWKLYIKSTSLETQDDDNIRLKENTFTIENESVKIAFAVTLETVLAGHENWVNAVHWQPVFYKDGVLQQPVRLLSASMDKTMILWAPDEESGVWLEQVRVGEVGGNTLGFYDCQFNEDGSMIIAHAFHGALHLWKQNTVNPREWTPEIVISGHFDGVQDLVWDPEGEFIITVGTDQTTRLFAPWKRKDQSQVTWHEIARPQIHGYDLKCLAMINRFQFVSGADEKVLRVFSAPRNFVENFCAITGQSLNHVLCNQDSDLPEGATVPALGLSNKAVFQGDIASQPSDEEELLTSTGFEYQQVAFQPSILTEPPTEDHLLQNTLWPEVQKLYGHGYEIFCVTCNSSKTLLASACKAAKKEHAAIILWNTTSWKQVQNLVFHSLTVTQMAFSPNEKFLLAVSRDRTWSLWKKQDTISPEFEPVFSLFAFTNKITSVHSRIIWSCDWSPDSKYFFTGSRDKKVVVWGECDSTDDCIEHNIGPCSSVLDVGGAVTAVSVCPVLHPSQRYVVAVGLECGKICLYTWKKTDQVPEINDWTHCVETSQSQSHTLAIRKLCWKNCSGKTEQKEAEGAEWLHFASCGEDHTVKIHRVNKCAL

SEQ ID NO: 85287 - DNA, 2271 bp, Artificial Sequence
  derived and/or modified sequence
atggtggcccccgtgctggagaccagccacgtgttctgctgccccaacagagtgagaggcgtgctgaactggagcagcggccccagaggcctgctggccttcggcaccagctgcagcgtggtgctgtacgaccccctgaagagagtggtggtgaccaacctgaacggccacaccgccagagtgaactgcatccagtggatctgcaagcaggacggcagccccagcaccgagctggtgagcggcggcagcgacaaccaggtgatccactgggagatcgaggacaaccagctgctgaaggccgtgcacctgcagggccacgagggccccgtgtacgccgtgcacgccgtgtaccagagaagaaccagcgaccccgccctgtgcaccctgatcgtgagcgccgccgccgacagcgccgtgagactgtggagcaagaagggccccgagggcagagacctgttcctggccagctgcagccaggactgcctgatcagaatctggaagctgtacatcaagagcaccagcctggagacccaggacgacgacaacatcagactgaaggagaacaccttcaccatcgagaacgagagcgtgaagatcgccttcgccgtgaccctggagaccgtgctggccggccacgagaactgggtgaacgccgtgcactggcagcccgtgttctacaaggacggcgtgctgcagcagcccgtgagactgctgagcgccagcatggacaagaccatgatcctgtgggcccccgacgaggagagcggcgtgtggctggagcaggtgagagtgggcgaggtgggcggcaacaccctgggcttctacgactgccagttcaacgaggacggcagcatgatcatcgcccacgccttccacggcgccctgcacctgtggaagcagaacaccgtgaaccccagagagtggacccccgagatcgtgatcagcggccacttcgacggcgtgcaggacctggtgtgggaccccgagggcgagttcatcatcaccgtgggcaccgaccagaccaccagactgttcgccccctggaagagaaaggaccagagccaggtgacctggcacgagatcgccagaccccagatccacggctacgacctgaagtgcctggccatgatcaacagattccagttcgtgagcggcgccgacgagaaggtgctgagagtgttcagcgcccccagaaacttcgtggagaacttctgcgccatcaccggccagagcctgaaccacgtgctgtgcaaccaggacagcgacctgcccgagggcgccaccgtgcccgccctgggcctgagcaacaaggccgtgttccagggcgacatcgccagccagcccagcgacgaggaggagctgctgaccagcaccggcttcgagtaccagcaggtggccttccagcccagcatcctgaccgagccccccaccgaggaccacctgctgcagaacaccctgtggcccgaggtgcagaagctgtacggccacggctacgagatcttctgcgtgacctgcaacagcagcaagaccctgctggccagcgcctgcaaggccgccaagaaggagcacgccgccatcatcctgtggaacaccaccagctggaagcaggtgcagaacctggtgttccacagcctgaccgtgacccagatggccttcagccccaacgagaagttcctgctggccgtgagcagagacagaacctggagcctgtggaagaagcaggacaccatcagccccgagttcgagcccgtgttcagcctgttcgccttcaccaacaagatcaccagcgtgcacagcagaatcatctggagctgcgactggagccccgacagcaagtacttcttcaccggcagcagagacaagaaggtggtggtgtggggcgagtgcgacagcaccgacgactgcatcgagcacaacatcggcccctgcagcagcgtgctggacgtgggcggcgccgtgaccgccgtgagcgtgtgccccgtgctgcaccccagccagagatacgtggtggccgtgggcctggagtgcggcaagatctgcctgtacacctggaagaagaccgaccaggtgcccgagatcaacgactggacccactgcgtggagaccagccagagccagagccacaccctggccatcagaaagctgtgctggaagaactgcagcggcaagaccgagcagaaggaggccgagggcgccgagtggctgcacttcgccagctgcggcgaggaccacaccgtgaagatccacagagtgaacaagtgcgccctgtag

SEQ ID NO: 85288 - DNA, 2271 bp, Artificial Sequence
  derived and/or modified sequence
atggtggcaccggtgctggaaacgagccatgtgttctgttgcccgaaccgcgtgcgaggcgtgctgaactggtcttcagggcccaggggactacttgccttcggaacttcctgcagcgtggttctctacgaccccctgaagagagttgtggtcactaaccttaacggccataccgcacgagtgaattgcatccagtggatatgtaagcaggacgggtcgccctccacagagttggtttccggcggctcagacaaccaggttattcactgggaaatagaggataaccagctgctgaaagctgtgcacttacaggggcacgaggggccagtctatgctgtccacgccgtctaccaaagacggactagtgatcccgccctctgcacactcattgtcagtgccgccgcggactccgccgtccgtctctggtctaaaaaagggcccgaaggaagagatttattcctggccagctgttcccaagattgtctaatcagaatttggaagttgtatattaaatctacctcgttggagacccaggatgacgacaatatacgactgaaagaaaatacgttcaccattgagaatgaaagtgtgaagatagcattcgccgtgaccttggaaaccgtcctggccggacacgagaactgggtcaatgccgttcactggcagccagttttctacaaagacggcgtacttcaacagccagtgcgtttgttgtctgcctccatggacaagacaatgatcctatgggccccggacgaagaatccggcgtgtggcttgagcaggtgcgtgtgggagaggtcgggggaaacaccttaggattctatgactgccaatttaacgaagatggctcaatgatcattgcacacgcattccatggggcactgcacctgtggaagcaaaacacggtcaatcctcgggagtggacacctgagattgtgatttctggacatttcgacggcgttcaggatctcgtttgggatcctgagggagagttcatcataacggtgggtactgaccagacgacccgcctgtttgctccgtggaagagaaaagatcagtcccaggtgacatggcatgagatcgctcgtccacagatacatgggtacgacctgaagtgtctggctatgataaacagattccaatttgtgagcggcgcagatgaaaaggttttacgggtgttcagcgctcccaggaacttcgtggagaatttttgcgcaataaccggccagtctctgaatcatgtgctctgcaaccaggactcagacctcccagagggagccacggtacccgcgctggggctgagtaataaggccgtgttccagggtgatattgcatcacagccttcagatgaggaggagctgcttacctcgactggcttcgagtatcagcaggttgccttccagccttccattcttacagaacctcccacggaggatcacctgttacaaaataccctctggcctgaggtgcagaaactatatggtcacggttatgagatcttctgtgtgacatgcaattccagtaagaccttgctggcctccgcatgtaaggcggccaagaaagaacacgctgctatcatcctatggaacacgacctcatggaagcaagtccaaaatcttgtgtttcactctcttaccgtgacccaaatggcgttttcccctaatgagaaatttctactggctgtgtcccgggatcgcacctggtcactctggaagaaacaggacacaatctcgccggaattcgagccggttttcagcctgtttgccttcaccaataagatcacctctgtacactctagaattatctggagctgtgactggagcccagattcaaagtatttctttacaggatcgcgcgacaagaaagtggttgtgtggggcgagtgtgatagcactgacgactgcattgagcataacatcggtccctgctcatcagttttggacgtgggcggcgctgtgacagctgtgtccgtgtgtcccgttctgcacccaagccagcgctacgttgtcgccgttggcttggagtgcgggaagatttgtctgtatacttggaagaagaccgaccaggtgcccgagataaatgactggacccactgcgtcgaaacctcccagagccagagtcatacactcgcaatcagaaaactctgctggaagaattgttcaggaaagacagaacagaaagaggccgaaggcgcggaatggcttcacttcgccagctgtggtgaggaccatacggtgaagatccatagagtgaataaatgcgctctctag

SEQ ID NO: 85289 - DNA, 2271 bp, Artificial Sequence
  derived and/or modified sequence
atggtggcccctgtgctggagaccagccacgtgttctgctgccccaacagagtgcggggcgtgctgaactggagcagcggcccccggggcctgctggccttcggcaccagctgcagcgtggtgctgtatgaccccctgaagagggtggtggtgaccaacctgaatggccacacagcccgggtgaactgcatccagtggatctgcaagcaggacggcagccccagcacagagctggtgtctgggggcagtgacaaccaggtgatccactgggagattgaggacaaccagctgctgaaggctgtgcacctgcagggccacgagggccctgtgtatgctgtgcatgctgtgtaccagaggaggaccagtgaccctgccctgtgcaccctcatcgtgtctgctgctgctgacagcgctgtgcggctgtggagcaagaagggccctgagggccgggacctcttcctggccagctgcagccaggactgcctgatccgcatctggaagctgtacatcaagagcaccagcctggagacccaggatgatgacaacatccggctgaaggagaacaccttcaccattgaaaatgaatctgtgaagatcgcctttgctgtgaccctggagaccgtgctggccggccacgagaactgggtgaatgctgtgcactggcagcctgtgttctacaaggatggagtgctgcagcagcctgtgcggctgctgagcgcctccatggacaagaccatgatcctgtgggccccagatgaggagagcggcgtgtggctggagcaggtgcgggtgggggaggtgggcggcaacaccctgggcttctatgactgccagttcaatgaagatggctccatgatcatcgcccacgccttccacggggccctgcacctgtggaagcagaacacagtgaacccccgggagtggaccccagagatcgtcatcagcggccactttgatggagtgcaggacctggtgtgggaccctgagggggagttcatcatcaccgtgggcacagaccagaccacccggctgtttgccccctggaagaggaaggaccagagccaggtgacctggcatgaaattgcccggccccagatccacggctatgacctgaagtgcctggccatgatcaaccgcttccagtttgtgtctggagcagatgagaaggtgctgcgggtcttcagcgcccccaggaactttgtggagaacttctgtgccatcaccggccagagcctgaaccacgtgctgtgcaaccaggacagcgacctgcctgagggcgccaccgtgcctgccctgggcctgagcaacaaggctgtgttccagggcgacatcgccagccagcccagtgatgaggaggagctgctgaccagcacaggctttgagtaccagcaggtggccttccagcccagcatcctgacagagcccccaacagaggaccacctgctgcagaacaccctgtggccagaggtgcagaagctgtatggccacggctatgagatcttctgtgtgacctgcaacagcagcaagaccctgctggccagcgcctgcaaggccgccaagaaggagcacgccgccatcatcctgtggaacaccacctcctggaagcaggtgcagaacctggtgttccacagcctgactgtgacccagatggccttcagccccaatgagaagttcctgctggccgtgtcccgggacaggacctggagcctgtggaagaagcaggacaccatcagccctgagtttgagcctgtgttcagcctgtttgccttcaccaacaagatcacctctgtgcacagccgcatcatctggagctgtgactggagcccagacagcaagtacttcttcaccggcagccgggacaagaaggtggtggtgtggggagaatgtgacagcacagatgactgcatcgagcacaacatcggcccctgcagctctgtgctggatgtgggcggcgctgtgacagctgtgtctgtgtgccctgtgctgcaccccagccagcgctacgtggtggccgtgggcctggagtgtgggaagatctgcctgtacacctggaagaagacagaccaggtgcctgagatcaatgactggacccactgtgtggagaccagccagagccagagccacaccctggccatcaggaagctgtgctggaagaactgcagcggcaagacagagcagaaggaggccgagggcgctgagtggctgcactttgccagctgtggggaggaccacacagtgaagatccaccgggtgaacaagtgtgccctgtag

SEQ ID NO: 85290 - DNA, 2271 bp, Artificial Sequence
  derived and/or modified sequence
atggtggcccccgtgctggagaccagccacgtgttctgctgccccaacagggtgaggggcgtgttgaattggtctagtggccccaggggtctcctggcctttggaacatcgtgttccgtggtcctttacgacccacttaagcgggttgtcgtgaccaacctcaatgggcatacagctagagtgaactgtatccagtggatctgtaagcaagatggcagtccatccacggagctcgttagtggcggttcggataatcaggtgatacattgggagattgaggataaccagttgctgaaagctgtccacctgcagggtcacgaaggtccagtgtacgcagtgcacgccgtgtaccagaggagaacttctgatcccgcactctgcacgctaatcgtgtctgcagccgctgacagtgccgtcagactgtggagcaaaaagggaccagagggcagagacctgtttttggcctcatgcagccaggactgcctcatacgtatttggaagctctatatcaagtctacatctctggaaacgcaggatgacgacaacattagactgaaggagaacaccttcactatagagaacgagagtgtaaaaatcgctttcgcggttacactggaaacagtgctggccggccacgagaactgggtgaacgccgtgcactggcaaccagtgttttataaagatggcgtcctacagcagccagtgcgtctattgtctgcgagcatggataaaactatgatcttgtgggcaccagacgaggagtctggggtgtggctggaacaagtgcgggtgggcgaggtaggggggaataccctgggtttttatgattgccagttcaacgaggacgggagcatgataatcgcccatgccttccatggagccctgcacctgtggaaacagaatacagtcaatccccgcgagtggacgcccgaaatcgtgatcagtgggcactttgacggtgtgcaggatcttgtgtgggatccagagggggaatttattataaccgtaggaactgatcagacaactagactttttgctccatggaagagaaaagaccagagccaggttacttggcacgagatagcacgccctcagatccacgggtacgacctaaaatgtcttgccatgattaatcgcttccagttcgtctcgggagctgatgaaaaggtccttcgcgtgttttctgcgccccgaaactttgtggagaacttctgcgctataactggccagtccttgaatcacgttctgtgcaaccaggactccgatcttccggagggtgccacagtgccagctttaggattgagcaacaaagcagtgtttcagggcgacatcgctagtcagccttccgatgaagaggaactcctgaccagcaccggctttgaataccagcaggtggcattccagccgtctatcctcactgaaccccctacagaagaccatctgctacagaacaccctgtggcccgaggtccaaaaactgtacggccatggttatgagatattctgtgttacctgcaatagttccaagacactacttgcttctgcgtgcaaggccgccaagaaggagcatgcagcaataatcttgtggaacaccactagctggaagcaggtgcaaaacctggttttccactctctcacagtgactcagatggcattctctcccaatgaaaaatttctcctagctgtgtctagagatcggacttggtccctgtggaaaaagcaggatacaattagccctgaattcgagccagtatttagcctcttcgcctttacaaacaagatcacttctgtccatagccggatcatttggagctgcgactggtctcccgatagcaaatacttttttaccggatcacgggataagaaagtcgtggtctggggcgagtgtgattcaactgacgattgtatcgagcataatattggcccatgtagctcagtcctggatgtggggggagcagtgactgcagtcagcgtgtgcccggtccttcaccccagccagcgctacgttgttgctgtcggtctggagtgcggaaaaatctgcctctatacttggaagaagacggaccaagtacccgaaatcaacgattggacacattgcgtggaaacaagccagagtcagtcacatactctcgcaattagaaaactttgctggaaaaactgctccggaaaaaccgagcagaaggaggctgaaggtgctgaatggctgcacttcgcaagctgtggtgaggaccacacggtcaaaattcatcgcgtaaataaatgtgcgctgtag

SEQ ID NO: 85291 - DNA, 2385 bp, Artificial Sequence
  derived and/or modified sequence
gcgtctcttgtttgtgcggctgaccagttggcgacatggtggcacccgtgctggagacttctcacgtgttttgctgcccaaaccgggtgcggggagtcctgaactggagctctgggcccagaggacttctggcctttggcacgtcctgctccgtggtgctctatgaccccctgaaaagggttgttgttaccaacttgaatggtcacaccgcccgagtcaattgcatacagtggatttgtaaacaggatggctccccttctactgaattagtttctggaggatctgataatcaagtgattcactgggaaatagaggataatcagcttttaaaagcagtgcatcttcaaggccatgaaggacctgtttatgcggtgcatgctgtttaccagaggaggacatcagatcctgcattatgtacactgatcgtttctgcagctgcagattctgctgttcgactctggtctaaaaagggtccagaaggtagagatcttttcctagcaagctgttcacaagattgcctgataagaatatggaagctgtatataaagtcaacatctttagaaactcaggatgacgataacataagactgaaagaaaatacttttaccatagaaaatgaaagtgttaaaatagcatttgctgttactctggagacagtgctagccggtcatgaaaactgggtaaatgcagttcactggcaacctgtgttttacaaagatggtgtcctacagcagccagtgagattattatctgcttccatggataaaaccatgattctctgggctccagatgaagagtcaggagtttggctagaacaggttcgagtaggtgaagtaggtgggaatactttgggattttatgattgccagttcaatgaagatggctccatgatcattgctcatgctttccacggagcgttgcacctttggaaacagaatacagttaacccaagagagtggactccagagattgtcatttcaggacactttgatggtgtccaagacctagtctgggatccagaaggagaatttattatcactgttggtactgatcagacaactagactttttgctccatggaagagaaaagaccaatcacaggtgacttggcatgaaattgcaaggcctcagatacatgggtatgacctgaaatgtttggcaatgattaatcggtttcagtttgtatctggagcagatgaaaaagttcttcgggttttttctgcacctcggaattttgtggaaaatttttgtgccattacaggacaatcactgaatcatgtgctctgtaatcaagatagtgatcttccagaaggagccactgtccctgcattgggattatcaaataaagctgtctttcagggagatatagcttctcagccttctgatgaagaggagctgttaactagtactggttttgagtatcagcaggtggcctttcagccctccatacttactgagcctcccactgaggatcatcttctgcagaatactttgtggcctgaagttcaaaaactatatgggcacggttatgaaatattttgtgttacttgtaacagttcaaagactctgcttgcctcagcttgtaaggcagctaagaaagagcatgcagctatcattctttggaacactacatcttggaaacaggtgcagaatttagttttccacagtttgacagtcacgcagatggccttctcacctaatgagaagttcttactagctgtttccagagatcgaacctggtcattgtggaaaaagcaggatacaatctcacctgagttcgagccagtttttagtctttttgccttcaccaacaaaattacttctgtgcacagtagaattatttggtcttgtgattggagtcctgacagcaagtatttcttcactgggagtcgagacaaaaaggtggttgtctggggtgagtgcgactccactgatgactgtattgagcacaacattggcccctgctcctcagtcctggacgtgggtggggctgtgacagctgtcagcgtctgcccagtgctccacccttctcaacgatacgtggttgcagtaggattggagtgtggaaagatttgcttatatacctggaaaaagactgatcaagttccagaaataaatgactggacccactgtgtagaaacaagtcaaagccaaagtcatacactggctatcagaaaattatgctggaagaattgcagtggaaaaactgaacagaaggaagcagaaggtgctgagtggttacactttgcaagctgtggtgaagatcacactgtgaagatacacagagtcaataaatgtgcactgtaatggacttaataactacatgcttgcagtcactggtatcttaaaatattatcatgtaaacaggtcatctttaccttcataa

SEQ ID NO: 85292 - DNA, 2271 bp, Artificial Sequence
  derived and/or modified sequence
atggtggcccctgtgctcgagacaagtcacgtcttctgctgtcctaatcgtgtccgcggagtgttaaattggagctctgggccacggggactgctcgctttcggtacgagttgctccgtcgtcctatacgatcccctcaaaagggtagtggtgacgaatctcaacgggcacaccgccagggtgaattgtattcaatggatctgcaagcaggacggaagcccaagcacggagctggtgtcaggaggctccgataaccaggtgatccactgggagatagaagacaatcaactactcaaggcagtacacctacagggccacgagggccctgtgtatgccgtccacgcagtgtatcagcgccgaacatcggacccagccctgtgtaccttgattgtgagtgcagcagcagattccgctgtaagactttggagtaaaaagggccctgaaggcagggacttattcctagcttcctgctcccaggactgtctgattcgtatttggaaactgtacataaaatctacatctctggagacacaggatgatgataacattcgcctgaaagagaacacttttaccatcgaaaacgaaagcgtcaaaatagccttcgccgtgacactggaaacagttctcgccggacacgagaattgggtgaacgccgtgcactggcagcctgtgttctataaagatggggtgctgcagcaaccggtgcggttactctcagcatccatggacaaaaccatgatcctctgggctcctgacgaagagagcggcgtttggttggagcaggttagggtgggggaggtgggcggtaacaccctcggattttacgactgccagttcaatgaggatggctccatgattatagcgcatgcctttcacggcgcactgcacctgtggaagcagaatacagtcaatcccagagagtggactcctgagattgttataagcgggcatttcgatggcgtgcaggatctggtatgggaccctgaaggagagttcattattactgtgggtaccgatcagaccacacgactgtttgctccctggaaaaggaaagaccaatctcaggtgacttggcacgagattgcacggcctcagatccatggttacgatcttaaatgtctcgcaatgatcaaccgtttccaattcgtctcgggagccgacgagaaagttttgcgggtgttctcagcccctaggaactttgtagagaacttctgcgccataactggccagagcttgaaccacgttctttgtaatcaagattccgatctacccgaaggtgcaactgtcccagcgctcgggctttccaataaggctgtgtttcagggcgacatcgcctcacagccctctgacgaagaagaattgctaacatcgacaggatttgagtatcagcaagtggcgtttcagccttccattctaaccgagcctcccacagaggatcatctgctccagaataccctttggccggaggtccaaaaactgtacggccatggctacgagattttttgtgtgacctgcaattcttccaaaacccttttggcctctgcctgtaaggctgcaaaaaaggagcatgcagccatcatcctgtggaacaccacctcctggaaacaggtgcagaatttggtattccacagcctgacagttactcagatggcgttttcccctaacgaaaaattcctgctggctgtctcaagagaccgaacctggagtttatggaaaaaacaggacacaatctctcctgaattcgagccagttttttccttgttcgcatttacaaacaagattacatcggtccactcacgtattatctggtcatgcgactggagtccggattctaagtattttttcacaggcagcagggacaagaaggtagtggtgtggggagaatgcgacagtacagacgattgtattgaacacaatatcgggccatgttcttcagtactggacgtcgggggtgctgtgacagcagtctctgtgtgtccagtactgcacccaagccagcgctacgtagtggcagtgggacttgaatgcggtaagatctgcctctacacctggaagaagactgatcaggtccctgagattaacgactggacgcattgtgttgagactagccagagtcagagccacactctggctatacgtaagctgtgttggaagaactgttctggcaagactgagcagaaagaggccgagggcgcagaatggctacacttcgcatcctgtggcgaggaccacaccgtgaaaattcacagagtcaataagtgtgctctgtag

SEQ ID NO: 85293 - protein, 216 aa, Artificial Sequence
  derived and/or modified sequence
MAVFPATARGQLGIRNAARWPWVLAVGQSGLADEGILEVSKARDIPVVIDADGLWLVAQQPALIHGYRKAVLTPNHVEFSRLYDAVLRGPMDSDDSHGSVLRLSQALGNVTVVQKGERDILSNGQQVLVCSQEGSSRRCGGQGDLLSGSLGVLVHWALLAGPQKTNGSSPLLVAAFGACSLTRQCNHQAFQKHGRSTTTSDMIAEVGAAFSKLFET

SEQ ID NO: 85294 - protein, 121 aa, Artificial Sequence [sequence omitted]

SEQ ID NO: 85295 - protein, 323 aa, Artificial Sequence
  derived and/or modified sequence
MALGPRCGAIRACRRVLERAFSLRKAHSIKDMENTLQLVRNIIPPLSSTKHKGQDGRIGVVGGCQEYTGAPYFAAISALKVGADLSHVFCASAAAPVIKAYSPELIVHPVLDSPNAVHEVEKWLPRLHALVVGPGLGRDDALLRNVQGILEVSKARDIPVVIDADGLWLVAQQPALIHGYRKAVLTPNHVEFSRLYDAVLRGPMDSDDSHGSVLRLSQALGNVTVVQKGERDILSNGQQVLVCSQEGSSRRCGGQGDLLSGSLGVLVHWALLAGPQKTNGSSPLLVAAFGACSLTRQCNHQAFQKHGACQIFNLSINWLPLRI

SEQ ID NO: 85296 - DNA, 366 bp, Artificial Sequence
  derived and/or modified sequence
atggccctgggccccagatgcggcgccatcagagcctgcagaagagtgctggagagagccttcagcctgagaaaggcccacagcatcaaggacatggagaacaccctgcagctggtgagaaacatcatcccccccctgagcagcaccaagcacaagggccaggacggcagaatcggcgtggtgggcggctgccaggacgacagccccaacgccgtgcacgaggtggagaagtggctgcccagactgcacgccctggtggtgggccccggcctgggcagagacgacgccctgctgagaaacgtgcagggcatcctggaggtgagcaaggccagagacatccccgtggtgatcgacgccgtgagctag

SEQ ID NO: 85297 - DNA, 972 bp, Artificial Sequence
  derived and/or modified sequence
atggccctgggccccagatgcggcgccatcagagcctgcagaagagtgctggagagagccttcagcctgagaaaggcccacagcatcaaggacatggagaacaccctgcagctggtgagaaacatcatcccccccctgagcagcaccaagcacaagggccaggacggcagaatcggcgtggtgggcggctgccaggagtacaccggcgccccctacttcgccgccatcagcgccctgaaggtgggcgccgacctgagccacgtgttctgcgccagcgccgccgcccccgtgatcaaggcctacagccccgagctgatcgtgcaccccgtgctggacagccccaacgccgtgcacgaggtggagaagtggctgcccagactgcacgccctggtggtgggccccggcctgggcagagacgacgccctgctgagaaacgtgcagggcatcctggaggtgagcaaggccagagacatccccgtggtgatcgacgccgacggcctgtggctggtggcccagcagcccgccctgatccacggctacagaaaggccgtgctgacccccaaccacgtggagttcagcagactgtacgacgccgtgctgagaggccccatggacagcgacgacagccacggcagcgtgctgagactgagccaggccctgggcaacgtgaccgtggtgcagaagggcgagagagacatcctgagcaacggccagcaggtgctggtgtgcagccaggagggcagcagcagaagatgcggcggccagggcgacctgctgagcggcagcctgggcgtgctggtgcactgggccctgctggccggcccccagaagaccaacggcagcagccccctgctggtggccgccttcggcgcctgcagcctgaccagacagtgcaaccaccaggccttccagaagcacggcgcctgccagatcttcaacctgagcatcaactggctgcccctgagaatctag

SEQ ID NO: 85298 - DNA, 366 bp, Artificial Sequence
  derived and/or modified sequence
atggccctgggacctcgctgtggggcaatcagagcttgcaggagagtgctggagcgcgcattttccctgcgcaaagcccactccattaaggacatggagaacacccttcagctggtgagaaatatcattcccccactatcaagcacaaagcataagggtcaggacggccgcatcggggtcgtgggcggttgccaggatgactccccaaatgcggtgcacgaagtggagaagtggctcccaaggctccacgccctggtcgtgggtccaggactgggtagggacgatgcccttcttaggaatgtccagggcattttggaggtgtcgaaggctcgcgatatacctgtggtgatagatgcggtgtcatag

SEQ ID NO: 85299 - DNA, 972 bp, Artificial Sequence
  derived and/or modified sequence
atggctctgggtcccagatgtggcgcaataagggcatgcaggagagttctggagagagccttcagcctgcggaaagctcattctatcaaagatatggaaaacaccctgcagctggtacgtaacataattccaccactgagttccacgaaacacaaggggcaggatgggcggattggagtggttggaggatgtcaggaatacacaggagctccttacttcgctgcaatatccgccttaaaagtcggcgctgatctttctcacgtattttgcgcctccgcagcagcacctgtgattaaggcttattccccggagttaatcgttcacccagtgctggactctcctaacgccgtgcacgaagtagaaaaatggttaccgagactgcacgccctggtggtaggtcctggtctgggtcgcgacgatgccttactgaggaacgtgcaggggatcctcgaagtctctaaggctcgggacatacctgtagtgatcgacgctgatggtctctggttggtcgcccagcagcctgctctcattcatgggtaccggaaggcagttctcactccgaaccacgtcgagttcagtagactgtatgatgccgtgctaagagggcccatggattccgatgattcacacggttctgtgttacgtctgtcccaggcactgggcaatgtaacagtggtgcaaaaaggcgagcgagatattcttagtaatgggcagcaggtgttggtgtgttcacaagaggggagctctcgtcgatgtgggggccagggcgacctgctgtctggttcgctgggcgtgcttgtacattgggccctgttagccggcccacagaaaacaaatggaagctcacctttgctggtggccgccttcggggcgtgttccttgactagacagtgtaaccaccaggcatttcagaagcatggcgcatgccaaatcttcaacctctctattaattggttgccactgcgcatctag

SEQ ID NO: 85300 - DNA, 366 bp, Artificial Sequence
  derived and/or modified sequence
atggccctgggcccccgctgtggggccatccgggcctgccggcgggtgctggagcgggccttcagcctgaggaaggcccacagcatcaaggacatggagaacaccctgcagctggtgaggaacatcatcccccccctgagcagcaccaagcacaagggccaggacggccgcatcggcgtggtgggcggctgccaggatgacagccccaatgctgtgcatgaggtggagaagtggctgccccggctgcacgccctggtggtgggccctggcctgggcagagatgatgccctgctgagaaatgtgcagggcatcctggaggtgtccaaggcccgggacatccctgtggtgattgatgctgtgtcctag

SEQ ID NO: 85301 - DNA, 972 bp, Artificial Sequence
  derived and/or modified sequence
atggccctgggcccccgctgtggggccatccgggcctgccggcgggtgctggagcgggccttcagcctgaggaaggcccacagcatcaaggacatggagaacaccctgcagctggtgaggaacatcatcccccccctgagcagcaccaagcacaagggccaggacggccgcatcggcgtggtgggcggctgccaggagtacaccggggccccctactttgctgccatcagcgccctgaaggtgggcgctgacctgagccacgtgttctgtgccagcgctgctgcccctgtgatcaaggcctacagccctgagctgattgtgcaccctgtgctggacagccccaatgctgtgcatgaggtggagaagtggctgccccggctgcacgccctggtggtgggccctggcctgggcagagatgatgccctgctgagaaatgtgcagggcatcctggaggtgtccaaggcccgggacatccctgtggtgattgatgctgatggcctgtggctggtggcccagcagcctgccctgatccacggctacaggaaggctgtgctgacccccaaccacgtggagttcagccggctgtatgatgctgtgctgcggggccccatggacagtgatgacagccacggctctgtgctgcggctgagccaggccctgggcaatgtgacagtggtgcagaagggggagcgggacatcctgagcaatggccagcaggtgctggtgtgcagccaggagggcagcagccgccgctgtggcggccagggcgacctgctgagcggcagcctgggcgtgctggtgcactgggccctgctggccggcccccagaagaccaacggcagcagccccctgctggtggccgcctttggagcctgcagcctgacccggcagtgcaaccaccaggccttccagaagcacggggcctgccagatcttcaacctgagcatcaactggctgcccctgcgcatctag

SEQ ID NO: 85302 - DNA, 366 bp, Artificial Sequence
  derived and/or modified sequence
atggccctgggcccccggtgcggcgccatccgggcctgccggcgggttttggaacgggctttcagcctgcggaaggcacattcaatcaaagatatggagaataccctgcagctcgtgagaaatattatcccacctctatcttccactaaacacaaaggccaagatggacggatcggcgtcgttggagggtgccaggatgattctccaaatgctgtgcatgaagttgaaaaatggctgcctcggctccatgccttggttgtgggcccgggcctcgggagggatgatgcattattgcgtaacgtacagggcatcctggaggtgtccaaagccagagatatccccgttgtcatcgatgctgtgagttag

SEQ ID NO: 85303 - DNA, 972 bp, Artificial Sequence
  derived and/or modified sequence
atggccctgggcccccggtgcggcgccatccgggcctgccggcgggtgctggagagggcattctccctccgcaaggcccattctatcaaagacatggaaaacacactgcaactggtgcgcaatatcatccctcccctgagcagcacaaaacacaaagggcaggacgggagaatcggggtggttggaggatgtcaggagtataccggagcgccctatttcgctgccataagcgcactgaaagttggcgcggaccttagtcacgttttctgtgcatctgccgcagccccagttatcaaggcatacagtcctgagctgatagtgcacccagtgctcgacagtccaaatgccgtgcatgaggtggagaagtggttgccccgcctccatgccctggtcgtgggccctgggcttggaagggatgacgccctactgagaaatgtgcagggaatcctggaggtatcaaaagctagagatattcccgtagtcatcgacgcggatgggctgtggctcgtggcccaacagcctgccctgatccatgggtaccggaaggccgtattgacgcccaatcatgtagagttctcccgtctctacgacgccgtgctcaggggcccaatggactcggacgattcacatggatctgtgttgaggctttcacaagccctcggaaatgtcacggtggtccagaaaggggagagggacattttaagcaacgggcagcaagtactggtgtgttctcaggagggaagctcaaggagatgcggcggacagggggacctgctgtctgggagcctcggtgtgctcgtgcattgggccctgctagcaggcccccaaaaaacaaacggctccagccctctgctcgtggctgcctttggtgcatgttctctgacacggcagtgcaaccatcaggcatttcagaagcacggggcctgccagatcttcaacttatctataaactggctgcccctgaggatttag

SEQ ID NO: 85304 - DNA, 366 bp, Artificial Sequence
  derived and/or modified sequence
atggccctggggcctcgctgtggtgctatacgagcttgcagaagagtgctggaaagagcgttctcactgcggaaagcccacagcataaaggatatggagaatacactccagcttgtgcgcaacataatccctccattgtcaagcaccaagcacaaggggcaggacggcagaattggagtggtcggaggctgccaggatgactctcccaatgcagtccatgaggttgaaaagtggcttcccaggctccacgcactcgttgtcggccctggcctgggaagggatgacgccctgctgcgcaatgtccaggggattctggaagtgagcaaagctagggatatccctgtggttatcgacgctgtgtcctag

SEQ ID NO: 85305 - DNA, 972 bp, Artificial Sequence
  derived and/or modified sequence
atggcactcggtcctcggtgcggcgcaattcgggcttgtcggcgagttctggagagagccttctcccttaggaaagcccattccataaaagatatggaaaacacgctgcagttagtgaggaatatcatacccccactgtcttcaacaaagcataagggacaggacgggagaattggagtggtcggcggatgtcaggagtacactggggctccctacttcgctgcgattagcgctttgaaagtgggagcagatctaagccatgttttctgtgcctcagcagcagcccctgtgatcaaggcatactcccccgagctgattgtacaccccgtcctggactcgcccaatgcagtgcacgaagttgagaagtggctgcctaggcttcacgcactggtggttggaccgggactgggcagagacgacgctctcctgcgaaatgttcaaggtatactggaggtctcaaaggccagagatattccagtcgtgattgatgccgatggactctggcttgttgcacaacagcccgctctgattcacggttatcggaaggctgtgctgaccccaaaccatgtagaattctccaggctctacgacgctgttcttaggggtcccatggactcagacgacagtcacggaagcgtcttgcggctgtcacaggctctggggaatgtgacagtggtgcagaaaggtgagagagatatcctctctaatggccagcaggtccttgtgtgcagtcaggaggggtcatctcggaggtgcggagggcagggcgatcttctctcgggctcacttggggttctagtgcattgggctctgctggccggaccgcagaagaccaatggaagcagccccctgctcgttgctgccttcggcgcatgcagcctcacccggcaatgcaatcatcaagctttccagaaacacggcgcttgtcaaatatttaacctctccataaattggctgcctctgcggatttag

SEQ ID NO: 85306 - DNA, 1309 bp, Artificial Sequence
  derived and/or modified sequence
aatccggaatgctgcccgatggccctgggtcctcgctgtggggcaatccgggcttgcagacgagttttagaaagagcgttttcgctacgtaaagcacattcgataaaggatatggaaaatactttgcagctggtgagaaatatcatacctcctctgtcttccacaaagcacaaagggcaagatggaagaataggcgtagttggaggctgtcaggatgacagccccaatgctgttcatgaggtggagaagtggctgccccggctgcatgctcttgtcgtaggacctggcttgggtagagatgatgcgcttctcagaaatgtccagggcattttggaagtgtcaaaggccagggacatccctgttgtcatcgacgcggtgagttgacttctctcctcctggctcggactcccggaaggcctgtgcagtgagcacggctccttgttctgtgcaggatggcctgtggctggtcgctcagcagccggccctcatccatggctaccggaaggctgtgctcactcccaaccacgtggagttcagcagactgtatgacgctgtggtgagtcagtggaccccctggagggtagatgcaagccctgttcgtcctgaagagggtgaaggacgagctccatgcttctgcccagcctgtccctgtggacacacctgcaagtaatcgctgtgcctctcccagcggatggcgcgtcttcccattaatgcgcttggattggatgaacgatggtgtagtgggcttgggacaggcagggactcgggtcagtcagcccctcctgcagtgcactctggacaggtcactttgtctgtgtcctgagtgcctcatctgtaatgtgatgatggcatcagcttcacggggttgtgaggatgagatgaggaaacctatgtaaagccgtgagtccccacatggtaagtgtcccatcaatgttagtgcccagtacgactggaatttgtattactcctgcaaagctctcagaacccagtcttgggtggtcctccttcagcctgctctgatgaggtagaggatgggcactggagcaggcaccgtgtcagcacctgctcggaggactcactgcaggtgatatcctgggcatcctcccacctacatggcctttaacaggtgcctgggtgatccctttagacacgagagcatgagtctcatggcggatgggacagggctatctgtcgtcgtgtgtctgaggaagactttgctttttctctgtcttcctgtgttgtcatagctcagaggccctatggacagcgatgacagccatggatctgtgctaagactcagccaagccct

SEQ ID NO: 85307 - DNA, 1332 bp, Artificial Sequence
  derived and/or modified sequence
agctgggaatccggaatgctgcccgatggccctgggtcctcgctgtggggcaatccgggcttgcagacgagttttagaaagagcgttttcgctacgtaaagcacattcgataaaggatatggaaaatactttgcagctggtgagaaatatcatacctcctctgtcttccacaaagcacaaagggcaagatggaagaataggcgtagttggaggctgtcaggagtacactggagccccatattttgcagcaatctcagctctcaaagtgggcgcagacttgtcccacgtgttctgtgccagtgcggccgcacctgtgattaaggcctacagcccggagctgatcgtccacccagttcttgacagccccaatgctgttcatgaggtggagaagtggctgccccggctgcatgctcttgtcgtaggacctggcttgggtagagatgatgcgcttctcagaaatgtccagggcattttggaagtgtcaaaggccagggacatccctgttgtcatcgacgcggatggcctgtggctggtcgctcagcagccggccctcatccatggctaccggaaggctgtgctcactcccaaccacgtggagttcagcagactgtatgacgctgtgctcagaggccctatggacagcgatgacagccatggatctgtgctaagactcagccaagccctgggcaacgtgacggtggtccagaaaggagagcgcgacatcctctccaacggccagcaggtgcttgtgtgcagccaggaaggcagcagccgcaggtgtggagggcaaggggacctcctgtcgggctccctgggcgtcctggtacactgggcgctccttgctggaccacagaaaacaaatgggtccagccctctcctggtggccgcgtttggcgcctgctctctcaccaggcagtgcaaccaccaagccttccagaagcacggtgcttgccagattttcaacttgagcataaattggttgccattgagaatttaagaatctggaatattgcagcttttggttaaacttaatgcatggttggagatgttatggcgacactaaacaaagtattcctgaactttccttagctccttggtagtaactgggaagacagaaatgaagaaaatcacatgagaatgaagaattctttagcagctcaacagagtttctcggcctgctcccagatcggcgaagtttctacttgttactctctctgccggcgcccttcgttcctcctctgcttcccttccctagtctttcctccggcagggagctgggcaggggtccccgggtgtctccctgagtcccgactgcactgactgggtccatca

SEQ ID NO: 85308 - protein, 237 aa, Artificial Sequence
  derived and/or modified sequence
MLPDGPGSSLWGNPGLQTSDSPNAVHEVEKWLPRLHALVVGPGLGRDDALLRNVQGILEVSKARDIPVVIDADGLWLVAQQPALIHGYRKAVLTPNHVEFSRLYDAVLRGPMDSDDSHGSVLRLSQALGNVTVVQKGERDILSNGQQVLVCSQEGSSRRCGGQGDLLSGSLGVLVHWALLAGPQKTNGSSPLLVAAFGACSLTRQCNHQAFQKHGRSTTTSDMIAEVGAAFSKLFET

SEQ ID NO: 85309 - DNA, 714 bp, Artificial Sequence
  derived and/or modified sequence
atgctgcccgacggccccggcagcagcctgtggggcaaccccggcctgcagaccagcgacagccccaacgccgtgcacgaggtggagaagtggctgcccagactgcacgccctggtggtgggccccggcctgggcagagacgacgccctgctgagaaacgtgcagggcatcctggaggtgagcaaggccagagacatccccgtggtgatcgacgccgacggcctgtggctggtggcccagcagcccgccctgatccacggctacagaaaggccgtgctgacccccaaccacgtggagttcagcagactgtacgacgccgtgctgagaggccccatggacagcgacgacagccacggcagcgtgctgagactgagccaggccctgggcaacgtgaccgtggtgcagaagggcgagagagacatcctgagcaacggccagcaggtgctggtgtgcagccaggagggcagcagcagaagatgcggcggccagggcgacctgctgagcggcagcctgggcgtgctggtgcactgggccctgctggccggcccccagaagaccaacggcagcagccccctgctggtggccgccttcggcgcctgcagcctgaccagacagtgcaaccaccaggccttccagaagcacggcagaagcaccaccaccagcgacatgatcgccgaggtgggcgccgccttcagcaagctgttcgagacctag

SEQ ID NO: 85310 - DNA, 651 bp, Artificial Sequence
  derived and/or modified sequence
atggccgtgttccccgccaccgccagaggccagctgggcatcagaaacgccgccagatggccctgggtgctggccgtgggccagagcggcctggccgacgagggcatcctggaggtgagcaaggccagagacatccccgtggtgatcgacgccgacggcctgtggctggtggcccagcagcccgccctgatccacggctacagaaaggccgtgctgacccccaaccacgtggagttcagcagactgtacgacgccgtgctgagaggccccatggacagcgacgacagccacggcagcgtgctgagactgagccaggccctgggcaacgtgaccgtggtgcagaagggcgagagagacatcctgagcaacggccagcaggtgctggtgtgcagccaggagggcagcagcagaagatgcggcggccagggcgacctgctgagcggcagcctgggcgtgctggtgcactgggccctgctggccggcccccagaagaccaacggcagcagccccctgctggtggccgccttcggcgcctgcagcctgaccagacagtgcaaccaccaggccttccagaagcacggcagaagcaccaccaccagcgacatgatcgccgaggtgggcgccgccttcagcaagctgttcgagacctag

SEQ ID NO: 85311 - DNA, 714 bp, Artificial Sequence
  derived and/or modified sequence
atgctcccagacggcccaggttcctctctctggggcaacccaggactgcagacttctgactcacccaacgcagtgcacgaggtcgagaagtggctgccccgacttcatgcacttgttgttggcccaggcttgggacgtgacgacgctttgctgcgcaatgtacagggtatcctggaagtcagtaaggctagggacatccccgttgttattgatgccgacggcctctggctggtcgcccagcagcccgctctcatacacggatataggaaagccgtgctgacgccgaaccacgttgaatttagtcggctttacgacgccgtgttgcggggacccatggacagcgacgatagtcatgggagcgttctgcgcctgtcacaggctctggggaatgtgacggtggtccaaaagggcgagcgtgatattctgtccaacgggcaacaggttctcgtctgctcacaggagggcagtagcaggagatgtggtggacaaggggatctgctcagtggctccctcggggtactggtgcattgggcccttctcgccggacctcagaaaactaatggttcctcacccctcctcgtagccgcattcggtgcttgtagccttacccgccagtgcaatcatcaagcattccaaaaacacggccgctctactacaacgagcgacatgatagcggaggtgggagccgcattcagtaaactatttgagacgtag

SEQ ID NO: 85312 - DNA, 651 bp, Artificial Sequence
  derived and/or modified sequence
atggccgtttttcctgctacagcaaggggacagcttggcattagaaacgctgcgagatggccctgggtgctggctgtcggacaatccggactggcagacgaaggcatcctggaagtctccaaagcccgtgacattcccgtagtgatcgacgctgacggcctgtggctcgtggctcaacagcccgctctgattcacggatatcggaaggcagtgctgaccccgaatcacgtagagttctctaggctgtacgacgccgtcctccgcggtcccatggacagcgacgattcccatggaagtgtgctgcgcctttcgcaggcgctcgggaatgttacagtggtacagaaaggtgagcgggacatcctctccaacggacagcaggtactggtttgctctcaggaaggcagcagccggaggtgcggcggccagggagacttgctatcaggcagcctaggggtccttgtccattgggcgctcctggccggaccccaaaagacaaacgggtcaagtccccttctcgtggccgcattcggagcctgttcgctgacgaggcagtgtaatcaccaagcatttcaaaagcacgggaggtctaccacaacctctgacatgatcgctgaggtgggagctgctttttctaaactgttcgagacatag

SEQ ID NO: 85313 - DNA, 714 bp, Artificial Sequence
  derived and/or modified sequence
atgctgcctgatggccctggcagcagcctgtggggcaaccctggcctgcagaccagtgacagccccaatgctgtgcatgaggtggagaagtggctgccccggctgcacgccctggtggtgggccctggcctgggcagagatgatgccctgctgagaaatgtgcagggcatcctggaggtgtccaaggcccgggacatccctgtggtgattgatgctgatggcctgtggctggtggcccagcagcctgccctgatccacggctacaggaaggctgtgctgacccccaaccacgtggagttcagccggctgtatgatgctgtgctgcggggccccatggacagtgatgacagccacggctctgtgctgcggctgagccaggccctgggcaatgtgacagtggtgcagaagggggagcgggacatcctgagcaatggccagcaggtgctggtgtgcagccaggagggcagcagccgccgctgtggcggccagggcgacctgctgagcggcagcctgggcgtgctggtgcactgggccctgctggccggcccccagaagaccaacggcagcagccccctgctggtggccgcctttggagcctgcagcctgacccggcagtgcaaccaccaggccttccagaagcacggccgcagcaccaccaccagtgacatgattgctgaggtgggcgccgccttcagcaagctgtttgagacctag

SEQ ID NO: 85314 - DNA, 651 bp, Artificial Sequence
  derived and/or modified sequence
atggctgtgtttcctgccacagcccggggccagctgggcatcagaaatgctgcccgctggccctgggtgctggccgtgggccagagcggcctggctgatgagggcatcctggaggtgtccaaggcccgggacatccctgtggtgattgatgctgatggcctgtggctggtggcccagcagcctgccctgattcatggctacaggaaggctgtgctgacccccaaccacgtggagttcagccggctgtatgatgctgtgctgcggggccccatggacagtgatgacagccacggctctgtgctgcggctgagccaggccctgggcaatgtgacagtggtgcagaagggggagcgggacatcctgagcaatggccagcaggtgctggtgtgcagccaggagggcagcagcagaagatgtggcggccagggcgacctgctgagcggcagcctgggcgtgctggtgcactgggccctgctggccggcccccagaagaccaacggcagcagccccctgctggtggccgccttcggggcctgcagcctgacccggcagtgcaaccaccaggccttccagaagcacggccgcagcaccaccaccagtgacatgattgctgaggtgggcgccgccttcagcaagctgtttgagacctag

SEQ ID NO: 85315 - DNA, 714 bp, Artificial Sequence
  derived and/or modified sequence
atgctgcccgacggccccggcagcagcctgtggggcaaccccggcctgcaaacctcggattctccaaatgctgttcatgaagttgagaaatggctcccccgactgcatgccctggtcgtcggacctggcctcggccgggacgatgccctacttcggaacgtgcaaggcattttggaagtctccaaggctcgagacatcccggtggttatagatgcggatggtctctggctggtcgcccaacagcctgcacttatccatggttaccggaaagctgtcctgaccccaaaccatgtggaattttctaggctttacgatgcggtgctgcgcggccccatggacagtgacgactcacacggatccgttctgagattgtcacaggccttgggtaacgtgacggttgttcagaagggcgaaagggacatattgtcgaacgggcagcaagtgctggtttgcagtcaggagggaagctccaggaggtgtgggggccagggggacctactgtccggttccctcggcgttttggtccattgggcactgttggcaggaccacagaagaccaatggctcaagtcctctgctcgttgccgcatttggtgcctgctctttaaccaggcagtgtaaccatcaggctttccagaaacacggcaggagtacaaccacctctgacatgatcgctgaggtgggtgcagccttctccaaactgtttgagacgtag

SEQ ID NO: 85316 - DNA, 651 bp, Artificial Sequence
  derived and/or modified sequence
atggccgtgttccccgccaccgcccggggccagctgggcatccggaacgccgcccgatggccatgggtgctggcagtcggccaaagtggcctggccgacgaggggatactggaagtcagtaaggcaagggatattcctgttgttattgacgctgatggattatggctggtagcccagcagcctgctcttattcacgggtatagaaaagcggttcttacccccaaccacgtagaatttagtagactgtatgatgctgttctgcggggtccaatggattcagacgacagccacggctcagtactcagacttagtcaggccctgggaaacgtgactgtcgttcagaaaggtgagcgagacattctgtctaacggtcagcaagtgctggtgtgctcccaagagggtagctccagacgatgcggggggcagggcgatttactctccggctcactgggcgtgctggtgcactgggcactcctggcgggaccccagaagacaaacggctcatccccgctgctggttgccgctttcggggcatgttcacttactcggcagtgcaatcaccaggcgttccagaaacatggtagatctaccacaacctccgatatgatcgcagaagtcggagctgctttttccaaacttttcgagacatag

SEQ ID NO: 85317 - DNA, 714 bp, Artificial Sequence
  derived and/or modified sequence
atgcttcccgacggccctggatcctctctttgggggaacccgggtttgcagaccagtgattcacccaacgcagtgcacgaggtcgagaagtggctgcctcggttacatgcattggtagtaggacccggtctgggccgtgatgatgctctcctgcgaaatgtacagggaatacttgaggtcagcaaggccagagacattccggtggttatagatgccgacggcctgtggctggtagcgcagcaaccagctttaatccacggatataggaaagccgtacttacccccaaccatgtagagttttctcggctgtacgacgcagtgctccggggtccaatggattcagacgattcgcacgggagtgtcttgaggctcagccaggcccttggaaatgttaccgtggtgcaaaagggagaaagagacatactgtctaacggccagcaggtactcgtgtgctcccaggaggggtcttcccgtaggtgcggtgggcagggcgatctgttatcagggtctctgggagtattggtacattgggcgcttctggctggtccacagaagaccaatggttccagtcctctgctggtggctgctttcggcgcttgttcgctgactcggcagtgtaatcaccaggcctttcagaagcatggcagatctactactacctcagacatgatcgcagaggtcggcgcagctttttcaaaactttttgagacatag

SEQ ID NO: 85318 - DNA, 651 bp, Artificial Sequence
  derived and/or modified sequence
atggccgtcttcccagctacagcgcgaggccagctgggtatacgcaatgccgctcggtggccatgggtgttggccgtaggccaaagcggcctcgccgacgaaggtattcttgaggtaagcaaggctagggacattcctgtggtgatcgacgcggacggactatggctcgtggcccagcaaccagccttgattcatgggtaccggaaagctgtattgacccccaaccacgtcgaattcagccgactgtacgacgccgtcctgagggggcctatggacagcgacgacagtcacggatctgtcttaaggctgtcacaggcactgggaaacgtgaccgttgtccagaagggtgagcgggacatccttagcaatggccagcaagttctcgtttgctcacaggagggaagttccagacgctgcggaggccagggtgaccttctgagcggcagtcttggagtgcttgtgcattgggcactccttgccggtccccaaaagaccaacggatcaagcccactgcttgtggctgcgttcggcgcttgttctctgaccaggcaatgtaaccaccaggcttttcaaaagcatggccgatcgactactacgagcgacatgattgcagaggtcggggctgccttttccaagcttttcgagacatag

SEQ ID NO: 85319 - DNA, 1308 bp, Artificial Sequence
  derived and/or modified sequence
gcagctgggaatccggaatgctgcccgatggccctgggtcctcgctgtggggcaatccgggcttgcagacgagtgacagccccaatgctgttcatgaggtggagaagtggctgccccggctgcatgctcttgtcgtaggacctggcttgggtagagatgatgcgcttctcagaaatgtccagggcattttggaagtgtcaaaggccagggacatccctgttgtcatcgacgcggatggcctgtggctggtcgctcagcagccggccctcatccatggctaccggaaggctgtgctcactcccaaccacgtggagttcagcagactgtatgacgctgtgctcagaggccctatggacagcgatgacagccatggatctgtgctaagactcagccaagccctgggcaacgtgacggtggtccagaaaggagagcgcgacatcctctccaacggccagcaggtgcttgtgtgcagccaggaaggcagcagccgcaggtgtggagggcaaggggacctcctgtcgggctccctgggcgtcctggtacactgggcgctccttgctggaccacagaaaacaaatgggtccagccctctcctggtggccgcgtttggcgcctgctctctcaccaggcagtgcaaccaccaagccttccagaagcacggtcgctccaccaccacctccgacatgatcgccgaggtgggggccgccttcagcaagctctttgaaacctgagcccgcgcagaccagaagtaaacaggcaccttggacgggggagagcgtgtgtgtgatgggaaaatccggacccacgcgtgtgctgaaggcgtacggtgcttgccagattttcaacttgagcataaattggttgccattgagaatttaagaatctggaatattgcagcttttggttaaacttaatgcatggttggagatgttatggcgacactaaacaaagtattcctgaactttccttagctccttggtagtaactgggaagacagaaatgaagaaaatcacatgagaatgaagaattctttagcagctcaacagagtttctcggcctgctcccagatcggcgaagtttctacttgttactctctctgccggcgcccttcgttcctcctctgcttcccttccctagtctttcctccggcagggagctgggcaggggtccccgggtgtctccctgagtcccgactgcactgactgggtccatcagagggctgcttcgttctccagctcatcttcttttaaagtggtgactagcttggtggtatctggctgctggtgtttggcttattgacatactcca

SEQ ID NO: 85320 - DNA, 1330 bp, Artificial Sequence
  derived and/or modified sequence
aaaacgcttccaatggctgtgtttccggcgacggcgcgggggcagctgggaatccggaatgctgcccgatggccctgggtcctcgctgtggggcaatccgggcttgcagacgagggcattttggaagtgtcaaaggccagggacatccctgttgtcatcgacgcggatggcctgtggctggtcgctcagcagccggccctcatccatggctaccggaaggctgtgctcactcccaaccacgtggagttcagcagactgtatgacgctgtgctcagaggccctatggacagcgatgacagccatggatctgtgctaagactcagccaagccctgggcaacgtgacggtggtccagaaaggagagcgcgacatcctctccaacggccagcaggtgcttgtgtgcagccaggaaggcagcagccgcaggtgtggagggcaaggggacctcctgtcgggctccctgggcgtcctggtacactgggcgctccttgctggaccacagaaaacaaatgggtccagccctctcctggtggccgcgtttggcgcctgctctctcaccaggcagtgcaaccaccaagccttccagaagcacggtcgctccaccaccacctccgacatgatcgccgaggtgggggccgccttcagcaagctctttgaaacctgagcccgcgcagaccagaagtaaacaggcaccttggacgggggagagcgtgtgtgtgatgggaaaatccggacccacgcgtgtgctgaaggcgtacggtgcttgccagattttcaacttgagcataaattggttgccattgagaatttaagaatctggaatattgcagcttttggttaaacttaatgcatggttggagatgttatggcgacactaaacaaagtattcctgaactttccttagctccttggtagtaactgggaagacagaaatgaagaaaatcacatgagaatgaagaattctttagcagctcaacagagtttctcggcctgctcccagatcggcgaagtttctacttgttactctctctgccggcgcccttcgttcctcctctgcttcccttccctagtctttcctccggcagggagctgggcaggggtccccgggtgtctccctgagtcccgactgcactgactgggtccatcagagggctgcttcgttctccagctcatcttcttttaaagtggtgactagcttggtggtatctggctgctggtgtttggcttattgacatactccagggtaatcaatgatgactttgtttggaaacccttttggaggcaccatgggaacagaaggaaacatgagtgacgctgacccttgagtgtgt

SEQ ID NO: 85321 - protein, 402 aa, Artificial Sequence
  derived and/or modified sequence
MNASEFRRRGKEMVDYMANYMEGIEGRQVYPDVEPGYLRPLIPAAAPQEPDTFEDIINDVEKIIMPGGSASEATLVALLAARTKVIHRLQAASPELTQAAIMEKLVAYSSDQAHSSVERAGLIGGVKLKAIPSDGNFAMRASALQEALERDKAAGLIPFFMVATLGTTTCCSFDNLLEVGPICNKEDIWLHVDAAYAGSAFICPEFRHLLNGVEFADSFNFNPHKWLLVNFDCSAMWVKKRTDLTGAFRLDPTYLKHSHQDSGLITDYRHWQIPLGRRFRSLKMWFVFRMYGVKGLQAYIRKHVQLSHEFESLVRQDPRFEICVEVILGLVCFRLKGSNKVNEALLQRINSAKKIHLVPCHLRDKFVLRFAICSRTVESAHVQRAWEHIKELAADVLRAERE

SEQ ID NO: 85322 - DNA, 1209 bp, Artificial Sequence
  derived and/or modified sequence
atgaacgcaagcgagtttaggagaaggggtaaagagatggttgattacatggccaattatatggaaggaattgaggggagacaagtataccctgatgtggaaccgggctacctgcgtccgctcatcccggcagccgcccctcaggagcccgatactttcgaggacattatcaatgatgtggagaagatcattatgcctgggggatctgcctcggaagccacccttgtggcactcttagcggccaggaccaaggtgatacacagacttcaggcagcttcccccgagttgacacaggccgctataatggagaaacttgttgcttactcctccgatcaggcccacagtagcgtcgaacgggcaggcctcataggaggtgttaaactgaaggctattccctctgacggcaactttgccatgcgcgctagcgctctgcaggaggctcttgaaagggacaaggcggccgggttgattcccttcttcatggtcgctaccctggggacaaccacttgttgttccttcgataatctattagaggtaggcccgatatgtaataaagaagatatctggctccacgtggacgccgcgtatgcgggctctgccttcatctgcccagagttcaggcacctgctgaacggagtggagtttgcggattctttcaatttcaaccctcataaatggcttctagtgaacttcgattgctccgcgatgtgggtgaaaaaaaggacagacttgaccggcgcctttcgactggacccaacatatctgaagcattcccaccaagatagcggcctgatcacagattacaggcactggcagatccccctggggcgccgatttagaagcttgaaaatgtggtttgtgttcaggatgtatggagtgaaaggactgcaggcctatattaggaagcatgtccaactgtcccacgagtttgagtctctggtgagacaagatccacgatttgagatctgtgtggaagtgatcctggggttagtgtgttttcgacttaaagggtccaataaagttaacgaagcactcctccagaggatcaatagcgccaaaaagatccatttagttccctgtcatttgagggacaaattcgtcctacgctttgcaatctgcagtagaacagtggagtcagcgcacgtgcagcgggcctgggaacacataaaagagctggcggcagacgttctgagagcagagcgggaatag

SEQ ID NO: 85323 - DNA, 1209 bp, Artificial Sequence
  derived and/or modified sequence
atgaatgccagcgagttcagaagaagaggcaaggagatggtggactacatggccaactacatggagggcatcgagggccggcaggtgtacccagatgtggagcccggctacctgcggcccctcatcccagctgctgccccccaggagccagacacctttgaggacatcatcaatgatgtggagaagatcatcatgcctgggggcagcgccagcgaggccaccctggtggccctgctggccgcccggaccaaggtgatccaccggctgcaggccgccagccctgagctgacccaggccgccatcatggagaagctggtggcctacagcagtgaccaggcccacagctctgtggagcgggccggcctgattggaggagtgaagctgaaggccatccccagtgatggcaactttgccatgagggccagcgccctgcaggaggccctggagcgggacaaggccgccggcctcatccccttcttcatggtggccaccctgggcaccaccacctgctgcagctttgacaacctgctggaggtgggccccatctgcaacaaggaggacatctggctgcacgtggatgctgcctatgccggcagcgccttcatctgcccagagttccgccacctgctgaatggagtggagtttgctgacagcttcaacttcaacccccacaagtggctgctggtgaactttgactgcagcgccatgtgggtgaagaagaggacagacctgactggagccttccggctggaccccacctacctgaagcacagccaccaggacagcggcctcatcacagactaccgccactggcagatccccctgggccgccgcttccgcagcctgaagatgtggtttgtgttcaggatgtatggagtgaagggcctgcaggcctacatcaggaagcacgtgcagctgagccatgaatttgagagcctggtgcggcaggaccccaggtttgagatctgtgtggaggtgatcctgggcctggtgtgcttccggctgaagggcagcaacaaggtgaatgaggccctgctgcagaggatcaacagcgccaagaagatccacctggtgccctgccacctgcgggacaagtttgtgctgcgctttgccatctgcagcaggacagtggagagcgcccacgtgcagagggcctgggagcacatcaaggagctggccgcagatgtgctgcgggcagagcgggagtag

SEQ ID NO: 85324 - DNA, 1209 bp, Artificial Sequence
  derived and/or modified sequence
atgaacgccagcgagttccggcggcggggcaaggagatggtggactacatggcgaactacatggaaggcattgagggacgtcaagtgtacccagatgtcgagcctggatatctgcgccctctcattcctgctgctgccccccaggaaccggatacgtttgaagacataataaatgatgtcgagaaaattatcatgcctggggggagtgcgtccgaagctaccctggtcgccctgcttgctgcacgtactaaagtcatccatcgccttcaggcagcgtcaccagaactgacgcaggccgcaattatggagaagttggtcgcctatagttctgatcaagcacatagttcagtcgagagggcggggcttatcggaggggtgaagctaaaggctattcctagtgatggaaactttgcgatgcgcgctagcgccctacaagaggccctggaacgggacaaggcagctggcctgatcccattcttcatggtggcgactctagggactaccacctgttgcagtttcgacaatctattggaagttggacccatatgtaataaagaggacatttggctgcacgtggatgccgcttatgccgggtccgccttcatttgcccagaattcagacatcttctcaatggcgttgaatttgccgattccttcaattttaaccctcataagtggctcctggtcaatttcgattgcagcgccatgtgggtgaagaagcgcacagacttgaccggagccttccggctggatcccacctacctcaagcactcacatcaggacagtggcttaatcactgactaccggcactggcagatacccctggggaggcgcttccgcagcctgaagatgtggtttgtttttaggatgtacggggtcaaaggacttcaggcttacatccggaagcatgtgcagctcagccatgaatttgaaagcctggtgagacaggacccacgatttgagatatgcgtggaggtgatcctcggactggtctgtttccgcctcaaagggagcaataaagtgaatgaggccctgctgcaaaggatcaactccgcgaaaaaaattcatttagtgccttgtcacctccgcgacaaatttgtattgcggttcgcaatctgttcccgtacagttgaaagcgctcacgtacagcgggcatgggaacacataaaagagctcgccgcagacgtactgcgcgccgaaagggagtag

SEQ ID NO: 85325 - DNA, 1209 bp, Artificial Sequence
  derived and/or modified sequence
atgaatgcctccgagtttagacgacgcggaaaagagatggtagactacatggcaaactatatggaaggaatcgaaggacggcaggtgtatccagacgttgagcccggatatttgaggcctctcatccccgctgctgcccctcaggaacctgacacctttgaggacatcataaacgatgtggaaaaaatcattatgccaggcggttccgctagcgaagctacgctcgttgccttgctcgcagctaggacgaaggtgatccaccggctgcaggctgcttcacccgagttgacacaggcagccatcatggagaagctagtggcgtacagctcagatcaggcccactcctccgttgagagggccggactgataggaggagtgaagctgaaagcaattccaagcgacgggaatttcgccatgagagcatcagccttgcaggaggcgctcgaaagagataaggcagccggactcattccattttttatggtagccactttgggcaccacaacttgctgcagctttgacaacctgctggaggtcggaccaatctgcaacaaggaggacatttggttacacgtggacgcagcgtatgccggatcagcctttatctgcccagagtttcgtcacctgctcaatggcgtggaatttgctgattccttcaactttaacccccacaagtggctgctggtcaatttcgattgctcagcaatgtgggtcaaaaaaagaaccgatctaaccggcgctttcagactcgaccctacatatctcaaacacagccatcaggacagcgggttgatcaccgactaccggcactggcagatcccattaggaaggcggttccgcagtctgaaaatgtggttcgtcttccgtatgtatggagttaaaggcctgcaggcgtatatccggaagcatgtacagttgagccatgagttcgagtccctggtccggcaggatccacgcttcgaaatttgcgtggaggtcatacttggcctggtgtgttttcggctgaaggggagcaataaggtaaatgaagccttacttcaaagaataaattctgctaagaaaatccatctcgtgccctgccacttaagagataagttcgtgcttagattcgctatttgctctaggactgttgaatccgcacacgtgcagagagcctgggaacatataaaggaattagcagctgacgtcctcagagctgagcgcgagtag

SEQ ID NO: 85326 - DNA, 1209 bp, Artificial Sequence
  derived and/or modified sequence
atgaacgccagcgagttcagaagaagaggcaaggagatggtggactacatggccaactacatggagggcatcgagggcagacaggtgtaccccgacgtggagcccggctacctgagacccctgatccccgccgccgccccccaggagcccgacaccttcgaggacatcatcaacgacgtggagaagatcatcatgcccggcggcagcgccagcgaggccaccctggtggccctgctggccgccagaaccaaggtgatccacagactgcaggccgccagccccgagctgacccaggccgccatcatggagaagctggtggcctacagcagcgaccaggcccacagcagcgtggagagagccggcctgatcggcggcgtgaagctgaaggccatccccagcgacggcaacttcgccatgagagccagcgccctgcaggaggccctggagagagacaaggccgccggcctgatccccttcttcatggtggccaccctgggcaccaccacctgctgcagcttcgacaacctgctggaggtgggccccatctgcaacaaggaggacatctggctgcacgtggacgccgcctacgccggcagcgccttcatctgccccgagttcagacacctgctgaacggcgtggagttcgccgacagcttcaacttcaacccccacaagtggctgctggtgaacttcgactgcagcgccatgtgggtgaagaagagaaccgacctgaccggcgccttcagactggaccccacctacctgaagcacagccaccaggacagcggcctgatcaccgactacagacactggcagatccccctgggcagaagattcagaagcctgaagatgtggttcgtgttcagaatgtacggcgtgaagggcctgcaggcctacatcagaaagcacgtgcagctgagccacgagttcgagagcctggtgagacaggaccccagattcgagatctgcgtggaggtgatcctgggcctggtgtgcttcagactgaagggcagcaacaaggtgaacgaggccctgctgcagagaatcaacagcgccaagaagatccacctggtgccctgccacctgagagacaagttcgtgctgagattcgccatctgcagcagaaccgtggagagcgcccacgtgcagagagcctgggagcacatcaaggagctggccgccgacgtgctgagagccgagagagagtag

SEQ ID NO: 85327 - DNA, 1700 bp, Artificial Sequence
  derived and/or modified sequence
ggagagagagaggacagagagcaagtcactcccggctgcctttttcacctctgacagagcccagacaccatgaacgcaagtgaattccgaaggagagggaaggagatggtggattacatggccaactacatggaaggcattgagggacgccaggtctaccctgacgtggagcccgggtacctgcggccgctgatccctgccgctgcccctcaggagccagacacgtttgaggacatcatcaacgacgttgagaagataatcatgcctgggggaagtgccagtgaagccaccctggtggccctgctggccgctcggaccaaagtgatccatcggctgcaggcagcgtccccagagctcacacaggccgctatcatggagaagctggtggcttactcatccgatcaggcacactcctcagtggaaagagctgggttaattggtggagtgaaattaaaagccatcccctcagatggcaacttcgccatgcgtgcgtctgccctgcaggaagccctggagagagacaaagcggctggcctgattcctttctttatggttgccaccctggggaccacaacatgctgctcctttgacaatctcttagaagtcggtcctatctgcaacaaggaagacatatggctgcacgttgatgcagcctacgcaggcagtgcattcatctgccctgagttccggcaccttctgaatggagtggagtttgcagattcattcaactttaatccccacaaatggctattggtgaattttgactgttctgccatgtgggtgaaaaagagaacagacttaacgggagcctttagactggaccccacttacctgaagcacagccatcaggattcagggcttatcactgactaccggcattggcagataccactgggcagaagatttcgctctttgaaaatgtggtttgtatttaggatgtatggagtcaaaggactgcaggcttatatccgcaagcatgtccagctgtcccatgagtttgagtcactggtgcgccaggatccccgctttgaaatctgtgtggaagtcattctggggcttgtctgctttcggctaaagggttccaacaaagtgaatgaagctcttctgcaaagaataaacagtgccaaaaaaatccacttggttccatgtcacctcagggacaagtttgtcctgcgctttgccatctgttctcgcacggtggaatctgcccatgtgcagcgggcctgggaacacatcaaagagctggcggccgacgtgctgcgagcagagagggagtaggagtgaagccagctgcaggaatcaaaaattgaagagagatatatctgaaaactggaataagaagcaaataaatatcatcctgccttcatggaactcagctgtctgtggcttcccatgtctttctccaaagttatccagagggttgtgattttgtctgcttagtatctcatcaacaaagaaatattatttgctaattaaaaagttaatcttcatggccatagcttttattcattagctgtgatttttgttgattaaaacattatagattttcatgttcttgcagtcatcagaagtggtaggaaagcctcactgatatattttccagggcaatcaatgttcacgcaacttgaaattatatctgtggtcttcaaattgtcttttgtcatgtggctaaatgcctaataaacaattcaagtgaaata

SEQ ID NO: 85328 - protein, 387 aa, Artificial Sequence
  derived and/or modified sequence
MNASEFRRRGKEMVDYMANYMEGIEGRQVYPDVEPGYLRPLIPAAAPQEPDTFEDIINDVEKIIMPGVTHWHSPYFFAYFPTASSYPAMLADMLCGAIGCIGFSWAASPACTELETVMMDWLGKMLELPKAFLNEKAGEGGGVIQMVATLGTTTCCSFDNLLEVGPICNKEDIWLHVDAAYAGSAFICPEFRHLLNGVEFADSFNFNPHKWLLVNFDCSAMWVKKRTDLTGAFRLDPTYLKHSHQDSGLITDYRHWQIPLGRRFRSLKMWFVFRMYGVKGLQAYIRKHVQLSHEFESLVRQDPRFEICVEVILGLVCFRLKGSNKVNEALLQRINSAKKIHLVPCHLRDKFVLRFAICSRTVESAHVQRAWEHIKELAADVLRAERE

SEQ ID NO: 85329 - DNA, 1164 bp, Artificial Sequence
  derived and/or modified sequence
atgaatgcgagcgaattccgccgcaggggcaaggagatggtggactacatggctaactacatggagggcatcgagggccgtcaagtttacccagatgtggaaccaggttacctaaggcctttaattccggcagccgcaccccaggaacccgacaccttcgaggacattatcaatgacgttgagaaaatcattatgcccggagtaacacactggcactcaccttacttttttgcctacttccctaccgcctcctcctaccccgccatgttagctgacatgctgtgtggcgccatcggctgcattggattttcttgggcagcctccccagcatgcacagagctagagaccgtaatgatggattggctggggaaaatgttggaacttcctaaggcctttctcaacgagaaggccggtgaggggggcggtgttatccagatggttgccaccctggggactacaacatgctgcagctttgacaatctgctcgaggtgggccccatctgtaataaggaagatatttggctgcatgtggacgccgcctacgctggaagtgccttcatatgccccgagttccgtcacctgctgaatggagtagagttcgcagactcatttaattttaatccacataagtggctgttggtcaactttgactgctccgccatgtgggtgaagaagcgcacagacctcaccggagcctttagactagacccaacatatctcaaacacagccatcaagactctggcctgatcactgattataggcactggcagatccccctcggacggaggttcagatcactaaagatgtggtttgtgtttcgcatgtatggcgttaagggtttgcaggcctacatcagaaagcatgtgcagctgtcccatgagtttgagtctctggttcggcaggaccccagattcgagatttgtgtcgaggtcatcctggggctagtgtgcttcagattgaagggtagcaacaaagtgaacgaggctctcctgcaaagaataaactcagctaaaaaaattcatttagtcccttgtcatttaagggacaaattcgtgctgcggtttgctatctgttcgcgcaccgtggaatccgcacacgtgcagagggcatgggagcatatcaaagagctggctgccgacgtactgcgcgccgagagagagtag

SEQ ID NO: 85330 - DNA, 1164 bp, Artificial Sequence
  derived and/or modified sequence
atgaatgccagcgagttcagaagaagaggcaaggagatggtggactacatggccaactacatggagggcatcgagggccggcaggtgtacccagatgtggagcccggctacctgcggcccctcatcccagctgctgccccccaggagccagacacctttgaggacatcatcaatgatgtggagaagatcatcatgcctggggtgacccactggcacagcccctacttctttgcctacttccccacagccagcagctacccagccatgctggccgacatgctgtgtggggccatcggctgcatcggcttctcctgggccgccagccctgcctgcacagagctggagaccgtgatgatggactggctgggcaagatgctggagctgcccaaggccttcctgaatgagaaggccggggagggcggcggcgtcatccagatggtggccaccctgggcaccaccacctgctgcagctttgacaacctgctggaggtgggccccatctgcaacaaggaggacatctggctgcacgtggatgctgcctatgccggcagcgccttcatctgcccagagttccgccacctgctgaatggagtggagtttgctgacagcttcaacttcaacccccacaagtggctgctggtgaactttgactgcagcgccatgtgggtgaagaagaggacagacctgaccggggccttccggctggaccccacctacctgaagcacagccaccaggacagcggcctcatcacagactaccgccactggcagatccccctgggccgccgcttccgcagcctgaagatgtggtttgtgttcaggatgtatggagtgaagggcctgcaggcctacatcaggaagcacgtgcagctgagccatgaatttgagagcctggtgcggcaggaccccaggtttgagatctgtgtggaggtgatcctgggcctggtgtgcttccggctgaagggcagcaacaaggtgaatgaggccctgctgcagaggatcaacagcgccaagaagatccacctggtgccctgccacctgcgggacaagtttgtgctgcgctttgccatctgcagcaggacagtggagagcgcccacgtgcagagggcctgggagcacatcaaggagctggccgcagatgtgctgcgggcagagcgggagtag

SEQ ID NO: 85331 - DNA, 1164 bp, Artificial Sequence
  derived and/or modified sequence
atgaacgccagcgagttccggcggcggggcaaggagatggtggactacatggcaaattatatggagggaattgagggaaggcaagtgtaccccgacgtagagcctggctatctgcgccccctaatccctgccgctgcacctcaggaacctgatacattcgaagatattatcaacgacgtcgaaaagataatcatgccaggggtgactcattggcactctccatacttcttcgcatacttccccaccgctagctcttatcccgccatgctagccgacatgctctgtggagcaatcggatgtattggattcagctgggctgcttcacccgcgtgtacagagctggaaacagtaatgatggattggctcgggaaaatgctggaactgccaaaggccttcttgaacgaaaaagccggtgaggggggcggagtcatccagatggtagctacgctgggtacaactacgtgctgctccttcgacaacctgttggaagtgggcccgatatgtaataaagaagacatctggctccacgtggatgcggcctatgctggctccgccttcatctgtcctgaatttcgtcatctcctgaacggcgtggagtttgccgattccttcaattttaatccccacaaatggcttcttgttaactttgattgctcggcaatgtgggtgaaaaagcgtaccgatctcacaggggcattcagactggacccaacttatctcaaacatagccatcaggactccggattgatcacagattaccggcattggcagatccccctaggcaggcgctttcgaagtctgaagatgtggtttgtcttccggatgtatggggtgaaggggctgcaagcctacattcggaagcacgtccaactgtcacatgaattcgagtccttggttcgacaggatcccagatttgagatttgcgtcgaggttattctcgggctggtgtgctttaggctgaaagggtcaaacaaagtgaatgaggccttactgcagagaattaacagcgctaaaaagatacacctggtcccatgtcacctgagggacaaattcgtgctgcgttttgctatctgctctcggaccgtggaaagcgcacatgtccagcgggcctgggaacacattaaggaactcgccgccgacgttctgcgcgcagagcgggaatag

SEQ ID NO: 85332 - DNA, 1164 bp, Artificial Sequence
  derived and/or modified sequence
atgaatgcatctgaatttcgacgcaggggcaaagaaatggttgattacatggcaaattatatggaggggatcgaaggcaggcaagtttatcccgatgtggaacctggctatctacggcctctgatcccagctgctgccccacaagaacccgacacttttgaggacatcataaacgacgtcgagaaaatcataatgcccggagtaacacactggcacagcccatattttttcgcctattttccaaccgcttcatcgtatcccgcaatgctggccgatatgctgtgtggtgctatcggctgcatcggctttagctgggcagcatcccccgcatgcacagagctcgagacagtgatgatggactggttagggaagatgctcgagcttccgaaagcctttttgaacgagaaggccggtgaaggcggtggcgtgatccagatggtggccacgctagggaccactacatgttgctccttcgataatctcttggaggtaggcccaatctgtaacaaggaagacatctggttgcacgtagacgcagcttacgcaggctctgccttcatctgtcccgaatttcggcacctgctcaatggcgtggagttcgctgattcctttaatttcaaccctcacaaatggcttctcgttaacttcgattgttccgccatgtgggtgaaaaagcggaccgaccttaccggcgcttttcgcctagacccaacctacctcaaacattcccaccaggactctggattgatcactgactatcgccattggcagatccctctggggcgacggttccggtccttgaagatgtggttcgtatttagaatgtatggcgtgaaggggctccaggcttatataagaaagcacgttcagctgtcacatgagttcgagagtctggttcggcaagatccacgctttgaaatctgtgttgaggtgatattgggcctggtgtgtttccgcctcaaaggctccaataaggtgaatgaggccctgctccagaggattaattctgccaaaaagattcacttggtaccatgtcatctgagagataagtttgtgctccggttcgcgatctgcagtaggaccgtcgaaagcgctcatgtacagcgcgcatgggagcatatcaaagagttagccgctgacgtgcttagagccgagcgcgaatag

SEQ ID NO: 85333 - DNA, 1164 bp, Artificial Sequence
  derived and/or modified sequence
atgaacgccagcgagttcagaagaagaggcaaggagatggtggactacatggccaactacatggagggcatcgagggcagacaggtgtaccccgacgtggagcccggctacctgagacccctgatccccgccgccgccccccaggagcccgacaccttcgaggacatcatcaacgacgtggagaagatcatcatgcccggcgtgacccactggcacagcccctacttcttcgcctacttccccaccgccagcagctaccccgccatgctggccgacatgctgtgcggcgccatcggctgcatcggcttcagctgggccgccagccccgcctgcaccgagctggagaccgtgatgatggactggctgggcaagatgctggagctgcccaaggccttcctgaacgagaaggccggcgagggcggcggcgtgatccagatggtggccaccctgggcaccaccacctgctgcagcttcgacaacctgctggaggtgggccccatctgcaacaaggaggacatctggctgcacgtggacgccgcctacgccggcagcgccttcatctgccccgagttcagacacctgctgaacggcgtggagttcgccgacagcttcaacttcaacccccacaagtggctgctggtgaacttcgactgcagcgccatgtgggtgaagaagagaaccgacctgaccggcgccttcagactggaccccacctacctgaagcacagccaccaggacagcggcctgatcaccgactacagacactggcagatccccctgggcagaagattcagaagcctgaagatgtggttcgtgttcagaatgtacggcgtgaagggcctgcaggcctacatcagaaagcacgtgcagctgagccacgagttcgagagcctggtgagacaggaccccagattcgagatctgcgtggaggtgatcctgggcctggtgtgcttcagactgaagggcagcaacaaggtgaacgaggccctgctgcagagaatcaacagcgccaagaagatccacctggtgccctgccacctgagagacaagttcgtgctgagattcgccatctgcagcagaaccgtggagagcgcccacgtgcagagagcctgggagcacatcaaggagctggccgccgacgtgctgagagccgagagagagtag

SEQ ID NO: 85334 - DNA, 1620 bp, Artificial Sequence
  derived and/or modified sequence
ctgcagttttcacctctgacagagcccagacaccatgaacgcaagtgaattccgaaggagagggaaggagatggtggattacatggccaactacatggaaggcattgagggacgccaggtctaccctgacgtggagcccgggtacctgcggccgctgatccctgccgctgcccctcaggagccagacacgtttgaggacatcatcaacgacgttgagaagataatcatgcctggggtgacgcactggcacagcccctacttcttcgcctacttccccactgccagctcgtacccggccatgcttgcggacatgctgtgcggggccattggctgcatcggcttctcctgggcggcaagcccagcatgcacagagctggagactgtgatgatggactggctcgggaagatgctggaactaccaaaggcatttttgaatgagaaagctggagaagggggaggagtgatccagatggttgccaccctggggaccacaacatgctgctcctttgacaatctcttagaagtcggtcctatctgcaacaaggaagacatatggctgcacgttgatgcagcctacgcaggcagtgcattcatctgccctgagttccggcaccttctgaatggagtggagtttgcagattcattcaactttaatccccacaaatggctattggtgaattttgactgttctgccatgtgggtgaaaaagagaacagacttaacgggagcctttagactggaccccacttacctgaagcacagccatcaggattcagggcttatcactgactaccggcattggcagataccactgggcagaagatttcgctctttgaaaatgtggtttgtatttaggatgtatggagtcaaaggactgcaggcttatatccgcaagcatgtccagctgtcccatgagtttgagtcactggtgcgccaggatccccgctttgaaatctgtgtggaagtcattctggggcttgtctgctttcggctaaagggttccaacaaagtgaatgaagctcttctgcaaagaataaacagtgccaaaaaaatccacttggttccatgtcacctcagggacaagtttgtcctgcgctttgccatctgttctcgcacggtggaatctgcccatgtgcagcgggcctgggaacacatcaaagagctggcggccgacgtgctgcgagcagagagggagtaggagtgaagccagctgcaggaatcaaaaattgaagagagatatatctgaaaactggaataagaagcaaataaatatcatcctgccttcatggaactcagctgtctgtggcttcccatgtctttctccaaagttatccagagggttgtgattttgtctgcttagtatctcatcaacaaagaaatattatttgctaattaaaaagttaatcttcatggccatagcttttattcattagctgtgatttttgttgattaaaacattatagattttcatgttcttgcagtcatcagaagtggtaggaaagcctcactgatatattttccagggcaatcaatgttcacgcaacttgaaattatatctgtggtcttcaaattgtcttttgtcatgtggctaaatgcctaataaacaattcaagtgaaata

SEQ ID NO: 85335 - protein, 16 aa, Artificial Sequence
  derived and/or modified sequence
MNASEFRRRGKEMVDY

SEQ ID NO: 85336 - protein, 338 aa, Artificial Sequence
  derived and/or modified sequence
MNASEFRRRGKEMVDYMANYMEGIEGRQVYPDVEPGYLRPLIPAAAPQEPDTFEDIINDVEKIIMPGVTHWHSPYFFAYFPTASSYPAMLADMLCGAIGCIGFSWAASPACTELETVMMDWLGKMLELPKAFLNEKAGEGGGVIQGSASEATLVALLAARTKVIHRLQAASPELTQAAIMEKLVAYSSDQAHSSVERAGLIGGVKLKAIPSDGNFAMRASALQEALERDKAAGLIPFFMVATLGTTTCCSFDNLLEVGPICNKEDIWLHVDAAYAGSAFICPEFRHLLNGVEFADSFNFNPHKWLLVNFDCSAMWSRQPVRMLRLKKTCLVSAVVRRS

SEQ ID NO: 85337 - DNA, 1017 bp, Artificial Sequence
  derived and/or modified sequence
atgaatgcttccgaattccgccgaagaggaaaagaaatggtcgactacatggccaactacatggaagggatagaggggcggcaagtgtaccctgatgttgagccaggataccttcgcccgctgatcccagccgcagccccacaggagccagacactttcgaagacatcatcaatgatgtcgaaaaaatcatcatgcccggcgtaacacattggcattctccctacttcttcgcctactttcctactgcatccagctaccctgccatgttagccgacatgctttgcggagctattggttgcatcggcttttcgtgggcagctagtcctgcctgcactgagttagaaaccgtcatgatggactggctgggcaagatgttggagctacctaaagcttttctgaatgagaaggctggagaaggcgggggcgtgatacagggctccgcctcagaagctaccctggtggccctgttggccgcacgaaccaaggtcattcatcgcctacaggccgccagtcctgaattaacccaggccgcaatcatggagaagctcgttgcttattcatctgatcaggctcacagctccgtcgaacgggctgggcttattggcggcgtcaagctgaaagcgatcccctctgatggcaatttcgctatgagggcctctgccctgcaggaggcactcgaaagagataaggctgccgggctcataccctttttcatggttgccacattaggcacaactacttgctgctcctttgataatttgttagaggtcggacccatttgtaataaagaggatatttggttacacgtggatgctgcatacgccggatctgcctttatttgtccagaatttcgtcatctgttgaacggtgtggagtttgcggactctttcaatttcaatccccataagtggctcctagtgaacttcgattgtagtgcaatgtggtcccggcagccagtgagaatgctgcgtctaaagaagacctgcctggtgagtgcagtcgtccgccggtcctag

SEQ ID NO: 85338 - DNA, 1017 bp, Artificial Sequence
  derived and/or modified sequence
atgaatgccagcgagttcagaagaagaggcaaggagatggtggactacatggccaactacatggagggcatcgagggccggcaggtgtacccagatgtggagcccggctacctgcggcccctcatcccagctgctgccccccaggagccagacacctttgaggacatcatcaatgatgtggagaagatcatcatgcctggggtgacccactggcacagcccctacttctttgcctacttccccacagccagcagctacccagccatgctggccgacatgctgtgtggggccatcggctgcatcggcttctcctgggccgccagccctgcctgcacagagctggagaccgtgatgatggactggctgggcaagatgctggagctgcccaaggccttcctgaatgagaaggccggggagggcggcggcgtcatccagggcagcgccagcgaggccaccctggtggccctgctggccgcccggaccaaggtgatccaccggctgcaggccgccagccctgagctgacccaggccgccatcatggagaagctggtggcctacagcagtgaccaggcccacagctctgtggagcgggccggcctgattggaggagtgaagctgaaggccatccccagtgatggcaactttgccatgagggccagcgccctgcaggaggccctggagcgggacaaggccgccggcctcatccccttcttcatggtggccaccctgggcaccaccacctgctgcagctttgacaacctgctggaggtgggccccatctgcaacaaggaggacatctggctgcacgtggatgctgcctatgccggcagcgccttcatctgcccagagttccgccacctgctgaatggagtggagtttgctgacagcttcaacttcaacccccacaagtggctgctggtgaactttgactgcagcgccatgtggagccggcagcctgtgaggatgctgcggctgaagaagacctgcctggtgtctgctgtggtgcggcgctcctag

SEQ ID NO: 85339 - DNA, 1017 bp, Artificial Sequence
  derived and/or modified sequence
atgaacgccagcgagttccggcggcggggcaaggagatggtggactatatggcaaactacatggagggaattgagggacgacaggtgtatcctgacgttgagccaggatatctgagacctctgatacctgcggctgcgccccaggagccagacacctttgaagatattatcaatgacgtcgagaaaattatcatgccaggggtcactcattggcattccccatatttcttcgcctactttcccactgcatcgtcctacccggccatgttagccgacatgctctgcggggcaattggctgcatcggcttcagctgggctgcgtcccctgcctgtaccgaacttgagaccgtgatgatggattggctcgggaagatgctggaattgccaaaagctttcctcaacgaaaaagccggcgaaggcggaggggtgattcagggttccgcgtcagaggctacgctcgttgctttactggccgcacgtaccaaggtgattcaccgcctccaggctgcctctccagaactgacccaggcagccatcatggagaagttggtagcatattcttcagaccaggctcatagttccgttgaacgagcaggccttatcggaggtgtcaagctgaaggcgattccctccgacgggaacttcgctatgagggcatccgccctgcaggaggctttggagagagacaaagccgccggccttattccatttttcatggttgcgacgctcggtacaaccacctgttgcagtttcgacaacctgctcgaagtggggccaatatgtaacaaagaagacatctggctgcacgtagatgcagcctacgctggtagcgcctttatctgtccagagtttagacatttgctgaacggcgtggaattcgctgattcattcaatttcaatcctcataaatggctgctcgttaatttcgactgttctgccatgtggagcagacagcctgtccgaatgcttcggctaaagaagacctgcctggtgagcgctgtggtcagaagaagctag

SEQ ID NO: 85340 - DNA, 1017 bp, Artificial Sequence
  derived and/or modified sequence
atgaatgcctccgagtttcgaagaaggggcaaagaaatggttgattacatggctaattacatggaaggaatcgagggacgccaggtctatcccgatgtggaaccaggatacttgcgcccactcattcctgccgcagccccacaggaacctgatacattcgaggatattatcaacgatgttgaaaaaattatcatgcccggtgtgactcactggcactccccttattttttcgcctacttccctacagcatcctcctaccctgcaatgcttgctgacatgctgtgcggagctattgggtgtatcgggttttcttgggccgcttcccccgcttgtaccgagctggagaccgttatgatggattggctgggcaaaatgctcgaacttccaaaggcctttctaaacgaaaaagccggtgagggaggcggtgtgatccaggggtcagccagcgaagctacactggtggcgctgctcgcagccaggacaaaagtgatccatagattacaagccgcatctcctgagctgactcaggctgcaatcatggagaagctcgtggcgtacagttcagatcaggcccattcttcagttgaacgtgcaggacttattggcggtgttaagttgaaggcaattccaagcgatggcaatttcgccatgcgggcatcagccctccaggaggccctagagcgcgataaagccgcagggctcatcccgtttttcatggtggctaccctgggcacaaccacttgctgctctttcgacaacctgctggaggttggcccaatctgcaacaaggaggatatatggctgcacgtggatgcagcctacgctggatctgcctttatttgccccgaatttcgtcatctgctgaacggcgtggagtttgccgattcttttaattttaatccccacaaatggctactggttaatttcgattgtagtgctatgtggagtcgtcagcctgtgcggatgctacgcctgaaaaagacatgcctagtgtctgccgttgtccgcaggtcctag

SEQ ID NO: 85341 - DNA, 1017 bp, Artificial Sequence
  derived and/or modified sequence
atgaacgccagcgagttcagaagaagaggcaaggagatggtggactacatggccaactacatggagggcatcgagggcagacaggtgtaccccgacgtggagcccggctacctgagacccctgatccccgccgccgccccccaggagcccgacaccttcgaggacatcatcaacgacgtggagaagatcatcatgcccggcgtgacccactggcacagcccctacttcttcgcctacttccccaccgccagcagctaccccgccatgctggccgacatgctgtgcggcgccatcggctgcatcggcttcagctgggccgccagccccgcctgcaccgagctggagaccgtgatgatggactggctgggcaagatgctggagctgcccaaggccttcctgaacgagaaggccggcgagggcggcggcgtgatccagggcagcgccagcgaggccaccctggtggccctgctggccgccagaaccaaggtgatccacagactgcaggccgccagccccgagctgacccaggccgccatcatggagaagctggtggcctacagcagcgaccaggcccacagcagcgtggagagagccggcctgatcggcggcgtgaagctgaaggccatccccagcgacggcaacttcgccatgagagccagcgccctgcaggaggccctggagagagacaaggccgccggcctgatccccttcttcatggtggccaccctgggcaccaccacctgctgcagcttcgacaacctgctggaggtgggccccatctgcaacaaggaggacatctggctgcacgtggacgccgcctacgccggcagcgccttcatctgccccgagttcagacacctgctgaacggcgtggagttcgccgacagcttcaacttcaacccccacaagtggctgctggtgaacttcgactgcagcgccatgtggagcagacagcccgtgagaatgctgagactgaagaagacctgcctggtgagcgccgtggtgagaagaagctag

SEQ ID NO: 85342 - DNA, 1366 bp, Artificial Sequence
  derived and/or modified sequence
agagaggacagagagcaagtcactcccggctgcctttttcacctctgacagagcccagacaccatgaacgcaagtgaattccgaaggagagggaaggagatggtggattacatggccaactacatggaaggcattgagggacgccaggtctaccctgacgtggagcccgggtacctgcggccgctgatccctgccgctgcccctcaggagccagacacgtttgaggacatcatcaacgacgttgagaagataatcatgcctggggtgacgcactggcacagcccctacttcttcgcctacttccccactgccagctcgtacccggccatgcttgcggacatgctgtgcggggccattggctgcatcggcttctcctgggcggcaagcccagcatgcacagagctggagactgtgatgatggactggctcgggaagatgctggaactaccaaaggcatttttgaatgagaaagctggagaagggggaggagtgatccagggaagtgccagtgaagccaccctggtggccctgctggccgctcggaccaaagtgatccatcggctgcaggcagcgtccccagagctcacacaggccgctatcatggagaagctggtggcttactcatccgatcaggcacactcctcagtggaaagagctgggttaattggtggagtgaaattaaaagccatcccctcagatggcaacttcgccatgcgtgcgtctgccctgcaggaagccctggagagagacaaagcggctggcctgattcctttctttatggttgccaccctggggaccacaacatgctgctcctttgacaatctcttagaagtcggtcctatctgcaacaaggaagacatatggctgcacgttgatgcagcctacgcaggcagtgcattcatctgccctgagttccggcaccttctgaatggagtggagtttgcagattcattcaactttaatccccacaaatggctattggtgaattttgactgttctgccatgtggtccagacaaccagtgcgtatgttaaggctgaagaaaacctgcttagtcagtgcggtggtgagaaggagttgagcctttcgggacgtggagtgcctgccgcagagctgatgccccgaggctgccgcagacgctgcagagctgatgccagcaagttggcggctgtgcgctcatctctcccggacaactcttccccggcgctcggggttcagttcagccaccagcctgtgaggggaaatttgacaaagtggaggtgatgtagggaagagacacaggacacacagggatgaggccaggccatttggaaaaggccatttggaaaatttccttgtagaaggaattaaacgtaagccctaagaca

SEQ ID NO: 85343 - DNA, 1173 bp, Artificial Sequence
  derived and/or modified sequence
atggccctgctgacccccgcccccggcagccagagcagccagttccagctgatgaaggccctgctgaagcacgagagcgtgggcagccagcccctgcaggacagagtgctgcaggtgcccgtgctggcccacggcggctgctgcagagaggacaaggtggtggccagcagactgacccccgagagccagggcctgctgaaggtggaggacgtggccctgaccctgacccccgagtggacccagcaggacagcagccagggcaacctgtgcagagacgagaagcaggagaaccacggcagcctggtgagcctgggcgacgagaagcagaccaagagcagagacctgccccccgccgaggagctgcccgagaaggagcacggcaagatcagctgccacctgagagaggacatcgcccagatccccacctgcgccgaggccggcgagcaggagggcagactgcagagaaagcagaagaacgccaccggcggcagaagacacatctgccacgagtgcggcaagagcttcgcccagagcagcggcctgagcaagcacagaagaatccacaccggcgagaagccctacgagtgcgaggagtgcggcaaggccttcatcggcagcagcgccctggtgatccaccagagagtgcacaccggcgagaagccctacgagtgcgaggagtgcggcaaggccttcagccacagcagcgacctgatcaagcaccagagaacccacaccggcgagaagccctacgagtgcgacgactgcggcaagaccttcagccagagctgcagcctgctggagcaccacagaatccacaccggcgagaagccctaccagtgcagcatgtgcggcaaggccttcagaagaagcagccacctgctgagacaccagagaatccacaccggcgacaagaacgtgcaggagcccgagcagggcgaggcctggaagagcagaatggagagccagctggagaacgtggagacccccatgagctacaagtgcaacgagtgcgagagaagcttcacccagaacaccggcctgatcgagcaccagaagatccacaccggcgagaagccctaccagtgcaacgcctgcggcaagggcttcaccagaatcagctacctggtgcagcaccagagaagccacgtgggcaagaacatcctgagccagtag

SEQ ID NO: 85344 - DNA, 1173 bp, Artificial Sequence
  derived and/or modified sequence
atggcactcctcactcccgcccccggatcacagtcaagtcaattccagctgatgaaggcccttctaaagcacgagagtgtggggtcccagccgctgcaggatcgggtgcttcaagtgcctgtgttagcacacggcgggtgttgcagagaagacaaagtggtggcctcaaggctgactccggaaagccagggcttgctgaaggtggaggacgtagctctgactctgacaccggagtggacccagcaggatagttcccagggcaacctgtgtcgcgacgagaaacaagagaaccacggtagtttagtgagtctcggggatgaaaaacaaaccaagtcccgggacctcccacctgccgaagaactgccagagaaggaacacggcaaaatatcatgtcacctgagggaagacattgcacagatcccaacatgcgcagaagccggagaacaggaagggaggttacagcggaagcagaaaaatgctacaggagggcgtcggcacatttgccacgagtgtggaaaatccttcgctcaaagttctggtctgtcaaagcatcgtaggatccacactggtgagaagccttacgaatgcgaagaatgcggaaaagcctttataggctctagcgcattagttattcatcaaagggtgcatacaggcgagaaaccatatgaatgtgaggagtgcggaaaggccttttctcactccagcgatcttatcaaacatcagagaacacataccggggaaaaaccatacgagtgtgatgattgtggaaagactttctctcaatcctgttccttgcttgagcaccacaggattcatacaggcgagaagccctatcagtgtagcatgtgcgggaaggctttccgtcgttcctctcacctgttacggcaccaacgcatacacactggggataagaacgtacaggagccggaacaaggtgaggcctggaagagtagaatggaatcacagctggaaaacgtggaaactcccatgtcttataagtgcaatgagtgtgagcgatcctttacccagaataccggcctcatagaacaccagaaaattcataccggagaaaagccatatcagtgtaatgcatgtggtaaaggttttacccggatttcgtacctggtccagcaccagcgatcacacgttgggaagaatatcctgagtcagtag

SEQ ID NO: 85345 - DNA, 1173 bp, Artificial Sequence
  derived and/or modified sequence
atggccctgctgaccccagcccctggcagccagagcagccagttccagctgatgaaggccctgctgaagcatgagagcgtgggcagccagcccctgcaggacagagtgctgcaggtgcctgtgctggcccacggcggctgctgccgggaggacaaggtggtggccagccggctgaccccagagagccagggcctgctgaaggtggaggatgtggccctgaccctgaccccagagtggacccagcaggacagcagccagggcaacctgtgcagagatgagaagcaggagaaccacggcagcctggtgtccctgggagatgagaagcagaccaagagccgggacctgcccccagctgaggagctgcctgagaaggagcacggcaagatcagctgccacctgagagaagatattgcccagatccccacctgtgccgaggccggggagcaggagggccgcctgcagaggaagcagaagaatgccactggaggccgccgccacatctgccatgaatgtgggaagagctttgcccagagcagcggcctgagcaagcaccggcgcatccacactggagagaagccctatgaatgtgaggagtgtgggaaggccttcatcggcagcagcgccctggtgatccaccagagggtgcacactggagagaagccctatgaatgtgaggagtgtgggaaggccttcagccacagcagtgacctgatcaagcaccagaggacccacactggagagaagccctatgaatgtgatgactgtgggaagaccttcagccagagctgcagcctgctggagcaccaccgcatccacactggagagaagccctaccagtgcagcatgtgtgggaaggccttccgccgcagcagccacctgctgcggcaccagaggatccacactggagacaagaatgtgcaggagcctgagcagggcgaggcctggaagagcaggatggagagccagctggagaatgtggagacccccatgagctacaagtgcaatgaatgtgagaggagcttcacccagaacacaggcctcatcgagcaccagaagatccacactggagagaagccctaccagtgcaatgcctgtgggaagggcttcacccgcatctcctacctggtgcagcaccagaggagccacgtgggcaagaacatcctgagccagtag

SEQ ID NO: 85346 - DNA, 1173 bp, Artificial Sequence
  derived and/or modified sequence
atggccctgctgacccccgcccccggcagccagagcagccagttccagctcatgaaggccctgttgaagcacgagtctgttgggtctcagcctcttcaagatcgtgtgctgcaggtgcctgtcctcgcccacggggggtgctgccgcgaggataaagtagtggcatcacgcctcactccagagagccaggggctgctcaaggtggaggatgtggcacttacattgacccctgagtggactcagcaggatagttcccagggcaacctatgccgggacgagaaacaggaaaaccacgggtcactggtgagcctgggcgatgaaaaacagacaaaatcgcgggaccttccacctgccgaggaactcccagaaaaggagcatggcaagattagctgtcatctccgagaagatatcgctcagatacctacttgtgcagaggcaggagaacaggaaggccggctgcaaaggaaacaaaagaatgccacaggaggccggagacacatttgccatgagtgcggaaagagcttcgcgcagtcttccggtttgagtaaacacagaagaatacatacaggggagaaaccctatgagtgcgaagagtgtgggaaagcatttatcggctctagtgcactggtgattcaccagcgcgtgcataccggggagaagccatatgagtgtgaggaatgcggcaaggcctttagccactccagcgacctgatcaagcatcagcggactcacacgggggagaagccctacgaatgtgacgattgtgggaagaccttcagtcagtcttgctcgctccttgagcatcacagaattcataccggtgaaaagccctaccaatgtagtatgtgcggcaaagcttttcgtcggagcagccacttgctgaggcatcagcgaatccataccggggataagaatgtgcaagagccagaacagggtgaggcgtggaagtcgcgtatggagagtcagttagaaaatgtggagaccccaatgtcatacaaatgtaatgagtgtgagcgaagcttcacacagaacaccggccttattgagcaccagaagatccacactggcgaaaaaccctaccagtgtaacgcctgcgggaaaggcttcacacgtatcagttacctagtccagcaccaaagatcacatgtaggaaagaacatcctttcacagtag

SEQ ID NO: 85347 - DNA, 1173 bp, Artificial Sequence
  derived and/or modified sequence
atggcactgctgacacccgctcccggttctcagtcctcccagttccagctcatgaaagcactgctgaagcatgaatcagtcgggagccagcccctgcaagaccgtgtgcttcaggtgccagtgctggctcacggaggttgttgcagggaagacaaagtggtggccagcagactcaccccagagagtcaaggtctcctcaaggtcgaggacgtggccttaacactgacccccgagtggactcagcaggatagctctcagggcaatttatgtagagacgaaaagcaggagaaccacggatccttggtcagcctgggggacgaaaagcagacgaagtctcgcgacttaccccctgctgaggaactgcccgagaaggaacatggaaagatctcatgtcatctgcgggaggacattgcacagattccgacttgcgccgaagcgggtgagcaggaaggaagattgcaacgaaagcagaagaatgcgaccggcggaaggcggcacatctgtcatgaatgcgggaagtcgtttgcgcaatcctcagggctgagcaagcatcgaaggatccatacaggcgaaaagccctacgagtgcgaggagtgtggtaaagcattcattgggtcttccgcacttgtgatacaccagcgtgtgcatactggtgagaaaccttacgagtgcgaggagtgcgggaaagctttttcccatagctctgatttgataaaacatcagcgcacgcacacgggcgaaaagccttatgaatgcgatgactgtggcaaaaccttctcacagtcctgcagcttactcgagcaccaccgtattcatactggggagaaaccataccagtgttccatgtgcgggaaagcatttcgacggagtagtcatctgttgcgacaccagcggatccatacaggcgataagaatgttcaggaaccggagcagggcgaggcctggaaaagccgaatggagtcacaacttgaaaacgttgagacccctatgtcttacaaatgtaacgaatgtgaacgcagcttcacccagaatactggactgatagaacatcagaagattcatactggagaaaagccttaccagtgcaatgcgtgcggcaagggatttacccgaatatcatacttggtacagcatcagcgtagtcacgtcggaaaaaacatcttgagccagtag

SEQ ID NO: 85348 - DNA, 3576 bp, Artificial Sequence
  derived and/or modified sequence
agtggcttctgtgccccgccctgcgggtggtttgctagtttcaagcactttgtgagtatggggtgaatcggcgtcggccttccactgtggggttaaatctcatcccgcggctctcctcctgtcggtcctgcagttcttttgtccccgggtagagggatcttctgcagaaatagcgctggaagctagagtgaggcctgagtactgccttggcctaggatggctagagaattaagtgaaagcacagccctggatgcccagtctacagaagaccagatggagcttctggtcataaaggtggaggaagaagaagccggttttcccagtagcccagatctgggttctgagggctcccgcgagcgcttccgaggcttccgctacccggaggctgcaggcccccgcgaggcgctgagtcggctccgagagctctgccgacagtggctgcagcctgagatgcacagcaaggagcagatcctggagctgctggtgctggagcagttcctgaccatcctgccggggaatctgcagagctgggtgcgggagcagcatccagagagcggggaggaggtggtggtgctattggagtatttggagaggcagctggatgagccggcgccgcaggtagaaagaacaggtttagtatctgagcgctgtggcctgtttcctcctgaaatcccagatcagagtgaggggcattcctttaacatccaggagttcttcatctcttttttgtaccgtgaacctccttggcagtaaggtgaagtccctggactccttctcagaataattttttttttaaaatacataaaccataaaggattacaaaagaacgcagtcatatcaacatacagtttgcaaagtattaactttgtattaaagtcatacttttttttattagtacactaaataataaaacctacggacagggcttataactggcaattacaaagcagtgataagtatctctttgcttggttgtaatgtgatgtaaaaacatctgcaggttctattggtgacaaagtcgtgggtactgcttatgctacattgatttgttgcttccattcataattggaaggaaatgctaactttctcttaaagactagttaaaaataagattagcttttgtcctgttcaagttcatggactacgtgggaaggagttcatggaccactggttatgaacctctggtagaaaatgggccgacttttacctccatgttcttccctgttttatgagactgtgtcctctttgcatcatcctgtgtccctgtgcacacaccctcagaggacctgtgtggccagagccttctaaatggtgagctggataccagggttcttgacttgggtctgttgcacccaaggcctgtaacagtggaaagtcagtgcgagtctcttagcttcattctttataaaggatgtgggaaattctgagctgcacatgagaaagtaacttgaaaactgtaattttataataactataaatgtctggaaggaaacctgcatacatatcgtatgccaggccatgttaggtgatttcacgtactgtgatgttgtttgggtcccccaaactccataaactagagattgtaatccccttttcagataataaaaggtattaatattctctgagaattttgcaccagtttccaatggattttcataaaagcacaaatgtatatatgaaggagcatagagtaatgataagaacgtgtgctctggcatcattctacctgagctcccatcctagcattgccactgattagctatttaaactggctgtgccttaatttccctatcagtaaaatgggtataataataatacctcccttataagattgttgttttctgcgttaaatgagttaacatttataatgctcttggaaatagtgccagccacctaggtagttctatggaagtgtttgatgaaaacatgaaaataagaacaaatgatttctaggtttcaggtgttgaccaggggcaagaactgctctgttgcaagatggcactattgacaccagccccagggtcacaaagtagccaatttcagctaatgaaggctctgctcaagcatgaatctgtgggatcccagcctttacaagatagagttctccaggtccccgtgcttgcccatggaggatgctgcagagaagataaagtggtagcttctaggcttactccagagtcccaggtgatgaaaaacagactaagagcagggacttgcctccagctgaggagcttccagaaaaggagcatgggaagatatcgtgccacctgagagaagacattgcccagattcctacatgtgcagaagctggtgaacaggagggcaggctacaaagaaagcagaaaaatgccacaggagggaggcggcacatctgccatgaatgtggaaagagttttgctcaaagctcaggcctgagtaaacacaggagaatccacactggtgagaaaccctacgaatgtgaagagtgtggcaaagccttcattgggagctctgcccttgtcattcatcagagagtccacactggtgagaagccatatgagtgtgaagaatgtggtaaggccttcagtcatagctcagaccttatcaagcatcagagaacccacactggggagaagccctatgagtgtgatgactgtgggaagaccttcagccagagctgcagcctccttgaacatcacagaatccacagttggtcagattcataaagtcttatatccccctctgtgccttttctgcaggtgctaataaatgtttattgaatgtaccagtgagattaccttcatagatctgaaaatctgatgttatccaggtttctgaagaacttctcgccaaggccatttgtgcttgtgtccaattctctgacctagattgtgactcaatctagtgtgtttcttaccaagtacataggcagagcagggttactgtgattgaaagaatccattttttttttggagacgtagtcttgctctgtcgcccaggctggagtgcagtggcacaatcttggctcactgcaacctccacctcctgggttcaagcgattctcctgcctcagcctcctgagtagctgggattacaggtgtgtgccaccatgcccggctaattttttatgtttttagtagagacgggattttaccgtgttagccaggatggtctcgatctcctaacctcatgatcctcctgcctcagcctaccaaagtgctgggattacaggcatgagccaccatgcccggccaagaatccatatttctttaccagactaggaattctattctagtgcaaatgccttaaaaagcttatcactaaatcattacgaatgtgtgccatccgtggaattgcttttttttttttttttttgtaaatatgaggtctcactatgttgcccaggctggtctcgaaatcctgggcaatcctcctgcctcaccctctcaagtactggaattacaggcgtgagccaccatacccagcccaaatttcactctttaatgttttcctgttgctattctttaaggaaaaaactttcctattcagacagtgtgaaaatcagtcatcaagtcagaataaaatgatgaatattct

SEQ ID NO: 85349 - protein, 1552 aa, Artificial Sequence
  derived and/or modified sequence
MRTTKVYKLVIHKKGFGGSDDELVVNPKVFPHIKLGDIVEIAHPNDEYSPLLLQVKSLKEDLQKETISVDQTVTQVFRLRPYQDVYVNVVDPKDVTLDLVELTFKDQYIGRGDMWRLKKSLVSTCAYITQKVEFAGIRAQAGELWVKNEKVMCGYISEDTRVVFRSTSAMVYIFIQMSCEMWDFDIYGDLYFEKAVNGFLADLFTKWKEKNCSHEVTVVLFSRTFYDAKSVDEFPEINRASIRQDHKGRFYEDFYKVVVQNERREEWTSLLVTIKKLFIQYPVLVRLEQAEGFPQGDNSTSAQGNYLEAINLSFNVFDKHYINRNFDRTGQMSVVITPGVGVFEVDRLLMILTKQRMIDNGIGVDLVCMGEQPLHAVPLFKLHNRSAPRDSRLGDDYNIPHWINHSFYTSKSQLFCNSFTPRIKLAGKKPASEKAKNGRDTSLGSPKESENALPIQVDYDAYDAQVFRLPGPSRAQCLTTCRSVRERESHSRKSASSCDVSSSPSLPSRTLPTEEVRSQASDDSSLGKSANILMIPHPHLHQYEVSSSLGYTSTRDVLENMMEPPQRDSSAPGRFHVGSAESMLHVRPGGYTPQRALINPFAPSRMPMKLTSNRRRWMHTFPVGPSGEAIQIHHQTRQNMAELQGSGQRDPTHSSAELLELAYHEAAGRHSNSRQPGDGMSFLNFSGTEELSVGLLSNSGAGMNPRTQNKDSLEDSVSTSPDPILTLSAPPVVPGFCCTVGVDWKSLTTPACLPLTTDYFPDRQGLQNDYTEGCYDLLPEADIDRRDEDGVQMTAQQVFEEFICQRLMQGYQIIVQPKTQKPNPAVPPPLSSSPLYSRGLVSRNRPEEEDQYWLSMGRTFHKVTLKDKMITVTRYLPKYPYESAQIHYTYSLCPSHSDSEFVSCWVEFSHERLEEYKWNYLDQYICSAGSEDFSLIESLKFWRTRFLLLPACVTATKRITEGEAHCDIYGDRPRADEDEWQLLDGFVRFVEGLNRIRRRHRSDRMMRKGTAMKGLQMTGPISTHSLESTAPPVGKKGTSALSALLEMEASQKCLGEQQAAVHGGKSSAQSAESSSVAMTPTYMDSPRKDGAFFMEFVRSPRTASSAFYPQVSVDQTATPMLDGTSLGICTGQSMDRGNSQTFGNSQNIGEQGYSSTNSSDSSSQQLVASSLTSSSTLTEILEAMKHPSTGVQLLSEQKGLSPYCFISAEVVHWLVNHVEGIQTQAMAIDIMQKMLEEQLITHASGEAWRTFIYGFYFYKIVTDKEPDRVAMQQPATTWHTAGVDDFASFQRKWFEVAFVAEELVHSEIPAFLLPWLPSRPASYASRHSSFSRSFGGRSQAAALLAATVPEQRTVTLDVDVNNRTDRLEWCSCYYHGNFSLNAAFEIKLHWMAVTAAVLFEMVQGWHRKATSCGFLLVPVLEGPFALPSYLYGDPLRAQLFIPLNISCLLKEGSEHLFDSLGLYKINILPLLLTSLLRTSLSISTLQEQCFCSCPTPSASSQGSSGGGGTPPAPPTRTCSARSGSATTGPTTPCSPKHGAPAPQGMKSLLIGC

SEQ ID NO: 85350 - DNA, 4659 bp, Artificial Sequence
  derived and/or modified sequence
atgcggactactaaggtgtataaactggttattcacaagaagggattcggaggctccgatgatgaacttgttgtgaaccctaaagtcttcccccacattaagctgggcgacatcgtagagatcgctcacccaaatgacgagtattcacctctactcttgcaggtaaaaagcttgaaggaagatctccagaaagagactataagtgtggaccagactgtgacacaggtgttccggctgagaccttatcaagatgtctatgtgaatgtagttgatccaaaggacgtgacactggatctcgtagagcttactttcaaggatcagtacatcggccgcggagatatgtggcggcttaagaagtctctggtgagtacgtgtgcttacataacccagaaggtcgaatttgccggcattagggcacaggctggtgagctgtgggtgaaaaacgaaaaggttatgtgcggttacatttctgaggacactcgcgtggtgttccggtccaccagcgctatggtctacatctttatccagatgagttgcgagatgtgggactttgatatctacggtgacctgtactttgagaaagcggtcaacggtttcttggccgacctatttacaaaatggaaagagaaaaattgcagtcacgaggtgacggttgtcctattttctcggacgttttatgacgcaaagtccgtagacgagttcccagagattaacagggccagtatccgccaggaccacaagggtagattctacgaggacttttataaagtagtggtgcaaaacgagagacgcgaggaatggacctctctgctcgttacaattaagaagctgttcatccagtatccagtgcttgtaaggctggagcaagccgaggggttccctcagggtgataactcgacgtccgctcagggcaattaccttgaggcgattaacctgtctttcaatgtctttgataagcattacatcaaccggaacttcgatcggaccggccagatgtccgtcgtcatcaccccgggagttggcgtgttcgaagtggaccggctactaatgatcttgacaaaacagagaatgatagacaacgggatcggagtagatctggtttgcatgggcgagcagcctctgcacgccgttccactgtttaagcttcacaaccgttctgcacctagggattccaggctgggggatgattacaacattccccattggatcaaccattccttttatactagtaagagccaactcttttgcaattcctttacccctagaattaagcttgccggtaaaaagccggcaagcgaaaaggccaaaaacggcagagatacttccctggggagtcccaaggagagtgaaaatgccttgcctatccaagtggattacgacgcttatgacgcccaggtttttaggcttccagggccaagcagagcgcagtgtcttacaacttgcaggtcggtccgggaacgagagagtcactctagaaaatccgcctcatcctgcgatgtttcgtcctcaccctctttaccctcgagaaccctgccaaccgaagaggtgcgaagccaagcatccgacgatagctcccttggaaagtccgctaacattctgatgattcctcaccctcacttgcaccagtacgaagtctccagctcccttggctacaccagtactcgagacgtgctggagaacatgatggagcctccacagcgagactcgagcgctccaggtagatttcacgtcgggtccgccgaaagtatgctgcacgtgagacccgggggctacaccccccagcgggccttaataaatccatttgctccgagtcgtatgcccatgaaacttacctctaaccggcggaggtggatgcacacttttcccgtgggcccgagcggagaggctattcagatccaccatcaaaccagacagaacatggcagagttgcagggttcaggccagcgtgatcccactcactcatcggccgaactcttagaattagcttaccacgaggccgcggggcggcactctaactctaggcagccaggcgatgggatgtcctttcttaatttttccggcacagaggagctttctgtagggctactgagtaattccggagcaggcatgaatccacggacccagaataaggatagcctcgaggactctgtgtctacatccccagatccaatccttaccctgagcgcacctcctgttgtccccggtttctgctgtaccgttggggtggattggaagtcattgacaacacctgcttgtcttccgttgaccaccgactactttcctgacagacagggcttacaaaacgattacacagaggggtgttacgatctcctccctgaggccgacatagatcgccgcgacgaggatggggtgcagatgacagcccagcaggttttcgaagagttcatttgccagcggctgatgcagggctaccagatcatagtccaacccaagacccagaagccaaatccagcagtcccaccacccttgtcaagctctccactgtacagcaggggactcgtatctcggaataggcccgaggaggaagatcagtactggctttccatgggcagaacctttcacaaagttactctaaaagacaagatgatcacagtgaccagatacctgccgaaatacccttacgaatcagcccagatacattatacctactccctttgtccctcccacagtgactctgagttcgtgagctgctgggtggaattctcccacgagcgacttgaagagtacaaatggaattatctggatcagtatatatgctcagctgggagcgaagatttctcattgatagaatctctgaagttctggaggaccaggttcttgctccttcccgcctgtgttaccgcgaccaaacggatcactgagggagaagcacactgcgacatttacggagatcgcccaagggccgatgaggatgagtggcagttgctagacggctttgttcgcttcgtcgagggactcaatcgaattcggagacgccatagaagcgataggatgatgcgcaagggtacggccatgaagggtctgcagatgaccggtcctatatccacacactctttagaatcaaccgcaccaccggtgggcaagaaaggaacgtccgccctctctgctttgttagagatggaggcctctcagaagtgtctgggagaacagcaggcggcggtgcatggagggaagagtagtgcccaaagtgctgaatcaagctccgtagccatgactcccacctatatggattcccccaggaaagatggagcctttttcatggagttcgtccgtagcccaaggacggccagttccgctttttatccccaggtgagcgttgaccagaccgctacaccaatgctcgacggaacgtctctgggcatctgtaccggccagtcaatggaccgtggtaactcgcagacttttggaaacagtcagaatatcggcgaacaaggttactcatcaacaaactccagcgatagttcaagccaacaactagtggcctcgagcttgaccagctcctccacgctgactgaaatcctagaagctatgaagcatccctcaaccggagttcagcttctgtccgagcagaaaggactttctccttattgtttcatctctgccgaggtggtgcactggctggtaaatcacgtcgaaggcatccagacccaagcgatggcgatcgacattatgcagaagatgctcgaagaacagttgatcacacacgccagtggagaggcctggcgaaccttcatctacggcttctatttttacaaaattgtcacagacaaagagccagacagagttgcgatgcagcaaccagccactacttggcatacagccggagttgacgatttcgcctctttccagaggaagtggtttgaggtggctttcgttgcagaggagctggtacactcagaaataccggcattcctgctcccctggctgccaagcagaccagcaagctatgcatcccgacacagctcatttagtcggagcttcggcggacgttctcaggcggcagccctgcttgccgccaccgttcctgaacagagaaccgttaccttggacgtggacgtgaacaatcgaacagaccgactggaatggtgcagctgctattaccacgggaacttctctctaaatgctgcttttgagattaagctgcactggatggccgtcacagcagcggtcctgtttgagatggtccaggggtggcatcgcaaggcgacgagttgtgggtttctattagtaccagtgcttgagggccccttcgccctgcccagttatttgtacggagatcctttaagggctcagctctttatccctttaaatatctcatgcctcctgaaagaaggatctgaacatcttttcgattctttgggactttacaagatcaacatattgcctctgctgcttacctcccttctgagaacatctctgagcatcagcacattgcaggaacaatgcttctgttcatgtcctaccccctccgcttcctcccaggggtcatctggcggcggcggcacgccccctgctccacccactagaacatgtagtgctcggagcgggagcgctacgacaggccccaccaccccttgttctccaaaacatggggcgcccgccccccagggcatgaagtccctgttgattggatgctag

SEQ ID NO: 85351 - DNA, 4659 bp, Artificial Sequence
  derived and/or modified sequence
atgaggaccaccaaggtgtacaagctggtgatccacaagaagggctttggaggcagtgatgatgagctggtggtgaaccccaaggtgttcccccacatcaagctgggggacatcgtggagatcgcccaccccaatgatgagtacagccccctgctgctgcaggtgaagagcctgaaggaggacctgcagaaggagaccatctctgtggaccagacagtgacccaggtgttccggctgcggccctaccaggatgtgtatgtgaatgtggtggaccccaaggatgtgaccctggacctggtggagctgaccttcaaggaccagtacatcggccgcggggacatgtggaggctgaagaagagcctggtgtccacctgtgcctacatcacccagaaggtggagtttgctggcatccgggcccaggccggggagctgtgggtgaagaatgagaaggtgatgtgtggctacatcagcgaggacaccagggtggtgttccgcagcaccagcgccatggtgtacatcttcatccagatgagctgtgagatgtgggactttgacatctatggagacctgtactttgagaaggctgtgaatggcttcctggccgacctcttcaccaagtggaaggagaagaactgcagccatgaggtgacagtggtgctcttcagcaggaccttctatgatgccaagtctgtggatgagttccctgagatcaacagagccagcatccggcaggaccacaagggccgcttctatgaggacttctacaaggtggtggtgcagaatgaaagaagagaggagtggaccagcctgctggtgaccatcaagaagctgttcatccagtaccctgtgctggtgcggctggagcaggccgagggcttcccccagggcgacaacagcaccagcgcccagggcaactacctggaggccatcaacctgtccttcaacgtgtttgacaagcactacatcaacagaaactttgacagaacaggccagatgtctgtggtgatcaccccaggagtgggcgtgtttgaggtggaccggctgctgatgatcctgaccaagcagaggatgattgacaatggcatcggcgtggacctggtgtgcatgggagagcagcccctgcatgctgtgcccctcttcaagctgcacaacagaagtgccccccgggacagccggctgggagatgactacaacatcccccactggatcaaccacagcttctacaccagcaagagccagctgttctgcaacagcttcaccccccgcatcaagctggccggcaagaagccagccagcgagaaggccaagaatggccgggacaccagcctgggcagccccaaggagagtgaaaatgccctgcccatccaggtggactatgatgcctatgatgcccaggtgttccggctgcccggccccagccgggcccagtgcctgaccacctgccgctctgtgcgggagcgggagagccacagcaggaagagcgccagcagctgtgatgtgagcagcagccccagcctgcccagcaggaccctgcccacagaggaggtgcgcagccaggccagtgatgacagcagcctgggcaagagcgccaacatcctgatgatcccccacccccacctgcaccagtatgaggtgagcagcagcctgggctacaccagcaccagagatgtgctggagaacatgatggagcccccccagagggacagcagcgcccctggccgcttccacgtgggcagcgctgagagcatgctgcacgtgcggcctgggggctacaccccccagagggccctgatcaacccctttgcccccagcaggatgcccatgaagctgaccagcaacagaagacgctggatgcacaccttccctgtgggccccagcggggaggccatccagatccaccaccagacccggcagaacatggccgagctgcagggcagcggccagagggaccccacccacagcagcgctgagctgctggagctggcctaccacgaggccgccggccgccacagcaacagccggcagcctggagatggcatgtccttcctgaacttcagcggcacagaggagctgtctgtgggcctgctgagcaacagcggggccggcatgaaccccaggacccagaacaaggacagcctggaggacagcgtgtccaccagcccagaccccatcctgaccctgagcgcccctcctgtggtgcccggcttctgctgcaccgtgggcgtggactggaagagcctgaccaccccagcctgcctgcccctgaccacagactacttcccagaccggcagggcctgcagaatgactacacagagggctgctatgacctgctgcctgaggccgacatcgacagaagagatgaagatggagtgcagatgacagcccagcaggtgtttgaggagttcatctgccagaggctgatgcagggctaccagatcatcgtgcagcccaagacccagaagcccaacccagctgtgcccccacccctgagcagcagccccctgtacagccggggcctggtgtccaggaacagacctgaggaggaggaccagtactggctgtccatgggccgcaccttccacaaggtgaccctgaaggacaagatgatcaccgtgacccgctacctgcccaagtacccctatgaaagtgcccagatccactacacctacagcctgtgccccagccacagcgacagcgagtttgtgtcctgctgggtggagttcagccatgagcggctggaggagtacaagtggaactacctggaccagtacatctgcagcgctggcagcgaggacttcagcctcatcgagagcctgaagttctggaggacccgcttcctgctgctgcctgcctgtgtgacagccaccaagaggatcacagaaggagaggcccactgtgacatctatggagaccggcccagggcagatgaagatgagtggcagctgctggatggctttgtgcgctttgtggagggcctgaaccgcatcagaagaagacacagaagtgacaggatgatgaggaagggcacagccatgaagggcctgcagatgacaggccccatcagcacccacagcctggagagcacagcccctcctgtgggcaagaagggcaccagcgccctgagcgccctgctggagatggaggccagccagaagtgcctgggggagcagcaggccgctgtgcacggcggcaagagcagcgcccagagcgctgagagcagctctgtggccatgacccccacctacatggacagccccaggaaggatggagccttcttcatggagtttgtgcgcagccccaggacagccagcagcgccttctacccccaggtgtctgtggaccagacagccacccccatgctggatggcaccagcctgggcatctgcaccggccagagcatggaccggggcaacagccagaccttcggcaacagccagaacatcggggagcagggctacagcagcaccaacagcagtgacagcagcagccagcagctggtggccagcagcctgaccagcagcagcaccctgacagagatcctggaggccatgaagcaccccagcactggagtgcagctgctgtctgagcagaagggcctgagcccctactgcttcatctctgctgaggtggtgcactggctggtgaaccacgtggagggcatccagacccaggccatggccatcgacatcatgcagaagatgctggaggagcagctgatcacccacgccagcggggaggcctggaggaccttcatctacggcttctacttctacaagatcgtgacagacaaggagccagacagagtggccatgcagcagcctgccaccacctggcacacagctggggtggatgactttgccagcttccagaggaagtggtttgaggtggcctttgtggccgaggagctggtgcacagcgagatcccagccttcctgctgccctggctgcccagcaggcctgccagctatgccagccgccacagcagcttcagccgcagctttggaggccgcagccaggccgccgccctgctggccgccaccgtgcctgagcagaggacagtgaccctggatgtggatgtgaacaacagaacagaccggctggagtggtgcagctgctactaccacggcaacttcagcctgaatgctgcctttgagatcaagctgcactggatggctgtgacagctgctgtgctgtttgagatggtgcagggctggcacaggaaggccaccagctgtggcttcctgctggtgcctgtgctggagggcccctttgccctgcccagctacctgtatggagaccccctgcgggcccagctgttcatccccctgaacatcagctgcctgctgaaggagggcagcgagcacctgtttgacagcctgggcctgtacaagatcaacatcctgcccctgctgctgaccagcctgctgcggaccagcctgagcatcagcaccctgcaggagcagtgcttctgcagctgccccaccccatctgccagcagccagggcagcagcggcggcggcggcaccccaccagccccacccaccaggacctgcagcgcccggagcggcagcgccaccaccggccccaccaccccctgcagccccaagcatggagccccagccccccagggcatgaagagcctgctgattggctgctag

SEQ ID NO: 85352 - DNA, 4659 bp, Artificial Sequence
  derived and/or modified sequence
atgcggaccaccaaggtgtacaagctggtgatccacaagaagggcttcgggggatctgacgacgaactggtcgtgaacccaaaggtcttcccccacataaagctgggggatatcgttgaaattgctcaccccaacgacgaatattctcccctacttcttcaggtgaaatctctcaaagaggatctgcagaaagaaaccattagcgtagatcagaccgtgacacaggtattccgcctgcgcccctaccaagacgtgtatgtgaatgtcgtcgatccaaaagatgtgacgctcgacctcgtggaactgacttttaaggaccaatatattggccgtggcgatatgtggcggttgaaaaagtctttggtttccacatgcgcctacattacacagaaggtggagttcgccgggatacgggcccaggccggcgagctatgggtgaaaaacgagaaggtcatgtgcggctacataagtgaggacacccgggttgtctttaggagcaccagcgcgatggtctatatcttcatccagatgagctgtgagatgtgggattttgatatttacggcgacttatatttcgagaaagccgtgaacgggttcctggccgatctctttactaagtggaaggaaaaaaactgctctcacgaggtgaccgtggtgctcttctcaaggaccttttacgacgccaagtcggtggacgagttcccagaaattaaccgggccagcatccgacaggatcacaagggtcggttttatgaggatttctataaagtagtggtgcagaacgaacggagagaagaatggacatctcttctggtgactataaagaagctgtttatacagtatccagtgttggtgcgccttgaacaggctgagggatttccacaaggggacaattctaccagcgcccagggaaattacttagaggcaataaacttgtcattcaatgtcttcgacaagcactatattaacagaaatttcgatcggaccggtcagatgagtgtcgtcatcacaccgggcgtaggtgtctttgaagtggatcgactgctcatgatactaaccaagcagcgcatgattgataatggaataggcgtggatttggtttgtatgggggagcagcctctccatgctgtgcctctttttaagcttcacaaccggagtgctccacgggactcaagattaggggatgactataatatcccccactggattaaccatagtttctatacaagtaaaagccagctcttttgtaattccttcaccccaagaataaagttggcgggcaagaagccagcgagcgagaaagccaagaatgggcgggacacatctctcggcagtcccaaggagagcgaaaacgcactgcctatacaggtggactacgacgcatacgacgcccaagtcttccgactcccaggaccatcaagggcacagtgtctgacaacatgccgtagtgtgcgagagcgagagagccattcccgcaagagtgcctcgagctgcgatgtgtcctcttctccaagcttaccttctagaacactgcccacggaagaagtacggtcccaggcatctgacgatagttctcttgggaaatcagccaatatcctgatgatcccgcatcctcacctgcaccagtacgaagttagttcgtctttggggtatactagcacaagagacgttctcgagaacatgatggagcctccccagagggatagttccgcaccagggaggttccacgttgggtctgccgaatctatgctccatgtgcgtcccggcgggtacacaccccagagagccttgatcaatccttttgctccctctagaatgcctatgaaactgacgtctaaccgccgtagatggatgcacacattccccgtgggacccagcggagaggcaatccaaattcatcaccagactcgacagaacatggccgagcttcaggggagtgggcaaagagatcctacccacagcagcgctgagctgctggagctcgcttaccatgaagccgccggaaggcacagcaattcaagacagcccggggatggtatgtcctttctgaatttcagtggaaccgaagaactctcagtgggcctgctgtctaatagcggagccggcatgaaccctaggacccaaaacaaggactccctggaagatagtgtgagcacttcaccagaccccattcttactctgagcgccccgccagtcgtcccggggttctgttgcactgttggagttgattggaagtcccttacaactcccgcgtgtttaccactgactaccgattactttcccgataggcaaggactgcaaaacgattacactgaaggatgttacgatctccttcctgaagccgacattgacaggcgggacgaagatggcgtgcagatgacagcccaacaggtgtttgaggagtttatctgccagcgcttgatgcagggttaccagattattgtccagcccaagacacagaaacctaacccggcagtccctccccccttgtcgtcatctcctctgtacagccgaggtctggtttcgcgcaaccggccagaggaagaggaccagtattggttatctatgggacggacatttcacaaggtgaccttgaaagataagatgattactgtcacaagatatttgcctaagtacccctatgaatctgcccagatccattatacctactcactgtgcccttctcattcagacagtgagttcgttagctgctgggtcgagttctcccatgaacggctggaggaatataagtggaattacctagaccagtacatttgtagtgctggctccgaggactttagcctgattgaatcactgaagttctggcgaacacggtttctactcctcccggcctgtgtgacggcaacaaagaggatcacagaaggagaggcccattgcgacatctacggagatagacctcgggctgacgaagatgagtggcagctgctggacggcttcgtgcggtttgtggaaggtctgaaccggatccggcgtcgccacaggagtgaccgtatgatgcggaagggtacggccatgaaagggctacaaatgacgggccccatctcaacgcatagcctggaatccacagcccctcctgtcgggaaaaaggggactagcgcactctccgctctcctggagatggaggcctcacaaaagtgtctgggcgaacagcaggcagctgtccacggtggaaagagctcagctcagagtgccgagtctagctccgtcgcaatgacccccacttatatggattcccccagaaaagacggggccttcttcatggagtttgtgcggagtccccggacagcttcttccgctttctaccctcaggtttccgttgatcaaactgctactcccatgctcgacggtactagtcttggaatctgcacaggacagagcatggatcgcggtaactctcaaacctttggtaattcacaaaacatcggcgaacagggctactccagtaccaactcttcagactccagctctcagcaattggtggcctcaagcctcaccagcagctccacgctcaccgagatcttagaggccatgaaacacccaagcactggcgtccagttgctgtcagagcagaaaggtctgagcccatactgtttcataagtgccgaggtggttcactggctggtcaatcacgtcgaagggatccagactcaggcgatggccatcgatataatgcagaaaatgctggaggagcagctcatcacccatgcaagcggggaagcctggcggacctttatatatggcttctacttttacaaaatcgtgactgataaggaacccgaccgggtggctatgcaacagcctgcaaccacatggcacactgctggcgtggacgacttcgcctctttccagcgcaagtggttcgaggtggctttcgtggccgaggaacttgtgcactccgaaatcccagcgtttctccttccatggttaccaagcaggcccgcctcatacgccagcaggcactcaagtttttcacgaagctttggtggaagatcgcaggctgcagccttgctggccgccacagtaccagaacagcgaacagtcacccttgacgtagacgtaaataaccggaccgacagattagagtggtgctcatgttactaccacggcaacttctctcttaacgccgccttcgaaatcaagctgcactggatggctgtcactgccgctgtactgtttgaaatggtgcagggctggcaccgaaaagctacctcgtgcggctttctcctcgtacccgtgttggaagggccctttgcccttccttcctatctgtatggcgacccattgagagcccagctcttcattcctctcaacattagctgcttgctcaaggaagggtcagaacacctgtttgattctctgggactttataagattaatatactgcctttgctcctgacgagtctcttacgcactagtctatcaataagtacactgcaggaacaatgtttttgcagttgccccactcctagcgccagctcccaaggaagttctggaggcggcgggactcctcctgcacctccgactcggacctgctccgctcgctccggctcagccactacaggccccacaaccccttgtagcccaaaacacggcgcacctgctccacaggggatgaagagcctattgataggctgttag

SEQ ID NO: 85353 - DNA, 4659 bp, Artificial Sequence
  derived and/or modified sequence
atgcggacaaccaaagtttacaagttggtaatccacaagaaaggttttgggggaagcgatgacgagctggtggtcaaccctaaggtatttcctcatataaagctgggtgatatcgtagagatcgcacatccaaacgacgagtactcccccctgctgctgcaggtgaagagcctgaaggaagacctgcagaaggagacaatctccgtggaccagaccgtgacccaggtctttcgcctgaggccttatcaggacgtgtatgtcaatgttgtcgacccgaaagacgtgacactcgatttggttgaattgacatttaaggaccagtatattgggaggggagatatgtggaggctgaaaaagagtctggtgagtacttgtgcctacattacccagaaagttgaattcgcaggcattagagctcaggccggtgagttgtgggtgaagaacgagaaagttatgtgtggctacatctctgaagacaccagagtggtattccgtagcacatccgcaatggtttacatatttatccagatgtcatgtgaaatgtgggattttgatatctatggtgatctttattttgaaaaagctgtaaacggtttcctggctgatttatttaccaaatggaaagaaaagaattgcagtcacgaggtaaccgtagttctgttttcaaggaccttctacgatgcgaagtctgttgacgaattccctgagattaatagggctagcatccgccaggaccacaaggggaggttttacgaggatttttacaaggtagtggttcagaatgaaaggcgcgaagagtggactagcctgctcgtgactatcaagaagctgtttatccagtatcctgtactggttcgcttggagcaggccgaggggttcccgcagggcgacaatagtacctcagctcaaggcaactacctggaggctattaacctgtcctttaatgtgttcgacaaacattacataaatcgtaactttgataggaccggccagatgagtgtggttattactccaggagtaggggtgttcgaggtggataggctcctgatgatactcacaaagcagcggatgattgacaacggcatcggcgtggaccttgtctgtatgggcgaacagccgctgcatgccgttccgctgttcaagctgcataacaggagcgccccacgggacagtagactgggagacgactataacattccacattggatcaaccacagcttctacactagtaagagccagctgttctgcaactcattcacaccacggatcaaattggctggcaagaagcctgcctctgagaaggctaagaacggccgtgacacctctcttggatcgcctaaggaaagcgagaacgctctgccaatacaggtagactatgacgcttatgatgcacaagtgttccgtcttccagggccaagccgggcacagtgcttaaccacctgtcgctcagtcagggagcgcgagtcccacagccgtaaatctgcttcaagctgcgacgtctcctcgagccccagcttgcccagccgcactttacccactgaagaagtgcgaagtcaggcttccgatgattcttcgctcggcaaatctgctaatatcctaatgataccccatcctcatttacaccagtacgaggtgagcagtagcctaggatacacttctacgcgggacgtgctcgaaaatatgatggaacctccgcaaagggactcgtccgccccaggaaggttccacgtgggctctgccgaatcaatgctgcatgttcggccaggtggctacacgccccagcgcgctctgatcaatccatttgcaccctcgcgaatgcctatgaagctaacttcaaacagacgcaggtggatgcacaccttccccgtgggtccctccggcgaggcaattcaaatccatcaccagacacgccagaatatggccgagctccaggggtccgggcagcgcgatcctacacattccagcgccgagctgttggagctcgcctatcatgaggctgcaggcagacattctaatagcagacagcctggtgacgggatgtcttttctgaattttagtggaaccgaagaattgtccgtggggctgctgtccaactcaggtgcaggaatgaacccacggacacaaaataaggactcactggaagattcagtatctacgagtcctgaccctattttgacattatccgctcctcctgtggtacctgggttttgctgtaccgtgggcgtagactggaagtcactaaccacaccagcctgcttgccactgactacagattatttcccagaccgccaggggctccagaacgattacacagaaggatgctatgatctactgccggaggcagatatcgacagaagagacgaagatggggtccagatgaccgctcagcaagtctttgaggagtttatttgtcagcgcctgatgcaaggctatcagatcatcgtgcaacccaagacccagaaaccgaaccccgcagtgccaccccctctctccagcagtcccctgtactcacgtggactggtgtcccggaatcggcctgaagaagaagaccagtactggctctcgatgggcagaactttccacaaggttactctaaaggataaaatgataacagtgactagatacctgcctaagtacccatacgaatctgcacaaatccattacacatattctctctgcccatctcattctgattctgagtttgtgtcatgttgggtggagttcagccacgagcggcttgaggaatacaagtggaactacctcgaccagtatatctgttctgccggttccgaggatttttccctgatcgagtcattgaaattctggcggacaaggttcctactactccccgcttgtgtcacagctacaaaaagaatcactgaaggggaagcccattgcgacatttatggcgaccgccctagagcggatgaagacgaatggcagctactcgacggctttgtgcgtttcgtggagggtctgaaccgaattcgacgtaggcataggtcagaccgtatgatgcgcaaaggcactgcgatgaagggactgcaaatgacaggtccaattagtacccacagccttgagtctactgccccacctgttgggaagaagggaacgtccgctctttctgcccttctggaaatggaggcatcacagaagtgtctaggggagcagcaagccgctgtgcatggagggaagtcctccgctcagtcagctgagagttcaagtgtggccatgacacctacttacatggatagtccccgtaaagacggagccttcttcatggagtttgtgcgatcccccaggaccgccagcagtgccttctaccctcaggttagtgtggatcagaccgcgacgccaatgctggatggaacctcgctcgggatttgcaccgggcaaagtatggaccggggaaattcccagacatttgggaacagtcagaatataggggagcaggggtattccagcacgaattcatcggactcttcaagtcagcagctggttgccagttctcttacctccagcagtacgttaacagagatactcgaggctatgaagcatccctcgacgggggtgcagctgctgagtgagcagaagggattgtccccctattgtttcatcagcgccgaagtcgtccactggctggtaaaccatgtcgaggggatccaaacgcaggctatggctatagatatcatgcagaagatgctggaggagcagctgatcactcacgcctcaggagaggcctggcgcacctttatctatggattttacttttataaaatcgtaacagacaaagaaccagaccgagtggcaatgcagcagcccgcaactacctggcacactgcgggtgtggacgactttgcatcgttccagagaaaatggttcgaggtcgcctttgtggcggaggagttggtgcactcagagatccccgcattccttttgccatggttacctagccggccagcttcatatgcgtcacgccattcctcattcagccgcagtttcggtgggaggtcacaagcggcagctttgttagcagccacagtgcctgaacaacggaccgtgacgttggatgtggatgtgaacaacaggactgacaggctggagtggtgtagctgttactaccacggcaacttcagcctcaatgctgcctttgagataaaattacactggatggcggtcactgccgctgtgctctttgaaatggtgcagggttggcaccgtaaggctacaagttgcggctttctgctggtaccagtgctggaaggcccattcgccctgccaagttatctgtacggggacccactcagggctcagttgtttattcccctcaacatctcatgcctcctaaaagaagggtccgaacacctgtttgacagcctaggtctgtacaagattaacatcctacccctgctcctcacatccctgctgagaacatcactgtcgatttcaaccttacaagagcagtgcttttgtagttgtccaacaccgtcagcaagcagccagggaagctcggggggagggggaacgccgcctgcccctcccactcgcacatgctcagccagaagcggctccgcaaccacgggccctaccaccccctgtagccccaagcatggagctccggcaccccagggaatgaagagtctcctgataggatgttag

SEQ ID NO: 85354 - DNA, 4659 bp, Artificial Sequence
  derived and/or modified sequence
atgagaaccaccaaggtgtacaagctggtgatccacaagaagggcttcggcggcagcgacgacgagctggtggtgaaccccaaggtgttcccccacatcaagctgggcgacatcgtggagatcgcccaccccaacgacgagtacagccccctgctgctgcaggtgaagagcctgaaggaggacctgcagaaggagaccatcagcgtggaccagaccgtgacccaggtgttcagactgagaccctaccaggacgtgtacgtgaacgtggtggaccccaaggacgtgaccctggacctggtggagctgaccttcaaggaccagtacatcggcagaggcgacatgtggagactgaagaagagcctggtgagcacctgcgcctacatcacccagaaggtggagttcgccggcatcagagcccaggccggcgagctgtgggtgaagaacgagaaggtgatgtgcggctacatcagcgaggacaccagagtggtgttcagaagcaccagcgccatggtgtacatcttcatccagatgagctgcgagatgtgggacttcgacatctacggcgacctgtacttcgagaaggccgtgaacggcttcctggccgacctgttcaccaagtggaaggagaagaactgcagccacgaggtgaccgtggtgctgttcagcagaaccttctacgacgccaagagcgtggacgagttccccgagatcaacagagccagcatcagacaggaccacaagggcagattctacgaggacttctacaaggtggtggtgcagaacgagagaagagaggagtggaccagcctgctggtgaccatcaagaagctgttcatccagtaccccgtgctggtgagactggagcaggccgagggcttcccccagggcgacaacagcaccagcgcccagggcaactacctggaggccatcaacctgagcttcaacgtgttcgacaagcactacatcaacagaaacttcgacagaaccggccagatgagcgtggtgatcacccccggcgtgggcgtgttcgaggtggacagactgctgatgatcctgaccaagcagagaatgatcgacaacggcatcggcgtggacctggtgtgcatgggcgagcagcccctgcacgccgtgcccctgttcaagctgcacaacagaagcgcccccagagacagcagactgggcgacgactacaacatcccccactggatcaaccacagcttctacaccagcaagagccagctgttctgcaacagcttcacccccagaatcaagctggccggcaagaagcccgccagcgagaaggccaagaacggcagagacaccagcctgggcagccccaaggagagcgagaacgccctgcccatccaggtggactacgacgcctacgacgcccaggtgttcagactgcccggccccagcagagcccagtgcctgaccacctgcagaagcgtgagagagagagagagccacagcagaaagagcgccagcagctgcgacgtgagcagcagccccagcctgcccagcagaaccctgcccaccgaggaggtgagaagccaggccagcgacgacagcagcctgggcaagagcgccaacatcctgatgatcccccacccccacctgcaccagtacgaggtgagcagcagcctgggctacaccagcaccagagacgtgctggagaacatgatggagcccccccagagagacagcagcgcccccggcagattccacgtgggcagcgccgagagcatgctgcacgtgagacccggcggctacaccccccagagagccctgatcaaccccttcgcccccagcagaatgcccatgaagctgaccagcaacagaagaagatggatgcacaccttccccgtgggccccagcggcgaggccatccagatccaccaccagaccagacagaacatggccgagctgcagggcagcggccagagagaccccacccacagcagcgccgagctgctggagctggcctaccacgaggccgccggcagacacagcaacagcagacagcccggcgacggcatgagcttcctgaacttcagcggcaccgaggagctgagcgtgggcctgctgagcaacagcggcgccggcatgaaccccagaacccagaacaaggacagcctggaggacagcgtgagcaccagccccgaccccatcctgaccctgagcgccccccccgtggtgcccggcttctgctgcaccgtgggcgtggactggaagagcctgaccacccccgcctgcctgcccctgaccaccgactacttccccgacagacagggcctgcagaacgactacaccgagggctgctacgacctgctgcccgaggccgacatcgacagaagagacgaggacggcgtgcagatgaccgcccagcaggtgttcgaggagttcatctgccagagactgatgcagggctaccagatcatcgtgcagcccaagacccagaagcccaaccccgccgtgcccccccccctgagcagcagccccctgtacagcagaggcctggtgagcagaaacagacccgaggaggaggaccagtactggctgagcatgggcagaaccttccacaaggtgaccctgaaggacaagatgatcaccgtgaccagatacctgcccaagtacccctacgagagcgcccagatccactacacctacagcctgtgccccagccacagcgacagcgagttcgtgagctgctgggtggagttcagccacgagagactggaggagtacaagtggaactacctggaccagtacatctgcagcgccggcagcgaggacttcagcctgatcgagagcctgaagttctggagaaccagattcctgctgctgcccgcctgcgtgaccgccaccaagagaatcaccgagggcgaggcccactgcgacatctacggcgacagacccagagccgacgaggacgagtggcagctgctggacggcttcgtgagattcgtggagggcctgaacagaatcagaagaagacacagaagcgacagaatgatgagaaagggcaccgccatgaagggcctgcagatgaccggccccatcagcacccacagcctggagagcaccgccccccccgtgggcaagaagggcaccagcgccctgagcgccctgctggagatggaggccagccagaagtgcctgggcgagcagcaggccgccgtgcacggcggcaagagcagcgcccagagcgccgagagcagcagcgtggccatgacccccacctacatggacagccccagaaaggacggcgccttcttcatggagttcgtgagaagccccagaaccgccagcagcgccttctacccccaggtgagcgtggaccagaccgccacccccatgctggacggcaccagcctgggcatctgcaccggccagagcatggacagaggcaacagccagaccttcggcaacagccagaacatcggcgagcagggctacagcagcaccaacagcagcgacagcagcagccagcagctggtggccagcagcctgaccagcagcagcaccctgaccgagatcctggaggccatgaagcaccccagcaccggcgtgcagctgctgagcgagcagaagggcctgagcccctactgcttcatcagcgccgaggtggtgcactggctggtgaaccacgtggagggcatccagacccaggccatggccatcgacatcatgcagaagatgctggaggagcagctgatcacccacgccagcggcgaggcctggagaaccttcatctacggcttctacttctacaagatcgtgaccgacaaggagcccgacagagtggccatgcagcagcccgccaccacctggcacaccgccggcgtggacgacttcgccagcttccagagaaagtggttcgaggtggccttcgtggccgaggagctggtgcacagcgagatccccgccttcctgctgccctggctgcccagcagacccgccagctacgccagcagacacagcagcttcagcagaagcttcggcggcagaagccaggccgccgccctgctggccgccaccgtgcccgagcagagaaccgtgaccctggacgtggacgtgaacaacagaaccgacagactggagtggtgcagctgctactaccacggcaacttcagcctgaacgccgccttcgagatcaagctgcactggatggccgtgaccgccgccgtgctgttcgagatggtgcagggctggcacagaaaggccaccagctgcggcttcctgctggtgcccgtgctggagggccccttcgccctgcccagctacctgtacggcgaccccctgagagcccagctgttcatccccctgaacatcagctgcctgctgaaggagggcagcgagcacctgttcgacagcctgggcctgtacaagatcaacatcctgcccctgctgctgaccagcctgctgagaaccagcctgagcatcagcaccctgcaggagcagtgcttctgcagctgccccacccccagcgccagcagccagggcagcagcggcggcggcggcaccccccccgccccccccaccagaacctgcagcgccagaagcggcagcgccaccaccggccccaccaccccctgcagccccaagcacggcgcccccgccccccagggcatgaagagcctgctgatcggctgctag

SEQ ID NO: 85355 - DNA, 5410 bp, Artificial Sequence
  derived and/or modified sequence
atctggaggaggcgcagggaacctggagagggtccagccctcagtgccccggccagaggcgggaaggggctctagagcttcgggaggcaagatgacttctctgccccaagcttggaacagctaaagggaaaaacagtgcaagatgagaacaacaaaggtctacaaactcgtcatccacaagaagggctttgggggcagtgatgatgagctagttgtgaaccccaaagtgttccctcacatcaagcttggagacattgtagagattgcacaccccaacgatgaatacagccctctgcttttgcaggtcaagtctcttaaggaagatttacagaaggaaactatcagtgtggaccagactgtgactcaagtgttccggctgagaccttatcaggatgtctatgttaatgtcgtagaccctaaggatgtgacccttgacctagtggaattaacttttaaggatcagtatattggccgtggggatatgtggcgactaaagaaaagtttggtcagcacatgtgcctatatcacccagaaggtggagtttgctggcatcagagcacaggctggtgaactgtgggttaagaatgagaaggtcatgtgtggctacatcagtgaagataccagggtggtgtttcgttctacgtcggctatggtttacatatttattcagatgagctgtgaaatgtgggattttgatatttatggggatttgtattttgagaaagctgtgaatggtttccttgctgatctatttaccaagtggaaggagaagaactgtagtcatgaagtgacagtggtcctgttttctagaactttctatgatgcaaaatctgttgatgaatttcctgaaataaaccgagcctcaattcgacaggatcacaaggggagattctatgaagacttttacaaagtggtggtgcagaatgagagaagagaagaatggacttcacttctcgtaaccattaaaaaactcttcatccagtatccagtgttggtgcgactggaacaggcagagggctttcctcaaggagataattctacctcagcacaaggaaactacctggaggccatcaatctgtcattcaatgtgtttgataagcactacatcaaccgcaactttgaccgaactgggcagatgtcagtggtgatcacgcccggggtgggtgtctttgaagtggaccgcctactcatgatcctgaccaagcagcggatgatagataatggaattggtgtggatttggtgtgcatgggagagcaaccgttacatgctgtcccattgttcaagctccataatcggagtgctccccgtgattctcgtctgggcgatgactataatatccctcactggataaaccacagtttctacacatccaaaagccagctcttttgtaatagtttcaccccacgaataaaactggcaggaaagaagcccgcctctgagaaagcaaaaaatggccgtgatacatctctcgggagtccaaaagaatctgagaacgcccttcccatccaagtagattatgacgcctatgacgctcaagtgttcaggctgcccggcccatcccgggcccagtgcctcaccacctgcagatctgtgcgagagcgagagagtcacagtcgaaagagtgccagctcctgtgatgtttcatccagcccttccctaccaagccgcacactgcccactgaggaagtgaggagccaggcttctgacgacagctccctaggcaagagtgccaacatcctgatgatcccacacccccacctgcaccagtatgaagtcagcagctccttgggatacaccagcactcgagatgtcctggagaacatgatggagccaccacagcgagactccagtgcaccagggaggtttcacgttggcagtgcagaatccatgctgcatgttcgacctggtggatacacgccccagagagcactgattaaccccttcgctccctctcggatgcccatgaagcttacgtccaacagaaggcgctggatgcacacttttcctgtggggccatccggagaagccatccagatccaccaccagacccgacagaatatggcggagctacaaggcagcgggcagagggatccaactcactcctctgcagagctgctggagttagcatatcatgaagctgctggaaggcacagcaattcccgccagcctggtgacggcatgtccttcttgaacttcagtggaacagaggagctttctgtcggcctgcttagcaacagtggtgcaggtatgaatcctaggacccagaataaggattctctagaggacagtgtttctacctctccagacccaattctgacactgtctgctccccctgtagtgccaggcttctgttgcacagttggagtggactggaagtctctcactactccggcgtgcctcccccttaccaccgactacttccctgaccgccagggcctgcagaatgactacacagagggctgttatgatctccttccagaagcagacatcgacaggagggacgaagatggtgtgcagatgacagcccagcaggtatttgaagagtttatttgccaacgtctcatgcagggctaccaaatcatagtgcagcccaagacacagaaacccaatcctgctgtcccgcccccgctgagcagtagcccactctatagccgaggccttgtgtcccgaaaccgccctgaggaggaggaccagtattggctgagtatgggcagaacgttccacaaagtgacgctgaaggataagatgatcacagtgacgcgataccttcccaagtatccttatgaatctgcccagatccactacacctacagcctctgtccttcccactcagactcagagttcgtctcctgctgggtggaattctcccacgaacggctggaggagtacaagtggaattacttagatcagtatatctgttctgccggctctgaagacttcagcttaattgagtccctgaagttctggaggacccgcttcctgctgctgccagcctgtgtcaccgccaccaagcgcatcacggagggggaggcccactgcgacatctatggggacaggccccgtgcagacgaggacgagtggcaactcctggatggttttgtccgctttgtggagggcttgaatcgcattcgcaggcggcatcgctcggatcgcatgatgcggaaagggaccgccatgaaaggcttgcagatgactgggcccatttccacgcattctctggagtcaactgcacccccagtggggaagaagggaacctcagctctctctgccctgttggagatggaggccagtcagaagtgcctgggagaacagcaggcagctgtgcatggtgggaagagctccgcccagtcagccgagagcagcagcgttgccatgactcccacctacatggacagcccacgaaaggacggggccttctttatggagtttgtccgcagcccacgcacagcatcgtccgccttctaccctcaggtatctgtggaccaaacagccactcctatgttggacggcaccagtttgggcatatgcacaggccaatccatggacagaggcaacagccagacctttgggaactcccagaacataggagaacagggctactcctccacaaactccagtgacagcagctctcagcagctggtggcaagctccttgacctcatcctctaccctgacagagatcctggaagccatgaagcacccctcgacaggagtccagctgctctctgaacagaagggcctctcaccgtactgcttcatcagcgcggaggtggtacactggttggtgaaccacgtggaggggatccagacacaggcgatggccattgacatcatgcagaaaatgctggaagagcagctcatcacacatgcatctggcgaagcctggcggaccttcatctacggcttctatttctacaagatagtaacggacaaagagcccgaccgagtggccatgcagcagcccgccaccacctggcacacagcaggagtggacgacttcgccagcttccagcgcaagtggtttgaggtggcctttgtggcagaagagctcgtgcactctgagattcctgcctttctcctgccctggctgcctagccggccagcctcctatgcaagtaggcacagctcctttagccgaagttttggaggacggagccaggcggcagcacttttagctgccactgtcccagagcagaggactgtgaccctggatgttgacgtgaacaaccgcacagaccggctggagtggtgcagctgttattaccatggcaacttttctctgaatgcagcctttgagatcaagctgcactggatggcggtgaccgcagcagtactcttcgagatggtccaaggttggcatcggaaagccacctcctgtggcttcttgttagtcccagttttggaggggccttttgcactgcccagttacctgtatggcgacccccttcgtgcccagctcttcatcccactcaacatcagctgcttgctcaaggagggcagcgagcacctgtttgatagtttgggtttgtacaagataaatattctgcctctgcttttaacttccctgctgagaacaagcctcagtatatccacgttacaggaacagtgtttctgcagctgccctactccaagcgcaagttctcagggcagcagcggcggcggcggaactccaccagctccaccaaccagaacatgttctgcgaggagcgggtcggctacaactgggcctacaacaccatgctcaccaaaacatggcgctccagcgccacaggggatgaaaagtttgctgatcggctgctgaaggacttcacggacttctgcatcaaccgtgacaaccggctggtcacgttctggacaagttgcctggagaagatgcatgccagtgccccgtgaggccaggctgcacctgtgctgggggaaggtgggtgagccactgccctcaaacccggggcggaggattccaggcaggctctaggagtcaggtgtccgtttgctgctatcagtgagtgggggccattgttttttgtttgtttgtttgtttgtttgtttgtttttggcccccacgacaagtcttctactctagaagaaagactttggaagcagctgctgctgctgccaccactcctgtcagcaagtgctcagagcaggtgggaggcacagattgtccgtgggagggctccagtgtctgggaagagggcaggcggcccccatgaatgtcctcggaagggggtggctcctggtagcatccttttccttcaccatctatgggatattaggggcagaatctgccacttcttgcccaggagtgtgcacagatgtaagataattttgtgaaataatgtaccatagactctcaccaactgtatatacctgtacatatcagaagcaaataaagagctccacgtgcatc

SEQ ID NO: 85356 - protein, 1503 aa, Artificial Sequence
  derived and/or modified sequence
MRTTKVYKLVIHKKGFGGSDDELVVNPKVFPHIKLGDIVEIAHPNDEYSPLLLQVKSLKEDLQKETISVDQTVTQVFRLRPYQDVYVNVVDPKDVTLDLVELTFKDQYIGRGDMWRLKKSLVSTCAYITQKVEFAGIRAQAGELWVKNEKVMCGYISEDTRVVFRSTSAMVYIFIQMSCEMWDFDIYGDLYFEKAVNGFLADLFTKWKEKNCSHEVTVVLFSRTFYDAKSVDEFPEINRASIRQDHKGRFYEDFYKVVVQNERREEWTSLLVTIKKLFIQYPVLVRLEQAEGFPQGDNSTSAQGNYLEAINLSFNVFDKHYINRNFDRTGQMSVVITPGVGVFEVDRLLMILTKQRMIDNGIGVDLVCMGEQPLHAVPLFKLHNRSAPRDSRLGDDYNIPHWINHSFYTSKSQLFCNSFTPRIKLAGKKPASEKAKNGRDTSLGSPKESENALPIQVDYDAYDAQVFRLPGPSRAQCLTTCRSVRERESHSRKSASSCDVSSSPSLPSRTLPTEEVRSQASDDSSLGKSANILMIPHPHLHQYEVSSSLGYTSTRDVLENMMEPPQRDSSAPGRFHVGSAESMLHVRPGGYTPQRALINPFAPSRMPMKLTSNRRRWMHTFPVETSCFYLSIGMNPRTQNKDSLEDSVSTSPDPMPGFCCTVGVDWKSLTTPACLPLTTDYFPDRQGLQNDYTEGCYDLLPEADIDRRDEDGVQMTAQQVFEEFICQRLMQGYQIIVQPKTQKPNPAVPPPLSSSPLYSRGLVSRNRPEEEDQYWLSMGRTFHKVTLKDKMITVTRYLPKYPYESAQIHYTYSLCPSHSDSEFVSCWVEFSHERLEEYKWNYLDQYICSAGSEDFSLIESLKFWRTRFLLLPACVTATKRITEGEAHCDIYGDRPRADEDEWQLLDGFVRFVEGLNRIRRRHRSDRMMRKGTAMKGLQMTGPISTHSLESTAPPVGKKGTSALSALLEMEASQKCLGEQQAAVHGGKSSAQSAESSSVAMTPTYMDSPRKVSVDQTATPMLDGTSLGICTGQSMDRGNSQTFGNSQNIGEQGYSSTNSSDSSSQQLVASSLTSSSTLTEILEAMKHPSTGVQLLSEQKGLSPYCFISAEVVHWLVNHVEGIQTQAMAIDIMQKMLEEQLITHASGEAWRTFIYGFYFYKIVTDKEPDRVAMQQPATTWHTAGVDDFASFQRKWFEVAFVAEELVHSEIPAFLLPWLPSRPASYASRHSSFSRSFGGRSQAAALLAATVPEQRTVTLDVDVNNRTDRLEWCSCYYHGNFSLNAAFEIKLHWMAVTAAVLFEMVQGWHRKATSCGFLLVPVLEGPFALPSYLYGDPLRAQLFIPLNISCLLKEGSEHLFDSFEPETYWDRMHLFQEAIAHRFGFVQDKYSASAFNFPAENKPQYIHVTGTVFLQLPYSKRKFSGQQRRRRNSTSSTNQNMFCEERVGYNWAYNTMLTKTWRSSATGDEKFADRLLKDFTDFCINRDNRLVTFWTSCLEKMHASAP

SEQ ID NO: 85357 - protein, 45 aa, Artificial Sequence
  derived and/or modified sequence
MRTTKVYKLVIHKKGFGGSDDELVVNPKVFPHIKLGDIVEIAHPN

SEQ ID NO: 85358 - protein, 1503 aa, Artificial Sequence
  derived and/or modified sequence
MRTTKVYKLVIHKKGFGGSDDELVVNPKVFPHIKLGDIVEIAHPNDEYSPLLLQVKSLKEDLQKETISVDQTVTQVFRLRPYQDVYVNVVDPKDVTLDLVELTFKDQYIGRGDMWRLKKSLVSTCAYITQKVEFAGIRAQAGELWVKNEKVMCGYISEDTRVVFRSTSAMVYIFIQMSCEMWDFDIYGDLYFEKAVNGFLADLFTKWKEKNCSHEVTVVLFSRTFYDAKSVDEFPEINRASIRQDHKGRFYEDFYKVVVQNERREEWTSLLVTIKKLFIQYPVLVRLEQAEGFPQGDNSTSAQGNYLEAINLSFNVFDKHYINRNFDRTGQMSVVITPGVGVFEVDRLLMILTKQRMIDNGIGVDLVCMGEQPLHAVPLFKLHNRSAPRDSRLGDDYNIPHWINHSFYTSKSQLFCNSFTPRIKLAGKKPASEKAKNGRDTSLGSPKESENALPIQVDYDAYDAQVFRLPGPSRAQCLTTCRSVRERESHSRKSASSCDVSSSPSLPSRTLPTEEVRSQASDDSSLGKSANILMIPHPHLHQYEVSSSLGYTSTRDVLENMMEPPQRDSSAPGRFHVGSAESMLHVRPGGYTPQRALINPFAPSRMPMKLTSNRRRWMHTFPVGMNPRTQNKDSLEDSVSTSPDPILTLSAPPVVPGFCCTVGVDWKSLTTPACLPLTTDYFPDRQGLQNDYTEGCYDLLPEADIDRRDEDGVQMTAQQVFEEFICQRLMQGYQIIVQPKTQKPNPAVPPPLSSSPLYSRGLVSRNRPEEEDQYWLSMGRTFHKVTLKDKMITVTRYLPKYPYESAQIHYTYSLCPSHSDSEFVSCWVEFSHERLEEYKWNYLDQYICSAGSEDFSLIESLKFWRTRFLLLPACVTATKRITEGEAHCDIYGDRPRADEDEWQLLDGFVRFVEGLNRIRRRHRSDRMMRKGTAMKGLQMTGPISTHSLESTAPPVGKKGTSALSALLEMEASQKCLGEQQAAVHGGKSSAQSAESSSVAMTPTYMDSPRKVSVDQTATPMLDGTSLGICTGQSMDRGNSQTFGNSQNIGEQGYSSTNSSDSSSQQLVASSLTSSSTLTEILEAMKHPSTGVQLLSEQKGLSPYCFISAEVVHWLVNHVEGIQTQAMAIDIMQKMLEEQLITHASGEAWRTFIYGFYFYKIVTDKEPDRVAMQQPATTWHTAGVDDFASFQRKWFEVAFVAEELVHSEIPAFLLPWLPSRPASYASRHSSFSRSFGGRSQAAALLAATVPEQRTVTLDVDVNNRTDRLEWCSCYYHGNFSLNAAFEIKLHWMAVTAAVLFEMVQGWHRKATSCGFLLVPVLEGPFALPSYLYGDPLRAQLFIPLNISCLLKEGSEHLFDSFEPETYWDRMHLFQEAIAHRFGFVQDKYSASAFNFPAENKPQYIHVTGTVFLQLPYSKRKFSGQQRRRRNSTSSTNQNMFCEERVGYNWAYNTMLTKTWRSSATGDEKFADRLLKDFTDFCINRDNRLVTFWTSCLEKMHASAP

SEQ ID NO: 85359 - DNA, 4512 bp, Artificial Sequence
  derived and/or modified sequence
atgaggaccactaaggtttacaagctggttattcacaaaaagggcttcggtggctctgacgacgaactggtcgtgaatcccaaggtgtttccccacatcaaactgggcgacatagtggagatcgctcaccccaatgacgagtatagccccctgttgctgcaggtaaaatcgttgaaggaagacctgcagaaagagactattagcgtagaccagaccgtgactcaagtttttcggctgcgtccctatcaggatgtgtatgtcaatgtcgtggatcccaaagatgtgacccttgatctggtggagctaacatttaaggatcagtacatcggacgtggcgatatgtggagactgaaaaaatcccttgtctcgacatgcgcttacattacacagaaggtcgagtttgccggaatccgtgctcaggcgggagagctgtgggtcaagaacgaaaaggtgatgtgcgggtatatttctgaggacaccagagttgtattccgaagcaccagcgccatggtgtacattttcattcaaatgagttgcgagatgtgggatttcgacatatacggagatctttatttcgagaaggccgtgaatggttttcttgccgacctgtttactaagtggaaggagaaaaattgctctcatgaagtgaccgtggtgctgttctcccgcaccttctatgatgctaaaagcgtggacgagttccccgaaattaatcgggcttctattcgccaagatcacaagggccgtttttacgaggatttttacaaggtggtggtacagaacgagagaagagaagaatggacaagccttctcgtgaccataaaaaagctgtttatccaatatcctgtactggtccgccttgagcaggcggagggcttcccgcaaggggataattccacatcagcccaagggaattatttggaagctatcaatttgtccttcaacgtgttcgataaacattatattaatcggaactttgaccgcactggccagatgtcggtggtgattacccctggcgtgggcgtgttcgaggtggacaggttacttatgatcctcactaaacagcgaatgatagacaatggcattggtgtcgacctggtttgcatgggcgaacagcccctccacgccgtccctctttttaagctccacaaccgctcagcccctcgtgactcacggctgggagatgattataatatcccccactggattaaccacagtttttatactagcaagtcccagcttttttgcaattcttttacaccacgcattaaactcgcaggtaaaaagccagcctcagagaaagccaaaaacggtagagacacttctctcggaagccccaaggagtcagaaaacgctctgccgattcaggttgactatgacgcctatgacgcccaagtgttcagattgcccggcccaagtagagcgcaatgcttgacaacatgtcggtccgtgcgggagcgcgagagtcattcccggaaatccgctagcagctgtgatgtctcctcttcaccttctctgcccagccggacactcccaaccgaggaggtgcgctctcaggcaagtgacgactcctcgctcggtaaaagcgcgaacattctgatgatcccacacccacacttacaccagtatgaagtatcaagtagcctgggttatacttcaactcgagacgtactggaaaatatgatggagccccctcagcgggacagctctgccccgggtcgattccatgtgggaagcgctgagagcatgctgcatgtgcgcccgggtggatacacgccacagcgcgctctcatcaaccctttcgcgcccagcaggatgcccatgaagctgaccagcaacagacgacgctggatgcatacatttcccgtcgagactagctgtttttatttaagcattggtatgaatcctcgcacccagaacaaagacagtttggaagatagcgtgtcaaccagtccagatcccatgccaggcttttgctgtaccgtgggcgttgactggaaatccctcactactccagcctgtctacccctgactacagactacttccccgatcgtcagggactccagaacgattataccgaaggttgctacgacctgttgccggaggccgatattgatcggcgggacgaagacggagtgcagatgaccgcccagcaagtgtttgaagaatttatttgtcagaggctgatgcagggctaccagattatcgtgcagccgaagacccagaagcccaaccctgccgttcctccacccctgtcctcttcaccgctctatagcaggggtctggtgtcccgtaatcgacctgaagaagaggatcagtattggttgagcatggggcgtaccttccataaagtcactctgaaagataaaatgattaccgtgacaaggtatctgcctaagtacccatatgagagtgcacaaattcattatacatactccttgtgcccatctcattccgatagtgagtttgttagttgctgggtcgagttctctcacgaacggctggaggagtacaagtggaattacctggatcagtacatctgttctgccggttctgaagacttcagcctgatcgagtccctaaagttttggcgcactcgattcctgcttttgccagcctgcgtgacagccactaaaaggataactgagggagaggcgcattgcgacatctacggtgacagacctagggctgatgaagacgagtggcagctcttagacgggttcgtacggtttgtggagggtctgaacagaatcagaaggcggcaccgctccgatcgcatgatgcggaaaggtactgccatgaaagggttacaaatgacgggccccatttcaacacactctctggagtccacggcccccccagtggggaaaaaaggcacgtctgccttaagcgcactgctggaaatggaagcgagccagaaatgtctgggcgaacaacaggccgccgtgcatgggggcaaaagttcggcccagtctgcagaaagctcttctgtggctatgacacctacctatatggactcaccccggaaggtaagcgtagaccagacagcgactccaatgttggacggtaccagtctcgggatatgcactggacagtcaatggatcgcggtaattctcagacctttggaaacagccaaaatattggcgaacagggatattctagtacaaactcctcagatagctcttcacaacagctggtggccagttcactgacctcctcgtcaacgttaaccgaaatcctcgaggcaatgaagcatccgtcgaccggagtccaattgttgtcagagcagaaaggactgagcccatactgtttcatcagcgccgaggtcgtacattggctggtgaaccatgtggagggcattcagactcaggctatggcgatcgatatcatgcagaagatgctggaggaacaactaattacgcacgcgtcaggggaagcttggaggacatttatatatggcttttatttctataagattgtcactgacaaagagccagacagagtcgcaatgcagcagccagcaaccacttggcatacagctggagtggatgatttcgccagctttcaaaggaaatggtttgaggtggccttcgttgccgaggagcttgtgcactcagaaatcccagcctttctcctgccatggctgccttcaaggcctgcttcttacgcatcccggcattcatcattctccagatcatttgggggacgatcacaggctgctgctctgctggccgccacggtgcctgagcaaaggaccgtcacactggacgtagatgtaaacaaccgcactgaccgcttggagtggtgttcttgttattaccatggaaatttcagcctcaacgctgcctttgaaatcaaactccactggatggccgttaccgccgcagttctgttcgaaatggtccagggatggcatagaaaggctacatcttgcggatttctgctggtcccagtgctggaaggccctttcgccctgccatcgtatctctatggggaccctctgagggctcagctgttcataccgcttaatatctcgtgtctgctgaaagaggggtcagagcatctgtttgattcatttgagcccgagacctactgggatcgcatgcacctgtttcaggaggccattgcccatcgctttggcttcgtccaagataagtactccgcttctgcttttaattttcccgctgagaataagccgcaatacatccacgtgacaggtacagttttcctgcaactgccctattctaagaggaaattttctggacagcagcggcgaaggcggaactctaccagtagcaccaatcagaatatgttttgcgaggagcgtgtcggatacaattgggcatataatacaatgctcaccaaaacatggaggtcttcagcaactggtgacgagaaatttgcagaccggttactgaaggattttacagacttctgcattaacagagacaatcgactggttacattctggaccagttgtcttgaaaagatgcacgcctcggccccctag

SEQ ID NO: 85360 - DNA, 4512 bp, Artificial Sequence
  derived and/or modified sequence
atgaggactactaaggtgtataagctggtcatccataagaaagggtttggaggttctgacgacgagctcgtggtgaacccaaaagtgtttccccacatcaagctgggggatattgtggagattgctcatcccaatgatgagtatagcccactgctgctccaagtcaaaagtcttaaggaggatttgcagaaagaaacaatctccgtggatcaaacagtgacacaggtgtttcgtctgaggccctatcaggacgtgtacgtaaacgtcgtggaccctaaagacgtgactctggaccttgtggaactcactttcaaggatcagtacattggcagaggggacatgtggcgactgaagaagtccctggtctctacttgcgcctatattacgcaaaaagtggaatttgccggaattcgcgctcaggccggcgagctgtgggttaaaaatgagaaagtgatgtgcggttacattagcgaagacacacgagttgtgttccgatctaccagcgccatggtttacatattcatccagatgtcatgcgaaatgtgggattttgatatttacggagacttgtacttcgaaaaagcagtgaatggtttcttggccgacctgttcacgaagtggaaggaaaagaattgttcacacgaagtcaccgttgtgttgttctcgagaacgttttacgatgcaaagtccgtggacgaatttccagaaataaaccgagcttctatcaggcaagatcataaaggtagattctacgaagatttttataaagttgttgtgcagaatgagcgccgcgaggagtggacatccctgttggtcaccatcaaaaagctgttcattcagtatcccgtgctggtgcggctcgaacaggccgagggcttcccacagggggataattctaccagtgcacaggggaattatctggaagctatcaacctgagttttaacgtgtttgacaaacattacatcaataggaactttgacaggaccggacaaatgtccgtggtgatcacccctggggtgggagtgtttgaagtagatcgtcttctaatgatccttacgaaacagaggatgattgataacggtatcggtgtagacctcgtttgtatgggtgagcaacccctccacgcggtccccctgttcaagctgcacaacagatcagccccaagggactcacgtttaggggatgattacaacataccccattggatcaatcacagcttctacacctcaaaaagtcagctcttctgcaatagtttcacacctaggattaaactggcgggaaagaagcctgcttccgaaaaggctaagaatggaagagataccagtctgggctcccctaaggagtctgagaacgcactgccaatacaggtggattatgatgcttatgatgctcaggtgttcaggctgcctgggcccagtagggcccagtgtctaacaacttgcagaagcgtgcgcgagcgggagagtcattcccgcaagagtgccagcagctgtgacgtgtcctcttccccatccctcccctcacggaccctgccgaccgaagaggtcagatcacaagcatcagacgattcctccttgggcaagtcggcaaatattttaatgattccccaccctcacctccaccagtatgaggtctcgagtagcctgggctacactagcactagggatgtgctcgagaatatgatggaaccaccacagagggactctagtgctcctggccggttccatgtggggtccgctgaaagtatgctgcacgttcggcccggaggatacactcctcaacgagcccttatcaacccctttgcacctagtaggatgccaatgaaactgacatccaataggagaaggtggatgcacacctttccagtgggcatgaatcctcgtacccagaataaagactcacttgaggactccgtctcaacctcgcctgacccaatcctcactctgagcgccccccccgtagtacctggattttgttgtaccgttggtgttgactggaaaagcttgaccactccagcttgcttacccctcacgacggactattttcctgataggcagggattacagaacgactataccgaaggatgctacgacctcctgcccgaggcagacatcgacagaagggatgaggacggcgtgcagatgactgcccagcaggtgttcgaggagtttatttgtcagcgcttgatgcagggttatcagatcatagtgcagcccaaaacacagaaacccaatcctgcggtgccaccgcctctgtcgtcttctccattgtactctaggggcctggtgtcacggaacaggccagaggaagaggaccagtactggttgagtatgggcaggacttttcataaggtgactcttaaggacaagatgattacagtgactaggtacctgcccaaatacccttacgagtccgcgcagatacactacacttatagtttgtgccccagccacagtgattcggagttcgttagctgctgggtggagtttagtcacgaaaggcttgaggaatataaatggaactatcttgaccagtatatctgtagcgctggctcagaagatttcagcctcatcgaatccctcaaattttggcgcacccgcttcctcttactaccggcctgcgtgactgctaccaaacgtatcaccgaaggagaggcacattgcgatatctatggcgaccggcctcgggccgatgaggacgaatggcagttgctggacggatttgttaggtttgtagagggtttgaaccgtatacgtcggcgacaccgaagtgaccggatgatgaggaagggcactgcgatgaagggactgcagatgaccggaccgatctcaactcatagccttgagtctaccgccccaccagtcggaaagaaaggtacgtctgcgctgtcagcactgctagagatggaggcttcacaaaagtgcttgggagagcagcaggctgctgtgcatgggggcaagtcctccgcccagagtgccgagagctcttccgtggcgatgacacccacatacatggattcgccacgaaaggtatcggtggaccagactgccacccctatgctggatgggacatcactgggaatttgcaccgggcaaagtatggatcgaggaaacagtcagacattcggtaactcccaaaatatcggtgagcagggatattcatccacaaattcttctgactcttcctcccagcagttggtggcctctagtctcactagcagctccacattgacagaaatcctggaggccatgaagcacccctccaccggcgtgcaactcctctccgaacaaaaagggctctccccctactgcttcatttcagcggaggtcgtgcactggctggttaaccatgtggagggcatccagacacaagcgatggccatcgacattatgcagaagatgctcgaagaacagcttataacccatgcttctggtgaagcttggagaaccttcatttacggtttttatttctacaagatcgtcacagacaaagaacctgaccgggttgccatgcagcagcctgccaccacttggcataccgccggggtggatgacttcgcatccttccaaaggaaatggttcgaggtggcgtttgtcgcagaggagctggtgcatagtgaaattcctgcttttctcctcccatggctaccgtcacggcccgccagctatgcctctcggcactcaagcttctcacgatctttcggtggtaggagccaggctgccgcactgctggccgcaactgtgccagaacagagaaccgttaccctcgacgttgacgtgaataatcgtaccgaccgattagaatggtgtagctgttattaccatggaaacttcagtctgaacgctgccttcgagatcaagctgcactggatggccgttacggccgccgtgctgttcgagatggtgcaggggtggcatcgcaaggccacttcatgcggatttcttctggtccctgtccttgaggggccttttgcgctgccctcctatttgtatggcgatccgttgcgcgcccagctgtttatccctctcaatatcagctgtttactcaaggagggctccgagcacttgttcgattccttcgaacccgaaacttattgggataggatgcaccttttccaagaggcaatcgcccatcgctttggatttgtgcaggacaaatactcagcatcggccttcaactttcccgccgaaaacaaaccacagtacatccacgtgaccggcacagtgttcctccagctgccctatagcaaaagaaaattctccgggcagcagcgacggaggcggaatagcacttccagcaccaaccaaaacatgttttgcgaggagcgtgtgggatacaactgggcttataacacaatgctcactaaaacctggaggagtagcgctacaggcgatgagaagttcgcagatagattactgaaggactttaccgatttctgtattaatcgggacaacagactggttaccttctggacctcttgcctggaaaagatgcatgcgtctgctccgtag

SEQ ID NO: 85361 - DNA, 1995 bp, Artificial Sequence
  derived and/or modified sequence
atgcgcactacaaaggtctataagctcgtgattcataagaagggcttcggaggaagcgacgacgaactggtagttaaccccaaagtgttcccccacatcaagctcggtgatatagtggagatcgcacatccgaacgacgagtactctccgctcctgctgcaggtgaagtcactcaaagaggatcttcagaaggaaacgatctcggtcgatcaaaccgtgactcaggtgtttcgtctgaggccatatcaggacgtttatgtgaacgtggtggaccccaaggttagtacctgcgcctatatcacgcaaaaggtagagtttgctggcataagggctcaagccggtgaactgtgggtcaaaaatgagaaggtcatgtgcggttacatctcagaagatactagggtcgtattccgctctactagcgccatggtctacatttttatccagatgtcttgcgagatgtgggattttgacatctacggcgacctttattttgaaaaggccgtcaatggctttctcgccgacctgtttaccaaatggaaggagaagaattgtagccacgaagttacagtggtattattctcccggaccttctatgacgctaaaagtgtggatgaattccccgagatcaatagggcgagcattcgccaggatcacaagggacgattttacgaagatttttataaagtggtcgtccagaatgagaggagagaggagtggaccagtctgcttgttactatcaagaaactgtttatccaatatccagtcctggtccgtcttgagcaagccgaaggtttcccacagggcgataacagcacatccgcccagggtaattaccttgaggccatcaaccttagttttaatgtgttcgataagcactatattaatagaaatttcgataggactgggcaaatgtcagtcgttatcactcccggcgtgggagtttttgaagtggacagactactgatgattctaacaaagcaaagaatgatcgataatggcatcggtgttgatctggtgtgtatgggggaacagccattgcatgccgtgcccttgtttaagctgcacaacaggtccgctccccgggatagtagactcggtgacgattataatatcccacactggattaatcactctttctatacttctaaaagccaactcttctgtaatagcttcacccctcgaatcaagcttgcaggcaagaagcccgcatcagaaaaagccaagaacggccgagacacatccttgggcagtccaaaggagtccgaaaacgccttacccattcaagtagactacgatgcttacgacgcacaggtattccgcctgccaggcccatccagagcacagtgccttaccacatgccggagtgtgcgagagcgagagagtcacagtcgcaagtccgcttcctcctgcgacgtgtctagcagcccctccctgcccagcagaactctgcctacagaagaggtgcggtcacaggcatctgacgactccagtctcggaaaatcagccaatattctgatgattccacacccccatctgcaccaatatgaagtgagtagctcactaggatatacgagcacgcgcgatgtgcttgagaatatgatggagcccccacagagggattcctcagctccaggaaggttccacgtcggcagtgcggaaagtatgttacatgtaaggcctggcgggtacaccccccaacgggccttaatcaatccttttgcgccctcccgcatgcccatgaaacttacctccaatcgaaggcggtggatgcatacctttcccgttggcatgaaccctagaactcaaaacaaggactcactcgaggattcagtgtctacctcccctgacccatctaagaggggacagctgaccggagagaggggtcgtcaaggtgtgtggggaggccagagtatgaggaaacaagaggaagcactgtgggaagtttcggggcctgaggttcacatccctttggggtatggtaaggctatgtggtag

SEQ ID NO: 85362 - DNA, 4512 bp, Artificial Sequence
  derived and/or modified sequence
atgaggaccaccaaggtgtacaagctggtgatccacaagaagggctttggaggcagtgatgatgagctggtggtgaaccccaaggtgttcccccacatcaagctgggggacatcgtggagatcgcccaccccaatgatgagtacagccccctgctgctgcaggtgaagagcctgaaggaggacctgcagaaggagaccatctctgtggaccagacagtgacccaggtgttccggctgcggccctaccaggatgtgtatgtgaatgtggtggaccccaaggatgtgaccctggacctggtggagctgaccttcaaggaccagtacatcggccgcggggacatgtggaggctgaagaagagcctggtgtccacctgtgcctacatcacccagaaggtggagtttgctggcatccgggcccaggccggggagctgtgggtgaagaatgagaaggtgatgtgtggctacatcagcgaggacaccagggtggtgttccgcagcaccagcgccatggtgtacatcttcatccagatgagctgtgagatgtgggactttgacatctatggagacctgtactttgagaaggctgtgaatggcttcctggccgacctcttcaccaagtggaaggagaagaactgcagccatgaggtgacagtggtgctcttcagcaggaccttctatgatgccaagtctgtggatgagttccctgagatcaacagagccagcatccggcaggaccacaagggccgcttctatgaggacttctacaaggtggtggtgcagaatgaaagaagagaggagtggaccagcctgctggtgaccatcaagaagctgttcatccagtaccctgtgctggtgcggctggagcaggccgagggcttcccccagggcgacaacagcaccagcgcccagggcaactacctggaggccatcaacctgtccttcaacgtgtttgacaagcactacatcaacagaaactttgacagaacaggccagatgtctgtggtgatcaccccaggagtgggcgtgtttgaggtggaccggctgctgatgatcctgaccaagcagaggatgattgacaatggcatcggcgtggacctggtgtgcatgggagagcagcccctgcatgctgtgcccctcttcaagctgcacaacagaagtgccccccgggacagccggctgggagatgactacaacatcccccactggatcaaccacagcttctacaccagcaagagccagctgttctgcaacagcttcaccccccgcatcaagctggccggcaagaagccagccagcgagaaggccaagaatggccgggacaccagcctgggcagccccaaggagagtgaaaatgccctgcccatccaggtggactatgatgcctatgatgcccaggtgttccggctgcccggccccagccgggcccagtgcctgaccacctgccgctctgtgcgggagcgggagagccacagcaggaagagcgccagcagctgtgatgtgagcagcagccccagcctgcccagcaggaccctgcccacagaggaggtgcgcagccaggccagtgatgacagcagcctgggcaagagcgccaacatcctgatgatcccccacccccacctgcaccagtatgaggtgagcagcagcctgggctacaccagcaccagagatgtgctggagaacatgatggagcccccccagagggacagcagcgcccctggccgcttccacgtgggcagcgctgagagcatgctgcacgtgcggcctgggggctacaccccccagagggccctgatcaacccctttgcccccagcaggatgcccatgaagctgaccagcaacagaagacgctggatgcacaccttccctgtggagaccagctgcttctacctgagcatcggcatgaaccccaggacccagaacaaggacagcctggaggacagcgtgtccaccagcccagaccccatgcctggcttctgctgcaccgtgggcgtggactggaagagcctgaccaccccagcctgcctgcccctgaccacagactacttcccagaccggcagggcctgcagaatgactacacagagggctgctatgacctgctgcctgaggccgacatcgacagaagagatgaagatggagtgcagatgacagcccagcaggtgtttgaggagttcatctgccagaggctgatgcagggctaccagatcatcgtgcagcccaagacccagaagcccaacccagctgtgcccccacccctgagcagcagccccctgtacagccggggcctggtgtccaggaacagacctgaggaggaggaccagtactggctgtccatgggccgcaccttccacaaggtgaccctgaaggacaagatgatcaccgtgacccgctacctgcccaagtacccctatgaaagtgcccagatccactacacctacagcctgtgccccagccacagcgacagcgagtttgtgtcctgctgggtggagttcagccatgagcggctggaggagtacaagtggaactacctggaccagtacatctgcagcgctggcagcgaggacttcagcctcatcgagagcctgaagttctggaggacccgcttcctgctgctgcctgcctgtgtgacagccaccaagaggatcacagaaggagaggcccactgtgacatctatggagaccggcccagggcagatgaagatgagtggcagctgctggatggctttgtgcgctttgtggagggcctgaaccgcatcagaagaagacacagaagtgacaggatgatgaggaagggcacagccatgaagggcctgcagatgacaggccccatcagcacccacagcctggagagcacagcccctcctgtgggcaagaagggcaccagcgccctgagcgccctgctggagatggaggccagccagaagtgcctgggggagcagcaggccgctgtgcacggcggcaagagcagcgcccagagcgctgagagcagctctgtggccatgacccccacctacatggacagccccaggaaggtgtctgtggaccagacagccacccccatgctggatggcaccagcctgggcatctgcaccggccagagcatggaccggggcaacagccagaccttcggcaacagccagaacatcggggagcagggctacagcagcaccaacagcagtgacagcagcagccagcagctggtggccagcagcctgaccagcagcagcaccctgacagagatcctggaggccatgaagcaccccagcactggagtgcagctgctgtctgagcagaagggcctgagcccctactgcttcatctctgctgaggtggtgcactggctggtgaaccacgtggagggcatccagacccaggccatggccatcgacatcatgcagaagatgctggaggagcagctgatcacccacgccagcggggaggcctggaggaccttcatctacggcttctacttctacaagatcgtgacagacaaggagccagacagagtggccatgcagcagcctgccaccacctggcacacagctggggtggatgactttgccagcttccagaggaagtggtttgaggtggcctttgtggccgaggagctggtgcacagcgagatcccagccttcctgctgccctggctgcccagcaggcctgccagctatgccagccgccacagcagcttcagccgcagctttggaggccgcagccaggccgccgccctgctggccgccaccgtgcctgagcagaggacagtgaccctggatgtggatgtgaacaacagaacagaccggctggagtggtgcagctgctactaccacggcaacttcagcctgaatgctgcctttgagatcaagctgcactggatggctgtgacagctgctgtgctgtttgagatggtgcagggctggcacaggaaggccaccagctgtggcttcctgctggtgcctgtgctggagggcccctttgccctgcccagctacctgtatggagaccccctgcgggcccagctgttcatccccctgaacatcagctgcctgctgaaggagggcagcgagcacctgtttgacagctttgagcctgagacctactgggacaggatgcacctgttccaggaggccatcgcccaccgcttcggctttgtgcaggacaagtacagcgccagcgccttcaacttccctgctgagaacaagccccagtacatccacgtgacaggcaccgtcttcctgcagctgccctacagcaagaggaagttcagcggccagcagaggagaagaagaaacagcaccagcagcaccaaccagaacatgttctgtgaggagcgggtgggctacaactgggcctacaacaccatgctgaccaagacctggaggagcagcgccactggagatgagaagtttgctgaccggctgctgaaggacttcacagacttctgcatcaacagagacaaccggctggtgaccttctggaccagctgcctggagaagatgcacgccagcgccccctag

SEQ ID NO: 85363 - DNA, 4512 bp, Artificial Sequence
  derived and/or modified sequence
atgaggaccaccaaggtgtacaagctggtgatccacaagaagggctttggaggcagtgatgatgagctggtggtgaaccccaaggtgttcccccacatcaagctgggggacatcgtggagatcgcccaccccaatgatgagtacagccccctgctgctgcaggtgaagagcctgaaggaggacctgcagaaggagaccatctctgtggaccagacagtgacccaggtgttccggctgcggccctaccaggatgtgtatgtgaatgtggtggaccccaaggatgtgaccctggacctggtggagctgaccttcaaggaccagtacatcggccgcggggacatgtggaggctgaagaagagcctggtgtccacctgtgcctacatcacccagaaggtggagtttgctggcatccgggcccaggccggggagctgtgggtgaagaatgagaaggtgatgtgtggctacatcagcgaggacaccagggtggtgttccgcagcaccagcgccatggtgtacatcttcatccagatgagctgtgagatgtgggactttgacatctatggagacctgtactttgagaaggctgtgaatggcttcctggccgacctcttcaccaagtggaaggagaagaactgcagccatgaggtgacagtggtgctcttcagcaggaccttctatgatgccaagtctgtggatgagttccctgagatcaacagagccagcatccggcaggaccacaagggccgcttctatgaggacttctacaaggtggtggtgcagaatgaaagaagagaggagtggaccagcctgctggtgaccatcaagaagctgttcatccagtaccctgtgctggtgcggctggagcaggccgagggcttcccccagggcgacaacagcaccagcgcccagggcaactacctggaggccatcaacctgtccttcaacgtgtttgacaagcactacatcaacagaaactttgacagaacaggccagatgtctgtggtgatcaccccaggagtgggcgtgtttgaggtggaccggctgctgatgatcctgaccaagcagaggatgattgacaatggcatcggcgtggacctggtgtgcatgggagagcagcccctgcatgctgtgcccctcttcaagctgcacaacagaagtgccccccgggacagccggctgggagatgactacaacatcccccactggatcaaccacagcttctacaccagcaagagccagctgttctgcaacagcttcaccccccgcatcaagctggccggcaagaagccagccagcgagaaggccaagaatggccgggacaccagcctgggcagccccaaggagagtgaaaatgccctgcccatccaggtggactatgatgcctatgatgcccaggtgttccggctgcccggccccagccgggcccagtgcctgaccacctgccgctctgtgcgggagcgggagagccacagcaggaagagcgccagcagctgtgatgtgagcagcagccccagcctgcccagcaggaccctgcccacagaggaggtgcgcagccaggccagtgatgacagcagcctgggcaagagcgccaacatcctgatgatcccccacccccacctgcaccagtatgaggtgagcagcagcctgggctacaccagcaccagagatgtgctggagaacatgatggagcccccccagagggacagcagcgcccctggccgcttccacgtgggcagcgctgagagcatgctgcacgtgcggcctgggggctacaccccccagagggccctgatcaacccctttgcccccagcaggatgcccatgaagctgaccagcaacagaagacgctggatgcacaccttccctgtgggcatgaaccccaggacccagaacaaggacagcctggaggacagcgtgtccaccagcccagaccccatcctgaccctgagcgcccctcctgtggtgcccggcttctgctgcaccgtgggcgtggactggaagagcctgaccaccccagcctgcctgcccctgaccacagactacttcccagaccggcagggcctgcagaatgactacacagagggctgctatgacctgctgcctgaggccgacatcgacagaagagatgaagatggagtgcagatgacagcccagcaggtgtttgaggagttcatctgccagaggctgatgcagggctaccagatcatcgtgcagcccaagacccagaagcccaacccagctgtgcccccacccctgagcagcagccccctgtacagccggggcctggtgtccaggaacagacctgaggaggaggaccagtactggctgtccatgggccgcaccttccacaaggtgaccctgaaggacaagatgatcaccgtgacccgctacctgcccaagtacccctatgaaagtgcccagatccactacacctacagcctgtgccccagccacagcgacagcgagtttgtgtcctgctgggtggagttcagccatgagcggctggaggagtacaagtggaactacctggaccagtacatctgcagcgctggcagcgaggacttcagcctcatcgagagcctgaagttctggaggacccgcttcctgctgctgcctgcctgtgtgacagccaccaagaggatcacagaaggagaggcccactgtgacatctatggagaccggcccagggcagatgaagatgagtggcagctgctggatggctttgtgcgctttgtggagggcctgaaccgcatcagaagaagacacagaagtgacaggatgatgaggaagggcacagccatgaagggcctgcagatgacaggccccatcagcacccacagcctggagagcacagcccctcctgtgggcaagaagggcaccagcgccctgagcgccctgctggagatggaggccagccagaagtgcctgggggagcagcaggccgctgtgcacggcggcaagagcagcgcccagagcgctgagagcagctctgtggccatgacccccacctacatggacagccccaggaaggtgtctgtggaccagacagccacccccatgctggatggcaccagcctgggcatctgcaccggccagagcatggaccggggcaacagccagaccttcggcaacagccagaacatcggggagcagggctacagcagcaccaacagcagtgacagcagcagccagcagctggtggccagcagcctgaccagcagcagcaccctgacagagatcctggaggccatgaagcaccccagcactggagtgcagctgctgtctgagcagaagggcctgagcccctactgcttcatctctgctgaggtggtgcactggctggtgaaccacgtggagggcatccagacccaggccatggccatcgacatcatgcagaagatgctggaggagcagctgatcacccacgccagcggggaggcctggaggaccttcatctacggcttctacttctacaagatcgtgacagacaaggagccagacagagtggccatgcagcagcctgccaccacctggcacacagctggggtggatgactttgccagcttccagaggaagtggtttgaggtggcctttgtggccgaggagctggtgcacagcgagatcccagccttcctgctgccctggctgcccagcaggcctgccagctatgccagccgccacagcagcttcagccgcagctttggaggccgcagccaggccgccgccctgctggccgccaccgtgcctgagcagaggacagtgaccctggatgtggatgtgaacaacagaacagaccggctggagtggtgcagctgctactaccacggcaacttcagcctgaatgctgcctttgagatcaagctgcactggatggctgtgacagctgctgtgctgtttgagatggtgcagggctggcacaggaaggccaccagctgtggcttcctgctggtgcctgtgctggagggcccctttgccctgcccagctacctgtatggagaccccctgcgggcccagctgttcatccccctgaacatcagctgcctgctgaaggagggcagcgagcacctgtttgacagctttgagcctgagacctactgggacaggatgcacctgttccaggaggccatcgcccaccgcttcggctttgtgcaggacaagtacagcgccagcgccttcaacttccctgctgagaacaagccccagtacatccacgtgacaggcaccgtcttcctgcagctgccctacagcaagaggaagttcagcggccagcagaggagaagaagaaacagcaccagcagcaccaaccagaacatgttctgtgaggagcgggtgggctacaactgggcctacaacaccatgctgaccaagacctggaggagcagcgccactggagatgagaagtttgctgaccggctgctgaaggacttcacagacttctgcatcaacagagacaaccggctggtgaccttctggaccagctgcctggagaagatgcacgccagcgccccctag

SEQ ID NO: 85364 - DNA, 1995 bp, Artificial Sequence
  derived and/or modified sequence
atgaggaccaccaaggtgtacaagctggtgatccacaagaagggctttggaggcagtgatgatgagctggtggtgaaccccaaggtgttcccccacatcaagctgggggacatcgtggagatcgcccaccccaatgatgagtacagccccctgctgctgcaggtgaagagcctgaaggaggacctgcagaaggagaccatctctgtggaccagacagtgacccaggtgttccggctgcggccctaccaggatgtgtatgtgaatgtggtggaccccaaggtgtccacctgtgcctacatcacccagaaggtggagtttgctggcatccgggcccaggccggggagctgtgggtgaagaatgagaaggtgatgtgtggctacatcagcgaggacaccagggtggtgttccgcagcaccagcgccatggtgtacatcttcatccagatgagctgtgagatgtgggactttgacatctatggagacctgtactttgagaaggctgtgaatggcttcctggccgacctcttcaccaagtggaaggagaagaactgcagccatgaggtgacagtggtgctcttcagcaggaccttctatgatgccaagtctgtggatgagttccctgagatcaacagagccagcatccggcaggaccacaagggccgcttctatgaggacttctacaaggtggtggtgcagaatgaaagaagagaggagtggaccagcctgctggtgaccatcaagaagctgttcatccagtaccctgtgctggtgcggctggagcaggccgagggcttcccccagggcgacaacagcaccagcgcccagggcaactacctggaggccatcaacctgtccttcaacgtgtttgacaagcactacatcaacagaaactttgacagaacaggccagatgtctgtggtgatcaccccaggagtgggcgtgtttgaggtggaccggctgctgatgatcctgaccaagcagaggatgattgacaatggcatcggcgtggacctggtgtgcatgggagagcagcccctgcatgctgtgcccctcttcaagctgcacaacagaagtgccccccgggacagccggctgggagatgactacaacatcccccactggatcaaccacagcttctacaccagcaagagccagctgttctgcaacagcttcaccccccgcatcaagctggccggcaagaagccagccagcgagaaggccaagaatggccgggacaccagcctgggcagccccaaggagagtgaaaatgccctgcccatccaggtggactatgatgcctatgatgcccaggtgttccggctgcccggccccagccgggcccagtgcctgaccacctgccgctctgtgcgggagcgggagagccacagcaggaagagcgccagcagctgtgatgtgagcagcagccccagcctgcccagcaggaccctgcccacagaggaggtgcgcagccaggccagtgatgacagcagcctgggcaagagcgccaacatcctgatgatcccccacccccacctgcaccagtatgaggtgagcagcagcctgggctacaccagcaccagagatgtgctggagaacatgatggagcccccccagagggacagcagcgcccctggccgcttccacgtgggcagcgctgagagcatgctgcacgtgcggcctgggggctacaccccccagagggccctgatcaacccctttgcccccagcaggatgcccatgaagctgaccagcaacagaagacgctggatgcacaccttccctgtgggcatgaaccccaggacccagaacaaggacagcctggaggacagcgtgtccaccagcccagaccccagcaagaggggccagctgaccggggagcggggccggcagggcgtgtggggcggccagagcatgaggaagcaggaggaggccctgtgggaggtgtctggccctgaggtgcacatccccctgggctacggcaaggccatgtggtag

SEQ ID NO: 85365 - DNA, 4512 bp, Artificial Sequence
  derived and/or modified sequence
atgcggaccaccaaggtgtacaagctggtgatccacaagaagggctttggaggaagcgacgacgagctcgtggtgaacccaaaagtgttcccccatatcaagctgggagacattgtggaaatcgctcacccaaatgacgaatacagccccctgttactgcaagttaaatctttgaaagaggatctgcaaaaggaaaccatctccgtggaccagaccgttactcaggtattcaggttgagaccgtaccaggacgtgtatgtgaacgtggtcgatcccaaagatgtgacactggatctggtggaactcacctttaaagatcagtacatcggtagaggagatatgtggcgtttgaagaaatccctcgtcagcacctgtgcctatatcactcagaaggtcgagttcgccggcatccgagcccaagccggtgagctgtgggtaaagaatgagaaagtcatgtgcggttacatcagcgaagacaccagagtggtctttaggtctacatcagcgatggtatatatctttatccagatgagttgtgagatgtgggattttgacatctacggcgatctgtactttgagaaagccgtcaacgggttcttggcagatcttttcaccaagtggaaagaaaagaactgttcacatgaggtaaccgtcgtgctcttctccaggacattttacgacgcaaaatcagtcgacgagttcccagagatcaaccgtgcctccatacggcaggaccacaaaggcagattctatgaggatttttataaggttgtggtccagaatgaacggcgcgaggaatggacaagcctgctggtgactataaaaaagctgtttatccagtacccagtgctagtgcggctggagcaggctgaagggttccctcagggagataatagcactagcgctcaaggaaattatctagaggcaatcaacttaagtttcaacgtttttgataagcactatataaatagaaatttcgataggacaggccaaatgagcgttgtgatcacgcccggagtaggggtatttgaagtggacagactactgatgatcctgaccaaacagaggatgatcgataatgggattggcgtggacttagtgtgcatgggcgaacagcctctgcacgcagtgcccctattcaaattgcataaccggtccgcccctagagactcccgtttaggagatgactataacatcccccactggattaaccacagcttctatacgagtaagagtcagctgttctgtaattcctttacccccaggattaagctcgcagggaaaaaacccgctagcgagaaggctaagaatggcagggatacctcactcggttctcctaaggaaagcgagaacgccctcccaattcaagtagactacgatgcctatgatgctcaagtgttccgcttaccaggcccttctagagcccagtgcctcaccacctgtaggtccgttcgggagcgggagtctcattcacggaaaagcgcatccagctgtgacgtgtcaagtagcccctcactgccatcacgaaccctgcccaccgaagaggtgaggagccaggcgagcgacgactcttctctcggaaagtctgccaatatcttgatgatcccccaccctcacctgcaccagtatgaggtgagttcatctctcggctacacaagtacaagggacgtgcttgagaacatgatggagcccccccagcgagactcatctgctccaggcaggttccacgtaggcagcgccgagtccatgttacacgtccgacctggcgggtacactcctcagcgggccctgattaatccctttgccccatcccggatgcctatgaagctgacttctaacagacgcaggtggatgcatacgttcccggtggaaacttcctgtttctacctcagcattggaatgaatcccagaacacaaaacaaggacagcctggaggatagcgtcagcacttcgcccgaccccatgcctggattttgttgtaccgtgggagtcgattggaagtccctaacgaccccggcttgcttgccacttactaccgactactttcctgaccgccaggggttacagaacgactacactgaaggctgttacgatctgttgccggaggccgatatagaccgccgggacgaggacggcgtccagatgaccgcccagcaggttttcgaagagttcatctgccagcgcctcatgcagggttatcaaatcattgtccagccgaaaacgcaaaagcctaacccagctgtaccaccccctctctcaagctctcccctctacagccgaggcctcgttagccgcaacaggcccgaagaggaagaccagtactggctgagcatgggacggaccttccataaagtaacattgaaagacaagatgattacggtgacccgctaccttccgaagtatccttatgagtcggcccaaatccactatacatatagtctttgcccaagccactccgattctgaatttgtctcttgctgggtggaattcagtcatgagaggctcgaagaatataagtggaattacctcgatcagtacatttgcagcgcgggttccgaagatttttccctgatcgagtccctgaaattctggcggacgcggttccttctgctgcctgcatgcgtgaccgccaccaagaggatcactgagggggaggcccactgcgacatttatggcgacagaccaagagcagatgaagacgaatggcaactgttagacgggtttgtcagattcgttgaaggactgaatcgaattcgcaggaggcatcgcagtgacagaatgatgaggaaggggactgcgatgaagggcctgcagatgaccgggcctataagcacccatagcctcgagtctactgcccctccggttgggaaaaagggaacctctgccctgtccgctctactggagatggaggcctctcagaagtgcctgggagagcagcaagctgcggttcacggaggaaagtcctccgctcagtctgccgagtcctcatcagtggcaatgacccctacttatatggacagtccacgaaaggtatcagttgatcaaactgccaccccaatgttagacggaacctccctgggcatttgtacaggccagtcaatggatcgcgggaactcccagacctttggtaattctcagaatattggagagcagggttattcctcaactaacagctctgacagctcctcccagcagttggtcgcgtcaagcctgacaagcagcagcaccctaactgaaattctggaagccatgaagcacccatcaacaggcgttcagctgctgtcagaacagaaggggctttccccgtactgtttcatttctgctgaagttgttcattggctggtcaaccatgtcgagggaatacagacacaggccatggccatcgacattatgcaaaagatgttagaagagcagctcattacacacgctagcggggaggcttggaggacctttatttatggcttctacttttacaagatcgtcaccgacaaagagcccgaccgcgtcgcaatgcagcagcctgccacaacctggcacacagcaggtgttgatgactttgcttcgttccagaggaagtggtttgaggttgctttcgtggcagaggagctcgtccacagcgaaattcccgctttcctgcttccatggctcccgtcgcggcctgcatcatacgctagcaggcattcctcattctcacgttcattcggtggacgctcccaagccgctgctctcctggcggctaccgtgccggaacagcgaaccgtcactctagacgtggacgtaaataaccggacagatcgccttgagtggtgttcttgctattaccacggaaacttctcacttaacgctgcctttgagattaaactgcactggatggctgtgacagccgcagtgctgtttgagatggtgcaggggtggcaccgtaaggccacaagctgcggcttcctgctcgtccccgtgcttgaagggcctttcgctctgccttcttacctctacggcgaccccctacgagcccagttgttcatccctctgaacataagctgccttctgaaggagggctccgagcatttgttcgattccttcgaacccgaaacctattgggaccgcatgcatttatttcaggaggccatcgctcaccgcttcggattcgttcaggacaaatactccgcttcagctttcaactttccggccgaaaacaaaccccagtatattcatgtaactggcacggtgtttcttcaactaccatactcaaagaggaaatttagcggccaacaaagaagacggagaaattcgacatccagcacaaaccaaaatatgttttgtgaagaacgcgtgggatataattgggcttataacaccatgctgaccaagacctggagatcatccgcaaccggcgacgagaaattcgccgacagactgcttaaagatttcacagatttctgcatcaacagggataaccgactggtcaccttctggacctcctgcttagagaaaatgcatgccagtgcaccatag

SEQ ID NO: 85366 - DNA, 4512 bp, Artificial Sequence
  derived and/or modified sequence
atgcggaccaccaaggtgtacaagctggtgatccacaagaagggcttcggaggctcagacgacgagctagtggttaaccctaaggtgtttcctcatattaaactcggagacattgtcgagatagcacacccaaatgacgagtatagtcccctgctcctgcaagtgaaaagcctgaaggaagacctgcagaaggagaccatttctgtcgatcagaccgtgacgcaggtgttccgcctgcggccctaccaggacgtctacgtcaatgtcgtcgatcctaaggacgtaacactcgacttggtggagctgaccttcaaggatcagtatatcggtcgtggcgatatgtggcgcctgaaaaagagcctcgtttcaacgtgcgcctatattacacagaaagtcgaatttgcaggcattagagcgcaggctggcgaattgtgggtcaagaacgaaaaagtgatgtgtggctatatttcggaagatacccgcgttgtgtttagaagcacctcagcgatggtttacattttcatacagatgagctgtgagatgtgggatttcgacatttacggagacctgtactttgaaaaagctgtgaatggattcctggcagatttattcacaaagtggaaggagaagaactgtagtcacgaggtgactgtagtgctgttcagtaggactttttacgacgcaaagtccgtcgatgagtttccagaaattaacagagctagtattcggcaggatcataaagggagattttatgaggatttctataaggtggtggtgcagaacgagagacgggaggagtggacaagcctcctggtgaccattaagaagctcttcatccagtatcccgtcctcgtccgtttggaacaggccgagggatttccacagggcgacaattctaccagcgcgcagggcaattacctggaagcaattaacctcagcttcaacgtgttcgataagcactacatcaacagaaattttgatagaaccggccagatgagtgtggtaattacacccggggtaggggtgttcgaagtagaccgcctgctgatgatcttgaccaagcagcgtatgattgacaacggaatcggcgtggacctggtgtgcatgggagagcagcctctccacgcagtccctctattcaaactgcataacagatcagctccacgtgattctagactgggagacgactataatatccctcactggatcaaccactcattctatacatctaaaagtcagttattttgcaactctttcaccccgcgcatcaaactcgctggaaaaaagccggcgagcgagaaagccaaaaacggacgtgatacaagtctcggttctccaaaggaatccgagaacgcattgccaattcaggttgattacgatgcctatgatgcgcaggtgttcaggctacctgggccgtcaagggctcagtgccttacaacatgcagaagcgtcagggagcgagagtctcattctcggaaaagcgcatctagctgcgatgtatctagcagcccttcactacctagccggaccttgcccaccgaggaggtgcgcagccaagccagtgacgacagtagcctgggtaagagcgctaacatcctgatgatcccgcacccccacttacaccagtacgaagtgtctagctccctcgggtatacttccacacgagacgtgctggagaacatgatggagccaccgcagagagattccagcgccccaggcagattccatgtggggagcgctgagtcaatgctccacgtaaggcccggaggatatacgccacaaagggccctcattaacccattcgctccatctagaatgcccatgaagctgacatcaaatcgtcggagatggatgcacacattcccagtgggtatgaaccccaggactcagaataaggactccctggaagatagcgtgtcaaccagccccgatccaatactcactctctcagcaccccctgtggtccctgggttttgttgcacagtcggggttgactggaagtctctcacgacccccgcctgtctcccactgactaccgactatttccctgaccgacaggggctgcagaatgattacaccgagggctgttacgacctgttacccgaggcggatatcgacaggcgtgatgaagatggcgttcagatgactgcacagcaggtgtttgaagagtttatttgtcaaagactcatgcagggatatcagataattgtacagcctaagacccagaagcctaatccagcagtccctccacccctgagctccagcccactctactctcgcggtctggtgtcccgtaacaggccagaggaagaagatcagtactggttgagtatgggccgaacgttccacaaggtgactctgaaggataaaatgatcacagtgactcgttacctccccaagtatccttatgagtctgcacagatccactacacctatagcctctgtccatcacatagtgattccgaattcgtgagctgttgggttgagttcagccacgagcggttggaggaatacaaatggaattatctcgaccagtacatctgctcagctggtagcgaagattttagcctgattgagtccctcaagttctggcggacccgctttctcttgctgccagcatgtgtcaccgccaccaagcggattacagagggcgaagcccactgcgatatctacggggacagaccccgcgccgacgaggatgagtggcagctgcttgatggcttcgtgcggttcgtggagggcctcaaccgcatccgcagaaggcatagaagtgacagaatgatgagaaaggggacagccatgaaggggttgcagatgacaggccctatttctacacattccctggagtctaccgccccgcccgtgggtaagaagggcaccagtgcgctttctgccctcctggaaatggaagcaagccaaaaatgcctgggagagcagcaggccgccgtgcatggcggcaagagtagtgcacagtcagctgagagcagctccgtagctatgacacccacctatatggactccccacggaaagtatccgtagaccagaccgccacaccaatgttggacggtaccagccttggtatctgcactggacaaagcatggatcgcgggaactctcaaacgttcggcaatagccaaaacatcggtgagcagggttatagctccacaaattcttccgactcctcaagtcagcagctggtggcaagctccttgacttctagctccactctgacagaaatcctcgaggcaatgaaacaccctagtacgggcgtacagctcctctcggagcaaaagggactttccccttactgtttcatttcggccgaagtcgtacattggttggttaatcacgtggagggtatccagacgcaagcaatggcaatagacataatgcagaagatgttagaagaacagctgattacacatgcctccggagaagcttggcggacctttatttatggcttctatttttacaaaatcgtcacggacaaggagcccgacagggtggctatgcagcagccagccacaacatggcataccgccggagtcgatgactttgccagttttcagagaaaatggtttgaagttgccttcgtggccgaggaactggttcactccgagatccccgcctttctcctaccttggctcccttcaaggccagccagttatgccagtagacacagttcgttttctaggagctttggcggccgttcgcaagccgctgccctgcttgccgcaaccgttccagaacaaaggacagttaccctcgatgtggatgtgaataacagaaccgatagactcgaatggtgttcatgttattatcatgggaacttctcactgaacgcggccttcgagatcaaactccactggatggctgtaacagctgcagtgctattcgagatggttcagggctggcatagaaaagcgacctcatgcggtttcctgctggttcctgtcctcgaaggcccttttgcactcccaagctatctctatggagatccactgcgggcccagctgtttatccccctcaatatcagctgtctgctcaaagagggatccgaacatctctttgatagttttgagccggagacttactgggatcggatgcatctgtttcaggaggctatcgcgcacagatttggctttgtccaggacaaatactctgcctcggcctttaactttccggctgaaaacaaacctcagtatatccacgtaacaggcactgtgttcttacagctgccttactcgaaacgcaagttctctggccaacagcggcgtaggagaaatagtactagctctactaatcagaacatgttctgcgaggaaagagtcggatacaattgggcttataataccatgcttaccaagacttggcgttcctcagccactggagatgaaaaattcgctgatagattactcaaagatttcactgacttctgtatcaaccgcgacaacagactagtgacgttttggacctcatgcctggaaaagatgcatgcctccgcaccttag

SEQ ID NO: 85367 - DNA, 1995 bp, Artificial Sequence
  derived and/or modified sequence
atgcggaccaccaaggtgtacaagctggtgatccacaagaagggctttggagggagcgatgatgagttggtggttaatcccaaagtgttccctcacatcaaactgggcgacattgtggaaatcgcccatcctaacgatgagtactccccattgctcctccaagtgaaaagcctgaaagaggacctgcagaaggagacgattagcgtcgatcagaccgtcacacaggtgttccgactaaggccatatcaggatgtatatgtaaatgtagtcgaccccaaggtttcaacttgcgcgtacatcacccagaaagtagagttcgctgggattcgcgctcaggctggggaactgtgggtgaagaacgagaaggtcatgtgtggatatatcagcgaggatacccgggtggtgtttcgctccacctccgcaatggtgtacatcttcatccagatgagttgtgaaatgtgggatttcgatatctacggggacctatacttcgaaaaggccgtgaatgggttcttggcagacctgttcacgaagtggaaggagaagaattgctcacacgaggtgactgtagtcctcttcagtaggaccttttacgacgctaaaagtgtggatgagttcccagagattaaccgcgcctctatccgacaggaccacaagggccgcttttacgaagatttttataaggtagttgtccagaatgagaggcgggaggaatggacatccctgttggtcacaatcaagaaactatttattcagtatcccgtcttagtgcgactggaacaggcggaaggattccctcagggagacaatagcactagcgctcagggaaactacctggaggcaataaacctttccttcaacgtgttcgacaagcattacatcaaccggaattttgaccgcacggggcagatgagtgtggtgattactcccggcgtgggggtgttcgaggtggacagacttctcatgatcttaactaagcagaggatgattgacaacgggatcggcgttgatctggtgtgtatgggcgaacagccattgcacgccgtaccactgttcaaattgcacaaccgatcagcgcccagagactcccggcttggggacgattacaacatcccacactggatcaatcacagtttctacacctctaaatcccaactgttttgtaatagcttcactccacgcataaaattggcagggaaaaagcccgcctcggagaaggctaagaacggtagggacacgtcactgggtagccccaaggaatccgagaacgccttgcctatacaggtcgattacgacgcatatgacgcccaggtgtttagattacccggaccatctcgggcccagtgccttacaacgtgcaggagcgtgcgggaaagagagtctcactccaggaaatctgcatcctcctgcgatgttagcagcagcccatctttgccttcacgcactttgcctactgaagaagtgcgatcacaggcctcggacgattcctctctgggaaagtctgcaaatattttaatgatcccccaccctcacttacatcagtatgaagtgtcgtctagcctcggatatacaagtaccagagatgtactggagaacatgatggaacctcctcagcgggactcctccgcacccggccgattccacgtggggtctgcagaaagtatgcttcatgtaaggcctggcggctataccccccagcgcgccctgatcaaccctttcgccccctcacgcatgcccatgaaacttacgagcaatagacgacgatggatgcacacttttccagtcggcatgaatcctagaacacaaaataaagactccctggaggacagtgttagcacttcacctgatccctctaaacgaggtcaactcaccggggagcgagggcgacaaggcgtgtggggcgggcaatcaatgcggaaacaagaggaagctttgtgggaagtgagtggacccgaggttcacattccacttggctatggcaaagctatgtggtag

SEQ ID NO: 85368 - DNA, 4512 bp, Artificial Sequence
  derived and/or modified sequence
atgagaaccacgaaggtatataaactggtgattcacaagaagggtttcgggggatcagatgacgaactcgtcgtcaatcccaaggttttccctcacataaaacttggcgacatcgtagaaatcgcgcaccccaatgacgagtatagtcctcttctactccaggtgaagagtcttaaggaggacctacagaaagagactatatccgtagaccagacagtcacccaggtgttccggctacggccataccaggacgtctatgtgaacgtcgtcgaccctaaagacgttactctagatttggtcgaactcaccttcaaggaccagtatattggacgcggagatatgtggagactgaagaaaagtttggtttcaacatgcgcatacatcactcaaaaggtcgaatttgccggaattagagcccaggctggagagttatgggttaagaacgaaaaggtgatgtgcggttatatttcagaggacacaagagtggtctttagatcaactagcgccatggtatatatctttatccaaatgagctgcgagatgtgggacttcgatatttatggtgacctgtatttcgagaaggccgtcaatgggttcctagcagacctgttcacaaaatggaaagaaaagaattgcagccacgaagtgacggttgtcctcttttcaagaactttttacgatgcaaagtccgtcgatgaatttccggagataaatcgagcctctattcgacaggatcacaagggaagattttatgaggacttctataaagtggtcgtccagaatgaaagacgcgaggaatggacttccctgctcgtgaccataaaaaagctgtttatccagtaccctgtactggtacgcttagaacaggcagaaggtttcccccagggggacaattcaacgtccgctcaggggaactacctcgaggcaatcaaccttagcttcaacgtcttcgacaaacactacattaaccggaacttcgatagaacgggacaaatgagcgtggtaatcacgccaggagtcggcgtgtttgaggtggacagattgctgatgattctgacgaagcagcggatgattgataacggtatcggagtggatctggtgtgcatgggggaacagccattgcacgccgtacctctgttcaagttacacaataggagtgctcccagggactctcgcctgggtgatgactataacatcccacactggattaaccactcattctatacttcaaaaagccaattattttgtaatagcttcactcctagaattaagctcgcgggaaaaaagcctgccagcgaaaaagccaagaacggtcgagacacgtctttaggctcgcccaaagaaagtgagaacgccttgccaatccaggttgactacgatgcctacgatgcccaggtattccgccttcctgggccatcccgagctcagtgccttacaacttgtcgatcagtgcgggagcgagaatctcatagccgaaaatctgcttcttcctgcgatgtgagcagctcaccatcactgccatctcgcaccttgcctaccgaagaggtaaggtcacaggcctccgacgattcaagccttggtaaaagcgctaatattcttatgattccacacccacatttacatcagtacgaggtatctagctctcttgggtatacctctacccgcgatgttctggagaacatgatggagccacctcaaagggattcctctgcgcctggccgatttcatgtggggtcggctgagagtatgttgcacgtgaggccaggaggctacacaccacagcgcgcattgatcaatccctttgcgccttcgcgtatgcccatgaagttgacaagcaatcgtcggagatggatgcacacctttcctgtcgagacctcttgcttttatcttagcatcggtatgaaccccagaacgcagaataaagacagtctggaggactcagtctccacttctccagatcctatgcccggattctgttgcacggtgggagtggactggaagagcctgaccacccctgcatgtttaccacttacgactgattatttcccagaccgccagggcttgcagaatgactacacagagggctgctacgatcttctcccggaagcagacatcgatcggagggacgaagacggagtgcagatgactgcgcaacaagtgttcgaagaattcatatgtcagagactcatgcaggggtaccaaatcatcgtgcagccgaagacacagaagccgaatcccgctgtcccccctcccctgagtagcagtccgctttattcacggggtctcgtatcccgcaacaggccagaggaagaagaccaatattggctgtctatggggagaaccttccataaggtgaccctgaaagataagatgatcaccgtcactaggtaccttcccaagtacccctatgagtctgcccagatccactatacgtacagcttgtgtccatcccactctgacagcgagtttgtgagctgttgggtggagtttagtcacgagcggcttgaagagtacaaatggaactatctggatcagtacatttgctccgcgggatctgaggacttctcacttatcgagagtttgaagttttggcggacccggttcttacttctccccgcatgcgtcacagctactaagcgaattactgagggcgaagcacactgcgatatatacggggaccgaccccgagccgatgaggacgagtggcagctcttggacggattcgttagattcgtggaagggctcaataggatccgcaggcggcacaggagcgaccgaatgatgcgtaaaggtaccgctatgaagggcctccagatgaccgggcctatttccacccacagtctggaaagcaccgcccctccggttggcaagaaaggcacttccgcgctgagtgcgctgctggagatggaggctagccaaaaatgcctgggtgaacagcaggcggctgtacacgggggaaaaagctctgcccagtcagccgagtcttcaagtgtggcgatgactccaacctacatggacagcccaagaaaggtgagtgtcgaccaaactgcgactcccatgttggacggcacgagtctgggaatttgcactggtcaaagtatggataggggcaattcgcagacctttgggaactctcagaacataggtgagcagggctacagttcaaccaattcctctgattctagttcccaacagctggtggccagcagtctcacctcctctagcaccctgacagaaatcttagaagccatgaagcatcctagcaccggtgtgcagctgcttagcgagcagaaaggcctgtctccttactgttttattagtgccgaagttgtgcactggctcgttaaccacgtggaggggatccagacccaagcaatggcgatcgatatcatgcaaaagatgttagaagaacagctgatcactcatgcaagtggtgaggcgtggcgaactttcatctacggattctacttctataaaatagtgaccgataaggagcctgacagagtggctatgcagcagcctgccaccacttggcatactgccggagtcgacgattttgcaagcttccagcgcaagtggtttgaggtggccttcgttgctgaagagttagtgcactccgagattcctgcgtttttactcccctggctcccgtcccggccagcttcttacgcctcccgtcactcgagctttagcaggagttttggaggccgatctcaagccgcagctctcctggcagccacagtgcctgaacagagaactgtcactctggatgtcgacgtcaacaaccggacagaccgactcgagtggtgtagttgctattaccacgggaactttagcctcaacgcagccttcgagatcaaacttcactggatggccgtgacagctgctgttttatttgagatggtgcaggggtggcaccggaaagcaacgtcttgcggattccttctggtgcccgtgctcgaagggccattcgcgctcccatcttatttgtacggcgatcctcttagagctcaactctttatccctctgaacatttcctgccttctcaaggagggctccgagcatctgttcgactcttttgagcccgagacctattgggatcgaatgcatttattccaggaagccattgcccaccggtttggctttgtccaggataagtattcagcaagtgcgttcaacttcccagccgagaataaaccacagtacatccacgtgacgggaacagtattcctccagctgccctactctaaacggaagttctccgggcaacagcgacgaagaagaaattccaccagtagtacaaatcaaaatatgttttgtgaggaacgggtagggtacaactgggcttataatactatgctcaccaaaacatggagatcatctgcaactggcgatgagaaattcgccgaccgcctgctgaaggatttcacagatttctgtatcaatcgcgataacaggttagtgaccttctggacttcgtgcctcgaaaagatgcacgctagcgcaccttag

SEQ ID NO: 85369 - DNA, 4512 bp, Artificial Sequence
  derived and/or modified sequence
atgcgcactactaaagtgtacaagctcgtgattcataaaaaaggttttggtggcagcgatgatgagttagtggtcaatcctaaggtctttcctcatatcaagttaggtgacatcgttgaaatcgcacaccccaacgacgaatacagcccattgttgctgcaagtgaaaagcctcaaggaagatctgcagaaggaaaccatcagcgtagatcagaccgtcactcaggtctttagattacgcccttaccaggacgtgtacgtcaacgtggtggacccaaaggacgtgacactcgatcttgtagagctgacattcaaggaccagtacattggcaggggcgacatgtggagactcaaaaaatccctggtcagtacttgtgcgtacatcactcagaaagtcgagtttgctggaatccgtgctcaggccggagaattgtgggttaaaaacgagaaggttatgtgtgggtacattagcgaggatacgcgcgtcgttttccggtccacttcagccatggtttacattttcatacagatgtcatgtgagatgtgggacttcgacatctacggagacctatacttcgagaaagccgtaaacggatttctggctgacttattcactaagtggaaggaaaagaattgttcccatgaagttacagtggtgctgttttctcgtaccttctatgacgcaaagtcagtggacgaattcccagaaatcaaccgcgcttcgatcagacaggaccataaaggaagattttacgaagacttttataaagtcgtcgtgcagaacgagaggcgggaggagtggacttctcttttggtgactattaagaagctgttcatccaatacccggtgctagtgcgcctcgagcaggcggaggggtttccacaaggagacaattcaacatcagcacaaggcaattatctcgaggctatcaacctaagctttaacgtattcgataagcactatattaacaggaacttcgacagaacaggccagatgtcagtcgtgatcactcctggtgtgggggtattcgaggtcgatcggctactgatgatcctgacaaagcagagaatgattgataatggtattggcgttgatctcgtgtgcatgggcgagcagccactccacgctgtgccactgtttaagttacacaataggtcggccccaagggattcaagactaggcgacgattacaatatcccccattggattaaccactccttttacacctcaaagagccagctgttctgcaactcattcacaccaaggatcaagctggcaggcaagaagcctgcatccgaaaaggctaagaacggaagggacacatcactggggtcccccaaggaaagcgaaaatgctctacctattcaagttgattatgatgcctatgatgctcaggtttttcggctcccaggcccatccagggcccagtgcctgacaacttgtagatccgtaagagagcgcgaaagccactcacgtaagagtgctagttcctgtgatgtaagcagttccccttcattgcctagcaggactttacccacggaagaggtacggtcacaggcttccgatgactctagccttggcaagtccgccaatattttgatgatcccccacccccaccttcatcagtacgaggtcagcagttccctgggctacactagcacacgtgacgtgctggaaaatatgatggagccccctcagagagacagtagtgctcctggtcggttccacgttggatccgccgaatcaatgcttcacgtgagaccagggggatacacgcctcagcgagcacttatcaacccctttgctcctagtagaatgccgatgaaactcaccagcaaccggaggcggtggatgcacactttccctgtgggcatgaaccctcgtactcagaacaaggactccctggaagactccgtaagtacatctcccgaccccatcctcaccctctcggcccctcccgtggtcccaggcttctgctgtacagtcggtgtggactggaagtctcttactaccccggcatgcctgcctctgaccactgactacttcccggataggcagggtctccagaatgactatactgagggctgttacgaccttctgccagaggccgacatagatcggagagacgaagacggggtccagatgactgcacagcaggttttcgaagagttcatttgccagaggctgatgcaggggtaccagataattgtgcagcctaagacccagaagcccaacccagccgtgccaccacccttgtccagttcacccctctactctagagggcttgtttcacgtaaccggccagaagaagaggaccaatattggcttagtatgggacgaaccttccataaagttactctgaaagataaaatgataaccgtgactagatatctgcccaaatatccatacgaatccgcacagattcattatacttacagcctttgtccgtctcattcagattccgagtttgtgagctgctgggtagagttctctcacgaacgcctggaagagtataaatggaattacctggaccaatatatctgctctgcaggctccgaagatttttccttgatcgagagcctgaaattctggagaacacgcttcctcctgctcccagcctgtgtgactgccacaaaacgcattacagaaggcgaagcacactgtgacatctatggtgatcggcctagggcggatgaagacgagtggcagctgctcgacggcttcgtcagattcgtggaaggccttaacaggattcgacgtagacataggtctgataggatgatgcggaaggggacagcgatgaaggggctccaaatgaccggcccaatttccacccatagtctcgagtctacagcccctcccgtgggtaagaaagggacgtctgctctcagcgccctcctggagatggaagcaagtcaaaagtgtctaggcgaacaacaggctgccgtacacggagggaagagcagtgcacagtccgcagaatcctcttctgtcgcgatgactcccacctacatggattcgcccaggaaggtatctgtggaccagacggccacgcccatgcttgacgggacctctctggggatctgcaccggccagagcatggaccggggtaacagccagacttttggcaattctcagaacataggggagcaggggtattcgagcactaatagtagcgactcgtcttctcagcaactcgtggccagcagtttgacaagctcatcaacactgacagaaattctggaagctatgaaacacccttctacaggcgtacaactcctgagcgaacagaagggcctctctccatattgcttcatttccgcagaagttgtacattggctggtcaaccacgtcgaaggtattcagactcaggcgatggcaatcgatatcatgcagaagatgctcgaagagcagctgataacgcatgcttcaggagaggcctggcgtacatttatctatgggttctacttctacaagattgtgaccgacaaagaacctgatagagtggctatgcagcagcctgcaaccacctggcataccgccggagtggacgatttcgcgtctttccaacgcaagtggttcgaagtggcgttcgtggcggaggaacttgtgcattcagaaattcctgcctttctgttaccttggctgccgagccggcctgcctcctatgcaagtcgccactcgtccttttcacgaagcttcgggggaaggtcacaggccgctgcccttttagccgctactgtccctgaacagcggacagttaccctggacgtggatgtgaacaatcgaacagaccggcttgaatggtgttcatgctactaccacggtaacttcagcttgaatgctgcattcgagattaagcttcactggatggccgtgacagcagcagtcctgtttgaaatggttcaggggtggcacaggaaggccacaagctgtggatttttgctcgtgccggtcctggaggggcctttcgccttgcctagctacctgtatggggatcccctgcgtgcccagctgttcatcccactcaacataagttgtctgctgaaggaggggtccgagcacctcttcgactcatttgagcctgaaacgtattgggatcggatgcacctgtttcaggaggctatcgctcatagattcgggtttgtgcaggataagtacagtgcttcggctttcaatttcccagcggagaacaaacctcagtacattcacgtaacaggaacggtctttctgcagctcccttacagcaagcggaagtttagtgggcagcagaggcgcagacgaaattcaactagttccactaaccaaaacatgttttgcgaagaaagggtcggctataactgggcctacaacacaatgttaacgaagacttggcggagctccgccactggggatgagaagtttgcggatcggctgcttaaagacttcactgacttctgcatcaatcgagacaaccggctagtcaccttctggacctcctgcctggaaaagatgcacgccagcgccccttag

SEQ ID NO: 85370 - DNA, 1995 bp, Artificial Sequence
  derived and/or modified sequence
atgcggacaaccaaagtgtataaactggtgattcacaagaagggcttcggcggttctgacgatgagctagtggtaaatccgaaggtttttccccacatcaagcttggcgatatcgttgagatagcccaccctaatgatgagtatagtccgttgctattgcaggtaaagtctttaaaggaggatctgcaaaaagagacaatcagtgtcgaccaaactgtaacccaggtgttccgactgaggccgtaccaggatgtgtatgtcaacgtagtggaccccaaagtgagcacttgtgcatacattacccagaaagtggaatttgctggcatccgcgcacaagccggagaattatgggtgaagaatgaaaaggttatgtgcggctacatttctgaagatactagagtggtgttccggagtacctctgccatggtgtacatatttatccagatgagttgtgagatgtgggacttcgacatttacggcgacctctattttgagaaggcagtcaatggattcctggccgatctgtttaccaaatggaaggaaaaaaattgtagccacgaagtgaccgtggttctttttagcagaactttttatgatgcaaaaagcgtggatgagttcccggagatcaaccgcgcatccattagacaggaccacaaagggagattctacgaggacttctacaaggtagttgttcagaatgaacgccgagaggagtggacatcattgttagtgacaattaaaaaactgttcattcaatatccagttctggtgaggctcgagcaggccgaagggtttccgcagggggataacagcaccagtgcccaagggaattatctggaagcgattaacctgtcctttaacgttttcgataagcactacataaataggaattttgatcggaccggacaaatgtcggtggttattacccccggtgtgggcgttttcgaggtcgaccgactcctaatgattctcaccaagcagagaatgattgataacggaatcggggtggatctggtgtgcatgggagagcaacccctgcatgccgtaccactctttaagctccacaaccgctccgctcccagagactcccggttgggggacgactacaacatcccgcattggattaaccattcattctacacatctaagtcccagctcttctgtaactctttcactccgcgaatcaagttggctggcaaaaagccagcttctgaaaaggccaagaacggtcgtgacacatcactggggtcgcccaaggaatcagagaatgccctgccaatccaggtggactacgacgcgtacgacgcgcaggtgtttaggcttccaggcccttccagggcacagtgcctgaccacatgtcgctcggttagggaaagagagagtcacagcagaaagtccgctagtagctgcgacgttagctcttcaccatcactgccctcccgtacgctcccaacagaagaggtacggtcccaggccagcgatgacagctccctcggcaagtcagcgaacattctgatgatcccccacccacatttgcatcaatacgaggttagttcctcgctgggttacacatcgaccagagacgttttagagaacatgatggaacccccacagcgggactcctccgcacccggtcgattccacgtcggctccgccgagagcatgctgcatgtgcgccctggaggctatactcctcagcgcgctttgattaatcctttcgctcccagccgcatgcctatgaagctcacctctaacagacggcgttggatgcatactttcccagtaggaatgaatccgaggacgcagaataaggatagcctagaagattccgtctctacgtcaccagacccatccaagcggggtcaacttactggagagcgcggacgccagggcgtgtggggaggacagtccatgcgcaaacaggaagaagctctgtgggaagtcagcggacccgaggtgcacatccctttaggatatggcaaagcaatgtggtag

SEQ ID NO: 85371 - DNA, 4512 bp, Artificial Sequence
  derived and/or modified sequence
atgagaaccaccaaggtgtacaagctggtgatccacaagaagggcttcggcggcagcgacgacgagctggtggtgaaccccaaggtgttcccccacatcaagctgggcgacatcgtggagatcgcccaccccaacgacgagtacagccccctgctgctgcaggtgaagagcctgaaggaggacctgcagaaggagaccatcagcgtggaccagaccgtgacccaggtgttcagactgagaccctaccaggacgtgtacgtgaacgtggtggaccccaaggacgtgaccctggacctggtggagctgaccttcaaggaccagtacatcggcagaggcgacatgtggagactgaagaagagcctggtgagcacctgcgcctacatcacccagaaggtggagttcgccggcatcagagcccaggccggcgagctgtgggtgaagaacgagaaggtgatgtgcggctacatcagcgaggacaccagagtggtgttcagaagcaccagcgccatggtgtacatcttcatccagatgagctgcgagatgtgggacttcgacatctacggcgacctgtacttcgagaaggccgtgaacggcttcctggccgacctgttcaccaagtggaaggagaagaactgcagccacgaggtgaccgtggtgctgttcagcagaaccttctacgacgccaagagcgtggacgagttccccgagatcaacagagccagcatcagacaggaccacaagggcagattctacgaggacttctacaaggtggtggtgcagaacgagagaagagaggagtggaccagcctgctggtgaccatcaagaagctgttcatccagtaccccgtgctggtgagactggagcaggccgagggcttcccccagggcgacaacagcaccagcgcccagggcaactacctggaggccatcaacctgagcttcaacgtgttcgacaagcactacatcaacagaaacttcgacagaaccggccagatgagcgtggtgatcacccccggcgtgggcgtgttcgaggtggacagactgctgatgatcctgaccaagcagagaatgatcgacaacggcatcggcgtggacctggtgtgcatgggcgagcagcccctgcacgccgtgcccctgttcaagctgcacaacagaagcgcccccagagacagcagactgggcgacgactacaacatcccccactggatcaaccacagcttctacaccagcaagagccagctgttctgcaacagcttcacccccagaatcaagctggccggcaagaagcccgccagcgagaaggccaagaacggcagagacaccagcctgggcagccccaaggagagcgagaacgccctgcccatccaggtggactacgacgcctacgacgcccaggtgttcagactgcccggccccagcagagcccagtgcctgaccacctgcagaagcgtgagagagagagagagccacagcagaaagagcgccagcagctgcgacgtgagcagcagccccagcctgcccagcagaaccctgcccaccgaggaggtgagaagccaggccagcgacgacagcagcctgggcaagagcgccaacatcctgatgatcccccacccccacctgcaccagtacgaggtgagcagcagcctgggctacaccagcaccagagacgtgctggagaacatgatggagcccccccagagagacagcagcgcccccggcagattccacgtgggcagcgccgagagcatgctgcacgtgagacccggcggctacaccccccagagagccctgatcaaccccttcgcccccagcagaatgcccatgaagctgaccagcaacagaagaagatggatgcacaccttccccgtggagaccagctgcttctacctgagcatcggcatgaaccccagaacccagaacaaggacagcctggaggacagcgtgagcaccagccccgaccccatgcccggcttctgctgcaccgtgggcgtggactggaagagcctgaccacccccgcctgcctgcccctgaccaccgactacttccccgacagacagggcctgcagaacgactacaccgagggctgctacgacctgctgcccgaggccgacatcgacagaagagacgaggacggcgtgcagatgaccgcccagcaggtgttcgaggagttcatctgccagagactgatgcagggctaccagatcatcgtgcagcccaagacccagaagcccaaccccgccgtgcccccccccctgagcagcagccccctgtacagcagaggcctggtgagcagaaacagacccgaggaggaggaccagtactggctgagcatgggcagaaccttccacaaggtgaccctgaaggacaagatgatcaccgtgaccagatacctgcccaagtacccctacgagagcgcccagatccactacacctacagcctgtgccccagccacagcgacagcgagttcgtgagctgctgggtggagttcagccacgagagactggaggagtacaagtggaactacctggaccagtacatctgcagcgccggcagcgaggacttcagcctgatcgagagcctgaagttctggagaaccagattcctgctgctgcccgcctgcgtgaccgccaccaagagaatcaccgagggcgaggcccactgcgacatctacggcgacagacccagagccgacgaggacgagtggcagctgctggacggcttcgtgagattcgtggagggcctgaacagaatcagaagaagacacagaagcgacagaatgatgagaaagggcaccgccatgaagggcctgcagatgaccggccccatcagcacccacagcctggagagcaccgccccccccgtgggcaagaagggcaccagcgccctgagcgccctgctggagatggaggccagccagaagtgcctgggcgagcagcaggccgccgtgcacggcggcaagagcagcgcccagagcgccgagagcagcagcgtggccatgacccccacctacatggacagccccagaaaggtgagcgtggaccagaccgccacccccatgctggacggcaccagcctgggcatctgcaccggccagagcatggacagaggcaacagccagaccttcggcaacagccagaacatcggcgagcagggctacagcagcaccaacagcagcgacagcagcagccagcagctggtggccagcagcctgaccagcagcagcaccctgaccgagatcctggaggccatgaagcaccccagcaccggcgtgcagctgctgagcgagcagaagggcctgagcccctactgcttcatcagcgccgaggtggtgcactggctggtgaaccacgtggagggcatccagacccaggccatggccatcgacatcatgcagaagatgctggaggagcagctgatcacccacgccagcggcgaggcctggagaaccttcatctacggcttctacttctacaagatcgtgaccgacaaggagcccgacagagtggccatgcagcagcccgccaccacctggcacaccgccggcgtggacgacttcgccagcttccagagaaagtggttcgaggtggccttcgtggccgaggagctggtgcacagcgagatccccgccttcctgctgccctggctgcccagcagacccgccagctacgccagcagacacagcagcttcagcagaagcttcggcggcagaagccaggccgccgccctgctggccgccaccgtgcccgagcagagaaccgtgaccctggacgtggacgtgaacaacagaaccgacagactggagtggtgcagctgctactaccacggcaacttcagcctgaacgccgccttcgagatcaagctgcactggatggccgtgaccgccgccgtgctgttcgagatggtgcagggctggcacagaaaggccaccagctgcggcttcctgctggtgcccgtgctggagggccccttcgccctgcccagctacctgtacggcgaccccctgagagcccagctgttcatccccctgaacatcagctgcctgctgaaggagggcagcgagcacctgttcgacagcttcgagcccgagacctactgggacagaatgcacctgttccaggaggccatcgcccacagattcggcttcgtgcaggacaagtacagcgccagcgccttcaacttccccgccgagaacaagccccagtacatccacgtgaccggcaccgtgttcctgcagctgccctacagcaagagaaagttcagcggccagcagagaagaagaagaaacagcaccagcagcaccaaccagaacatgttctgcgaggagagagtgggctacaactgggcctacaacaccatgctgaccaagacctggagaagcagcgccaccggcgacgagaagttcgccgacagactgctgaaggacttcaccgacttctgcatcaacagagacaacagactggtgaccttctggaccagctgcctggagaagatgcacgccagcgccccctag

SEQ ID NO: 85372 - DNA, 4512 bp, Artificial Sequence
  derived and/or modified sequence
atgagaaccaccaaggtgtacaagctggtgatccacaagaagggcttcggcggcagcgacgacgagctggtggtgaaccccaaggtgttcccccacatcaagctgggcgacatcgtggagatcgcccaccccaacgacgagtacagccccctgctgctgcaggtgaagagcctgaaggaggacctgcagaaggagaccatcagcgtggaccagaccgtgacccaggtgttcagactgagaccctaccaggacgtgtacgtgaacgtggtggaccccaaggacgtgaccctggacctggtggagctgaccttcaaggaccagtacatcggcagaggcgacatgtggagactgaagaagagcctggtgagcacctgcgcctacatcacccagaaggtggagttcgccggcatcagagcccaggccggcgagctgtgggtgaagaacgagaaggtgatgtgcggctacatcagcgaggacaccagagtggtgttcagaagcaccagcgccatggtgtacatcttcatccagatgagctgcgagatgtgggacttcgacatctacggcgacctgtacttcgagaaggccgtgaacggcttcctggccgacctgttcaccaagtggaaggagaagaactgcagccacgaggtgaccgtggtgctgttcagcagaaccttctacgacgccaagagcgtggacgagttccccgagatcaacagagccagcatcagacaggaccacaagggcagattctacgaggacttctacaaggtggtggtgcagaacgagagaagagaggagtggaccagcctgctggtgaccatcaagaagctgttcatccagtaccccgtgctggtgagactggagcaggccgagggcttcccccagggcgacaacagcaccagcgcccagggcaactacctggaggccatcaacctgagcttcaacgtgttcgacaagcactacatcaacagaaacttcgacagaaccggccagatgagcgtggtgatcacccccggcgtgggcgtgttcgaggtggacagactgctgatgatcctgaccaagcagagaatgatcgacaacggcatcggcgtggacctggtgtgcatgggcgagcagcccctgcacgccgtgcccctgttcaagctgcacaacagaagcgcccccagagacagcagactgggcgacgactacaacatcccccactggatcaaccacagcttctacaccagcaagagccagctgttctgcaacagcttcacccccagaatcaagctggccggcaagaagcccgccagcgagaaggccaagaacggcagagacaccagcctgggcagccccaaggagagcgagaacgccctgcccatccaggtggactacgacgcctacgacgcccaggtgttcagactgcccggccccagcagagcccagtgcctgaccacctgcagaagcgtgagagagagagagagccacagcagaaagagcgccagcagctgcgacgtgagcagcagccccagcctgcccagcagaaccctgcccaccgaggaggtgagaagccaggccagcgacgacagcagcctgggcaagagcgccaacatcctgatgatcccccacccccacctgcaccagtacgaggtgagcagcagcctgggctacaccagcaccagagacgtgctggagaacatgatggagcccccccagagagacagcagcgcccccggcagattccacgtgggcagcgccgagagcatgctgcacgtgagacccggcggctacaccccccagagagccctgatcaaccccttcgcccccagcagaatgcccatgaagctgaccagcaacagaagaagatggatgcacaccttccccgtgggcatgaaccccagaacccagaacaaggacagcctggaggacagcgtgagcaccagccccgaccccatcctgaccctgagcgccccccccgtggtgcccggcttctgctgcaccgtgggcgtggactggaagagcctgaccacccccgcctgcctgcccctgaccaccgactacttccccgacagacagggcctgcagaacgactacaccgagggctgctacgacctgctgcccgaggccgacatcgacagaagagacgaggacggcgtgcagatgaccgcccagcaggtgttcgaggagttcatctgccagagactgatgcagggctaccagatcatcgtgcagcccaagacccagaagcccaaccccgccgtgcccccccccctgagcagcagccccctgtacagcagaggcctggtgagcagaaacagacccgaggaggaggaccagtactggctgagcatgggcagaaccttccacaaggtgaccctgaaggacaagatgatcaccgtgaccagatacctgcccaagtacccctacgagagcgcccagatccactacacctacagcctgtgccccagccacagcgacagcgagttcgtgagctgctgggtggagttcagccacgagagactggaggagtacaagtggaactacctggaccagtacatctgcagcgccggcagcgaggacttcagcctgatcgagagcctgaagttctggagaaccagattcctgctgctgcccgcctgcgtgaccgccaccaagagaatcaccgagggcgaggcccactgcgacatctacggcgacagacccagagccgacgaggacgagtggcagctgctggacggcttcgtgagattcgtggagggcctgaacagaatcagaagaagacacagaagcgacagaatgatgagaaagggcaccgccatgaagggcctgcagatgaccggccccatcagcacccacagcctggagagcaccgccccccccgtgggcaagaagggcaccagcgccctgagcgccctgctggagatggaggccagccagaagtgcctgggcgagcagcaggccgccgtgcacggcggcaagagcagcgcccagagcgccgagagcagcagcgtggccatgacccccacctacatggacagccccagaaaggtgagcgtggaccagaccgccacccccatgctggacggcaccagcctgggcatctgcaccggccagagcatggacagaggcaacagccagaccttcggcaacagccagaacatcggcgagcagggctacagcagcaccaacagcagcgacagcagcagccagcagctggtggccagcagcctgaccagcagcagcaccctgaccgagatcctggaggccatgaagcaccccagcaccggcgtgcagctgctgagcgagcagaagggcctgagcccctactgcttcatcagcgccgaggtggtgcactggctggtgaaccacgtggagggcatccagacccaggccatggccatcgacatcatgcagaagatgctggaggagcagctgatcacccacgccagcggcgaggcctggagaaccttcatctacggcttctacttctacaagatcgtgaccgacaaggagcccgacagagtggccatgcagcagcccgccaccacctggcacaccgccggcgtggacgacttcgccagcttccagagaaagtggttcgaggtggccttcgtggccgaggagctggtgcacagcgagatccccgccttcctgctgccctggctgcccagcagacccgccagctacgccagcagacacagcagcttcagcagaagcttcggcggcagaagccaggccgccgccctgctggccgccaccgtgcccgagcagagaaccgtgaccctggacgtggacgtgaacaacagaaccgacagactggagtggtgcagctgctactaccacggcaacttcagcctgaacgccgccttcgagatcaagctgcactggatggccgtgaccgccgccgtgctgttcgagatggtgcagggctggcacagaaaggccaccagctgcggcttcctgctggtgcccgtgctggagggccccttcgccctgcccagctacctgtacggcgaccccctgagagcccagctgttcatccccctgaacatcagctgcctgctgaaggagggcagcgagcacctgttcgacagcttcgagcccgagacctactgggacagaatgcacctgttccaggaggccatcgcccacagattcggcttcgtgcaggacaagtacagcgccagcgccttcaacttccccgccgagaacaagccccagtacatccacgtgaccggcaccgtgttcctgcagctgccctacagcaagagaaagttcagcggccagcagagaagaagaagaaacagcaccagcagcaccaaccagaacatgttctgcgaggagagagtgggctacaactgggcctacaacaccatgctgaccaagacctggagaagcagcgccaccggcgacgagaagttcgccgacagactgctgaaggacttcaccgacttctgcatcaacagagacaacagactggtgaccttctggaccagctgcctggagaagatgcacgccagcgccccctag

SEQ ID NO: 85373 - DNA, 1995 bp, Artificial Sequence
  derived and/or modified sequence
atgagaaccaccaaggtgtacaagctggtgatccacaagaagggcttcggcggcagcgacgacgagctggtggtgaaccccaaggtgttcccccacatcaagctgggcgacatcgtggagatcgcccaccccaacgacgagtacagccccctgctgctgcaggtgaagagcctgaaggaggacctgcagaaggagaccatcagcgtggaccagaccgtgacccaggtgttcagactgagaccctaccaggacgtgtacgtgaacgtggtggaccccaaggtgagcacctgcgcctacatcacccagaaggtggagttcgccggcatcagagcccaggccggcgagctgtgggtgaagaacgagaaggtgatgtgcggctacatcagcgaggacaccagagtggtgttcagaagcaccagcgccatggtgtacatcttcatccagatgagctgcgagatgtgggacttcgacatctacggcgacctgtacttcgagaaggccgtgaacggcttcctggccgacctgttcaccaagtggaaggagaagaactgcagccacgaggtgaccgtggtgctgttcagcagaaccttctacgacgccaagagcgtggacgagttccccgagatcaacagagccagcatcagacaggaccacaagggcagattctacgaggacttctacaaggtggtggtgcagaacgagagaagagaggagtggaccagcctgctggtgaccatcaagaagctgttcatccagtaccccgtgctggtgagactggagcaggccgagggcttcccccagggcgacaacagcaccagcgcccagggcaactacctggaggccatcaacctgagcttcaacgtgttcgacaagcactacatcaacagaaacttcgacagaaccggccagatgagcgtggtgatcacccccggcgtgggcgtgttcgaggtggacagactgctgatgatcctgaccaagcagagaatgatcgacaacggcatcggcgtggacctggtgtgcatgggcgagcagcccctgcacgccgtgcccctgttcaagctgcacaacagaagcgcccccagagacagcagactgggcgacgactacaacatcccccactggatcaaccacagcttctacaccagcaagagccagctgttctgcaacagcttcacccccagaatcaagctggccggcaagaagcccgccagcgagaaggccaagaacggcagagacaccagcctgggcagccccaaggagagcgagaacgccctgcccatccaggtggactacgacgcctacgacgcccaggtgttcagactgcccggccccagcagagcccagtgcctgaccacctgcagaagcgtgagagagagagagagccacagcagaaagagcgccagcagctgcgacgtgagcagcagccccagcctgcccagcagaaccctgcccaccgaggaggtgagaagccaggccagcgacgacagcagcctgggcaagagcgccaacatcctgatgatcccccacccccacctgcaccagtacgaggtgagcagcagcctgggctacaccagcaccagagacgtgctggagaacatgatggagcccccccagagagacagcagcgcccccggcagattccacgtgggcagcgccgagagcatgctgcacgtgagacccggcggctacaccccccagagagccctgatcaaccccttcgcccccagcagaatgcccatgaagctgaccagcaacagaagaagatggatgcacaccttccccgtgggcatgaaccccagaacccagaacaaggacagcctggaggacagcgtgagcaccagccccgaccccagcaagagaggccagctgaccggcgagagaggcagacagggcgtgtggggcggccagagcatgagaaagcaggaggaggccctgtgggaggtgagcggccccgaggtgcacatccccctgggctacggcaaggccatgtggtag

SEQ ID NO: 85374 - DNA, 5171 bp, Artificial Sequence
  derived and/or modified sequence
atctggaggaggcgcagggaacctggagagggtccagccctcagtgccccggccagaggcgggaaggggctctagagcttcgggaggcaagatgacttctctgccccaagcttggaacagctaaagggaaaaacagtgcaagatgagaacaacaaaggtctacaaactcgtcatccacaagaagggctttgggggcagtgatgatgagctagttgtgaaccccaaagtgttccctcacatcaagcttggagacattgtagagattgcacaccccaacgatgaatacagccctctgcttttgcaggtcaagtctcttaaggaagatttacagaaggaaactatcagtgtggaccagactgtgactcaagtgttccggctgagaccttatcaggatgtctatgttaatgtcgtagaccctaaggatgtgacccttgacctagtggaattaacttttaaggatcagtatattggccgtggggatatgtggcgactaaagaaaagtttggtcagcacatgtgcctatatcacccagaaggtggagtttgctggcatcagagcacaggctggtgaactgtgggttaagaatgagaaggtcatgtgtggctacatcagtgaagataccagggtggtgtttcgttctacgtcggctatggtttacatatttattcagatgagctgtgaaatgtgggattttgatatttatggggatttgtattttgagaaagctgtgaatggtttccttgctgatctatttaccaagtggaaggagaagaactgtagtcatgaagtgacagtggtcctgttttctagaactttctatgatgcaaaatctgttgatgaatttcctgaaataaaccgagcctcaattcgacaggatcacaaggggagattctatgaagacttttacaaagtggtggtgcagaatgagagaagagaagaatggacttcacttctcgtaaccattaaaaaactcttcatccagtatccagtgttggtgcgactggaacaggcagagggctttcctcaaggagataattctacctcagcacaaggaaactacctggaggccatcaatctgtcattcaatgtgtttgataagcactacatcaaccgcaactttgaccgaactgggcagatgtcagtggtgatcacgcccggggtgggtgtctttgaagtggaccgcctactcatgatcctgaccaagcagcggatgatagataatggaattggtgtggatttggtgtgcatgggagagcaaccgttacatgctgtcccattgttcaagctccataatcggagtgctccccgtgattctcgtctgggcgatgactataatatccctcactggataaaccacagtttctacacatccaaaagccagctcttttgtaatagtttcaccccacgaataaaactggcaggaaagaagcccgcctctgagaaagcaaaaaatggccgtgatacatctctcgggagtccaaaagaatctgagaacgcccttcccatccaagtagattatgacgcctatgacgctcaagtgttcaggctgcccggcccatcccgggcccagtgcctcaccacctgcagatctgtgcgagagcgagagagtcacagtcgaaagagtgccagctcctgtgatgtttcatccagcccttccctaccaagccgcacactgcccactgaggaagtgaggagccaggcttctgacgacagctccctaggcaagagtgccaacatcctgatgatcccacacccccacctgcaccagtatgaagtcagcagctccttgggatacaccagcactcgagatgtcctggagaacatgatggagccaccacagcgagactccagtgcaccagggaggtttcacgttggcagtgcagaatccatgctgcatgttcgacctggtggatacacgccccagagagcactgattaaccccttcgctccctctcggatgcccatgaagcttacgtccaacagaaggcgctggatgcacacttttcctgtggagacaagctgtttttatctttccataggtatgaatcctaggacccagaataaggattctctagaggacagtgtttctacctctccagacccaatgccaggcttctgttgcacagttggagtggactggaagtctctcactactccggcgtgcctcccccttaccaccgactacttccctgaccgccagggcctgcagaatgactacacagagggctgttatgatctccttccagaagcagacatcgacaggagggacgaagatggtgtgcagatgacagcccagcaggtatttgaagagtttatttgccaacgtctcatgcagggctaccaaatcatagtgcagcccaagacacagaaacccaatcctgctgtcccgcccccgctgagcagtagcccactctatagccgaggccttgtgtcccgaaaccgccctgaggaggaggaccagtattggctgagtatgggcagaacgttccacaaagtgacgctgaaggataagatgatcacagtgacgcgataccttcccaagtatccttatgaatctgcccagatccactacacctacagcctctgtccttcccactcagactcagagttcgtctcctgctgggtggaattctcccacgaacggctggaggagtacaagtggaattacttagatcagtatatctgttctgccggctctgaagacttcagcttaattgagtccctgaagttctggaggacccgcttcctgctgctgccagcctgtgtcaccgccaccaagcgcatcacggagggggaggcccactgcgacatctatggggacaggccccgtgcagacgaggacgagtggcaactcctggatggttttgtccgctttgtggagggcttgaatcgcattcgcaggcggcatcgctcggatcgcatgatgcggaaagggaccgccatgaaaggcttgcagatgactgggcccatttccacgcattctctggagtcaactgcacccccagtggggaagaagggaacctcagctctctctgccctgttggagatggaggccagtcagaagtgcctgggagaacagcaggcagctgtgcatggtgggaagagctccgcccagtcagccgagagcagcagcgttgccatgactcccacctacatggacagcccacgaaaggtatctgtggaccaaacagccactcctatgttggacggcaccagtttgggcatatgcacaggccaatccatggacagaggcaacagccagacctttgggaactcccagaacataggagaacagggctactcctccacaaactccagtgacagcagctctcagcagctggtggcaagctccttgacctcatcctctaccctgacagagatcctggaagccatgaagcacccctcgacaggagtccagctgctctctgaacagaagggcctctcaccgtactgcttcatcagcgcggaggtggtacactggttggtgaaccacgtggaggggatccagacacaggcgatggccattgacatcatgcagaaaatgctggaagagcagctcatcacacatgcatctggcgaagcctggcggaccttcatctacggcttctatttctacaagatagtaacggacaaagagcccgaccgagtggccatgcagcagcccgccaccacctggcacacagcaggagtggacgacttcgccagcttccagcgcaagtggtttgaggtggcctttgtggcagaagagctcgtgcactctgagattcctgcctttctcctgccctggctgcctagccggccagcctcctatgcaagtaggcacagctcctttagccgaagttttggaggacggagccaggcggcagcacttttagctgccactgtcccagagcagaggactgtgaccctggatgttgacgtgaacaaccgcacagaccggctggagtggtgcagctgttattaccatggcaacttttctctgaatgcagcctttgagatcaagctgcactggatggcggtgaccgcagcagtactcttcgagatggtccaaggttggcatcggaaagccacctcctgtggcttcttgttagtcccagttttggaggggccttttgcactgcccagttacctgtatggcgacccccttcgtgcccagctcttcatcccactcaacatcagctgcttgctcaaggagggcagcgagcacctgtttgatagctttgaacccgaaacgtactgggatcgaatgcacctcttccaggaagccattgcacacaggtttgggtttgtacaagataaatattctgcctctgcttttaacttccctgctgagaacaagcctcagtatatccacgttacaggaacagtgtttctgcagctgccctactccaagcgcaagttctcagggcagcagcggcggcggcggaactccaccagctccaccaaccagaacatgttctgcgaggagcgggtcggctacaactgggcctacaacaccatgctcaccaaaacatggcgctccagcgccacaggggatgaaaagtttgctgatcggctgctgaaggacttcacggacttctgcatcaaccgtgacaaccggctggtcacgttctggacaagttgcctggagaagatgcatgccagtgccccgtgaggccaggctgcacctgtgctgggggaaggtgggtgagccactgccctcaaacccggggcggaggattccaggcaggctctaggagtcaggtgtccgtttgctgctatcagtgagtgggggccattgttttttgtttgtttgtttgtttgtttgtttgtttttggcccccacgacaagtcttctactctagaagaaagactttggaagcagctgctgctgctgccaccactcctgtcagcaagtgctcagagcaggtgggaggcacagattgtccgtgggagggctccagtgtctgggaagagggcaggcggcccccatgaatgtcctcggaagggggtggctcctggtagcatccttttccttcaccatctatgggatattaggggcagaatctgccacttcttgcccaggagtgtgcacagatgtaagataattttgtgaaataatgtaccatagactctcaccaactgtatatacctgtacatatcagaagcaaataaagagctccacgtgcatc

SEQ ID NO: 85375 - DNA, 4843 bp, Artificial Sequence
  derived and/or modified sequence
agcggcgcgggttctcagggaggcaagatgacttctctgccccaagcttggaacagctaaagggaaaaacagtgcaagatgagaacaacaaaggtctacaaactcgtcatccacaagaagggctttgggggcagtgatgatgagctagttgtgaaccccaaagtgttccctcacatcaagcttggagacattgtagagattgcacaccccaacgatgaatacagccctctgcttttgcaggtcaagtctcttaaggaagatttacagaaggaaactatcagtgtggaccagactgtgactcaagtgttccggctgagaccttatcaggatgtctatgttaatgtcgtagaccctaaggatgtgacccttgacctagtggaattaacttttaaggatcagtatattggccgtggggatatgtggcgactaaagaaaagtttggtcagcacatgtgcctatatcacccagaaggtggagtttgctggcatcagagcacaggctggtgaactgtgggttaagaatgagaaggtcatgtgtggctacatcagtgaagataccagggtggtgtttcgttctacgtcggctatggtttacatatttattcagatgagctgtgaaatgtgggattttgatatttatggggatttgtattttgagaaagctgtgaatggtttccttgctgatctatttaccaagtggaaggagaagaactgtagtcatgaagtgacagtggtcctgttttctagaactttctatgatgcaaaatctgttgatgaatttcctgaaataaaccgagcctcaattcgacaggatcacaaggggagattctatgaagacttttacaaagtggtggtgcagaatgagagaagagaagaatggacttcacttctcgtaaccattaaaaaactcttcatccagtatccagtgttggtgcgactggaacaggcagagggctttcctcaaggagataattctacctcagcacaaggaaactacctggaggccatcaatctgtcattcaatgtgtttgataagcactacatcaaccgcaactttgaccgaactgggcagatgtcagtggtgatcacgcccggggtgggtgtctttgaagtggaccgcctactcatgatcctgaccaagcagcggatgatagataatggaattggtgtggatttggtgtgcatgggagagcaaccgttacatgctgtcccattgttcaagctccataatcggagtgctccccgtgattctcgtctgggcgatgactataatatccctcactggataaaccacagtttctacacatccaaaagccagctcttttgtaatagtttcaccccacgaataaaactggcaggaaagaagcccgcctctgagaaagcaaaaaatggccgtgatacatctctcgggagtccaaaagaatctgagaacgcccttcccatccaagtagattatgacgcctatgacgctcaagtgttcaggctgcccggcccatcccgggcccagtgcctcaccacctgcagatctgtgcgagagcgagagagtcacagtcgaaagagtgccagctcctgtgatgtttcatccagcccttccctaccaagccgcacactgcccactgaggaagtgaggagccaggcttctgacgacagctccctaggcaagagtgccaacatcctgatgatcccacacccccacctgcaccagtatgaagtcagcagctccttgggatacaccagcactcgagatgtcctggagaacatgatggagccaccacagcgagactccagtgcaccagggaggtttcacgttggcagtgcagaatccatgctgcatgttcgacctggtggatacacgccccagagagcactgattaaccccttcgctccctctcggatgcccatgaagcttacgtccaacagaaggcgctggatgcacacttttcctgtgggtatgaatcctaggacccagaataaggattctctagaggacagtgtttctacctctccagacccaattctgacactgtctgctccccctgtagtgccaggcttctgttgcacagttggagtggactggaagtctctcactactccggcgtgcctcccccttaccaccgactacttccctgaccgccagggcctgcagaatgactacacagagggctgttatgatctccttccagaagcagacatcgacaggagggacgaagatggtgtgcagatgacagcccagcaggtatttgaagagtttatttgccaacgtctcatgcagggctaccaaatcatagtgcagcccaagacacagaaacccaatcctgctgtcccgcccccgctgagcagtagcccactctatagccgaggccttgtgtcccgaaaccgccctgaggaggaggaccagtattggctgagtatgggcagaacgttccacaaagtgacgctgaaggataagatgatcacagtgacgcgataccttcccaagtatccttatgaatctgcccagatccactacacctacagcctctgtccttcccactcagactcagagttcgtctcctgctgggtggaattctcccacgaacggctggaggagtacaagtggaattacttagatcagtatatctgttctgccggctctgaagacttcagcttaattgagtccctgaagttctggaggacccgcttcctgctgctgccagcctgtgtcaccgccaccaagcgcatcacggagggggaggcccactgcgacatctatggggacaggccccgtgcagacgaggacgagtggcaactcctggatggttttgtccgctttgtggagggcttgaatcgcattcgcaggcggcatcgctcggatcgcatgatgcggaaagggaccgccatgaaaggcttgcagatgactgggcccatttccacgcattctctggagtcaactgcacccccagtggggaagaagggaacctcagctctctctgccctgttggagatggaggccagtcagaagtgcctgggagaacagcaggcagctgtgcatggtgggaagagctccgcccagtcagccgagagcagcagcgttgccatgactcccacctacatggacagcccacgaaaggtatctgtggaccaaacagccactcctatgttggacggcaccagtttgggcatatgcacaggccaatccatggacagaggcaacagccagacctttgggaactcccagaacataggagaacagggctactcctccacaaactccagtgacagcagctctcagcagctggtggcaagctccttgacctcatcctctaccctgacagagatcctggaagccatgaagcacccctcgacaggagtccagctgctctctgaacagaagggcctctcaccgtactgcttcatcagcgcggaggtggtacactggttggtgaaccacgtggaggggatccagacacaggcgatggccattgacatcatgcagaaaatgctggaagagcagctcatcacacatgcatctggcgaagcctggcggaccttcatctacggcttctatttctacaagatagtaacggacaaagagcccgaccgagtggccatgcagcagcccgccaccacctggcacacagcaggagtggacgacttcgccagcttccagcgcaagtggtttgaggtggcctttgtggcagaagagctcgtgcactctgagattcctgcctttctcctgccctggctgcctagccggccagcctcctatgcaagtaggcacagctcctttagccgaagttttggaggacggagccaggcggcagcacttttagctgccactgtcccagagcagaggactgtgaccctggatgttgacgtgaacaaccgcacagaccggctggagtggtgcagctgttattaccatggcaacttttctctgaatgcagcctttgagatcaagctgcactggatggcggtgaccgcagcagtactcttcgagatggtccaaggttggcatcggaaagccacctcctgtggcttcttgttagtcccagttttggaggggccttttgcactgcccagttacctgtatggcgacccccttcgtgcccagctcttcatcccactcaacatcagctgcttgctcaaggagggcagcgagcacctgtttgatagctttgaacccgaaacgtactgggatcgaatgcacctcttccaggaagccattgcacacaggtttgggtttgtacaagataaatattctgcctctgcttttaacttccctgctgagaacaagcctcagtatatccacgttacaggaacagtgtttctgcagctgccctactccaagcgcaagttctcagggcagcagcggcggcggcggaactccaccagctccaccaaccagaacatgttctgcgaggagcgggtcggctacaactgggcctacaacaccatgctcaccaaaacatggcgctccagcgccacaggggatgaaaagtttgctgatcggctgctgaaggacttcacggacttctgcatcaaccgtgacaaccggctggtcacgttctggacaagttgcctggagaagatgcatgccagtgccccgtgaggccaggctgcacctgtgctgggggaaggtgggtgagccactgccctcaaacccggggcggaggattccaggcaggctctaggagtcaggtgtccgtttgctgctatcagtgagtgggggccattgttttttgtttgtttgtttgtttgtttgtttgtttttggcccccacgacaagtcttctactctagaagaaagactttggaagcagctgctgctgctgccaccactcctgtcagcaagtgctcagagca

SEQ ID NO: 85376 - DNA, 2300 bp, Artificial Sequence
  derived and/or modified sequence
agcgcgggccgcgcgggcgtaggcggggtatctggaggaggcgcagggaacctggagagggtccagccctcagtgccccggccagaggcgggaaggggctctagagcttcgggaggcaagatgacttctctgccccaagcttggaacagctaaagggaaaaacagtgcaagatgagaacaacaaaggtctacaaactcgtcatccacaagaagggctttgggggcagtgatgatgagctagttgtgaaccccaaagtgttccctcacatcaagcttggagacattgtagagattgcacaccccaacgatgaatacagccctctgcttttgcaggtcaagtctcttaaggaagatttacagaaggaaactatcagtgtggaccagactgtgactcaagtgttccggctgagaccttatcaggatgtctatgttaatgtcgtagaccctaaggtcagcacatgtgcctatatcacccagaaggtggagtttgctggcatcagagcacaggctggtgaactgtgggttaagaatgagaaggtcatgtgtggctacatcagtgaagataccagggtggtgtttcgttctacgtcggctatggtttacatatttattcagatgagctgtgaaatgtgggattttgatatttatggggatttgtattttgagaaagctgtgaatggtttccttgctgatctatttaccaagtggaaggagaagaactgtagtcatgaagtgacagtggtcctgttttctagaactttctatgatgcaaaatctgttgatgaatttcctgaaataaaccgagcctcaattcgacaggatcacaaggggagattctatgaagacttttacaaagtggtggtgcagaatgagagaagagaagaatggacttcacttctcgtaaccattaaaaaactcttcatccagtatccagtgttggtgcgactggaacaggcagagggctttcctcaaggagataattctacctcagcacaaggaaactacctggaggccatcaatctgtcattcaatgtgtttgataagcactacatcaaccgcaactttgaccgaactgggcagatgtcagtggtgatcacgcccggggtgggtgtctttgaagtggaccgcctactcatgatcctgaccaagcagcggatgatagataatggaattggtgtggatttggtgtgcatgggagagcaaccgttacatgctgtcccattgttcaagctccataatcggagtgctccccgtgattctcgtctgggcgatgactataatatccctcactggataaaccacagtttctacacatccaaaagccagctcttttgtaatagtttcaccccacgaataaaactggcaggaaagaagcccgcctctgagaaagcaaaaaatggccgtgatacatctctcgggagtccaaaagaatctgagaacgcccttcccatccaagtagattatgacgcctatgacgctcaagtgttcaggctgcccggcccatcccgggcccagtgcctcaccacctgcagatctgtgcgagagcgagagagtcacagtcgaaagagtgccagctcctgtgatgtttcatccagcccttccctaccaagccgcacactgcccactgaggaagtgaggagccaggcttctgacgacagctccctaggcaagagtgccaacatcctgatgatcccacacccccacctgcaccagtatgaagtcagcagctccttgggatacaccagcactcgagatgtcctggagaacatgatggagccaccacagcgagactccagtgcaccagggaggtttcacgttggcagtgcagaatccatgctgcatgttcgacctggtggatacacgccccagagagcactgattaaccccttcgctccctctcggatgcccatgaagcttacgtccaacagaaggcgctggatgcacacttttcctgtgggtatgaatcctaggacccagaataaggattctctagaggacagtgtttctacctctccagacccaagtaagagggggcagctgactggggaaaggggtagacagggagtgtggggtggtcagagcatgaggaaacaagaggaagccctgtgggaagtgagtggtcctgaggtacacatacctctggggtatgggaaggcgatgtggtgagggaggactctctggactctgtgatggaaagtgagggggtgtgtgactgaatgacctgttttggaaggtgattcaggggcacctgggaaaggtagcagattccctataaggcccccatgctggtccagagctgg

SEQ ID NO: 85377 - DNA, 2802 bp, Artificial Sequence
  derived and/or modified sequence
atgttctggaagttcgacctgaacaccaccagccacgtggacaagctgctggacaaggagcacgtgaccctgcaggagctgatggacgaggacgacatcctgcaggagtgcaaggcccagaaccagaagctgctggacttcctgtgcagacagcagtgcatggaggagctggtgagcctgatcacccaggacccccccctggacatggaggagaaggtgagattcaagtaccccaacaccgcctgcgagctgctgacctgcgacgtgccccagatcagcgacagactgggcggcgacgagagcctgctgagcctgctgtacgacttcctggaccacgagccccccctgaaccccctgctggccagcttcttcagcaagaccatcggcaacctgatcgccagaaagaccgagcaggtgatcaccttcctgaagaagaaggacaagttcatcagcctggtgctgaagcacatcggcaccagcgccctgatggacctgctgctgagactggtgagctgcgtggagcccgccggcctgagacaggacgtgctgcactggctgaacgaggagaaggtgatccagagactggtggagctgatccaccccagccaggacgaggacagacagagcaacgccagccagaccctgtgcgacatcgtgagactgggcagagaccagggcagccagctgcaggaggccctggagcccgaccccctgctgaccgccctggagagcagacaggactgcgtggagcagctgctgaagaacatgttcgacggcgacagaaccgagagctgcctggtgagcggcacccaggtgctgctgaccctgctggagaccagaagagtgggcaccgagggcctggtggacagcttcagccagggcctggagagaagctacgccgtgagcagcagcgtgctgcacggcatcgagcccagactgaaggacttccaccagctgctgctgaacccccccaagaagaaggccatcctgaccaccatcggcgtgctggaggagcccctgggcaacgccagactgcacggcgccagactgatggccgccctgctgcacaccaacacccccagcatcaaccaggagctgtgcagactgaacaccatggacctgctgctggacctgttcttcaagtacacctggaacaacttcctgcacttccaggtggagctgtgcatcgccgccatcctgagccacgccgccagagaggagagaaccgaggccagcggcagcgagagcagagtggagcccccccacgagaacggcaacagaagcctggagaccccccagcccgccgccagcctgcccgacaacaccatggtgacccacctgttccagaagtgctgcctggtgcagagaatcctggaggcctgggaggccaacgaccacacccaggccgccggcggcatgagaagaggcaacatgggccacctgaccagaatcgccaacgccgtggtgcagaacctggagagaggccccgtgcagacccacatcagcgaggtgatcagaggcctgcccgccgactgcagaggcagatgggagagcttcgtggaggagaccctgaccgagaccaacagaagaaacaccgtggacctggccttcagcgactaccagatccagcagatgaccgccaacttcgtggaccagttcggcttcaacgacgaggagttcgccgaccaggacgacaacatcaacgcccccttcgacagaatcgccgagatcaacttcaacatcgacgccgacgaggacagccccagcgccgccctgttcgaggcctgctgcagcgacagaatccagcccttcgacgacgacgaggacgaggacatctgggaggacagcgacaccagatgcgccgccagagtgatggccagacccagattcggcgccccccacgccagcgagagctgcagcaagaacggccccgagagaggcggccaggacggcaaggccagcctggaggcccacagagacgcccccggcgccggcgccccccccgcccccggcaagaaggaggccccccccgtggagggcgacagcgagggcgccatgtggaccgccgtgttcgacgagcccgccaacagcacccccaccgcccccggcgtggtgagagacgtgggcagcagcgtgtgggccgccggcaccagcgcccccgaggagaagggctgggccaagttcaccgacttccagcccttctgctgcagcgagagcggccccagatgcagcagccccgtggacaccgagtgcagccacgccgagggcagcagaagccagggccccgagaaggccttcagccccgccagcccctgcgcctggaacgtgtgcgtgaccagaaaggcccccctgctggccagcgacagcagcagcagcggcggcagccacagcgaggacggcgaccagaaggccgccagcgccatggacgccgtgagcagaggccccggcagagaggccccccccctgcccaccgtggccagaaccgaggaggccgtgggcagagtgggctgcgccgacagcagactgctgagccccgcctgccccgcccccaaggaggtgaccgccgcccccgccgtggccgtgccccccgaggccaccgtggccatcaccaccgccctgagcaaggccggccccgccatccccacccccgccgtgagcagcgccctggccgtggccgtgcccctgggccccatcatggccgtgaccgccgcccccgccatggtggccaccctgggcaccgtgaccaaggacggcaagaccgacgccccccccgagggcgccgccctgaacggccccgtgtag

SEQ ID NO: 85378 - DNA, 2802 bp, Artificial Sequence
  derived and/or modified sequence
atgttttggaaatttgacctcaacaccacttcgcatgtggataagcttctcgataaagagcatgtgaccctgcaggagctgatggacgaagacgacatcttgcaggagtgtaaggcccaaaatcagaagctgcttgactttctgtgccgacagcagtgcatggaagaactggtgtcccttataacccaggacccaccacttgacatggaggaaaaagtcaggtttaaataccctaacacagcctgcgagcttctgacatgtgatgtgccccagattagcgatcgactggggggagacgagagcctgctctccctgctgtacgattttctggaccacgagcctccgcttaatcccttactagctagtttctttagtaagacaatcggtaatttaatagctcgaaagacagaacaagtaattacgttcctaaagaaaaaggataagtttataagtcttgtgttaaagcacatcgggacttctgccctgatggatcttttgctcaggttggtctcctgtgtcgagcccgccggcctgcggcaggacgtgctacactggctgaacgaggagaaggtcattcaacgtctagtggagctgatccatccgtcacaagacgaagatcgtcagtccaacgcgtctcagacactgtgtgatatcgtgcggttgggcagagaccaaggcagccagttacaggaggccctcgagcctgaccctcttcttactgctctcgagagccgccaagactgcgtggagcaattactaaagaatatgttcgacggagacaggacagagtcctgtctggtgtctgggactcaggtgcttttgactctcttagaaactcggagagtaggtactgagggactggtcgatagcttctcccaaggactggagcgctcttatgcggtgtcatcctcagtgttgcatggcattgaacccagactcaaagattttcatcagctcctgctcaaccctcccaagaagaaggccattctgacaacaattggggtcctggaagaaccattaggaaacgcgcgcctgcatggcgcccgcctaatggctgccctcttacacactaacaccccatctatcaaccaggagttgtgcaggctgaacacaatggacctgctgttggatctgttctttaagtatacatggaataattttctgcacttccaggtcgaactgtgcattgcagcaatcttgtcacacgctgctagggaagaacggaccgaggctagcggcagcgaatctagagtggagcctccacacgagaatggtaaccgctctctggaaactccacagcctgccgcgagtctccccgacaatacaatggttactcacctctttcagaaatgctgtctggtccagcggatcctggaggcttgggaggccaatgatcatacccaggctgcaggagggatgagacgaggcaatatggggcacctgactcggatcgctaatgctgtcgtgcagaatcttgagaggggcccagtgcagacacacatctccgaggttattagaggcctcccagccgattgtcgaggccgatgggagagttttgtggaggaaactcttactgagaccaatcgacggaacacagtggacctggccttcagcgattatcagatacagcaaatgacagcgaatttcgtcgaccaattcgggtttaacgacgaagagtttgcagatcaagacgataatatcaacgccccattcgaccggattgctgagattaattttaacattgacgctgacgaagactctccaagtgccgctctgtttgaagcttgctgtagcgaccgcatccagccctttgacgatgacgaggatgaggatatatgggaggacagcgacaccaggtgcgcagcgagggtgatggcccgcccacgatttggagcaccgcacgcctcagagtcttgcagtaaaaacggcccagaacgtggtggccaggacggaaaggcctcactagaagcccatcgcgacgctccaggtgcgggcgcgccgcctgccccgggaaagaaagaagctccccccgtggaaggtgactctgagggcgctatgtggacagccgtattcgacgagccagctaatagcactcccaccgcgcctggagtggtgcgcgacgtgggctcgagtgtatgggcagcgggcacgtcggccccagaagagaagggctgggcaaaatttacagacttccagccattctgttgctcggaatcgggcccccgttgctcttcgcctgtggacacggaatgcagccacgcagaaggcagtaggtcacagggacctgagaaagcattcagccctgccagcccatgtgcatggaacgtttgtgtgacccgcaaggcgccactcctggcctccgactcgagctcgtccggagggtctcactccgaagacggggaccagaaggcggcctctgccatggacgctgtgtctcggggtccaggccgggaagctccacctcttccgactgtagcgcgcaccgaagaggctgttggcagggttggctgtgcggactcaaggttgctgtcacccgcctgccccgcccctaaagaggtgaccgcggcccccgcagttgctgtgccccctgaggccactgtggcaataacaacagccctctcaaaggctggacccgcgataccaactcccgccgtgtcatcagccttagccgtggccgtgccccttggtcctattatggcagttactgccgcgcctgccatggtcgcaaccctcggaacggttactaaggatggcaagacggatgcacctcccgagggcgccgcactgaatggcccggtgtag

SEQ ID NO: 85379 - DNA, 2802 bp, Artificial Sequence
  derived and/or modified sequence
atgttctggaagtttgacctgaacaccaccagccacgtggacaagctgctggacaaggagcacgtgaccctgcaggagctgatggatgaagatgacatcctgcaggagtgcaaggcccagaaccagaagctgctggacttcctgtgccggcagcagtgcatggaggagctggtgtccctcatcacccaggacccccccctggacatggaggagaaggtgcgcttcaagtaccccaacacagcctgtgagctgctgacctgtgatgtgccccagatcagtgaccggctgggcggagatgagagcctgctgagcctgctgtatgacttcctggaccacgagccccccctgaaccccctgctggccagcttcttcagcaagaccatcggcaacctgattgccaggaagacagagcaggtgatcaccttcctgaagaagaaggacaagttcatcagcctggtgctgaagcacatcggcaccagcgccctgatggacctgctgctgcggctggtgtcctgtgtggagcccgccggcctgcggcaggatgtgctgcactggctgaatgaggagaaggtgatccagaggctggtggagctgatccaccccagccaggatgaagatcggcagagcaatgccagccagaccctgtgtgacatcgtgcggctgggccgggaccagggcagccagctgcaggaggccctggagccagaccccctgctgacagccctggagagccggcaggactgtgtggagcagctgctgaagaacatgtttgatggagacagaacagagagctgcctggtgtctggcacccaggtgctgctgaccctgctggagacccggcgggtgggcacagagggcctggtggacagcttcagccagggcctggagaggagctatgctgtgagcagctctgtgctgcatggaattgagccccggctgaaggacttccaccagctgctgctgaacccccccaagaagaaggccatcctgaccaccatcggcgtgctggaggagcccctgggcaatgcccggctgcacggggcccggctgatggccgccctgctgcacaccaacacccccagcatcaaccaggagctgtgccgcctgaacaccatggacctgctgctggacctcttcttcaagtacacctggaacaacttcctgcacttccaggtggagctgtgcatcgccgccatcctgagccatgctgcccgggaggagaggacagaggccagcggcagcgagagccgggtggagccccctcatgaaaatggaaacagaagcctggagaccccccagcctgctgccagcctgcctgacaacaccatggtgacccacctgttccagaagtgctgcctggtgcagaggatcctggaggcctgggaggccaatgaccacacccaggccgccggcggcatgaggcggggcaacatgggccacctgacccgcatcgccaatgctgtggtgcagaacctggagcggggccctgtgcagacccacatcagcgaggtgatccggggcctgcctgctgactgccggggccgctgggagagctttgtggaggagaccctgacagagaccaacagaagaaacacagtggacctggccttcagtgactaccagatccagcagatgacagccaactttgtggaccagtttggcttcaatgatgaggagtttgctgaccaggatgacaacatcaatgccccctttgacagaattgctgagatcaacttcaacattgatgctgatgaggacagccccagcgctgccctgtttgaggcctgctgcagcgaccgcatccagccctttgatgatgatgaagatgaggacatctgggaggacagcgacacccgctgtgccgcccgggtgatggcccggcccaggtttggagccccccacgccagcgagagctgcagcaagaatggacctgagcggggcggccaggacggcaaggccagcctggaggcccacagagatgcccctggggccggggcccccccagcccctgggaagaaggaggcccctcctgtggagggggacagcgagggcgccatgtggacagctgtgtttgatgagcccgccaacagcacccccacagcccctggggtggtgagagatgtgggcagctctgtgtgggccgccggcaccagcgcccctgaggagaagggctgggccaagttcacagacttccagcccttctgctgcagcgagagcggcccccgctgcagcagccctgtggacacagagtgcagccacgccgagggcagccgcagccagggccctgagaaggccttcagccctgccagcccctgtgcctggaatgtgtgtgtgaccaggaaggcccccctgctggccagtgacagcagcagcagcggcggcagccacagtgaagatggagaccagaaggccgccagcgccatggatgctgtgtcccggggccctggccgggaggccccacccctgcccaccgtggccaggacagaggaggccgtgggccgggtgggctgtgccgacagccggctgctgagccctgcctgcccagcccccaaggaggtgacagctgccccagctgtggccgtgcccccagaggccaccgtggccatcaccacagccctgagcaaggccggccctgccatccccaccccagctgtgtcctctgccctggccgtggccgtgcccctgggccccatcatggctgtgacagctgccccagccatggtggccaccctgggcaccgtgaccaaggatggcaagacagatgcccctcctgagggcgccgccctgaatggacctgtgtag

SEQ ID NO: 85380 - DNA, 2802 bp, Artificial Sequence
  derived and/or modified sequence
atgttctggaagttcgacctgaacaccaccagccacgtggacaagctgcttgacaaggaacacgtgactctgcaggaactaatggatgaggatgacatcctgcaggaatgcaaagcacagaaccagaaattactggactttctctgtcgccagcagtgcatggaagaactcgtttctctgatcactcaggatccccccttagatatggaagaaaaggtgcgattcaagtaccccaacaccgcttgcgaactgctgacatgtgacgtgccccagatctctgatagactgggaggggacgaatctctgctgtccctgttatacgactttctggaccacgaaccaccactgaaccctcttcttgcgtcattttttagcaaaactatcggtaacctcatcgcacgtaaaacagaacaggtcataacctttctgaaaaaaaaagacaagttcatcagcttggtgcttaagcatatcggcacctctgcgctgatggatttgcttctgcgcctcgtttcctgcgtggaacccgctggtcttcgccaggacgtcctgcactggctgaatgaagaaaaggtgattcaacgcctggtagagctcattcatccctcccaggacgaggataggcaaagcaatgcctcccagacattgtgtgacatcgtgagactcggaagagaccagggctctcagctgcaagaggcactcgagcccgaccctctcctgaccgcattagaatcccgacaggattgtgtcgaacagctcctgaagaatatgttcgatggggataggaccgaatcgtgcctcgtatcgggcacccaggtgctgttgacactactcgagactcgacgggttggcactgaggggctcgtggattcatttagccagggcttggaaagatcctacgcggtcagcagtagtgtgttgcatggaatcgagccccgtctgaaagactttcaccagctgcttctcaatcccccgaaaaaaaaagctattttaaccactataggagtgctggaggagcccctggggaatgcacggctacacggtgcccgactcatggcagcgttgctgcataccaacactccttcaatcaaccaggaactgtgccggctcaacacaatggatctactgcttgacctcttctttaaatacacctggaataacttcttgcacttccaggtagagctgtgcattgcagctattctctcgcacgcagccagagaagagcggaccgaagcatcggggagtgaatccagagtggagcctcctcacgagaacggaaatcggtcgttagagacgccccagcctgccgccagcctgcccgacaacaccatggtgacacacctctttcagaagtgctgtctggtccagagaattctggaggcttgggaggccaacgatcatacccaagcagcaggaggcatgcgccgggggaatatgggacatttaacccgtatcgcgaacgcagtggtccagaacctagaacgggggcccgttcagacacacatcagcgaagtgattcgtggcctgcctgcagattgccgcggacgctgggagtcttttgtcgaggagaccttgacagagacaaatagaagaaatactgtggacctggcattctccgattaccagatccagcaaatgactgcaaattttgtggatcaatttgggtttaacgacgaggaattcgctgatcaggacgacaatatcaatgctccattcgatcgaattgccgagattaattttaacatcgatgccgacgaggattctccgtctgctgccctgtttgaggcttgctgtagcgacagaatccagcctttcgacgacgacgaggacgaggatatctgggaagacagcgatacaagatgcgccgccagagtgatggctcgccccaggttcggggctcctcatgctagcgagagctgctccaaaaacggacccgagcgcggcggtcaggacgggaaagcctcattagaggcccatcgcgacgctcccggtgccggcgcgccacctgcacctggaaaaaaggaggcacctccagtggagggggatagcgagggcgctatgtggaccgcagtcttcgatgagcctgccaactccacacctacagccccaggagtcgtaagagatgtagggtcctcagtctgggcggctgggacatcagcccccgaggaaaagggttgggccaagtttactgacttccagcccttttgctgtagcgaatccggtccaagatgctcaagccctgtcgatactgaatgttcccacgccgagggttcgcgatcccagggacccgagaaagccttcagtcctgcctcgccctgtgcctggaacgtctgtgtcacacgcaaagcaccacttctggcttcagactccagcagcagcgggggttcgcattccgaggacggcgaccagaaggccgcttcggctatggatgctgtctcacggggccctggcagagaagccccccccctcccgacagttgcccggactgaagaggccgtgggcagggtgggatgcgcggatagccggttgcttagtcccgcctgcccagctcctaaagaggtgacagccgcacccgccgtcgcagtccctccagaggccacagttgcaattactaccgccctgtctaaggcagggcctgccattcccactcctgctgtaagttctgccctggcggtggctgtgccgcttggtcctattatggccgtcaccgcggcacctgcaatggtagccacgctcgggacagtgacaaaagacggtaaaacagatgcacccccagagggtgcagctcttaacggcccagtctag

SEQ ID NO: 85381 - DNA, 2802 bp, Artificial Sequence
  derived and/or modified sequence
atgttttggaaatttgacctgaatacgactagccatgtggacaagctgctggacaaggaacatgtgaccttgcaggaactgatggacgaagatgacatcttgcaagaatgtaaggctcagaaccagaagctattggatttcctttgtagacagcagtgtatggaagaactcgtctctctgatcacccaagatcccccactggatatggaagaaaaagtccgcttcaaatacccaaatactgcttgtgagctgttgacctgcgatgtgcctcagattagtgatcgcctgggaggagatgaatcacttctctcactcctctacgacttccttgatcacgaacctccgcttaaccctctgctggccagcttcttttcaaagaccattgggaatttgatagcacggaagacagaacaggtgatcacatttctcaagaagaaggacaagttcatctccctcgtactgaagcacatcggaacctctgctctcatggacttactgttgaggcttgtatcctgtgtagagccagctggcctccgccaggacgtgttgcactggctgaatgaagagaaggtgatacagcggctcgtcgaactgatccacccctcacaggatgaagatagacagtccaacgcctcccagaccctctgcgatattgtcagactggggagggatcagggctcgcagttacaggaggccctcgagcctgaccctctgctgacggcacttgaaagccgtcaggattgtgtcgaacagttattaaagaatatgttcgacggtgacaggacagagtcgtgcttggtgagcggtacccaagtgctcctcaccctcctggaaactagaagggttggaacagaagggctggtcgattcattctcacagggacttgagagatcgtacgcagtctctagtagcgtcctgcatgggatcgaaccaaggttgaaagattttcatcagctgctgctgaatcctccaaagaagaaagcaattctgacgaccataggggtgctcgaggagccactagggaacgcaaggctacatggcgcacgtctcatggctgcacttctgcataccaacaccccgagcattaatcaggaactgtgccggctgaacacaatggacttacttctggatttgttctttaaatatacctggaataatttcctgcactttcaggtggagttgtgtatagcagccattttgtcccacgccgctcgagaggagcggaccgaagcatcgggctcagaatcacgtgtagagccgcctcatgagaatggcaatcgtagcctggagacaccacagcccgctgcgtctctgcctgataatacaatggtcacgcatctgttccaaaaatgttgtctcgtccagcggatcctggaagcctgggaggcaaacgaccacactcaagcagccggaggaatgcgcaggggtaacatggggcacctgacgcgaattgctaacgccgtcgttcagaatctggagaggggcccagtccagacccatattagcgaggtgatcagaggcttacctgccgactgtcggggacgctgggagtcatttgtcgaggaaaccctgactgaaaccaacaggcggaataccgtcgatttagccttctccgattaccagatccagcagatgaccgctaactttgtggaccagtttggcttcaatgacgaagagtttgctgatcaggatgacaatatcaatgccccttttgatagaattgcagagataaatttcaacatcgatgctgacgaagatagcccctccgccgctcttttcgaggcgtgttgctccgacaggattcagcctttcgacgatgacgaggatgaggacatctgggaagactcagacacaaggtgcgccgcacgtgtgatggctagaccacggtttggagcgccacatgcttccgaatcctgttccaagaatggccctgaaaggggcggacaggatgggaaggcctcactggaggcccatagagacgcccctggagccggagccccacctgccccaggtaaaaaggaagccccaccagtagagggggattcggaaggcgctatgtggaccgccgtctttgatgaacctgccaatagcacccctaccgctccaggagttgtgcgagacgtgggctcttcagtttgggccgcaggcaccagtgcccctgaggaaaaagggtgggccaaattcacggatttccaacccttttgttgttctgagtccggcccaagatgcagctcaccggtggatactgagtgttcccacgccgagggctcgcggtcacagggacctgaaaaagctttctctcctgcctcgccttgtgcatggaacgtctgtgttactcggaaagctcccctcctggcctctgattcatctagcagcgggggttcccattccgaggatggggaccagaaggcggcatctgccatggacgccgtgtctcgcggaccaggcagggaagcaccaccattgccaactgtggctaggacagaagaagccgtgggtcgcgtagggtgtgctgactcccgtctcctaagtccagcttgtccagccccaaaggaagtcacagccgcacccgctgtggctgtcccaccagaagcgacagtcgcaataacaacagccttgtcgaaggcgggtcccgcaattcctacaccggcagttagtagtgctctcgcagtcgccgtccccttgggaccgatcatggctgtgactgcagcccctgccatggtggccacgctcggtaccgtgacaaaggacggaaagaccgatgctccaccagaaggggcagcgctgaacggacctgtgtag

SEQ ID NO: 85382 - protein, 927 aa, Artificial Sequence
  derived and/or modified sequence
MFWKFDLNTTSHVDKLLDKEHVTLQELMDEDDILQECKAQNQKLLDFLCRQQCMEELVSLITQDPPLDMEEKVRFKYPNTACELLTCDVPQISDRLGGDESLLSLLYDFLDHEPPLNPLLASFFSKTIGNLIARKTEQVITFLKKKDKFISLVLKHIGTSALMDLLLRLVSCVEPAGLRQDVLHWLNEEKVIQRLVELIHPSQDEDRQSNASQTLCDIVRLGRDQGSQLQEALEPDPLLTALESQDCVEQLLKNMFDGDRTESCLVSGTQVLLTLLETRRVGTEGLVDSFSQGLERSYAVSSSVLHGIEPRLKDFHQLLLNPPKKKAILTTIGVLEEPLGNARLHGARLMAALLHTNTPSINQELCRLNTMDLLLDLFFKYTWNNFLHFQVELCIAAILSHAAREERTEASGSESRVEPPHENGNRSLETPQPAASLPDNTMVTHLFQKCCLVQRILEAWEANDHTQAAGGMRRGNMGHLTRIANAVVQNLERGPVQTHISEVIRGLPADCRGRWESFVEETLTETNRRNTVDLAFSDYQIQQMTANFVDQFGFNDEEFADQDDNINAPFDRIAEINFNIDADEDSPSAALFEACCSDRIQPFDDDEDEDIWEDSDTRCAARVMARPRFGAPHASESCSKNGPERGGQDGKASLEAHRDAPGAGAPPAPGKKEAPPVEGDSEAGAMWTAVFDEPANSTPTAPGVVRDVGSSVWAAGTSAPEEKGWAKFTDFQPFCCSESGPRCSSPVDTECSHAEGSRSQGPEKAFSPASPCAWNVCVTRKAPLLASDSSSSGGSHSEDGDQKAASAMDAVSRGPGREAPPLPTVARTEEAVGRVGCADSRLLSPACPAPKEVTAAPAVAVPPEATVAITTALSKAGPAIPTPAVSSALAVAVPLGPIMAVTAAPAMVATLGTVTKDGQMPRQKELP

SEQ ID NO: 85383 - DNA, 2784 bp, Artificial Sequence
  derived and/or modified sequence
atgttctggaagttcgacctgaacaccaccagccacgtggacaagctgctggacaaggagcacgtgaccctgcaggagctgatggacgaggacgacatcctgcaggagtgcaaggcccagaaccagaagctgctggacttcctgtgcagacagcagtgcatggaggagctggtgagcctgatcacccaggacccccccctggacatggaggagaaggtgagattcaagtaccccaacaccgcctgcgagctgctgacctgcgacgtgccccagatcagcgacagactgggcggcgacgagagcctgctgagcctgctgtacgacttcctggaccacgagccccccctgaaccccctgctggccagcttcttcagcaagaccatcggcaacctgatcgccagaaagaccgagcaggtgatcaccttcctgaagaagaaggacaagttcatcagcctggtgctgaagcacatcggcaccagcgccctgatggacctgctgctgagactggtgagctgcgtggagcccgccggcctgagacaggacgtgctgcactggctgaacgaggagaaggtgatccagagactggtggagctgatccaccccagccaggacgaggacagacagagcaacgccagccagaccctgtgcgacatcgtgagactgggcagagaccagggcagccagctgcaggaggccctggagcccgaccccctgctgaccgccctggagagccaggactgcgtggagcagctgctgaagaacatgttcgacggcgacagaaccgagagctgcctggtgagcggcacccaggtgctgctgaccctgctggagaccagaagagtgggcaccgagggcctggtggacagcttcagccagggcctggagagaagctacgccgtgagcagcagcgtgctgcacggcatcgagcccagactgaaggacttccaccagctgctgctgaacccccccaagaagaaggccatcctgaccaccatcggcgtgctggaggagcccctgggcaacgccagactgcacggcgccagactgatggccgccctgctgcacaccaacacccccagcatcaaccaggagctgtgcagactgaacaccatggacctgctgctggacctgttcttcaagtacacctggaacaacttcctgcacttccaggtggagctgtgcatcgccgccatcctgagccacgccgccagagaggagagaaccgaggccagcggcagcgagagcagagtggagcccccccacgagaacggcaacagaagcctggagaccccccagcccgccgccagcctgcccgacaacaccatggtgacccacctgttccagaagtgctgcctggtgcagagaatcctggaggcctgggaggccaacgaccacacccaggccgccggcggcatgagaagaggcaacatgggccacctgaccagaatcgccaacgccgtggtgcagaacctggagagaggccccgtgcagacccacatcagcgaggtgatcagaggcctgcccgccgactgcagaggcagatgggagagcttcgtggaggagaccctgaccgagaccaacagaagaaacaccgtggacctggccttcagcgactaccagatccagcagatgaccgccaacttcgtggaccagttcggcttcaacgacgaggagttcgccgaccaggacgacaacatcaacgcccccttcgacagaatcgccgagatcaacttcaacatcgacgccgacgaggacagccccagcgccgccctgttcgaggcctgctgcagcgacagaatccagcccttcgacgacgacgaggacgaggacatctgggaggacagcgacaccagatgcgccgccagagtgatggccagacccagattcggcgccccccacgccagcgagagctgcagcaagaacggccccgagagaggcggccaggacggcaaggccagcctggaggcccacagagacgcccccggcgccggcgccccccccgcccccggcaagaaggaggccccccccgtggagggcgacagcgaggccggcgccatgtggaccgccgtgttcgacgagcccgccaacagcacccccaccgcccccggcgtggtgagagacgtgggcagcagcgtgtgggccgccggcaccagcgcccccgaggagaagggctgggccaagttcaccgacttccagcccttctgctgcagcgagagcggccccagatgcagcagccccgtggacaccgagtgcagccacgccgagggcagcagaagccagggccccgagaaggccttcagccccgccagcccctgcgcctggaacgtgtgcgtgaccagaaaggcccccctgctggccagcgacagcagcagcagcggcggcagccacagcgaggacggcgaccagaaggccgccagcgccatggacgccgtgagcagaggccccggcagagaggccccccccctgcccaccgtggccagaaccgaggaggccgtgggcagagtgggctgcgccgacagcagactgctgagccccgcctgccccgcccccaaggaggtgaccgccgcccccgccgtggccgtgccccccgaggccaccgtggccatcaccaccgccctgagcaaggccggccccgccatccccacccccgccgtgagcagcgccctggccgtggccgtgcccctgggccccatcatggccgtgaccgccgcccccgccatggtggccaccctgggcaccgtgaccaaggacggccagatgcccagacagaaggagctgccctag

SEQ ID NO: 85384 - DNA, 4030 bp, Artificial Sequence
  derived and/or modified sequence
ggagcgcgtgcccgtgcgccgccgccgccattttggagcgatcggagtgccgcccgcggccccgagtcggtctcgagccgccggccggccgtgccggtgtccgtaggcgctgcgccctcggccgggcccatgtgtgtgcggcccgcccgaggccgcccgggctttgcctccaccagcgccctggcctccgctcgggcctccacacgggcctccgaagagctgccgcgacgcccggcccgcagggcaggtaaagagattataaatcttccactgaatgaaaaaaattttcttaaagctgcatatactccaagaaaaaaaccacaaatgtttttctgttttgcctgaatacatgatttaaacaagagatttccacagaagctctgcggccgtcacgatgttctggaagtttgacttgaacaccacgtcccatgttgacaagctgctggacaaggagcatgtgacgctgcaggagttaatggatgaagatgacatcttgcaggagtgtaaggctcagaaccagaagctgctggacttcctgtgcaggcagcagtgcatggaggagctggtgagcctcatcacacaggatccgcccctggacatggaggagaaggtccgcttcaaatatccaaacacagcctgtgagcttctgacttgtgatgtgccgcagatcagcgaccgcctcggtggggacgagagcctgctgagcctcctgtacgacttcttggaccatgagccgcctctcaatcctctgctcgccagttttttcagcaagaccattggcaatctcattgcaagaaaaaccgaacaggtgattacgtttttgaagaagaaggacaagttcatcagcctggtgttgaagcacatcggcacctcagcgcttatggacctgctgctgcgcctggtcagctgtgtggagccagccgggctccggcaggacgtcctgcactggctgaatgaagagaaggtcatccagaggcttgtggagttgatccacccgagccaggatgaagataggcagtcaaatgcttctcagactctctgtgacatagttaggctgggcagagaccagggcagtcagctgcaagaggctctggagccagacccgctcctcacagcgctggagtcgcaggactgtgtggagcagcttctgaagaacatgtttgatggagaccggacggagagctgcctcgtcagtgggactcaggtgttactcaccttgctggaaaccaggcgggttgggacagagggcttggtggactccttttctcagggactggaaaggtcatacgctgtcagcagcagcgtactacacggcatcgagcctcggctgaaggacttccaccagctcctgctcaacccgcccaagaagaaagcgatcctgaccaccattggtgtgctggaggagcccctggggaatgcccgtctgcatggcgcccgcctcatggcagcactgctgcacacaaacacacccagcatcaaccaggagctctgccggctcaacacgatggacttactgctggacttgttctttaagtacacctggaataactttttgcacttccaagtggaactatgcatagccgctattctctcccacgctgcccgtgaggagaggacagaagccagcggatccgagagcagggtggagcctccgcatgagaacgggaaccggagcctggagactccccagccggccgccagcctccctgacaacacaatggtgacccacctgttccagaagtgctgcctggtgcagaggatcctggaggcctgggaagccaacgaccacacgcaggcagcgggtggcatgagacgtgggaacatgggccacctcacacggatcgccaacgcggtggtgcagaacctggagcggggccctgtgcagacgcacatcagcgaggtcatccgagggctccctgcggactgccgtggccgctgggagagcttcgtggaggagacgctgacggagacgaaccgcaggaacactgtggacctggccttctctgactaccagatccagcagatgacagccaacttcgtggatcagtttggcttcaatgatgaggagtttgccgaccaggacgacaacatcaatgccccgtttgacaggatcgcagagatcaacttcaacatcgacgctgacgaggacagtcccagcgcagctctgtttgaggcctgctgcagtgaccgcatccagccctttgatgatgatgaggacgaggacatctgggaggacagtgacactcgctgtgctgcccgggtgatggccagacccaggtttggagccccccatgcttcagagagttgctcaaagaatggcccagagcgtggaggccaggatgggaaggcgagcttggaagcacacagagatgcacctggggcaggtgccccaccggcccccgggaagaaggaagcgccccctgtggagggtgactcagaagcaggcgccatgtggacggcagtgtttgatgagccagcgaactcaacgcccacagccccaggagtggtgagggacgtgggttccagtgtgtgggcagctggcacctcagctccagaggagaaaggctgggccaagttcactgacttccaacctttctgctgctccgagtcagggcccaggtgcagctctccggtggacacagaatgcagccatgctgagggcagccggagccaaggccctgagaaagccttcagcccggcttctccatgtgcctggaacgtgtgtgtcaccaggaaggcccccctgctggcctctgacagtagctcctctgggggctcccacagcgaggatggcgaccagaaggcagcgagtgccatggatgcggtgagcaggggtcccggccgggaggcccccccgctgcccacagtggccaggacagaggaggctgtcggcagggtcgggtgtgctgacagccggctgttaagccctgcctgccccgcgccaaaggaagtgactgctgccccagccgtggctgtgccccccgaggctactgtggccatcaccacagcactgagcaaggctggccccgccatacccaccccagcagtctcttctgcactggccgtggcggtccccctagggcccatcatggcagtcacagcagccccagccatggtggccaccctggggacagtgacaaaggacggacagatgccccgccagaaggagctgccttaaatggcccagtgtgatgctgctgccgcccggccacggcccaccctggtcaggctgcctccttaatcgagaaaactacctggtgatgcaatcttttttttttttaatttaatttaattttaaaataaatgctgcattggtaaagctggcagttgaaaccagttggacggcccagcttgcgtctcttctgcctgagtgggcctctcaggtcactcgtgccctgctggaggacagaggggcacctcagccgcccccaagcccagagcacagcaataaggtcggcctgcaggagccggggtgggggtgggggtggggggggcaggaccctgagatgccaccaggacctgatgggccaggaagggcgtggacatggaggctgtttttacagttttttttttgttgttgttttgtttttaaagaatacagaaggagccaagcttttttgcactttgtatccagctgcaagctcagggcagagtcaagggcctgggttggaaaaacctgactcacaggaatgcataattgacccttgcagctacccaatagcccttggagctggcactgaaccaggctgcaagatttgactgccttaaaaacacaaggccctctaggcctggcagggatgtccctgtgcccagcacagggtgcctggcagggggagaccacaggtatgcaggtggggggacatggtgtggcactaggggctcgaagactggtttctagcactaccggtcacggccatgtcgtcctagaagggtccagaagattattttacgttgagtccatttttaatgttctgatcacctgacagggcaccccaaacccccaactcccaataaaagccgtgacgttcgg

SEQ ID NO: 85385 - DNA, 2784 bp, Artificial Sequence
  derived and/or modified sequence
atgttctggaagtttgatttaaatacgacgagccatgtagacaaactcctggataaggagcacgtgacactgcaggagttgatggacgaagacgacattctacaggaatgcaaggcccagaatcagaaattactggattttctgtgccgccagcaatgtatggaagagttggttagtctgatcacccaagacccacccctggacatggaggaaaaggtccgattcaaataccctaacaccgcatgtgagctcctgacctgtgacgtgccccagatttcggatcggcttggtggtgacgagagtctcctgagcctcctttatgactttctggatcacgagccacctctgaaccctctgctggcaagtttcttttctaaaactatcgggaacctgatcgcccgcaaaactgagcaggttataacatttctcaagaagaaggacaaatttatctcactcgtcctcaaacatatcggtacgtccgcacttatggatctcttactgcgactggtgagctgcgtcgagcccgccggactgcgtcaggacgttttgcactggctgaacgaggagaaggttatacaaagattggtggaattgattcaccctagccaggatgaggaccggcagtccaacgcttctcagacgttgtgcgatatcgtacggctcggcagagatcaggggtcccaactgcaggaggccctagaacctgatccattactgacagctttagagagccaggactgcgtagaacagttattaaaaaacatgtttgacggtgataggacagagagttgcttggtttcagggacccaagttttattaactctactcgagacgagacgggtgggcactgaaggtctggtggatagcttttcccagggcttagaacggtcctacgcggtctcatcgagtgtcctgcacggcatcgaacccagactgaaagactttcaccaactgctactgaatcctcctaagaagaaggcaattcttacgactattggtgtgctagaggagcctctcggcaacgcacgcttacacggcgcacgcttaatggccgccctgctgcataccaatacaccttcgataaatcaggaattgtgtagactgaatactatggacctactgctggatctttttttcaagtacacctggaacaatttccttcatttccaggtggagctctgtatcgcagctattctctcgcatgcggcccgcgaggagcgcacggaagccagtggtagcgaaagccgcgttgagccaccacacgagaacgggaatagatctcttgagacaccacaaccagcggcaagtctccccgataacacaatggtgacccacttgtttcagaagtgctgcttagtgcagcggatattggaggcgtgggaggccaatgatcatacacaagccgccggaggcatgcgacggggcaacatggggcatctgacaaggattgccaatgccgtagttcagaatctggagaggggacccgtgcagacacatatttcagaagtgataagagggctgccagcagactgtagaggtcgatgggagtcttttgtggaagaaacgctgactgagacaaaccggcggaacacggtggaccttgccttttctgactaccagattcagcagatgaccgcgaacttcgtggatcagtttggttttaacgatgaggagtttgcagatcaagacgacaacatcaatgcacccttcgaccgtattgccgagatcaatttcaatattgacgctgatgaggattcaccgtcagccgctcttttcgaagcgtgttgctctgatcggattcaaccgttcgatgatgacgaggatgaggatatctgggaggatagtgacactcggtgcgccgctcgagtgatggcccgccctcgctttggagccccgcacgcaagcgagagttgctccaaaaatggtcctgaacggggcggacaggatgggaaggcctctctcgaggcccaccgagacgctcctggtgccggagctccgccagcgcccggaaagaaagaggccccccccgtagagggtgacagtgaagctggagccatgtggactgccgtgttcgacgaacccgccaattctactccgaccgcgccaggtgtcgtccgagacgtgggcagctccgtgtgggcagcaggaacatccgcccctgaagagaaaggctgggccaagttcacagacttccagcccttctgttgctccgaaagtggcccccgctgttcttcaccagtagataccgagtgctcccatgccgaaggctccagatcccaaggtccagaaaaggcgttcagccccgcttccccctgtgcctggaacgtttgtgtaactcgcaaggcccctctgctggccagcgatagttcaagttcaggcggaagtcactcagaggacggagatcagaaggccgcttccgccatggatgcagtgtcgcgcggcccgggtcgagaagcaccccctctgccaacagttgcgaggacagaagaggcagttggtcgcgtgggctgcgctgacagccggctgctctcccccgcatgtccagctcccaaagaggtgactgcagctcccgctgtagccgtcccccctgaggccacggtggccatcaccaccgccctgtctaaggcaggtcctgcaatccccacaccagcagtgagttctgctctcgcagtggccgtacccttggggccgatcatggccgtgactgcagcacctgctatggttgcaacactggggaccgtcactaaggacggccaaatgcctcggcagaaggagcttccttag

SEQ ID NO: 85386 - DNA, 2784 bp, Artificial Sequence
  derived and/or modified sequence
atgttctggaagtttgacctgaacaccaccagccacgtggacaagctgctggacaaggagcacgtgaccctgcaggagctgatggatgaagatgacatcctgcaggagtgcaaggcccagaaccagaagctgctggacttcctgtgccggcagcagtgcatggaggagctggtgtccctcatcacccaggacccccccctggacatggaggagaaggtgcgcttcaagtaccccaacacagcctgtgagctgctgacctgtgatgtgccccagatcagtgaccggctgggcggagatgagagcctgctgagcctgctgtatgacttcctggaccacgagccccccctgaaccccctgctggccagcttcttcagcaagaccatcggcaacctgattgccaggaagacagagcaggtgatcaccttcctgaagaagaaggacaagttcatcagcctggtgctgaagcacatcggcaccagcgccctgatggacctgctgctgcggctggtgtcctgtgtggagcccgccggcctgcggcaggatgtgctgcactggctgaatgaggagaaggtgatccagaggctggtggagctgatccaccccagccaggatgaagatcggcagagcaatgccagccagaccctgtgtgacatcgtgcggctgggccgggaccagggcagccagctgcaggaggccctggagccagaccccctgctgacagccctggagagccaggactgtgtggagcagctgctgaagaacatgtttgatggagacagaacagagagctgcctggtgtctggcacccaggtgctgctgaccctgctggagaccaggagagtgggcacagagggcctggtggacagcttcagccagggcctggagaggagctatgctgtgagcagctctgtgctgcacggcatcgagccccggctgaaggacttccaccagctgctgctgaacccccccaagaagaaggccatcctgaccaccatcggcgtgctggaggagcccctgggcaatgcccggctgcatggagcccggctgatggccgccctgctgcacaccaacacccccagcatcaaccaggagctgtgccgcctgaacaccatggacctgctgctggacctcttcttcaagtacacctggaacaacttcctgcacttccaggtggagctgtgcatcgccgccatcctgagccacgccgcccgggaggagaggacagaggccagcggcagcgagagccgggtggagccccctcatgaaaatggaaacagaagcctggagaccccccagcctgctgccagcctgcctgacaacaccatggtgacccacctgttccagaagtgctgcctggtgcagaggatcctggaggcctgggaggccaatgaccacacccaggccgccggcggcatgagaagaggcaacatgggccacctgaccagaattgccaatgctgtggtgcagaacctggagcggggccctgtgcagacccacatcagcgaggtgatccggggcctgcctgctgactgccggggccgctgggagagctttgtggaggagaccctgacagagaccaacagaagaaacacagtggacctggccttcagtgactaccagatccagcagatgacagccaactttgtggaccagtttggcttcaatgatgaggagtttgctgaccaggatgacaacatcaatgccccctttgacagaattgctgagatcaacttcaacattgatgctgatgaggacagccccagcgctgccctgtttgaggcctgctgcagcgaccgcatccagccctttgatgatgatgaagatgaggacatctgggaggacagcgacacccgctgtgccgcccgggtgatggcccggcccaggtttggagcccctcatgccagcgagagctgcagcaagaatggacctgagcggggcggccaggacggcaaggccagcctggaggcccacagagatgcccctggagctggggcccccccagcccctgggaagaaggaggcccctcctgtggagggggacagcgaggccggggccatgtggacagctgtgtttgatgagcccgccaacagcacccccacagcccctggggtggtgagagatgtgggcagctctgtgtgggccgccggcaccagcgcccctgaggagaagggctgggccaagttcacagacttccagcccttctgctgcagcgagagcggcccccgctgcagcagccctgtggacacagagtgcagccacgccgagggcagccgcagccagggccctgagaaggccttcagccctgccagcccctgtgcctggaatgtgtgtgtgaccaggaaggcccccctgctggccagtgacagcagcagcagcggcggcagccacagtgaagatggagaccagaaggccgccagcgccatggatgctgtgtcccggggccctggccgggaggccccacccctgcccaccgtggccaggacagaggaggccgtgggccgggtgggctgtgccgacagccggctgctgagccctgcctgcccagcccccaaggaggtgacagctgccccagctgtggccgtgcccccagaggccaccgtggccatcaccacagccctgagcaaggccggccctgccatccccaccccagctgtgtcctctgccctggccgtggccgtgcccctgggccccatcatggctgtgacagctgccccagccatggtggccaccctgggcaccgtgaccaaggatggccagatgccccggcagaaggagctgccctag

SEQ ID NO: 85387 - DNA, 2784 bp, Artificial Sequence
  derived and/or modified sequence
atgttctggaagttcgacctgaacaccaccagccacgtggacaagcttctggacaaagaacacgtgacactgcaagaactcatggatgaggacgacatcctccaggagtgtaaggcacagaaccagaaactgctcgatttcctatgccggcagcagtgtatggaagaactcgtctctctcatcacccaagacccgcccttggatatggaggagaaggtgagatttaagtatcctaacacagcatgtgagctcttgacttgcgacgtgccccagatctccgatcgtttgggaggtgacgagtcactcctgtcccttttgtatgattttttggaccacgagcctcctcttaatccccttctggcgtcgttcttcagtaaaaccattggcaatctcatagctaggaaaactgaacaggtaataacgttcttgaaaaagaaagataaatttatctccctcgtgctcaaacatatcgggacttcggcgctgatggatctgctgctccggcttgtgtcatgcgtggaacctgctgggctgcgtcaagacgtgctgcattggctcaacgaagaaaaggttatccagcgtctggtcgagttgattcacccatctcaggacgaggaccgtcagtctaacgcttctcagacactgtgtgatatcgtcagactcggccgtgaccaggggagtcagctacaagaggcgttggaacccgatccgctgctgaccgctctggaatcccaagactgcgttgagcaactgctgaaaaatatgtttgatggtgatagaactgaaagctgtttagtgtccggcactcaggtcctgctgaccttgctagagactcgtagagtgggtacagaggggctggtggattctttttctcagggactggaacggtcctacgccgtctctagctctgtgcttcatggtattgagcctcgcctgaaagattttcaccagctgctgttaaatcctcccaagaagaaggccatcttgactacaattggcgtgctcgaggagcctcttggcaatgctcgcctgcacggggctcgcctgatggccgcgctgctgcacaccaacacacctagcataaaccaagagctatgccgattgaatactatggatctcctgttggatctcttcttcaaatacacctggaacaatttcctgcactttcaggttgagttgtgcatcgccgcgatcctgagccacgccgctcgtgaggaacgcaccgaggcctcaggatccgaaagtcgggtggagcctccccatgagaatgggaacaggtccctcgaaacgccgcagcccgcggcatcgttgcctgataatactatggttacacatctgttccagaaatgctgtctggtgcagcgcattctggaggcgtgggaggccaatgatcacacgcaggctgcgggggggatgcgccgtgggaacatgggccatctgacacgtattgcaaacgccgttgtacagaatctggagcgaggtcccgtccagacccatatttcagaggttatccgcggactgcccgccgattgccgcgggcgctgggaatcttttgtcgaagaaactctgacagaaacgaataggcgaaacaccgtcgatctggcattcagcgattaccagatccaacagatgacagccaactttgtggatcagttcggcttcaacgacgaggaatttgccgaccaggacgacaacattaacgcccctttcgaccgcatcgctgaaattaatttcaacatcgacgccgacgaggactccccaagtgccgccctctttgaggcctgctgcagcgaccgaatacagcccttcgatgacgacgaggacgaggatatttgggaggacagcgacacacggtgcgcagcacgggtaatggctagacctcgcttcggcgcgccccatgcctctgaaagctgcagcaaaaatggaccagaacggggaggccaggacgggaaagcttcattagaggcacatcgtgatgcccctggcgcaggtgcacccccggcccccgggaagaaggaagccccccctgtggaaggcgactctgaggctggcgcaatgtggaccgctgtgttcgacgaacctgctaacagcacccctacagctccaggcgtcgtccgtgacgtcggttccagtgtatgggcagctggtactagtgccccagaggagaaaggatgggcaaagttcacagattttcaaccgttctgttgcagtgagtctggaccacgctgtagttccccagtggacacggagtgcagccacgccgaaggaagccgaagccaggggccagagaaagcattcagtcctgcaagcccttgcgcttggaacgtgtgtgtgacacgtaaggcaccgctcctggctagtgattcctcatccagtggaggtagtcactccgaggacggcgaccaaaaagcagcctccgctatggatgcggtgagtcgaggcccaggtcgagaggcacctccgttgcccaccgtggccagaaccgaagaagccgtgggtagggtcggctgtgccgattctaggcttttgtcccccgcttgccccgcacctaaggaagttacggccgcccctgctgttgctgtccctcctgaagcgaccgtagccattaccacagcactgagtaaggcgggacctgccatccccacacctgcagtatccagcgctctggcagtggctgtgcctttaggcccaatcatggctgtcactgctgcacccgcaatggtggctaccctcgggaccgtgaccaaagacggacagatgcccagacaaaaggagctgccttag

SEQ ID NO: 85388 - DNA, 2784 bp, Artificial Sequence
  derived and/or modified sequence
atgttctggaagttcgacttgaataccacaagtcatgtagacaagctgctggacaaagagcacgtgacattgcaagagctcatggacgaggacgatatcctgcaggagtgtaaggcccagaatcagaagttgctggattttctgtgccggcaacagtgcatggaagagttggtgagcctgattacccaggatcccccactggatatggaggaaaaggtccgcttcaaataccctaacaccgcctgcgagcttttgacttgtgatgtaccgcagataagcgaccgcctgggaggagatgagtccctcttgtctttactctacgacttcctggatcacgagccccctctcaacccgctcctggctagtttcttctccaagacaataggaaatctgattgctaggaagacagagcaggtgataaccttcctaaagaaaaaagacaagtttattagtctggtcctgaagcatattggaacttctgccctgatggatctcttgcttaggctggtgtcatgcgtggagccggcagggctccgtcaggacgttctgcactggctgaacgaggaaaaggtcatccaaagactggtggagcttatacacccaagtcaggatgaggaccgccagtcaaacgccagtcagaccttatgtgatatcgtgaggctgggcagggaccagggttcccaactacaggaggccctggagcccgacccactgctcacggctttggaatcccaagactgcgtggagcagctactaaaaaacatgttcgatggcgatcgaactgaaagctgcttggtctctggcacacaagttctcttgactctgcttgaaactcggagagtcggcacagagggcttagtggatagcttcagtcaggggctggagcggagctatgccgtcagttcttccgttctacatggtatcgaacccaggttgaaagacttccatcagttgctcttgaacccacctaaaaaaaaggccattcttacaacgatcggtgtattagaggaacctttgggtaatgccaggctgcacggggctcggctgatggcggctctgctgcataccaacacccctagcattaaccaggagctttgcagacttaatacaatggacctcctactcgatctcttttttaagtatacgtggaataatttcctgcatttccaggtcgaattgtgtatagctgccatcctctcccatgccgctcgcgaagagcgtacagaagccagcgggtccgagagccgcgtagagcctcctcacgagaacgggaaccggagtctggaaactcctcagccagccgcaagtctaccggacaatactatggtgacccacctttttcagaagtgttgcctggtgcagcgcatccttgaggcctgggaggcaaatgatcacacccaggctgccggtggaatgcgcagggggaacatggggcacctcacccggatcgccaacgcagtggtgcaaaacctggagcgcggaccggttcagacccacataagtgaggttattcggggactccccgctgattgtaggggcagatgggagagcttcgtggaggaaaccctgaccgagactaatagaaggaacaccgtggatttggctttctctgactaccaaattcagcagatgactgccaattttgttgatcaattcggttttaatgatgaagaatttgctgaccaagatgataacatcaatgccccattcgatcgcattgctgagattaacttcaatattgacgcagatgaggattcacctagcgccgctctgtttgaggcatgctgctcagatagaatccaaccctttgacgacgacgaagacgaggacatatgggaggatagcgacacccggtgtgccgctagggttatggctaggccaaggtttggggctccacatgcttcagagagctgctcaaaaaatgggccagagcgcggaggacaagatggcaaagcctcactggaggcccatagagacgcaccaggagcaggtgctccccctgcccctggcaaaaaagaggcccctccagttgagggtgatagcgaagctggagcaatgtggacagctgtttttgacgagcctgcaaacagtactcccactgccccaggcgtggtgagggacgtgggaagttccgtgtgggcagccggtacttctgcacctgaagagaagggctgggccaagtttaccgacttccagccgttctgttgtagcgaaagcgggccacgctgctccagtcctgtggataccgagtgctcccacgcagaaggatctcgcagtcaggggccagaaaaagccttctccccagcctcaccatgcgcatggaatgtctgtgtgacaagaaaggcacccttattggcatcagattcttccagcagtggcggatctcattcagaggacggagaccagaaggccgcttctgccatggacgcagtgtcgcgcggaccaggacgggaggctcccccacttcctaccgtggcaaggacagaggaggccgtgggcagggtaggttgcgcagactccaggcttctgagtcccgcttgccccgctcctaaagaagtgacagccgctcccgcagttgctgtgccccctgaagccactgttgctatcacaactgccctttcaaaggccggaccagccatccccacccctgccgttagttccgcactggccgtagccgtgcctctgggaccgatcatggcagtcaccgccgctcctgctatggtggctactttgggtactgtaactaaggacggacagatgccaaggcaaaaagagcttccctag

SEQ ID NO: 85389 - protein, 333 aa, Artificial Sequence
  derived and/or modified sequence
MAMIELGFGRQNFHPLKRKSSLLLKLIAVVFAVLLFCEFLIYYLAIFQCNWPEVKTTASDGEQTTREPVLKAMFLADTHLLGEFLGHWLDKLRREWQMERAFQTALWLLQPEVVFILGDIFDEGKWSTPEAWADDVERFQKMFRHPSHVQLKVVAGNHDIGFHYEMNTYKVERFEKVFSSERLFSWKGINFVMVNSVALNGDGCGICSETEAELIEVSHRLNCSRELLWWLQPRLVLSGHTHSACEVHHGGRVPELSVPSFSWRNRNNPSFIMGSITPTDYTLSKCYLPREDVVLIIYCGVVGFLVVLTLTHFGLLASPFLSGLNLLGKRKTR

SEQ ID NO: 85390 - DNA, 1002 bp, Artificial Sequence
  derived and/or modified sequence
atggccatgatcgaactgggatttggcagacagaatttccacccacttaagcgtaaatctagcctgctgctgaagctgattgctgtggtctttgctgtcctgctgttttgcgagtttctcatttattatctcgcaatattccagtgtaactggccagaagttaagacaaccgcctctgatggcgaacaaactactagggagcccgttctgaaagccatgttcctcgccgacacccacctgcttggtgaattcctgggacactggctagataagctgagaagagagtggcagatggagcgggcattccagacagcactgtggctgttacagcctgaggtggtgttcatcttgggagacatcttcgacgagggcaagtggtccacacccgaagcgtgggcggatgacgtagagcgcttccagaaaatgttccggcatccatcccatgttcagctcaaggtggtggccgggaaccacgatatcggcttccattacgagatgaatacatataaggtggaaagattcgaaaaggtgttctcctcggagagactcttcagctggaagggtattaattttgtaatggttaactctgtggcactgaatggggatggatgcggcatatgctctgaaacggaggctgaactgattgaggtaagccaccggctcaattgcagccgcgaattactctggtggctgcagcctagactggtcctgagcggccatacccactccgcttgcgaagttcaccacggcgggagagtgcctgagctgagtgttccttcatttagttggagaaacagaaataatcccagtttcataatgggcagcatcactcccacagattataccctgtctaaatgttatttaccccgggaagatgttgtgcttatcatatattgtggagtcgtgggtttcctggtggtgctgaccttgacacatttcggactgctcgcctctcccttcctgagcggactgaatctgctcggcaagcggaagacccggtag

SEQ ID NO: 85391 - DNA, 1002 bp, Artificial Sequence
  derived and/or modified sequence
atggccatgattgagctgggcttcggccggcagaacttccaccccctgaagaggaagagcagcctgctgctgaagctgattgctgtggtgtttgctgtgctgctcttctgtgagttcctgatctactacctggccatcttccagtgcaactggccagaggtgaagaccacagccagtgatggagagcagaccacccgggagcctgtgctgaaggccatgttcctggccgacacccacctgctgggggagttcctgggccactggctggacaagctgcggcgggagtggcagatggagcgggccttccagacagccctgtggctgctgcagcctgaggtggtgttcatcctgggggacatctttgatgagggcaagtggagcaccccagaggcctgggcagatgatgtggagcgcttccagaagatgttccgccaccccagccacgtgcagctgaaggtggtggccggcaaccacgacatcggcttccactatgagatgaacacctacaaggtggagagatttgagaaggtgttcagcagcgagcggctcttctcctggaagggcatcaactttgtgatggtgaacagcgtggccctgaatggagatggctgcggcatctgcagcgagacagaggccgagctgattgaggtgagccaccggctgaactgcagccgggagctgctgtggtggctgcagccccggctggtgctgagcggccacacccacagcgcctgtgaggtgcaccacggcggccgggtgcctgagctgtctgtgcccagcttctcctggaggaacagaaacaaccccagcttcatcatgggcagcatcacccccacagactacaccctgagcaagtgctacctgcccagagaagatgtggtgctgatcatctactgcggcgtggtgggcttcctggtggtgctgaccctgacccacttcggcctgctggccagccccttcctgagcggcctgaacctgctgggcaagaggaagaccaggtag

SEQ ID NO: 85392 - DNA, 2617 bp, Artificial Sequence
  derived and/or modified sequence
gcacttcgcggagggcgctaggggccgggacgcggccgccgagcgtaggttccggcctttactccgagttgcgcacggagccccagctgcggttgtccgctctggggatcacaggccgcggagacccgggagccacccgccgggccccttcagacgacccgcttccgcaaaccggccgtgggactccggcgccgggcggacgaagcggctccgggaagactcggtcttccccgcccgcctgaggtcgccggggcggggcttcagtgacaggcccgcgcgctaccgcggaaacaggaagttggctgggtgcgcgccggctccggctgcagttcccgggtccctcggccaccgaagccaccctgccctggtgaaagggctcccgcaccgcccggtgctccccatctgcctggcgttgtgcgcagagctggaaagcatggctgttataaatgaattctgattttggggagcagatgccaacttagagcctcgtaccaatctctctgtctttaaaagatgaggtgacttggtgattttcctggaaaattataggtgcccagctaagacctgaatgccatcaccctccccagggctctgcagttttctcgtggtgaacccttgatggatttgttgttgcttgagaaatggcgatgatcgaattggggtttggaagacagaattttcatccattaaagaggaagagttcattgctgttgaaactcatagctgttgtctttgctgtgcttctattttgtgaatttttaatctattacttagcgatctttcagtgtaattggcctgaagtgaaaaccacagcctctgatggtgaacagaccacacgtgagcctgtgctcaaagccatgtttttggctgacacccatttgcttggggaattcctaggccactggctggacaaattacgaagggaatggcagatggagagagcgttccagacagctctgtggttgctgcagccggaagtcgtcttcatcctgggggatatctttgatgaagggaagtggagcacccctgaggcctgggcggatgatgtggagcggtttcagaaaatgttcagacacccaagtcatgtacagctgaaggtagttgctggaaaccatgacattggcttccattatgagatgaacacatacaaagtagaacgctttgagaaagtgttcagctctgaaagactgttttcttggaaaggcattaactttgtgatggtcaacagcgtggcgctgaacggggatggctgtggcatctgctctgaaacagaagcagagctcattgaagtttctcacagactgaactgctcccgagagctgctgtggtggctccagccgcgcctggttctcagtggccacacgcacagcgcctgcgaggtgcaccacgggggccgagtccccgagctcagcgtcccatctttcagttggaggaacagaaacaaccccagtttcatcatgggtagcatcacgcccacagactacaccctctccaagtgctacctcccacgtgaggatgtggttttgatcatctactgtggagtggtgggcttccttgtggtcctcacactcactcactttgggcttctagcctcaccttttctttctggtttgaacttgctcggaaagcgtaagacaagatgaagagcaggcgccattataaatatcaaagcccaagaaatggaactttgggcagagatcatgttagaatcaagtggatgatgagaccaattacaggccgtctctctgcacagcacagaaattctcaatcactgaaatgagtaactgcaaaataaatagttgattgtactgttctcatgctataaaagtggacaggtactctacaacaaatctgttttctcatttttatcaaatatatgtatcatcaaaggttgcatctgtacagtatgtaaatgctattaatgtcgtcactcacatgcacgacagtccttgttcccccaggaagggcctggtggccccagcacacacttgggattatgtgtatacataaataaatattgggctgtttccctcttcctgtgaagtggttctcaaattcctatgtactgtaaagctgtacccttaaaagtacagatgtggccgggcacagtggctcacacctgtaatcccagcactttgggaggctgaggcgggtggatcacttgaggtcaggagttcaagaccagcctggccaacatggtgaaacctcgtctccgctagaaatacaaaaattagccaagcatggtagcaagtgcctataataccagctgaggctgaggcaggagaatcccttgagcccgggaggcggaggttgcagtgagccaagatcatgccactgcactccagcctgggcaacagagtgagactccgtctcaaaaaatatatttaaaaaaaaaaaagtacagatgtgatgtgcagaacatattgttttcgtagatttttatacttgatcaattaatggaatcagatttttagataagtgtaattttctctataggagaccacgttgctacatctgttaatgcctgtcagtgatcaaaagaaacttaaaaagtggaatgggatatggcttttggtacctgaaaataaatgctttaataattgtaagccagataaaa

SEQ ID NO: 85393 - DNA, 1002 bp, Artificial Sequence
  derived and/or modified sequence
atggccatgatcgagctgggcttcggccggcagaacttccaccccctgaagaggaaatcaagcctcctgctgaaactgattgccgtagtttttgcagttcttctcttctgtgaattcctaatttactatctcgcgatttttcaatgcaattggccagaagttaagaccacggcttcagatggggagcaaaccacaagggagcccgtactcaaagctatgtttctagcagacacacacctgcttggggaattcctggggcattggttggataaactgcggagggagtggcagatggaacgagcattccagactgcgctgtggttactgcagcccgaagtggtgtttatcctaggcgacatcttcgatgagggcaagtggtcaactcccgaagcgtgggcagacgacgtcgaacggtttcaaaagatgtttcgacatccttcgcacgtgcaactgaaggttgtcgctggcaatcatgatatcgggttccactatgagatgaatacatataaggtggagcgctttgagaaagtctttagctccgagaggctgttttcatggaagggaattaatttcgtcatggtgaactctgttgcattaaacggggacggatgcggtatctgttccgagaccgaagctgaattgattgaggtttctcatcgtttaaactgctctagagaactcttgtggtggttgcagcccagattggtgctgtccggtcatacgcactccgcctgtgaagttcaccatgggggccgggtgcctgaactgagtgtgccatccttttcctggagaaacagaaataatccgagttttatcatgggcagtatcactcccacagactataccctgagcaagtgctatctgcctagggaggatgtggtgttgatcatttattgcggggtggtgggatttcttgttgtgcttaccttgactcacttcgggttgctggcaagcccctttttgtctgggctgaatcttctagggaagagaaagactcggtag

SEQ ID NO: 85394 - DNA, 1002 bp, Artificial Sequence
  derived and/or modified sequence
atggcaatgatcgagctgggatttggtcggcaaaacttccatcccttaaaaagaaagagttccctcttgctcaagctcatagctgtggtgtttgccgtgctgctgttctgcgagtttctgatttactatcttgcgattttccaatgtaattggccagaggtgaagaccacagcttcagacggtgagcagactacaagggagcccgtgctgaaagccatgtttctagccgacacacaccttctgggcgagtttctcggtcattggcttgacaaactgcgccgagagtggcaaatggagcgggcattccagactgccttgtggctcctgcaacccgaggtcgtatttattctgggcgatatcttcgatgaaggtaagtggagcacccccgaagcttgggccgacgacgtggagcggttccagaagatgttcagacatccatcccacgtgcagctcaaggttgtggccggaaaccacgatattggcttccattatgagatgaacacttacaaggtcgaaagatttgagaaagtatttagttcagaaagactgttctcttggaaaggcatcaacttcgtaatggtaaatagcgtcgctctgaatggtgatggctgcggcatttgctcggaaaccgaggccgaactcatcgaagtgagtcacagactcaactgtagtagagagcttctgtggtggctccagccgaggctggtcttgagtggacacacccattcagcgtgcgaagtccaccatggtgggagagtcccagaactatcagtgccctcatttagttggagaaatagaaataatcccagcttcatcatgggtagtattacccctaccgattacactctgagcaaatgttatttgccgagggaagacgtggtgctgattatttactgcggagtagtggggtttcttgtcgtactgacgctgactcactttgggttgctggcttctcccttcctgtccggtttgaacctgctgggcaagcggaaaacccggtag

SEQ ID NO: 85395 - DNA, 1002 bp, Artificial Sequence
  derived and/or modified sequence
atggccatgatcgagctgggcttcggcagacagaacttccaccccctgaagagaaagagcagcctgctgctgaagctgatcgccgtggtgttcgccgtgctgctgttctgcgagttcctgatctactacctggccatcttccagtgcaactggcccgaggtgaagaccaccgccagcgacggcgagcagaccaccagagagcccgtgctgaaggccatgttcctggccgacacccacctgctgggcgagttcctgggccactggctggacaagctgagaagagagtggcagatggagagagccttccagaccgccctgtggctgctgcagcccgaggtggtgttcatcctgggcgacatcttcgacgagggcaagtggagcacccccgaggcctgggccgacgacgtggagagattccagaagatgttcagacaccccagccacgtgcagctgaaggtggtggccggcaaccacgacatcggcttccactacgagatgaacacctacaaggtggagagattcgagaaggtgttcagcagcgagagactgttcagctggaagggcatcaacttcgtgatggtgaacagcgtggccctgaacggcgacggctgcggcatctgcagcgagaccgaggccgagctgatcgaggtgagccacagactgaactgcagcagagagctgctgtggtggctgcagcccagactggtgctgagcggccacacccacagcgcctgcgaggtgcaccacggcggcagagtgcccgagctgagcgtgcccagcttcagctggagaaacagaaacaaccccagcttcatcatgggcagcatcacccccaccgactacaccctgagcaagtgctacctgcccagagaggacgtggtgctgatcatctactgcggcgtggtgggcttcctggtggtgctgaccctgacccacttcggcctgctggccagccccttcctgagcggcctgaacctgctgggcaagagaaagaccagatag

SEQ ID NO: 85396 - protein, 681 aa, Artificial Sequence
  derived and/or modified sequence
MPALPLDQLQITHKDPKTGKLRTSPALVIFDETLQKCLDSYLRYVPRKFDEGVASAPEVVDMQKRLHRSVFLTFLRMSTHKESKILDLCVLFGKGNSPLLQKMIGNIFTQQPSYYSDLDETLPTILQVFSNILQHCGLQGDGANTTPQKLEERGRLTPSDMPLLELKDIVLYLCDTCTTLWAFLDIFPLACQTFQKHDFCYRLASFYEAAIPEMESAIKKRRLEDSKLLGDLWQRLSHSRKKLMEIFHIILNQICLLPILESSCDNIQGFIEEFLQIFSSLLQEKRFLRDYDALFPVAEDISLLQQASSVLDETRTAYILQAVESAWEGVDRRKATDAKDPSVIEEPNGEPNGVTVTAEAVSQASSHPENSEEEECMGAAAAVGPAMCGVELDSLISQVKDLLPDLGEGFILACLEYYHYDPEQVINNILEERLAPTLSQLDRNLDREMKPDPTPLLTSRHNVFQNDEFDVFSRDSVDLSRVHKGKSTRKEENTRSLLNDKRAVAAQRQRYEQYSVVVEEVPLQPGESLPYHSVYYEDEYDDTYDGNQVGANDADSDDELISRRPFTIPQVLRTKVPREGQEEDDDDEEDDADEEAPKPDHFVQDPAVLREKAEARRMAFLAKKGYRHDSSTAVAGSPRGHGQSRETTQERRKKEANKATRANHNRRTMADRKRSKGMIPS

SEQ ID NO: 85397 - DNA, 2046 bp, Artificial Sequence
  derived and/or modified sequence
atgcccgcccttcccctggatcagctgcagattacccacaaggatcccaagactgggaaactacggacctcacccgccctcgtcatcttcgacgagaccttgcagaagtgcctggattcttaccttaggtacgtccctcgcaagttcgacgagggcgtggcttctgccccagaagtcgtggacatgcagaagcgcctgcaccgctcagtttttctgacatttctgagaatgtctacacataaagagtctaaaatattggatctctgcgtgctgtttggcaaaggtaatagtccattattgcaaaaaatgatcgggaacatcttcacccagcagccctcgtactatagcgacctcgacgaaacactgcccacaatcctccaggtctttagtaacattcttcaacattgtgggttgcagggggatggcgctaatacaaccccccagaaactcgaggaacgtggtcgtctgactccatccgatatgcccctcttggagttgaaagacatcgtcctgtacctttgcgacacatgtaccacactgtgggccttcctggacatctttcccctggcctgccagacctttcaaaaacatgatttctgctatcgcctggcatccttctacgaggctgcgatccccgagatggaatcagccataaagaaaagaaggctcgaggactctaagctgcttggggatctgtggcaacgtctgtcacattcacggaaaaaactcatggagattttccacattatactgaaccagatctgtctgctgcctatccttgaatctagttgcgataatatacaaggtttcatagaggaattcttgcaaattttttcttccttactccaagaaaagaggtttctgcgcgattatgatgcactctttccagtggctgaggatatctctctgctccaacaggcaagctccgttcttgatgaaacccggaccgcatacatactccaagccgtggagagtgcctgggagggtgtggaccggaggaaggctaccgatgctaaggatcccagcgtcatcgaagaacccaacggcgagcccaatggcgtaactgttactgcggaagcagtgagtcaagcctcaagtcacccagaaaactctgaagaggaggagtgcatgggtgccgccgcggccgtgggaccagctatgtgtggcgtggagttggattccttaattagccaagtgaaggatctccttcccgacctcggtgagggtttcatcctcgcatgtctggagtactaccactacgacccagagcaggttattaataacattctggaggaacgattggccccaactctgtctcagctcgataggaacctggacagagaaatgaaacccgacccaaccccactgttaacgtctaggcacaacgtgtttcagaatgacgagtttgatgtgttctccagagattccgtggacctgtcccgcgtgcataaaggcaagtccactcggaaggaggaaaatacaagaagcctattgaatgataaacgggccgtagctgcccagagacagcggtatgaacaatacagcgtggtagtcgaagaagtgcccttgcagccaggcgagagcttgccttatcatagcgtgtactatgaggatgaatatgatgacacatacgatggcaaccaagttggagctaatgatgcggactcagatgatgaactgatttccagaaggccatttaccatccctcaggtgctcagaactaaggtcccccgcgaagggcaggaagaagacgatgacgacgaggaggacgacgcggatgaggaagctcctaagcctgatcactttgtgcaggatcctgcagtgctgcgtgagaaagccgaggcgcggcgaatggctttcttagccaagaaggggtatagacacgattcgtcgacggccgttgcaggctcccccaggggacatggtcagtcccgggagaccacacaggagcgaaggaaaaaagaagccaataaggccactagggccaatcataaccgtaggacgatggccgatcgaaagcgcagcaaaggtatgattcccagctag

SEQ ID NO: 85398 - DNA, 2046 bp, Artificial Sequence
  derived and/or modified sequence
atgcctgccctgcccctggaccagctgcagatcacccacaaggaccccaagacaggcaagctgcggaccagccctgccctggtgatctttgatgagaccctgcagaagtgcctggacagctacctgcgctacgtgcccaggaagtttgatgagggcgtggccagcgcccctgaggtggtggacatgcagaagaggctgcacaggtctgtgttcctgaccttcctgaggatgagcacccacaaggagagcaagatcctggacctgtgtgtgctgtttgggaagggcaacagccccctgctgcagaagatgattggcaacatcttcacccagcagcccagctactacagcgacctggatgagaccctgcccaccatcctgcaggtgttcagcaacatcctgcagcactgcggcctgcagggagatggagccaacaccaccccccagaagctggaggagcggggccgcctgacccccagcgacatgcccctgctggagctgaaggacatcgtgctgtacctgtgtgacacctgcaccaccctgtgggccttcctggacatcttccccctggcctgccagaccttccagaagcatgacttctgctaccgcctggccagcttctatgaagctgccatccctgagatggagagcgccatcaagaagaggcggctggaggacagcaagctgctgggggacctgtggcagaggctgagccacagcaggaagaagctgatggagatcttccacatcatcctgaaccagatctgcctgctgcccatcctggagagcagctgtgacaacatccagggcttcatcgaggagttcctgcagatcttcagcagcctgctgcaggagaagcgcttcctgcgggactatgatgccctcttccctgtggccgaggacatcagcctgctgcagcaggccagctctgtgctggatgagaccaggacagcctacatcctgcaggccgtggagagcgcctgggagggcgtggacaggaggaaggccacagatgccaaggaccccagcgtcatcgaggagcccaacggggagcccaacggggtgacagtgacagctgaggccgtgtcccaggccagcagccacccagaaaattctgaggaggaggagtgcatgggcgctgctgctgctgtgggccctgccatgtgtggggtggagctggacagcctcatcagccaggtgaaggacctgctgcctgacctgggggagggcttcatcctggcctgcctggagtactaccactatgaccctgagcaggtgatcaacaacatcctggaggagcggctggcccccaccctgagccagctggacaggaacctggaccgggagatgaagccagaccccacccccctgctgaccagccgccacaacgtgttccagaatgatgaatttgatgtgttcagccgggacagcgtggacctgagccgggtgcacaagggcaagagcaccaggaaggaggagaacaccaggagcctgctgaatgacaagagagctgtggccgcccagaggcagagatatgagcagtacagcgtggtggtggaggaggtgcccctgcagcctggagagagcctgccctaccacagcgtgtactatgaagatgaatatgatgacacctatgatggcaaccaggtgggcgccaatgatgctgacagtgatgatgagctgatcagcagaagacccttcaccatcccccaggtgctgcggaccaaggtgccccgggagggccaggaggaggatgatgatgatgaagaagatgatgctgatgaggaggcccccaagccagaccactttgtgcaggaccctgctgtgctgcgggagaaggccgaggcccggaggatggccttcctggccaagaagggctacagacatgacagcagcacagctgtggccggcagcccccggggccacggccagagccgggagaccacccaggagaggaggaagaaggaggccaacaaggccacccgggccaaccacaacagaaggaccatggctgacaggaagaggagcaagggcatgatccccagctag

SEQ ID NO: 85399 - DNA, 2046 bp, Artificial Sequence
  derived and/or modified sequence
atgcccgccctgcccctggaccagctgcagatcacccacaaggacccaaaaaccggtaaactgcgcacgtccccagctctcgttatttttgatgaaactctgcagaagtgtctcgactcatacctgcggtatgtccccaggaagtttgacgaaggcgtggcctctgccccagaggtagtagatatgcagaagaggctacaccgcagtgtttttctgacctttctccgaatgtcaacacataaggagtctaaaattttggatctatgcgttctttttgggaaaggtaattcacccttattgcagaagatgataggcaatatattcactcagcagccttcttactactctgacctggatgagaccctccccaccatcctgcaagtgtttagcaacattcttcagcattgtggactccagggggacggagctaataccaccccccagaagctggaggagcggggaagactgaccccctctgatatgcctctgctggagctcaaagatattgtactctatctgtgtgatacttgcaccacactgtgggcattcctggacatctttcctttggcttgccaaacttttcaaaagcatgatttttgttatcgattggcatcattctacgaggcggcaatacccgagatggaatcagcaattaaaaagcgaaggctggaggattccaaactgcttggagacctgtggcagcggctgagtcattctcgaaaaaaactcatggaaatttttcacatcattttaaatcagatatgcctgttgccaattctggagtcctcttgtgacaatattcaggggtttatcgaagagttcttgcagatcttcagttccctgctgcaagaaaaaaggttcctgagggattatgacgccctgtttcccgtggcagaggatatcagcctgctgcagcaagcctcttccgtcctggatgaaaccaggacagcttacatcttgcaggctgtggaatcagcctgggaaggagtggatcggcgcaaggcaaccgacgctaaagatccaagtgtcatagaggaacccaatggagaacctaacggcgtgactgtcacggctgaagccgtgtcccaggcatcctctcatcccgaaaacagcgaggaggaggaatgcatgggggccgccgcagccgtgggaccggccatgtgcggcgtggaactggattcgctgatctcacaagttaaggatctgctgcccgatctgggcgaaggattcattctcgcctgtctcgaatattaccactatgaccccgaacaggtgatcaacaatattctggaagagaggttggcccctactttgtcccagctcgaccgcaacctggatcgcgagatgaaacctgatccaacacccctgcttacaagtagacataacgtgtttcagaatgatgaattcgatgtcttctccagggattccgtagatctgagcagggttcataaaggtaaaagcacaagaaaagaggaaaatacccgctccctattaaacgacaagagggccgtcgcggcccaacggcaacgctacgagcaatatagcgtggtggtggaagaggtccccttacagcctggtgaatcactgccataccactccgtctactatgaggacgaatacgatgatacctatgacgggaaccaggtcggtgcgaatgacgcagatagtgacgacgagcttatatcgcggcgacctttcactattccccaggtgctgcgtacgaaagtgcctagagagggccaggaggaggatgacgacgatgaggaggacgatgctgacgaggaagctcctaaacccgaccacttcgtgcaggaccctgctgttctgcgcgagaaagccgaagcgcgaaggatggccttcctcgcaaagaagggctaccgacacgactccagcacagccgttgcaggatcccctcgagggcatggccaatctagagaaacaacacaggagcgtcggaagaaggaggccaacaaggcaacacgtgccaaccacaatcgccgtaccatggctgatcgcaagagaagtaaagggatgattccctcttag

SEQ ID NO: 85400 - DNA, 2046 bp, Artificial Sequence
  derived and/or modified sequence
atgcccgctttgccccttgatcagttacagatcactcataaggatcctaaaactggaaagctgcgcacgtctcccgcactggtaattttcgacgagacgctacagaagtgtctcgactcatacttacggtatgtgcctagaaaatttgatgaaggcgtcgcatctgctcccgaagtggtggacatgcagaaaagattgcaccgttctgtgttcctgactttcctgcggatgagcacccacaaggaaagcaaaatccttgacctttgcgtactttttgggaaaggtaatagccccctgctgcaaaagatgattggtaacatcttcacccaacagccatcctattacagtgatctggatgagacactccccacaatcctgcaggtcttctctaacattctacagcattgtggcctccagggggacggcgctaacaccacccctcaaaagctggaagaacggggtcgcctgacaccctctgatatgccccttttggaactaaaggacatcgttctgtacctgtgcgatacctgcacaacattgtgggccttcctcgatattttccctctcgcctgccaaaccttccaaaagcacgatttttgttacaggctcgcttccttctatgaggcggctatcccagagatggaaagtgcaatcaagaagcgtaggctcgaggattccaaactgttaggcgatttgtggcagcggttgagccacagccgcaagaaacttatggaaattttccatattatccttaaccagatctgtttgctgccaatcctggagagttcctgcgacaacatccagggctttatcgaggagttcctccagatttttagctcactgcttcaggagaagaggttcctccgcgactacgacgcccttttcccggtggcggaggacatcagtctgcttcaacaggcttcatctgtgctggacgaaaccaggacagcctacattctgcaagccgtagagtccgcttgggagggggtggacagacgaaaggcgacagacgccaaagatcccagcgtcatcgaggagcctaacggcgagcccaacggagtcactgtcacagcagaggctgtgagccaagcttcttcccaccccgaaaatagtgaggaagaggagtgtatgggcgctgccgctgctgtcgggccagctatgtgtggcgtcgagctggacagtttaattagtcaggtcaaagatctgttaccagatttaggcgaagggtttatcctcgcttgcctggaatattaccactatgatcctgaacaggtgataaataacattcttgaagagcggctggctcccaccctgtctcagctggaccgaaatctcgacagggagatgaagcccgacccaactccactcctcacctcccggcacaatgttttccagaacgacgaatttgacgttttcagccgggatagtgtggacctatcaagagtacacaaagggaagagcacaagaaaggaggaaaatacacgatcactgttgaacgacaaacgcgctgtggcagctcagaggcagcgctacgagcagtacagcgttgttgtggaggaagtgccattacagcctggcgaaagtcttccctaccacagtgtttattatgaggacgagtacgatgacacctacgacggcaaccaggtgggggcaaatgacgcagactctgacgatgagcttatttcgcggaggccttttaccataccgcaggtgcttcgaactaaggtgcctcgcgagggacaggaggaagatgatgacgatgaggaagacgacgctgatgaggaggctcccaagcctgatcacttcgtgcaggaccccgcagtcctgcgcgaaaaggccgaagcgcgtagaatggccttcctcgcaaaaaaaggatatagacatgactctagtacagcagttgccggatcacccagaggacatggacaatccagggagaccacccaagaacgacgcaagaaggaggccaacaaagccacacgtgcaaaccacaataggcgaaccatggccgaccgaaagagaagtaagggaatgatccccagctag

SEQ ID NO: 85401 - DNA, 2291 bp, Artificial Sequence
  derived and/or modified sequence
agtttgaccccggaagtgcgggcgctcagggagctgtcaccgtggtcggcggcggcggcggcggcggcggcacagagccggtggtggagccgccgaggagggtcacgcagcacaatgccagctctgcccctggaccaactccagatcacccacaaggacccgaagacaggaaagctgaggacttcaccagcgctggtgatctttgacgagactctacagaagtgcctggactcctacctgcgctatgtcccccgcaaattcgacgagggggtggcctcagcccctgaggttgttgacatgcagaagcgcctccatcgaagtgtttttctcaccttcctccgcatgtccactcacaaggaatccaaaatcctggacctctgcgtgctctttggaaaaggcaactcaccactgctccagaagatgataggaaacatctttacacagcagccaagttactacagtgacctggatgaaaccctgcctaccatccttcaggtcttcagcaatatcctccagcactgtggtttgcaaggggacggggccaataccacaccccagaagcttgaggagaggggccgattgacccccagtgacatgcctctcctggaattaaaggacattgttctctacctttgtgatacctgcaccacactttgggcctttctggatatcttccctttggcttgccagaccttccagaagcacgacttttgttacagactagcttccttctacgaagcagcaattcccgaaatggagtctgcaattaagaagaggaggcttgaagatagcaagcttcttggtgacctgtggcagaggctctcccattccaggaagaagctaatggagattttccacatcatcctgaaccagatctgcctccttcccatcctagaaagcagctgtgacaacattcagggcttcatcgaagagttccttcagatcttcagctccttgctgcaggagaagaggttcctccgggactatgatgcactcttccccgtggccgaagacatcagcttgctgcagcaggcctcatcagtcttggacgagacgcggactgcctacatcctccaggcagtcgagagtgcatgggaaggggtggacagacggaaagccacagatgctaaagacccatcggtgattgaggagcctaatggggagcctaacggggtcacggtgacagcagaggcagtcagtcaagcatcatcacatccggagaactcggaggaagaggagtgcatgggagcagccgcggctgtgggccctgccatgtgtggggtggaactggactctctcatctcccaagtgaaggacctgctgccagaccttggtgagggcttcatcctggcctgcctggagtactaccactacgacccagagcaggtgatcaacaatatcctggaggagcggctggcccccaccctcagccagctggaccgcaacctagacagagaaatgaaaccagaccctacacccctgctgacgtctcgccacaacgtcttccagaatgacgagtttgatgtgttcagcagggactcagtagacctgagccgggtgcacaagggcaagagcaccaggaaggaggaaaacacgcggagtttgctgaacgacaagcgtgcagtggcggcacagcggcagcgctacgagcagtacagcgtggtggtggaggaggtgccactgcagccaggcgagagcctgccctaccacagtgtctactacgaggatgagtacgatgacacatacgatggcaaccaggtgggcgccaatgatgcagactctgatgacgagctcatcagccgcaggccattcaccatccctcaggtgctgagaaccaaagtgcctagagaagggcaggaggaggatgacgacgatgaggaagacgatgctgacgaggaggctcccaagcccgaccattttgttcaggaccctgcagtgctgagagagaaggcagaagccaggcgcatggcctttctcgccaagaaagggtaccggcatgacagctcaacagcagtggccggcagcccccgaggccatgggcagagccgcgagacaacccaggaacgcaggaagaaggaagccaacaaggcgacaagagccaaccacaaccggagaaccatggccgaccgcaagaggagcaaaggcatgatcccatcctgagacctggtgcagggccagtggggaggcagcggcaccagactcaccaggccgtgctcccatcgcctggggcctcctcactaggggccccaagttcaactcaacccctcaacagcctcagctttgcagcccct

SEQ ID NO: 85402 - DNA, 2046 bp, Artificial Sequence
  derived and/or modified sequence
atgcccgccctgcccctggaccagctgcagatcacccacaaggaccccaagaccggcaagctgagaaccagccccgccctggtgatcttcgacgagaccctgcagaagtgcctggacagctacctgagatacgtgcccagaaagttcgacgagggcgtggccagcgcccccgaggtggtggacatgcagaagagactgcacagaagcgtgttcctgaccttcctgagaatgagcacccacaaggagagcaagatcctggacctgtgcgtgctgttcggcaagggcaacagccccctgctgcagaagatgatcggcaacatcttcacccagcagcccagctactacagcgacctggacgagaccctgcccaccatcctgcaggtgttcagcaacatcctgcagcactgcggcctgcagggcgacggcgccaacaccaccccccagaagctggaggagagaggcagactgacccccagcgacatgcccctgctggagctgaaggacatcgtgctgtacctgtgcgacacctgcaccaccctgtgggccttcctggacatcttccccctggcctgccagaccttccagaagcacgacttctgctacagactggccagcttctacgaggccgccatccccgagatggagagcgccatcaagaagagaagactggaggacagcaagctgctgggcgacctgtggcagagactgagccacagcagaaagaagctgatggagatcttccacatcatcctgaaccagatctgcctgctgcccatcctggagagcagctgcgacaacatccagggcttcatcgaggagttcctgcagatcttcagcagcctgctgcaggagaagagattcctgagagactacgacgccctgttccccgtggccgaggacatcagcctgctgcagcaggccagcagcgtgctggacgagaccagaaccgcctacatcctgcaggccgtggagagcgcctgggagggcgtggacagaagaaaggccaccgacgccaaggaccccagcgtgatcgaggagcccaacggcgagcccaacggcgtgaccgtgaccgccgaggccgtgagccaggccagcagccaccccgagaacagcgaggaggaggagtgcatgggcgccgccgccgccgtgggccccgccatgtgcggcgtggagctggacagcctgatcagccaggtgaaggacctgctgcccgacctgggcgagggcttcatcctggcctgcctggagtactaccactacgaccccgagcaggtgatcaacaacatcctggaggagagactggcccccaccctgagccagctggacagaaacctggacagagagatgaagcccgaccccacccccctgctgaccagcagacacaacgtgttccagaacgacgagttcgacgtgttcagcagagacagcgtggacctgagcagagtgcacaagggcaagagcaccagaaaggaggagaacaccagaagcctgctgaacgacaagagagccgtggccgcccagagacagagatacgagcagtacagcgtggtggtggaggaggtgcccctgcagcccggcgagagcctgccctaccacagcgtgtactacgaggacgagtacgacgacacctacgacggcaaccaggtgggcgccaacgacgccgacagcgacgacgagctgatcagcagaagacccttcaccatcccccaggtgctgagaaccaaggtgcccagagagggccaggaggaggacgacgacgacgaggaggacgacgccgacgaggaggcccccaagcccgaccacttcgtgcaggaccccgccgtgctgagagagaaggccgaggccagaagaatggccttcctggccaagaagggctacagacacgacagcagcaccgccgtggccggcagccccagaggccacggccagagcagagagaccacccaggagagaagaaagaaggaggccaacaaggccaccagagccaaccacaacagaagaaccatggccgacagaaagagaagcaagggcatgatccccagctag

SEQ ID NO: 85403 - protein, 196 aa, Artificial Sequence
  derived and/or modified sequence
MAQETNHSQVPMLCSTGCGFYGNPRTNGMCSVCYKEHLQRQNSSNGRISPPVQCTDGSVPEAQSALDSTSSSMQPSPVSNQSLLSESVASSQLDSTSVDKAVPETEDVQASVSDTAQQPSEEQSKSLEKPKQKKNRCFMCRKKVGLTGFECRCGNVYCGVHRYSDVHNCSYNYKADAAEKIRKENPVVVGEKIQKI

SEQ ID NO: 85404 - DNA, 591 bp, Artificial Sequence
  derived and/or modified sequence
atggcccaggagaccaaccacagccaggtgcccatgctgtgcagcaccggctgcggcttctacggcaaccccagaaccaacggcatgtgcagcgtgtgctacaaggagcacctgcagagacagaacagcagcaacggcagaatcagcccccccgtgcagtgcaccgacggcagcgtgcccgaggcccagagcgccctggacagcaccagcagcagcatgcagcccagccccgtgagcaaccagagcctgctgagcgagagcgtggccagcagccagctggacagcaccagcgtggacaaggccgtgcccgagaccgaggacgtgcaggccagcgtgagcgacaccgcccagcagcccagcgaggagcagagcaagagcctggagaagcccaagcagaagaagaacagatgcttcatgtgcagaaagaaggtgggcctgaccggcttcgagtgcagatgcggcaacgtgtactgcggcgtgcacagatacagcgacgtgcacaactgcagctacaactacaaggccgacgccgccgagaagatcagaaaggagaaccccgtggtggtgggcgagaagatccagaagatctag

SEQ ID NO: 85405 - DNA, 591 bp, Artificial Sequence
  derived and/or modified sequence
atggcccaggaaacaaatcacagccaggtgcctatgctgtgtagtaccgggtgcggattctatgggaacccacgcaccaatggtatgtgtagtgtgtgttataaggaacacctacagaggcagaacagctctaacggccgcattagcccacctgtccagtgcaccgatggaagcgtaccggaggcccagtccgccctggattctacgtctagttccatgcagccttctccagtctcaaaccaatccctattgtcggagagcgtggcttcctctcagctcgattctacatctgtcgacaaagccgtccccgagacagaagacgtgcaggcaagcgtctctgatacagcacagcagcctagcgaagagcagtctaaaagcctggaaaagcccaagcagaaaaagaatcgctgtttcatgtgtcgcaaaaaggtggggctgacagggtttgagtgtcgctgcggtaacgtttactgcggagtgcacagatactctgacgtgcacaactgctcctacaactacaaggcagacgccgcggaaaaaattcggaaagagaatcctgttgtcgtgggcgagaagattcagaagatctag

SEQ ID NO: 85406 - DNA, 591 bp, Artificial Sequence
  derived and/or modified sequence
atggcccaggagaccaaccacagccaggtgcccatgctgtgcagcacaggctgcggcttctacggcaaccccaggaccaacggcatgtgcagcgtgtgctacaaggagcacctgcagaggcagaacagcagcaatggccgcatcagcccccctgtgcagtgcacagatggctctgtgcctgaggcccagagcgccctggacagcaccagcagctccatgcagcccagccctgtgagcaaccagagcctgctgtctgagagcgtggccagcagccagctggacagcacctctgtggacaaggctgtgcctgagacagaagatgtgcaggcctctgtgtctgacacagcccagcagcccagcgaggagcagagcaagagcctggagaagcccaagcagaagaagaaccgctgcttcatgtgcaggaagaaggtgggcctgactggatttgagtgccgctgtggaaatgtgtactgcggcgtgcaccgctacagtgatgtgcacaactgcagctacaactacaaggcagatgctgctgagaagatcaggaaggagaaccctgtggtggtgggggagaagatccagaagatctag

SEQ ID NO: 85407 - DNA, 591 bp, Artificial Sequence
  derived and/or modified sequence
atggcccaggagaccaaccacagccaggtgcccatgctgtgcagcacaggatgcgggttctacggaaatccacgcaccaatggaatgtgctccgtgtgctataaggaacacctgcaacgacaaaattctagcaatggccgcatctcgccgccagtgcagtgtacagatggcagcgttcctgaggcgcaaagcgcccttgacagcacttcatcttctatgcagccctctcctgtctccaatcaaagtctgctctccgagtccgtcgcctcctctcaactggatagcaccagtgtggacaaagctgttcctgagaccgaggatgttcaagcctctgtctctgataccgcccagcagccttcggaggaacaaagcaagagtcttgaaaaacctaaacaaaagaagaaccgttgctttatgtgccgtaaaaaggtgggcctgaccggttttgagtgcagatgtggcaacgtttactgcggggtgcaccgctactcagacgtccacaattgctcttataattataaggcagatgcagcagagaaaattagaaaggaaaacccagtggttgttggtgaaaaaatccagaagatttag

SEQ ID NO: 85408 - DNA, 591 bp, Artificial Sequence
  derived and/or modified sequence
atggcccaggagaccaatcattctcaggtcccaatgctctgcagcactgggtgtgggttttacgggaacccacgaaccaacggcatgtgctctgtttgttataaggagcatttgcaacggcagaactcttccaatggcagaatctccccaccagtccaatgcacagatgggagcgtgcccgaagcacagtctgcactcgacagcaccagttcatccatgcaaccgagccctgtctcaaatcagagcctgctgtcagagtccgttgcgtcctcccagcttgacagtacctctgtcgataaagccgtccccgaaacagaggacgtccaagccagtgtctctgacacagcccaacaaccatctgaggagcaaagtaagagcttggagaaaccgaagcagaagaagaatagatgctttatgtgtaggaagaaggttggactcacagggtttgagtgccggtgcggcaacgtttactgtggcgttcaccgctactctgacgtacataattgctcgtataactataaggcagatgctgccgagaagatcagaaaggagaaccccgtcgtggttggtgagaagattcagaaaatctag

SEQ ID NO: 85409 - protein, 398 aa, Artificial Sequence
  derived and/or modified sequence
MALFGALFLALLAGAHAEFPGCKIRVTSKALELVKQEGLRFLEQELETITIPDLRGKEGHFYYNISEKVYDFLSTFITSGMRFLLNQQICPVLYHAGTVLLNSLLDTVPVRSSVDELVGIDYSLMKDPVASTSNLDMDFRGAFFPLTERNWSLPNRAVEPQLQEEERMVYVAFSEFFFDSAMESYFRAGALQLLLVGDKVPHDLDMLLRATYFGSIVLLSPAVIDSPLKLELRVLAPPRCTIKPSGTTISVTASVTIALVPPDQPEVQLSSMTMDARLSAKMALRGKALRTQLDLRRFRIYSNHSALESLALIPLQAPLKTMLQIGVMPMLNERTWRGVQIPLPEGINFVHEVVTNHAGFLTIGADLHFAKGLREVIEKNRPADVRASTAPTPSTAAV

SEQ ID NO: 85410 - DNA, 1197 bp, Artificial Sequence
  derived and/or modified sequence
atggctctgttcggagccttgttcctggccctacttgccggagcccacgctgagttccccggatgtaagatccgcgtaacttcaaaagcgctggagcttgtaaagcaggagggactgaggtttctggagcaagagctggaaacaattacaatccctgatctaagaggcaaagagggacacttctactataatatatctgagaaggtctatgactttctgtctactttcatcaccagcggaatgagattcctcttgaaccagcaaatatgccctgtcctgtatcacgccgggacagtactcttgaattcacttctggatacagttcctgttagaagctcagtggacgagctcgtcggaatcgattacagtcttatgaaagatccggtggcatcaacgagcaatcttgatatggattttcgcggcgcattttttccactcacagaaaggaactggtcacttccaaatagagcagtggaacctcagctgcaggaggaggaacgcatggtgtacgtcgcattctctgagttcttttttgacagtgcgatggagtcttattttagagctggtgccctccagttactgctagtcggggacaaggtgcctcatgatttggatatgttgctgagagccacttactttggcagcattgtgctgttgtcacccgccgttatcgattctccacttaaactggaactacgagttctcgcaccgccacgatgtacgatcaagccctcgggcactacaatctccgtgacggcctctgttaccatcgctctggttccacctgatcagcccgaagtccagctctcctctatgacaatggacgcaaggctatccgccaagatggcactccggggcaaggccctgcggacgcagcttgacctgcgaaggttcagaatctactctaatcattcagccctggagtccttggccctgattcctctccaggcccccctcaagaccatgctgcaaattggggtgatgcccatgctgaacgagcgcacctggagaggcgttcagatccccctgcctgaaggcataaactttgtgcatgaagtggttaccaaccatgctggcttcctgacaatcggtgccgacctacactttgcaaaaggactccgcgaagttatcgaaaagaaccgtcccgctgatgtgcgggccagcaccgcacctacacctagcaccgctgcagtctag

SEQ ID NO: 85411 - DNA, 1197 bp, Artificial Sequence
  derived and/or modified sequence
atggccctgtttggagccctcttcctggccctgctggccggggcccatgctgagttccctggctgcaagatccgggtgaccagcaaggccctggagctggtgaagcaggagggcctgcgcttcctggagcaggagctggagaccatcaccatcccagacctgcggggcaaggagggccacttctactacaacatcagcgagaaggtgtatgacttcctgagcaccttcatcaccagcggcatgaggttcctgctgaaccagcagatctgccctgtgctgtaccacgccggcaccgtgctgctgaacagcctgctggacacagtgcctgtgcgcagctctgtggatgagctggtgggcatcgactacagcctgatgaaggaccctgtggccagcaccagcaacctggacatggacttccggggggccttcttccccctgacagaaagaaactggagcctgcccaacagagctgtggagccccagctgcaggaggaggagaggatggtgtatgtggccttcagcgagttcttctttgacagcgccatggagagctacttccgggccggggccctgcagctgctgctggtgggggacaaggtgccccatgacctggacatgctgctgcgggccacctacttcggcagcatcgtgctgctgagccctgctgtgattgacagccccctgaagctggagctgcgggtgctggccccaccccgctgcaccatcaagcccagcggcaccaccatctctgtgacagcctctgtgaccatcgccctggtgcccccagaccagcctgaggtgcagctgagctccatgaccatggatgcccggctgagcgccaagatggccctgcggggcaaggccctgcggacccagctggacctgcggcgcttccgcatctacagcaaccacagcgccctggagagcctggccctgatccccctgcaggcccccctgaagaccatgctgcagattggagtgatgcccatgctgaatgaaagaacctggaggggcgtgcagatccccctgcctgagggcatcaactttgtgcatgaggtggtgaccaaccacgccggcttcctgaccatcggggctgacctgcactttgccaagggcctgcgggaggtgattgagaagaacagaccagcagatgtgcgggccagcacagcccccacccccagcacagctgctgtgtag

SEQ ID NO: 85412 - DNA, 1197 bp, Artificial Sequence
  derived and/or modified sequence
atggccctgttcggcgccctgttcctggccctgctggccggcgcccacgcagaattcccaggttgtaaaattcgagtgacctctaaggctctggaactggtcaagcaggagggactcagattcttggagcaggaactcgagactatcacaatcccggacctacgtggcaaagagggccatttctattacaacattagcgagaaggtctatgacttcctctccacttttatcacaagcggtatgcggttccttctaaaccagcagatttgtccagtactgtaccacgccggcactgtgctgctcaattccctcttagataccgtgccagtgaggtcgtcagtcgacgagctggtggggattgattatagcctgatgaaagaccccgtcgcgtccacctctaaccttgatatggacttccggggagcctttttccccttgacagagcggaactggtccctaccgaatagggcggtcgaacctcagctgcaggaggaggagcgcatggtgtacgtagcattctctgaatttttctttgactccgccatggaatcttattttagggccggtgccctacagcttttgttggtcggggacaaggtgccccacgatctcgatatgcttctgcgggctacgtacttcggttccattgtgttactaagccctgctgtgattgactctccgctgaagcttgaactacgcgttttggctccgccccgttgtaccatcaaaccttcaggtacgacaattagtgttactgccagcgtcacgatcgcactggttcccccggatcagccggaagtccagctttcctctatgaccatggatgcgcgcctgtccgccaagatggctctcaggggcaaggcgttaagaacacagctggacctcaggcgcttcaggatttattccaaccattctgcccttgaatcattggccctgattcccctccaggcgcctctcaagacgatgctacaaatcggcgtaatgccaatgctgaacgaacggacatggcgcggggtgcagatccctctgccggaaggaataaatttcgtccacgaggtggtgacaaaccacgccggctttctcacgatcggtgcagacctacatttcgcaaagggtctgcgggaggtaattgagaagaataggcctgctgatgtcagagcgagtaccgctccaactccttctacggcagcagtgtag

SEQ ID NO: 85413 - DNA, 1420 bp, Artificial Sequence
  derived and/or modified sequence
gccagaccccgtcgcccggatcccctgagctgcccgccatcccacgtgaccgcgccgccccccagctccaccgctgagcccgctcgccatggccctcttcggggccctcttcctagcgctgctggcaggcgcacatgcagagttcccaggctgcaagatccgcgtcacctccaaggcgctggagctggtgaagcaggaggggctgcgctttctggagcaagagctggagactatcaccattccggacctgcggggcaaagaaggccacttctactacaacatctctgagaaggtgtatgattttctctccacgttcatcacctcagggatgcgcttcctcctcaaccagcagatctgccctgtcctctaccacgcagggacggtcctgctcaactccctcctggacaccgtgcctgtgcgcagttctgtggacgagcttgttggcattgactattccctcatgaaggatcctgtggcttccaccagcaacctggacatggacttccggggggccttcttccccctgactgagaggaactggagcctccccaaccgggcagtggagccccagctgcaggaggaagagcggatggtgtatgtggccttctctgagttcttcttcgactctgccatggagagctacttccgggcgggggccctgcagctgttgctggtgggggacaaggtgccccacgacctggacatgctgctgagggccacctactttgggagcattgtcctgctgagcccagcagtgattgactccccattgaagctggagctgcgggtcctggccccaccgcgctgcaccatcaagccctctggcaccaccatctctgtcactgctagcgtcaccattgccctggtcccaccagaccagcctgaggtccagctgtccagcatgactatggacgcccgtctcagcgccaagatggctctccgggggaaggccctgcgcacgcagctggacctgcgcaggttccgaatctattccaaccattctgcactggagtcgctggctctgatcccattacaggcccctctgaagaccatgctgcagattggggtgatgcccatgctcaatgagcggacctggcgtggggtgcagatcccactacctgagggcatcaactttgtgcatgaggtggtgacgaaccatgcgggattcctcaccatcggggctgatctccactttgccaaagggctgcgagaggtgattgagaagaaccggcctgctgatgtcagggcgtccactgcccccacaccgtccacagcagctgtctgagccctcaatccccaagctggcagctgtcattcaggaccccaacccctctcagcccctcttttcccacattcatagcctgtagtgccccctctaacccccagtgccacagagaagacgggatttgaagctgtaccc

SEQ ID NO: 85414 - DNA, 1197 bp, Artificial Sequence
  derived and/or modified sequence
atggctctgtttggggcactgtttctggccttgctcgccggtgcgcatgccgagtttcctgggtgtaagattagagttacttccaaggccctggagcttgtcaagcaggagggtcttaggttcctcgagcaggaactagagaccataacaattcccgacctgcgaggaaaggaaggacacttttactataacatcagtgagaaggtctacgacttcctgagcaccttcataacatcaggcatgcgatttctgctcaaccagcagatctgccctgtcctgtatcatgctggcaccgttctgctgaattctttactggacaccgtgcccgttcgcagctccgttgacgaactcgtcggcattgattacagtctgatgaaggacccagttgctagcacaagtaatctggatatggatttcaggggtgctttttttcccttaacagaacgtaattggtctttgcccaaccgggcagtcgagccacagctgcaagaggaggagcgcatggtttatgtggccttctccgagttttttttcgattcggctatggagagctactttcgcgctggtgcactgcagttgctgcttgtcggagacaaagtgcctcatgatttagacatgctgttgagagcgacctacttcggcagcatagtgctgctctcgccagccgtgatcgacagtcccctgaagctagaattacgagtgctcgctcctccgaggtgcactattaagccctctggaactaccatttctgtgactgcaagcgtgaccattgcactcgtccctccggaccagcccgaggtccagcttagttccatgactatggacgcaaggctgagtgctaagatggcgctacgtgggaaagccctgcggacccaattggatcttcgcaggttccgcatatatagcaatcacagcgctctggagtctctggctttgattccactacaggctccattgaagacgatgctgcagataggagtaatgcccatgcttaatgagcggacatggagaggggtgcagattcctcttcccgagggcatcaattttgtccacgaggtagtcaccaaccatgctggttttttaacaatcggggcagacttgcacttcgccaagggactgagagaagtcatagagaaaaatagacctgccgatgtaagagcctccacggcacccacaccgtctaccgctgcagtgtag

SEQ ID NO: 85415 - DNA, 1197 bp, Artificial Sequence
  derived and/or modified sequence
atggccctgttcggcgccctgttcctggccctgctggccggcgcccacgccgagttccccggctgcaagatcagagtgaccagcaaggccctggagctggtgaagcaggagggcctgagattcctggagcaggagctggagaccatcaccatccccgacctgagaggcaaggagggccacttctactacaacatcagcgagaaggtgtacgacttcctgagcaccttcatcaccagcggcatgagattcctgctgaaccagcagatctgccccgtgctgtaccacgccggcaccgtgctgctgaacagcctgctggacaccgtgcccgtgagaagcagcgtggacgagctggtgggcatcgactacagcctgatgaaggaccccgtggccagcaccagcaacctggacatggacttcagaggcgccttcttccccctgaccgagagaaactggagcctgcccaacagagccgtggagccccagctgcaggaggaggagagaatggtgtacgtggccttcagcgagttcttcttcgacagcgccatggagagctacttcagagccggcgccctgcagctgctgctggtgggcgacaaggtgccccacgacctggacatgctgctgagagccacctacttcggcagcatcgtgctgctgagccccgccgtgatcgacagccccctgaagctggagctgagagtgctggccccccccagatgcaccatcaagcccagcggcaccaccatcagcgtgaccgccagcgtgaccatcgccctggtgccccccgaccagcccgaggtgcagctgagcagcatgaccatggacgccagactgagcgccaagatggccctgagaggcaaggccctgagaacccagctggacctgagaagattcagaatctacagcaaccacagcgccctggagagcctggccctgatccccctgcaggcccccctgaagaccatgctgcagatcggcgtgatgcccatgctgaacgagagaacctggagaggcgtgcagatccccctgcccgagggcatcaacttcgtgcacgaggtggtgaccaaccacgccggcttcctgaccatcggcgccgacctgcacttcgccaagggcctgagagaggtgatcgagaagaacagacccgccgacgtgagagccagcaccgcccccacccccagcaccgccgccgtgtag

SEQ ID NO: 85416 - DNA, 1218 bp, Artificial Sequence
  derived and/or modified sequence
atgctgcaaattaccaacgctagtctcggcttgcgctttcggagacagctattgtactggtttttctacgacggcggatacatcaacgccagcgcagagggagtttcaatacgcaccggcctcgaactgagtagagatccagccggacgtatgaaagttagcaatgtgtcatgccaggccagtgtgagtcgaatgcacgcggcttttggtgggacatttaaaaaagtttacgatttcttgagtacctttattacctctggcatgaggtttctacttaaccagcagatctgtccagtgctgtatcatgcagggactgtgctcctgaatagcctgcttgacacagttcccgtgaggagctcagtcgacgaattggtggggattgactattctctgatgaaagatccagttgcctctacaagcaacctcgatatggactttcgcggagcatttttccccctcaccgaacgcaattggagtctgcccaaccgggcagttgagcctcaactgcaggaggaggaaaggatggtgtatgttgctttcagtgaattctttttcgatagtgctatggagtcttactttcgcgccggtgcattgcagttgctgctggtaggggacaaagtaccacatgatctggatatgttacttcgcgctacatattttggctccatagtcttactgtctcctgctgtgatcgactctccacttaaactggaattacgggtgctggctccacctagatgtacgattaagccctccggaaccaccatctcagttaccgcctcggtgaccatcgcccttgtccccccagaccagcccgaggtgcagttgtcatctatgacaatggacgcacggctcagtgccaaaatggccctcagaggtaaagcccttcgaacccagcttgacctgcgtcgattcagaatctacagcaatcactccgccctcgaatctctcgcactgatacctctgcaggcccctctcaaaacgatgctgcagattggtgttatgccaatgcttaacgagaggacatggaggggagtgcagatccctcttcccgagggaattaacttcgtgcatgaggttgtgactaatcatgcaggctttcttactatcggcgctgacctgcacttcgctaagggattacgtgaggttatagagaaaaatcgacccgctgacgtaagggcatctactgccccaacacctagcacagccgctgtgtag

SEQ ID NO: 85417 - DNA, 1218 bp, Artificial Sequence
  derived and/or modified sequence
atgctgcagatcaccaatgccagcctgggcctgcgcttccggcggcagctgctgtactggttcttctatgatggcggctacatcaatgccagcgctgagggcgtgtccatcagaacaggcctggagctgagccgggaccctgctggccgcatgaaggtgtccaatgtgtcctgccaggcctctgtgtccaggatgcatgctgcctttggaggcaccttcaagaaggtgtatgacttcctgagcaccttcatcaccagcggcatgaggttcctgctgaaccagcagatctgccctgtgctgtaccacgccggcaccgtgctgctgaacagcctgctggacacagtgcctgtgcgcagctctgtggatgagctggtgggcatcgactacagcctgatgaaggaccctgtggccagcaccagcaacctggacatggacttccggggggccttcttccccctgacagagaggaactggagcctgcccaacagagctgtggagccccagctgcaggaggaggagaggatggtgtatgtggccttcagcgagttcttctttgattctgccatggagagctacttccgggccggggccctgcagctgctgctggtgggggacaaggtgccccatgacctggacatgctgctgcgggccacctacttcggcagcatcgtgctgctgagccctgctgtgattgacagccccctgaagctggagctgcgggtgctggccccaccccgctgcaccatcaagcccagcggcaccaccatctctgtgacagcctctgtgaccatcgccctggtgcccccagaccagcctgaggtgcagctgagctccatgaccatggatgcccggctgagcgccaagatggccctgcggggcaaggccctgcggacccagctggacctgcggcgcttccgcatctacagcaaccacagcgccctggagagcctggccctgatccccctgcaggcccccctgaagaccatgctgcagatcggcgtgatgcccatgctgaatgaaagaacctggaggggcgtgcagatccccctgcctgagggcatcaactttgtgcatgaggtggtgaccaaccacgccggcttcctgaccatcggggctgacctgcactttgccaagggcctgcgggaggtgattgagaagaacagaccagcagatgtgcgggccagcacagcccccacccccagcacagctgctgtgtag

SEQ ID NO: 85418 - DNA, 1218 bp, Artificial Sequence
  derived and/or modified sequence
atgctgcagatcaccaacgccagcctgggcctgcggttccggcggcagctgctgtactggtttttctacgacggcggctacatcaatgcaagcgccgagggcgtgagcattcggacggggctggaactttcaagggatcccgctggaaggatgaaagtgtctaatgtgagttgtcaagcttctgtgagtcggatgcacgccgcatttggcggcacctttaaaaaagtctacgatttcttaagcacgttcattacctctggcatgcgattccttctgaatcagcagatctgtcctgtgttgtatcatgccgggacagtgctactgaatagcttgctggatacagtgcctgtccgcagctcagtggacgaactggtgggtattgactacagcctcatgaaggatccagtggcttccacttccaacctggatatggactttcgcggtgcctttttccctttgaccgagagaaattggtccctccctaatcgcgcggttgagccgcagttacaagaggaggaaaggatggtttatgtagcgttctcagagttcttttttgatagtgccatggagtcgtatttcagggctggagccctccagctgctgctggtgggggataaggtgccccatgatctcgacatgctgctgagagccacatatttcgggagtattgtgctgctctctcccgcggtcatagacagccctctgaaactcgagttgcgagtgctggccccacctcgctgcactattaagccaagtggtacaaccatcagtgtgacagccagcgttaccattgccctggtgcctcctgaccaacccgaggtccaactcagcagtatgacaatggatgctcggctaagtgccaagatggccctccgtggaaaggccctcaggacacagctggatctgcgacggttccgcatctatagcaatcatagtgcgcttgagagcttggccctgattccgttgcaggcacccctgaagacaatgctgcagataggggttatgcctatgcttaacgagcgcacatggaggggcgtgcagatacccctgccagaaggtattaacttcgtccatgaagtggtgaccaatcacgctgggtttctgaccataggcgctgatcttcattttgctaagggcttacgcgaggtcattgaaaagaataggcccgctgacgtgagggcctcaactgctccaaccccaagcacagccgctgtctag

SEQ ID NO: 85419 - DNA, 1218 bp, Artificial Sequence
  derived and/or modified sequence
atgctgcaaatcaccaatgctagtctaggccttcgctttcgtcgccaactgctgtattggttcttttatgacggaggctatataaacgccagcgctgagggtgtaagcatcagaacggggctcgagctgtcccgagatccagccggaagaatgaaggtcagcaacgtaagttgccaggcatccgtcagccgcatgcacgccgcattcggcggaacctttaagaaggtatatgactttctctcaacatttatcacctcaggtatgcgctttttgctgaatcagcagatttgtccagtgctgtaccacgctggcaccgtattactgaatagcctcctggatactgtgcctgtccggtcctccgtagatgagcttgtgggcattgactattcactgatgaaggatcccgttgcaagtacatctaatctggatatggacttcaggggtgctttttttccattgacagaacgcaactggagcttacccaatcgagcagtagagccacagctgcaggaagaagaacgaatggtgtatgtggctttctctgagttcttcttcgatagcgcaatggaatcttactttcgtgcgggtgccctgcagctcctgttggtgggcgataaggtgccgcacgatctggacatgctgctgcgtgccacctacttcggctccattgtgctgctgtcccctgccgtgattgatagccccctgaaactcgaactccgcgtgctggcacctccacggtgcactatcaagcctagcggcacgactatctcggtcacagctagcgtgaccatcgctctggtgcctccagaccagccagaagttcaactctccagcatgactatggacgctcgactgagcgccaagatggctcttcgtgggaaagctcttaggactcaacttgatttgagacgcttcaggatatactccaaccatagcgcactggagtctctggcactgatccctctgcaggccccactcaaaactatgctgcagatcggggtgatgcccatgctgaacgaacggacctggcgaggcgtgcaaatcccgttgcctgagggcattaactttgtgcatgaagttgttacaaatcatgctgggtttctaaccattggcgcagaccttcattttgccaagggattaagagaagtgatcgagaagaatagaccagcggatgtgcgcgcaagcacagcacctacaccctctactgcagccgtgtag

SEQ ID NO: 85420 - DNA, 1218 bp, Artificial Sequence
  derived and/or modified sequence
atgctgcagatcaccaacgccagcctgggcctgagattcagaagacagctgctgtactggttcttctacgacggcggctacatcaacgccagcgccgagggcgtgagcatcagaaccggcctggagctgagcagagaccccgccggcagaatgaaggtgagcaacgtgagctgccaggccagcgtgagcagaatgcacgccgccttcggcggcaccttcaagaaggtgtacgacttcctgagcaccttcatcaccagcggcatgagattcctgctgaaccagcagatctgccccgtgctgtaccacgccggcaccgtgctgctgaacagcctgctggacaccgtgcccgtgagaagcagcgtggacgagctggtgggcatcgactacagcctgatgaaggaccccgtggccagcaccagcaacctggacatggacttcagaggcgccttcttccccctgaccgagagaaactggagcctgcccaacagagccgtggagccccagctgcaggaggaggagagaatggtgtacgtggccttcagcgagttcttcttcgacagcgccatggagagctacttcagagccggcgccctgcagctgctgctggtgggcgacaaggtgccccacgacctggacatgctgctgagagccacctacttcggcagcatcgtgctgctgagccccgccgtgatcgacagccccctgaagctggagctgagagtgctggccccccccagatgcaccatcaagcccagcggcaccaccatcagcgtgaccgccagcgtgaccatcgccctggtgccccccgaccagcccgaggtgcagctgagcagcatgaccatggacgccagactgagcgccaagatggccctgagaggcaaggccctgagaacccagctggacctgagaagattcagaatctacagcaaccacagcgccctggagagcctggccctgatccccctgcaggcccccctgaagaccatgctgcagatcggcgtgatgcccatgctgaacgagagaacctggagaggcgtgcagatccccctgcccgagggcatcaacttcgtgcacgaggtggtgaccaaccacgccggcttcctgaccatcggcgccgacctgcacttcgccaagggcctgagagaggtgatcgagaagaacagacccgccgacgtgagagccagcaccgcccccacccccagcaccgccgccgtgtag

SEQ ID NO: 85421 - protein, 516 aa, Artificial Sequence
  derived and/or modified sequence
MLSDELESKPELLVQFVQNTSIPLGQGLVESEAKDITCLSLLPVTEASECSRLMLPEPVPWREEDGKSGCSDLNDTTNHSNSSKEVPSSAVLRSLRVNVGPDGEETRAQTVQKSPEFLSTSESSSLLQDLQPSDSTSFILLNLTRAGLGSSAEHLVFVQDEAEDSGNDFLSSESTDSSIPWFLRVQELAHDSLIAATRAQLAKNAKTSSNGENVHLGSGDGQSKDSGPLPQVEKKLKCTVEGCDRTFVWPAHFKYHLKTHRNDRSFICPAEGCGKSFYVLQRLKVHMRTHNGEKPFMCHESGCGKQFTTAGNLKNHRRIHTGEKPFLCEAQGCGRSFAEYSSLRKHLVVHSGEKPHQCQVCGKTFSQSGSRNVHMRKHHLQLGAAGSQEQEQTAEPLMGSSLLEEASVPSKNLVSMNSQPSLGGESLNLPNTNSILGVDDEVLAEGSPRSLSSVPDVTHHLVTMQSGRQSYEVSVLTAVNPQESLAPLPRLECSGAFSAHCNLCLPGSSDSPASAS

SEQ ID NO: 85422 - DNA, 1551 bp, Artificial Sequence
  derived and/or modified sequence
atgctgagcgacgagctggagagcaagcccgagctgctggtgcagttcgtgcagaacaccagcatccccctgggccagggcctggtggagagcgaggccaaggacatcacctgcctgagcctgctgcccgtgaccgaggccagcgagtgcagcagactgatgctgcccgagcccgtgccctggagagaggaggacggcaagagcggctgcagcgacctgaacgacaccaccaaccacagcaacagcagcaaggaggtgcccagcagcgccgtgctgagaagcctgagagtgaacgtgggccccgacggcgaggagaccagagcccagaccgtgcagaagagccccgagttcctgagcaccagcgagagcagcagcctgctgcaggacctgcagcccagcgacagcaccagcttcatcctgctgaacctgaccagagccggcctgggcagcagcgccgagcacctggtgttcgtgcaggacgaggccgaggacagcggcaacgacttcctgagcagcgagagcaccgacagcagcatcccctggttcctgagagtgcaggagctggcccacgacagcctgatcgccgccaccagagcccagctggccaagaacgccaagaccagcagcaacggcgagaacgtgcacctgggcagcggcgacggccagagcaaggacagcggccccctgccccaggtggagaagaagctgaagtgcaccgtggagggctgcgacagaaccttcgtgtggcccgcccacttcaagtaccacctgaagacccacagaaacgacagaagcttcatctgccccgccgagggctgcggcaagagcttctacgtgctgcagagactgaaggtgcacatgagaacccacaacggcgagaagcccttcatgtgccacgagagcggctgcggcaagcagttcaccaccgccggcaacctgaagaaccacagaagaatccacaccggcgagaagcccttcctgtgcgaggcccagggctgcggcagaagcttcgccgagtacagcagcctgagaaagcacctggtggtgcacagcggcgagaagccccaccagtgccaggtgtgcggcaagaccttcagccagagcggcagcagaaacgtgcacatgagaaagcaccacctgcagctgggcgccgccggcagccaggagcaggagcagaccgccgagcccctgatgggcagcagcctgctggaggaggccagcgtgcccagcaagaacctggtgagcatgaacagccagcccagcctgggcggcgagagcctgaacctgcccaacaccaacagcatcctgggcgtggacgacgaggtgctggccgagggcagccccagaagcctgagcagcgtgcccgacgtgacccaccacctggtgaccatgcagagcggcagacagagctacgaggtgagcgtgctgaccgccgtgaacccccaggagagcctggcccccctgcccagactggagtgcagcggcgccttcagcgcccactgcaacctgtgcctgcccggcagcagcgacagccccgccagcgccagctag

SEQ ID NO: 85423 - DNA, 1551 bp, Artificial Sequence
  derived and/or modified sequence
atgctctccgatgaattagaaagcaaaccagagcttcttgtgcagttcgttcagaatacctctataccgctggggcaggggttagtcgagtctgaggcgaaagacatcacatgtttgtccttgctgcccgtaactgaagcatctgaatgctccaggctgatgttacccgagcccgtcccatggcgagaggaggacgggaaatctggttgttcggacctgaacgataccacaaaccatagtaacagctccaaggaagtcccctcatctgcagttcttaggtcgttgcgggtgaatgttggccctgacggcgaagagacacgcgcccagacagtgcagaagtccccagagttcctgtcaacatctgaaagctctagtctgttacaagacttgcaaccttcagacagcactagcttcatcctgctgaatctgacccgggctggccttggcagctcagcagaacaccttgtattcgtccaagacgaggctgaggactctggaaatgactttctgtccagtgaaagcaccgattccagcatcccatggttcctgcgggtccaggaattagcccacgatagcttgatcgcagcaacccgtgcacagctggctaagaatgccaagaccagcagcaatggtgagaacgttcatctgggtagcggcgatggacagagtaaagattccgggccactcccgcaggttgaaaagaaactcaaatgcactgtcgaagggtgcgataggacattcgtgtggcctgctcacttcaaataccacctgaagacccatcgcaatgacaggtcatttatctgccctgctgaggggtgcgggaagtcgttttacgtgctgcagcggctcaaggtgcacatgcgcacacacaatggtgagaagcccttcatgtgtcacgaatccgggtgtggaaaacagtttaccaccgccggaaacctgaaaaaccatcgcaggattcatacaggagaaaaaccatttctctgcgaagcgcaaggttgtgggaggagctttgctgagtatagttcactgcggaagcacctagtggtacactccggagagaaaccccaccagtgccaggtttgcggaaaaacttttagtcagtctgggtctagaaatgtgcacatgagaaagcatcatctccaactgggagccgctggctcccaagagcaggaacagaccgccgagccactcatgggtagtagcctccttgaagaagcctctgtcccatccaaaaatttagtcagcatgaactctcagccctcacttggtggagagagcctaaatctgccaaacactaacagtattcttggcgttgatgatgaagtgttggctgagggctcccccagaagtttatcctccgtgccagacgtgacccatcacttggtgaccatgcagtctggacggcagtcctatgaagtttcagttctcaccgccgtgaacccccaagagtcgctggccccattacctcggcttgaatgtagcggcgcatttagcgcccattgcaatctgtgtctgcctggctcctcagactctcctgcctctgctagctag

SEQ ID NO: 85424 - DNA, 1551 bp, Artificial Sequence
  derived and/or modified sequence
atgctgagtgatgagctggagagcaagccagagctgctggtgcagtttgtgcagaacaccagcatccccctgggccagggcctggtggagagcgaggccaaggacatcacctgcctgagcctgctgcctgtgacagaggcctctgaatgttcccggctgatgctgcctgagcctgtgccctggagggaggaggatggcaagagcggctgcagcgacctgaatgacaccaccaaccacagcaacagcagcaaggaggtgcccagcagcgctgtgctgcggagcctgcgggtgaatgtgggcccagatggagaggagacccgggcccagacagtgcagaagagccctgagttcctgagcaccagcgagagcagcagcctgctgcaggacctgcagcccagcgacagcaccagcttcatcctgctgaacctgacccgggccggcctgggcagcagcgctgagcacctggtgtttgtgcaggatgaagcagaagattctggaaatgacttcctgagcagcgagagcacagacagcagcatcccctggttcctgcgggtgcaggagctggcccatgacagcctgattgctgccacccgggcccagctggccaagaatgccaagaccagcagcaatggagaaaatgtgcacctgggcagcggagatggccagagcaaggacagcggccccctgccccaggtggagaagaagctgaagtgcaccgtggagggctgtgacaggacctttgtgtggccagcccacttcaagtaccacctgaagacccacagaaatgaccgctccttcatctgcccagctgagggctgcggcaagagcttctacgtgctgcagaggctgaaggtgcacatgaggacccacaatggagagaagcccttcatgtgccatgaaagtggctgcggcaagcagttcaccacagctggcaacctgaagaaccaccggcgcatccacactggagagaagcccttcctgtgtgaggcccagggctgcggccgcagctttgctgagtacagcagcctgaggaagcacctggtggtgcacagcggggagaagccccaccagtgccaggtgtgtgggaagaccttcagccagagcggcagcagaaatgtgcacatgaggaagcaccacctgcagctgggcgctgctggcagccaggagcaggagcagacagctgagcccctgatgggcagcagcctgctggaggaggcctctgtgcccagcaagaacctggtgtccatgaacagccagcccagcctgggcggggagagcctgaacctgcccaacaccaacagcatcctgggcgtggatgatgaggtgctggccgagggcagccccaggagcctgagctctgtgcctgatgtgacccaccacctggtgaccatgcagagcggccggcagagctatgaggtgtctgtgctgacagctgtgaacccccaggagagcctggcccccctgccccggctggagtgcagcggggccttcagcgcccactgcaacctgtgcctgcccggcagcagtgacagccctgccagcgccagctag

SEQ ID NO: 85425 - DNA, 1551 bp, Artificial Sequence
  derived and/or modified sequence
atgctgagcgacgagctggagagcaagcccgagctgctggtgcagtttgtgcagaacacgagtattccattgggccagggactcgtggaaagcgaagcaaaggacataacttgtctatctctccttcctgttacggaggcatcggaatgctctaggctgatgttaccagagccggtcccctggcgggaggaggacggaaagagcggctgttctgatcttaatgacactactaaccacagcaattcgagcaaggaagtaccatccagtgccgtcctgagatccctcagagtgaacgtgggacctgatggcgaggagacccgggcccagacagtacagaagtctccagagtttttatcaacttccgagtcttcaagcttactgcaggaccttcagccaagcgactccacctctttcatattgctcaaccttacaagagctggcttaggtagctctgctgagcatcttgtcttcgtccaagacgaagctgaagactcggggaatgattttttgtccagtgagagtaccgacagcagcattccctggttccttagggtgcaggagctagctcacgactctctgatcgctgctacaagagctcagctggctaagaacgccaagacttctagcaatggtgaaaacgtccatctgggctcgggggatgggcagagtaaagattccggccctctgccccaggtggaaaagaagttaaaatgcacagtggaaggctgcgataggacattcgtgtggcctgcccattttaagtatcatcttaagacacacagaaatgatcgttctttcatctgtcccgcagagggctgcggcaaaagcttctatgtgctccagcgcctcaaagtgcatatgcgtacccataacggagagaagccctttatgtgtcacgagtctggctgtggcaagcagttcactacggctggtaatctgaagaatcatcggaggattcataccggcgaaaaacctttcctgtgcgaagctcagggatgcggccggtcattcgccgagtacagcagcctgcgcaagcatctcgtggtgcactccggtgagaagccacatcagtgtcaggtgtgcgggaagacatttagccagtccgggagccgcaacgtgcatatgcgaaaacatcatctgcagctgggggctgccgggagccaagagcaagagcagacagcagagcctctgatgggctccagtttactcgaagaggccagtgttccctctaaaaatctggtgagcatgaacagccaacctagtcttggaggcgagtcactaaatcttcctaataccaattccatacttggcgtagatgacgaggtacttgcagaaggctcccctaggtccttgagttctgtgcccgacgtaactcatcacctggttactatgcagtctggccggcagagttacgaggtttctgtcctgacagccgtgaatcctcaggaaagtctagcacccctgcctagattagagtgtagcggcgcctttagcgcgcattgtaacttgtgcttaccgggatcttccgactcacctgctagcgcgtcttag

SEQ ID NO: 85426 - DNA, 1551 bp, Artificial Sequence
  derived and/or modified sequence
atgctgtccgatgagctcgagtcgaagcctgagcttttggtgcaattcgtccagaatactagcattccactcggtcagggcctggtggaaagcgaagctaaagatattacttgtctatctttgctgcccgtgacagaagcctccgaatgcagccgactgatgcttcccgagcctgtgccatggcgcgaggaagacgggaaatcaggttgctccgatttgaatgacacaacgaaccactctaactcttcaaaggaagtcccctctagtgccgtactccggtcactgcgagtgaacgtgggacccgatggagaggagacaagagcgcagaccgtccagaaaagcccagagttcttaagtacctccgagtctagcagtttgttgcaagatttgcagccaagcgactccacttccttcatcttgctgaacctcactcgagctggactgggtagctccgccgagcacctcgtatttgtgcaggacgaggctgaggactctggcaatgatttcttatcctccgaatctaccgacagcagtatcccatggttcctgcgggtccaggagctcgctcacgactcactcatcgcggctacacgcgcacagttggcgaaaaacgcaaagacgtcctccaatggagaaaatgttcacctcggaagcggagacgggcagtctaaagacagtggccctctcccccaagttgaaaagaagctgaagtgtaccgtagaaggctgcgacagaacattcgtttggcccgctcactttaagtaccacctcaagacacatagaaacgaccgatctttcatttgccctgctgagggatgtggcaaatctttctatgtgctccagcggcttaaggtccacatgcgcacgcacaatggcgaaaagccatttatgtgtcacgagagtggctgcggcaaacagttcacaaccgctgggaatctgaaaaatcatcgacggattcacactggcgagaaaccctttctgtgtgaagcgcaggggtgcggcaggtctttcgccgaatacagtagtttgcgcaagcatctggtggtccacagcggggaaaagccgcatcagtgccaggtgtgcggtaaaacatttagccagtctggttcaagaaatgtccacatgaggaaacatcatctgcaactgggagccgctggaagccaggagcaggaacagaccgcagagcccctgatgggatcctcccttctggaggaagcctccgtcccgtcgaagaatctggtgtcaatgaacagtcaaccctcactcggtggagagagtcttaacctcccaaataccaattccatcttgggggttgatgacgaagttctggctgagggtagtcccaggtcattgtcttctgtgccagacgtgacccaccacctggtgacaatgcagtcagggaggcagagctacgaggtgtccgtgttaactgccgtcaaccctcaggagagtctcgccccactgccccgacttgagtgttcgggagcattctccgctcactgcaacttgtgcctcccgggttccagcgactcgcctgccagtgccagttag

SEQ ID NO: 85427 - DNA, 2076 bp, Artificial Sequence
  derived and/or modified sequence
aattcgggaccgactgacggccggccggcttcccggaactggaaggttacattgattacccacctagtacaacatcttacgggaagagcatagtatttcctagaggaatatgaacataacaggaaggtatcattggctctgaattaaatttgaacttgtcccctgaatagctacaggttttggaagctgaatcaatgttatcagatgagttagaatccaaaccagagctcctggtacagtttgttcagaatacgtccatcccattgggacaggggcttgtagaatcagaagctaaagatattacttgcttgtccctccttcccgtgactgaagcctcagaatgcagtcggctaatgttaccagaacctgttccatggagagaagaggatggaaagtcaggctgcagtgacttgaatgatactacaaatcattctaactcctccaaggaggtcccttcctcagctgttttgagaagccttcgggtgaatgtgggtccagacggagaggagacgagagctcagactgtacagaaatccccggagtttttgtccacttcagagtcttctagcttgttgcaagatctacagccaagtgatagcacttcttttattcttcttaacctaacaagagcaggtctgggctcttcagctgagcacttagtgtttgtacaggatgaggcagaagattcagggaatgatttcctctccagtgagagcacagacagtagcattccatggttcctccgggttcaggagttggcccatgacagtttgattgctgctactcgtgcacaactggcaaagaatgcaaaaaccagcagcaatggagaaaatgtccaccttggttctggtgatgggcagtcaaaagattctgggccccttcctcaagtggaaaagaagctcaagtgtacagttgaaggttgtgaccggacatttgtatggccagctcactttaaataccacctcaagactcatcgaaatgaccgctccttcatctgtcctgcagaaggttgtgggaaaagcttctatgtgctgcagaggctgaaggtgcacatgaggacccacaatggagagaagccctttatgtgccatgagtctggctgtggtaagcagtttactacagctggaaacctgaagaaccaccggcgcatccacacaggagagaaacctttcctttgtgaagcccaaggatgtggccgttcctttgctgagtattctagcctccgaaaacatctggtggttcactcaggagagaagcctcatcagtgccaagtctgtgggaagaccttctctcagagtggaagcaggaatgtgcatatgagaaagcatcacctgcagctgggagcagctgggagtcaagagcaggagcaaactgctgagccactaatgggcagtagtttgcttgaagaggcttcagtacccagtaaaaacctggtgtctatgaattcccagcccagccttggtggagagtccttgaacctaccaaataccaattctatcctgggagttgatgatgaggtgcttgctgaaggatccccacgttccctgtcttcagtgcctgatgtgacacatcacctggtgaccatgcagtcagggaggcaatcatatgaagtttctgtcttaactgcagtaaatccacaagagagtctcgctccgttgcccaggctggagtgcagtggtgcgttctcggctcactgcaacctctgcctcccaggttcaagcgattctcctgcctcagcctcctgagtagctgctactacagttactaaaccaaggagatttaactgaaagacggacatgagcgtgggtgctgactcctggaagagcaactctatctgatctcaaaatgcgtatactgggaacaggatgccttagcccacaacagaaccagaatgaatctttgaaggcacaagactctgcttttgccactcttcctctttcctggtatagaagatggatgtaggagagcttcttttctaactaccatctgatcagacaaggaatgaagcaatgactgtgggctgggaaactgtacctacctctcttcccactgcaaatttctgggatagaccaaaag

SEQ ID NO: 85428 - protein, 631 aa, Artificial Sequence
  derived and/or modified sequence
MFGHGLKHLFHSRRRSREREHQTSQDSQQHQQQQGMSDHDSPDEKERSPEMHRVSYAMSLHDLPARPTAFNRVLQQIRSRPSIKRGASLHSSSGGGSSGSSSRRTKSSSLEPQRGSPHLLRKAPQDSSLAAILHQHQCRPRSSSTTDTALLLADGSNVYLLAEEAEGIGDKVDKGDLVALSLPAGHGDTDGPISLDVPDGAPDPQRTKAAIDHLHQKILKITEQIKIEQEARDDNVAEYLKLANNADKQQVSRIKQVFEKKNQKSAQTIAQLHKKLEHYRRRLKEIEQNGPSRQPKDVLRDMQQGLKDVGANVRAGISGFGGGVVEGVKGSLSGLSQATHTAVVSKPREFASLIRNKFGSADNIAHLKDPLEDGPPEEAARALSGSATLVSSPKYGSDDECSSASASSAGAGSNSGAGPGGALGSPKSNALYGAPGNLDALLEELREIKEGQSHLEDSMEDLKTQLQRDYTYMTQCLQEERYRYERLEEQLNDLTELHQNEMTNLKQELASMEEKVAYQSYERARDIQEAVESCLTRVTKLELQQQQQQVVQLEGVENANARALLGKFINVILALMAVLLVFVSTIANFITPLMKTRLRITSTTLLVLVLFLLWKHWDSLTYLLEHVLLPS

SEQ ID NO: 85429 - DNA, 1896 bp, Artificial Sequence
  derived and/or modified sequence
atgttcggccacggcctgaagcacctgttccacagcagaagaagaagcagagagagagagcaccagaccagccaggacagccagcagcaccagcagcagcagggcatgagcgaccacgacagccccgacgagaaggagagaagccccgagatgcacagagtgagctacgccatgagcctgcacgacctgcccgccagacccaccgccttcaacagagtgctgcagcagatcagaagcagacccagcatcaagagaggcgccagcctgcacagcagcagcggcggcggcagcagcggcagcagcagcagaagaaccaagagcagcagcctggagccccagagaggcagcccccacctgctgagaaaggccccccaggacagcagcctggccgccatcctgcaccagcaccagtgcagacccagaagcagcagcaccaccgacaccgccctgctgctggccgacggcagcaacgtgtacctgctggccgaggaggccgagggcatcggcgacaaggtggacaagggcgacctggtggccctgagcctgcccgccggccacggcgacaccgacggccccatcagcctggacgtgcccgacggcgcccccgacccccagagaaccaaggccgccatcgaccacctgcaccagaagatcctgaagatcaccgagcagatcaagatcgagcaggaggccagagacgacaacgtggccgagtacctgaagctggccaacaacgccgacaagcagcaggtgagcagaatcaagcaggtgttcgagaagaagaaccagaagagcgcccagaccatcgcccagctgcacaagaagctggagcactacagaagaagactgaaggagatcgagcagaacggccccagcagacagcccaaggacgtgctgagagacatgcagcagggcctgaaggacgtgggcgccaacgtgagagccggcatcagcggcttcggcggcggcgtggtggagggcgtgaagggcagcctgagcggcctgagccaggccacccacaccgccgtggtgagcaagcccagagagttcgccagcctgatcagaaacaagttcggcagcgccgacaacatcgcccacctgaaggaccccctggaggacggcccccccgaggaggccgccagagccctgagcggcagcgccaccctggtgagcagccccaagtacggcagcgacgacgagtgcagcagcgccagcgccagcagcgccggcgccggcagcaacagcggcgccggccccggcggcgccctgggcagccccaagagcaacgccctgtacggcgcccccggcaacctggacgccctgctggaggagctgagagagatcaaggagggccagagccacctggaggacagcatggaggacctgaagacccagctgcagagagactacacctacatgacccagtgcctgcaggaggagagatacagatacgagagactggaggagcagctgaacgacctgaccgagctgcaccagaacgagatgaccaacctgaagcaggagctggccagcatggaggagaaggtggcctaccagagctacgagagagccagagacatccaggaggccgtggagagctgcctgaccagagtgaccaagctggagctgcagcagcagcagcagcaggtggtgcagctggagggcgtggagaacgccaacgccagagccctgctgggcaagttcatcaacgtgatcctggccctgatggccgtgctgctggtgttcgtgagcaccatcgccaacttcatcacccccctgatgaagaccagactgagaatcaccagcaccaccctgctggtgctggtgctgttcctgctgtggaagcactgggacagcctgacctacctgctggagcacgtgctgctgcccagctag

SEQ ID NO: 85430 - DNA, 1896 bp, Artificial Sequence
  derived and/or modified sequence
atgttcggacacggcttaaaacacctgttccatagccgaaggcgctcccgcgaaagggaacaccagacttcccaagatagccaacagcatcagcaacagcaaggtatgtctgatcacgatagtcccgatgagaaggagaggtcgcctgagatgcatagagttagctacgcaatgtcactgcacgacctgccagccagacccacggcatttaatcgagttctccaacaaatacgatcccgcccttctatcaagagaggagcctccttacactcctcaagcggcggcgggtcctctggatctagctcaaggcggactaaaagctcatctctcgaacctcagcgcggctctccacacctactgagaaaggccccacaggactcctcactcgccgctatcctgcaccagcaccagtgcagaccgaggtccagttctaccactgacaccgccctgttgttggctgatggtagcaatgtgtatcttctggccgaggaagccgaaggaattggggataaggttgataagggcgacttggtagccttgagtctcccggctgggcacggcgacaccgatggccccattagcctcgatgtccccgacggagcccccgaccctcaacggacaaaagccgctatcgaccatctgcaccagaaaatcctcaaaatcactgaacaaatcaaaatcgaacaggaggcccgcgatgacaacgtagccgaatacctgaaattggcgaacaacgcagataagcagcaagtgagtcgaatcaagcaagtctttgagaagaaaaatcagaaaagcgcccagactatcgcccagctgcataaaaaacttgagcactaccgccgtcgtctgaaagaaattgagcagaatgggcctagccgccagcccaaagacgttctgcgggatatgcagcagggcttaaaggatgtgggcgcaaatgtgagagccgggatcagtggattcggggggggagtcgtcgagggagtgaaagggtctcttagcggactctctcaagctacacataccgcagtggtgtccaagccacgcgagtttgcctcattgattcggaacaaattcggctcagctgacaacatagcgcatctgaaagatccactggaagatgggcctcccgaagaggcggcacgggccctgagtggtagcgcgacgttagttagttcacctaagtatggttctgatgacgagtgttcctctgcatccgcttccagtgctggagctggttccaattcaggtgcgggacctggcggcgcattgggcagccccaagtccaacgctctgtacggggcccctggaaacctcgacgccctgctggaggagcttcgcgagataaaggagggacagtcacacctggaggacagcatggaggaccttaaaacacaactccaaagggactacacctatatgacccagtgcttacaggaggaaagatatagatacgaaagacttgaagagcaattgaacgacttaactgaattgcatcagaacgagatgactaacctgaagcaagaacttgcctctatggaggaaaaggttgcctaccagtcatatgagagagctcgtgacattcaggaggcggttgaaagttgcctgactagggtgactaagctggagctgcaacagcaacaacagcaggtcgtccaattagagggggtggaaaacgccaatgcccgggcgctgctgggaaagtttataaatgttattctggctctgatggccgtgctgctggtgtttgtttctaccattgcaaattttatcaccccattaatgaaaactcggctgcgaatcacttcaacgacactgcttgttctggtgctgtttctcctatggaagcattgggatagtctcacgtacctgctggagcacgtactgctcccttcatag

SEQ ID NO: 85431 - DNA, 1896 bp, Artificial Sequence
  derived and/or modified sequence
atgtttggccacggcctgaagcacctgttccacagcagaagaagaagccgggagcgggagcaccagaccagccaggacagccagcagcaccagcagcagcagggcatgtctgaccatgacagcccagatgagaaggagaggagccctgagatgcaccgggtgtcctatgccatgagcctgcatgacctgcctgcccggcccacagccttcaacagagtgctgcagcagatccgcagccggcccagcatcaagagaggagccagcctgcacagcagcagcggcggcggcagcagcggcagcagcagcaggaggaccaagagcagcagcctggagccccagaggggcagcccccacctgctgaggaaggccccccaggacagcagcctggccgccatcctgcaccagcaccagtgccggcccaggagcagcagcaccacagacacagccctgctgctggctgatggcagcaatgtgtacctgctggccgaggaggccgagggcatcggggacaaggtggacaagggggacctggtggccctgagcctgcctgctggccacggggacacagatggccccatcagcctggatgtgcctgatggagccccagacccccagaggaccaaggccgccatcgaccacctgcaccagaagatcctgaagatcacagagcagatcaagattgagcaggaggccagagatgacaacgtggccgagtacctgaagctggccaacaatgctgacaagcagcaggtgagccgcatcaagcaggtgtttgagaagaagaaccagaagagcgcccagaccatcgcccagctgcacaagaagctggagcactacagaagaaggctgaaggagattgagcagaatggccccagccggcagcccaaggatgtgctgcgggacatgcagcagggcctgaaggatgtgggcgccaacgtgcgggccggcatcagcggctttggaggaggagtggtggagggcgtgaagggcagcctgagcggcctgagccaggccacccacacagctgtggtgtccaagccccgggagtttgccagcctcatccggaacaagtttggcagcgctgacaacatcgcccacctgaaggaccccctggaggatggccccccagaggaggccgcccgggccctgagcggcagcgccaccctggtgagcagccccaagtatggcagtgatgatgagtgcagcagcgccagcgccagcagcgctggagctggcagcaacagcggggccggccctggaggagccctgggcagccccaagagcaatgccctgtatggagcccctggcaacctggatgccctgctggaggagctgcgggagatcaaggagggccagagccacctggaggacagcatggaggacctgaagacccagctgcagagggactacacctacatgacccagtgcctgcaggaggagcgctaccgctatgaaaggctggaggagcagctgaatgacctgacagagctgcaccagaatgagatgaccaacctgaagcaggagctggcctccatggaggagaaggtggcctaccagagctatgagcgggcccgggacatccaggaggccgtggagagctgcctgaccagggtgaccaagctggagctgcagcagcagcagcagcaggtggtgcagctggagggcgtggagaatgccaatgcccgggccctgctgggcaagttcatcaacgtcatcctggccctgatggctgtgctgctggtgtttgtgtccaccatcgccaacttcatcacccccctgatgaagacccggctgcgcatcaccagcaccaccctgctggtgctggtgctcttcctgctgtggaagcactgggacagcctgacctacctgctggagcacgtgctgctgcccagctag

SEQ ID NO: 85432 - DNA, 1896 bp, Artificial Sequence
  derived and/or modified sequence
atgttcggccacggcctgaagcacctgttccacagccggcggcggagtcgcgaacgggagcaccagacctctcaggattcacaacagcatcagcagcaacagggcatgagcgaccacgatagccccgacgagaaagaacggtcccctgagatgcatcgggtatcatatgccatgtcactgcatgatcttcccgcaaggcccacagctttcaatcgggtcctgcagcagattaggagtcgaccatctatcaagcgtggggcttcacttcattcctcttctggcgggggtagttccggaagtagctccaggaggaccaagtcctccagcctagaaccccagcgtggcagcccccatctgctgcgcaaagcgcctcaggactcttcgctggcagctatcctccaccagcaccagtgcagaccccggagtagctccacaacagacaccgccttactcctggccgatggatcgaatgtgtacctgttggccgaggaagccgagggcataggtgacaaggtcgacaaaggagatctggtcgccctctcactacccgcaggtcacggtgacacagatggacctatcagcttggatgtgccggacggcgccccagatccccaacgcaccaaggcagcaattgaccatctccaccagaagattcttaagataactgagcaaatcaagatcgagcaggaagcccgggacgacaatgtcgcagaatatctgaagctcgctaataacgctgataagcaacaggtgtcccggattaagcaagtcttcgagaagaagaatcagaagtcagcccagacgattgcccaattgcataaaaaacttgagcactacagacgccgactcaaggaaatcgagcagaacggcccttctaggcagccaaaagacgtcctgcgggacatgcaacaggggctaaaggatgtaggggccaacgtgcgtgctggcatctctggattcggtggaggcgttgtcgaaggcgtaaagggctctctgtctggtctgagtcaggcaacccatactgctgtggtgagcaaaccacgagaattcgccagtctaattcgcaacaagttcggaagtgcagataacattgcccatctgaaagacccgttggaagacggacccccggaggaagcagcaagagctctaagcggctcagccactttggtgtcttcacccaagtacggctctgatgatgaatgtagcagcgcttctgcttctagcgcaggagctgggtcaaacagcggcgccggccccggaggcgcgcttggtagtccaaagagtaacgcactgtacggcgctcccgggaacctggacgccttactggaggaactgcgtgagattaaagagggacaatcccacttggaagactccatggaggacctgaaaacgcaacttcagagggactatacatatatgacccagtgtctgcaggaggagcgctataggtacgagaggctcgaagaacagctaaatgacctcacagagctccaccagaatgagatgaccaatttaaagcaagagctcgctagtatggaggagaaggtggcctaccagtcttatgaacgggctcgggatattcaggaggctgtggaaagctgtctgacgcgggtgactaagctggagctgcagcagcagcagcagcaggtggttcaactcgaaggagtggagaacgctaatgcccgagccttactaggtaagttcatcaatgtcatcctggccctgatggccgtcttactcgtgttcgtgagcaccatagccaatttcataacacctttaatgaaaactcgcctgcgaataaccagcaccaccctgcttgttttagtgctgttcctcctgtggaagcactgggactctctgacgtacctgctggagcatgtcctcttgcctagctag

SEQ ID NO: 85433 - DNA, 1896 bp, Artificial Sequence
  derived and/or modified sequence
atgttcggccatggtctgaagcacttgttccactctagacggagatctcgagaaagagagcatcagacttctcaggacagtcagcagcatcagcaacagcagggcatgtcagatcatgattcgccagacgagaaggagagatcaccggaaatgcaccgcgtgagttacgccatgtcgctacacgacttgcctgcccgaccgaccgctttcaacagagtgctgcagcagattaggtcccgaccctcaataaagaggggagcctccctgcactcatctagtggaggcggttcgagtggatcttcttctcggagaaccaagtcctcttcccttgaacctcaacgcggttccccacacctgctcagaaaagcacctcaggacagctcattagccgctatactgcaccaacatcagtgtaggccgagatcatcgagcaccacggacaccgcccttctgctggcggatgggagtaacgtgtatctgctcgctgaggaagcggaggggatcggagataaagtggataaaggggaccttgttgcgcttagtcttcccgcaggtcacggggacactgacggccctatttctctcgacgtccctgatggcgctccagatcctcaacggaccaaagccgcaatcgatcacctgcatcagaagatcctgaagatcacagagcaaatcaaaatcgaacaggaagcacgtgatgacaatgtcgctgagtacctcaagcttgcaaacaacgccgataaacagcaggtgtctcgcattaagcaggttttcgagaaaaagaaccagaagtcggcccaaacaattgcccaactgcacaagaaactggagcattacagacggaggttgaaagaaatcgagcagaacggcccatctaggcaacccaaggacgtgcttcgcgacatgcagcaggggttaaaagacgtgggagcaaatgttcgggcaggaatcagtggattcggtggaggagtggtggaaggagttaagggatccttgagtggcctcagccaggccactcacactgccgtcgtgtcaaagcctcgagagttcgcctccttaatccgcaataaatttggcagcgccgataacatcgcacaccttaaagatccactggaggacggaccacccgaggaggcagcccgtgccctgagtggatctgctactctggtaagttctccaaagtatggatccgacgacgagtgttccagcgctagtgcgtcaagcgccggagcaggtagtaactctggggcaggcccaggtggtgccctgggcagccctaaatctaacgccctgtacggcgctccgggtaatctggacgcactcctcgaagaactgcgcgagattaaagaggggcagtcccacctggaggattccatggaggacctaaagacccagcttcagcgggactatacttacatgactcagtgcctgcaggaggagcgctacagatatgaaagacttgaggaacagctgaacgacctgaccgagctacatcagaacgagatgactaatctgaagcaagagctggcatccatggaggagaaggtggcttatcagagctacgaacgggctagggacatacaggaggctgtcgaatcttgtctaaccagagtgactaaactcgagctccaacaacagcagcagcaggtcgtgcaactggagggtgtcgagaatgctaatgctcgagcactgctgggaaaatttatcaatgtgatactggcgctcatggcggtactgttggtgtttgtgagtactatcgctaattttatcactccattgatgaagactaggttaagaataacttcgaccaccctcctggtcctggtcctcttccttctctggaaacattgggactccctgacatatctgctggagcacgtgttactgccaagttag

SEQ ID NO: 85434 - protein, 431 aa, Artificial Sequence
  derived and/or modified sequence
MLSDELESKPELLVQFVQNTSIPLGQGLVESEAKDITCLSLLPVTEASECSRLMLPDDTTNHSNSSKEVPSSAVLRSLRVNVGPDGEETRAQTVQKSPEFLSTSESSSLLQDLQPSDSTSFILLNLTRAGLGSSAEHLVFVQDEAEDSGNDFLSSESTDSSIPWFLRVQELAHDSLIAATRAQLAKNAKTSSNGENVHLGSGDGQSKDSGPLPQVEKKLKCTVEGCDRTFVWPAHFKYHLKTHRNDRSFICPAEGCGKSFYVLQRLKVHMRTHNGEKPFMCHESGCGKQFTTAGNLKNHRRIHTGEKPFLCEAQGCGRSFAEYSSLRKHLVVHSGEKPHQCQVCGKTFSQSGSRNVHMRKHHLQLGAAGSQEQEQTEVLAEGSPRSLSSVPDVTHHLVTMQSGRQSYEVSVLTAVNPQELLNQGDLTERRT

SEQ ID NO: 85435 - protein, 70 aa, Artificial Sequence
  derived and/or modified sequence
MLSDELESKPELLVQFVQNTSIPLGQGLVESEAKDITCLSLLPVTEASECSRLMLPDDTTNHSNSSKEVP

SEQ ID NO: 85436 - protein, 74 aa, Artificial Sequence
  derived and/or modified sequence
MLSDELESKPELLVQFVQNTSIPLGQGLVESEAKDITCLSLLPVTEASECSRLMLPDDTTNHSNSSKEVPSSAV

SEQ ID NO: 85437 - protein, 126 aa, Artificial Sequence
  derived and/or modified sequence
MLSDELESKPELLVQFVQNTSIPLGQGLVESEAKDITCLSLLPVTEASECSRLMLPDDTTNHSNSSKEVPSSAVLRSLRVNVGPDGEETRAQTVQKSPEFLSTSESSSLLQDLQPSDSTSFILLNL

SEQ ID NO: 85438 - DNA, 1296 bp, Artificial Sequence
  derived and/or modified sequence
atgctgagcgacgagctggagagcaagcccgagctgctggtgcagttcgtgcagaacaccagcatccccctgggccagggcctggtggagagcgaggccaaggacatcacctgcctgagcctgctgcccgtgaccgaggccagcgagtgcagcagactgatgctgcccgacgacaccaccaaccacagcaacagcagcaaggaggtgcccagcagcgccgtgctgagaagcctgagagtgaacgtgggccccgacggcgaggagaccagagcccagaccgtgcagaagagccccgagttcctgagcaccagcgagagcagcagcctgctgcaggacctgcagcccagcgacagcaccagcttcatcctgctgaacctgaccagagccggcctgggcagcagcgccgagcacctggtgttcgtgcaggacgaggccgaggacagcggcaacgacttcctgagcagcgagagcaccgacagcagcatcccctggttcctgagagtgcaggagctggcccacgacagcctgatcgccgccaccagagcccagctggccaagaacgccaagaccagcagcaacggcgagaacgtgcacctgggcagcggcgacggccagagcaaggacagcggccccctgccccaggtggagaagaagctgaagtgcaccgtggagggctgcgacagaaccttcgtgtggcccgcccacttcaagtaccacctgaagacccacagaaacgacagaagcttcatctgccccgccgagggctgcggcaagagcttctacgtgctgcagagactgaaggtgcacatgagaacccacaacggcgagaagcccttcatgtgccacgagagcggctgcggcaagcagttcaccaccgccggcaacctgaagaaccacagaagaatccacaccggcgagaagcccttcctgtgcgaggcccagggctgcggcagaagcttcgccgagtacagcagcctgagaaagcacctggtggtgcacagcggcgagaagccccaccagtgccaggtgtgcggcaagaccttcagccagagcggcagcagaaacgtgcacatgagaaagcaccacctgcagctgggcgccgccggcagccaggagcaggagcagaccgaggtgctggccgagggcagccccagaagcctgagcagcgtgcccgacgtgacccaccacctggtgaccatgcagagcggcagacagagctacgaggtgagcgtgctgaccgccgtgaacccccaggagctgctgaaccagggcgacctgaccgagagaagaacctag

SEQ ID NO: 85439 - DNA, 213 bp, Artificial Sequence
  derived and/or modified sequence
atgctgagcgacgagctggagagcaagcccgagctgctggtgcagttcgtgcagaacaccagcatccccctgggccagggcctggtggagagcgaggccaaggacatcacctgcctgagcctgctgcccgtgaccgaggccagcgagtgcagcagactgatgctgcccgacgacaccaccaaccacagcaacagcagcaaggaggtgccctag

SEQ ID NO: 85440 - DNA, 225 bp, Artificial Sequence
  derived and/or modified sequence
atgctgagcgacgagctggagagcaagcccgagctgctggtgcagttcgtgcagaacaccagcatccccctgggccagggcctggtggagagcgaggccaaggacatcacctgcctgagcctgctgcccgtgaccgaggccagcgagtgcagcagactgatgctgcccgacgacaccaccaaccacagcaacagcagcaaggaggtgcccagcagcgccgtgtag

SEQ ID NO: 85441 - DNA, 381 bp, Artificial Sequence
  derived and/or modified sequence
atgctgagcgacgagctggagagcaagcccgagctgctggtgcagttcgtgcagaacaccagcatccccctgggccagggcctggtggagagcgaggccaaggacatcacctgcctgagcctgctgcccgtgaccgaggccagcgagtgcagcagactgatgctgcccgacgacaccaccaaccacagcaacagcagcaaggaggtgcccagcagcgccgtgctgagaagcctgagagtgaacgtgggccccgacggcgaggagaccagagcccagaccgtgcagaagagccccgagttcctgagcaccagcgagagcagcagcctgctgcaggacctgcagcccagcgacagcaccagcttcatcctgctgaacctgtag

SEQ ID NO: 85442 - DNA, 819 bp, Artificial Sequence
  derived and/or modified sequence
atgctgagcgacgagctggagagcaagcccgagctgctggtgcagttcgtgcagaacaccagcatccccctgggccagggcctggtggagagcgaggccaaggacatcacctgcctgagcctgctgcccgtgaccgaggccagcgagtgcagcagactgatgctgcccgacgacaccaccaaccacagcaacagcagcaaggaggtgcccagcagcgccgtgctgagaagcctgagagtgaacgtgggccccgacggcgaggagaccagagcccagaccgtgcagaagagccccgagttcctgagcaccagcgagagcagcagcctgctgcaggacctgcagcccagcgacagcaccagcttcatcctgctgaacctgaccagagccggcctgggcagcagcgccgagcacctggtgttcgtgcaggacgaggccgaggacagcggcaacgacttcctgagcagcgagagcaccgacagcagcatcccctggttcctgagagtgcaggagctggcccacgacagcctgatcgccgccaccagagcccagctggccaagaacgccaagaccagcagcaacggcgagaacgtgcacctgggcagcggcgacggccagagcaaggacagcggccccctgccccaggtggagaagaagctgaagtgcaccgtggagggctgcgacagaaccttcgtgtggcccgcccacttcaagtaccacctgaagacccacagaagactgtgggagaagctgctgtgcgccgccgaggccgagggcgcccacgaggacccccagtggagagaggccctgtacgtgccctag

SEQ ID NO: 85443 - DNA, 1296 bp, Artificial Sequence
  derived and/or modified sequence
atgctgtccgacgagctcgagagcaagccagagctcctggtccaatttgtgcaaaatacttcgataccacttggtcagggtcttgtcgaatcagaagccaaagatatcacatgcctgagcctgttgcctgtaaccgaggcctctgaatgctcccgcttaatgctccctgacgataccaccaatcactctaactcaagcaaagaagtcccaagctccgctgtgctgcgctccttgcgagtcaatgttggccctgatggtgaagagacgagagcacagactgtgcaaaaatcaccagagttcctttctactagcgagagttcatcgttgcttcaggacctccaacccagcgattcgacttcattcattttattaaatttgacaagagccggattgggatcttctgcagaacatctggtgtttgtgcaggacgaagccgaagacagcggaaacgactttttgtcatcagagagcacggatagcagcatcccctggtttttaagggttcaggaactggctcatgattcgctgatcgctgcaaccagggcccaattagctaagaacgctaagaccagttccaacggcgagaacgtgcacctgggttccggtgacgggcagtctaaggactccggtcctttaccacaggttgagaaaaagctgaagtgtactgtggagggatgtgaccgtacttttgtgtggcctgcacactttaaataccacctcaagacacacaggaatgacagatcttttatttgcccagccgaggggtgcggaaagtctttctatgttttgcaaagactgaaagtccatatgcggactcataatggcgaaaagccgttcatgtgtcatgaatcaggttgcggcaagcagttcactaccgcagggaatcttaagaaccatcggcgcatacacacaggagagaagccttttctatgcgaagctcaaggctgcgggcgaagcttcgcagaatattcttccctccggaagcatctggtggtgcactctggggagaagcctcatcagtgtcaggtttgtgggaaaacgttctcccaaagtggtagtcgcaatgtgcatatgcggaagcatcacctgcagcttggtgccgcggggagccaggaacaagagcagaccgaagtgctcgctgagggctcacccaggtccctgtcgagtgtgcccgatgtaacccaccatttagtgacgatgcaatctgggcggcagtcttacgaagttagcgttcttacagcggtcaatccccaggagcttctaaatcagggggatctgactgagcgccgcacctag

SEQ ID NO: 85444 - DNA, 213 bp, Artificial Sequence
  derived and/or modified sequence
atgctgagtgacgaactggagtccaaacctgagttactggtccaatttgtgcagaacaccagcatacctctcggtcagggtctagtggaaagtgaggccaaagatatcacttgtctcagcctgctaccggtcacagaggccagcgaatgttccaggctaatgttacccgatgatacaaccaatcactctaatagcagcaaggaggtcccttag

SEQ ID NO: 85445 - DNA, 225 bp, Artificial Sequence
  derived and/or modified sequence
atgctctctgacgagctagaaagtaagccagaactactggtccagtttgtacaaaatacttcgattcccctgggacagggcctcgtcgaatccgaggcaaaagacatcacttgcctgagccttctgccagtgaccgaagcatccgaatgtagccggctgatgttgcctgacgacactaccaaccattcaaactcctctaaagaagtgccttccagcgcagtgtag

SEQ ID NO: 85446 - DNA, 381 bp, Artificial Sequence
  derived and/or modified sequence
atgttgagtgacgagctggaatccaagccagagctcttggtacaatttgtacagaatacctcaataccactgggacagggacttgtcgagagcgaagctaaagatataacctgcctgagcctccttccggttaccgaggcctctgagtgctcccggcttatgctaccggatgatacaacaaaccactcaaactcaagcaaagaggtgccttcttctgccgtgttgagatcgctgagggtcaacgtgggacctgacggggaggagacccgcgctcagaccgtccagaagtcacccgagtttctatcaacttctgaaagctcaagcctcctccaggacttacagccaagcgattctacatctttcatacttctgaacctgtag

SEQ ID NO: 85447 - DNA, 819 bp, Artificial Sequence
  derived and/or modified sequence
atgctgtctgacgagctggagagcaaaccagagctcttggtgcagttcgtgcaaaacacttcaattcccctgggacaaggtctagtggaaagtgaggctaaggatataacgtgcttatcattgttgccagtcaccgaggcgagtgagtgctctagactgatgctgcctgatgacacaactaatcatagtaactcatctaaagaagtcccatcaagcgcagtcctccgatccctccgagtgaacgtcggccctgacggggaagaaacgagagcacagactgtgcagaagtccccagagttcctgtcgacaagtgagtcttcatcattgttgcaggacctgcagccgtcagattccaccagcttcatcctgctgaatctaacacgcgctggattagggtcctcagcagaacatttagtgtttgtgcaggatgaagccgaggattctggcaatgattttctgtcttccgaatctacggactcttcaatcccttggttcctgcgggtgcaagagcttgcccatgattctctaatcgcagcaactcgcgcccagttggcaaagaacgctaaaacctcttccaatggtgagaatgtgcacctggggagcggcgacggccaatcaaaagactctgggccactgccccaggtggaaaaaaagctgaagtgtaccgtggaaggttgcgaccgcacattcgtctggccagctcactttaaatatcaccttaaaacccaccgcagattgtgggaaaagttgttgtgcgccgctgaggcggaaggcgcccacgaggacccacaatggagagaagcattgtacgttccatag

SEQ ID NO: 85448 - DNA, 1296 bp, Artificial Sequence
  derived and/or modified sequence
atgctgagtgatgagctggagagcaagccagagctgctggtgcagtttgtgcagaacaccagcatccccctgggccagggcctggtggagagcgaggccaaggacatcacctgcctgagcctgctgcctgtgacagaggcctctgaatgttcccggctgatgctgcctgatgacaccaccaaccacagcaacagcagcaaggaggtgcccagcagcgctgtgctgcggagcctgcgggtgaatgtgggcccagatggagaggagacccgggcccagacagtgcagaagagccctgagttcctgagcaccagcgagagcagcagcctgctgcaggacctgcagcccagcgacagcaccagcttcatcctgctgaacctgaccagggctggcctgggcagcagcgctgagcacctggtgtttgtgcaggatgaagctgaggacagcggaaatgacttcctgagcagcgagagcacagacagcagcatcccctggttcctgcgggtgcaggagctggcccatgacagcctgattgctgccacccgggcccagctggccaagaatgccaagaccagcagcaatggagaaaatgtgcacctgggcagcggagatggccagagcaaggacagcggccccctgccccaggtggagaagaagctgaagtgcaccgtggagggctgtgacaggacctttgtgtggccagcccacttcaagtaccacctgaagacccacagaaatgacaggagcttcatctgcccagctgagggctgtgggaagagcttctacgtgctgcagaggctgaaggtgcacatgaggacccacaacggggagaagcccttcatgtgccacgagagcggctgtgggaagcagttcaccacagctggcaacctgaagaaccaccggcgcatccacactggagagaagcccttcctgtgtgaggcccagggctgcggccgcagctttgctgagtacagcagcctgaggaagcacctggtggtgcacagcggggagaagccccaccagtgccaggtgtgtgggaagaccttcagccagagcggcagcagaaatgtgcacatgaggaagcaccacctgcagctgggcgccgccggcagccaggagcaggagcagacagaggtgctggccgagggcagccccaggagcctgagctctgtgcctgatgtgacccaccacctggtgaccatgcagagcggccggcagagctatgaggtgtctgtgctgacagctgtgaacccccaggagctgctgaaccagggcgacctgacagaaagaagaacatag

SEQ ID NO: 85449 - DNA, 213 bp, Artificial Sequence
  derived and/or modified sequence
atgctgagtgatgagctggagagcaagccagagctgctggtgcagtttgtgcagaacaccagcatccccctgggccagggcctggtggagagcgaggccaaggacatcacctgcctgagcctgctgcctgtgacagaggcctctgaatgttcccggctgatgctgcctgatgacaccaccaaccacagcaacagcagcaaggaggtgccctag

SEQ ID NO: 85450 - DNA, 225 bp, Artificial Sequence
  derived and/or modified sequence
atgctgagtgatgagctggagagcaagccagagctgctggtgcagtttgtgcagaacaccagcatccccctgggccagggcctggtggagagcgaggccaaggacatcacctgcctgagcctgctgcctgtgacagaggcctctgaatgttcccggctgatgctgcctgatgacaccaccaaccacagcaacagcagcaaggaggtgcccagcagcgctgtgtag

SEQ ID NO: 85451 - DNA, 381 bp, Artificial Sequence
  derived and/or modified sequence
atgctgagtgatgagctggagagcaagccagagctgctggtgcagtttgtgcagaacaccagcatccccctgggccagggcctggtggagagcgaggccaaggacatcacctgcctgagcctgctgcctgtgacagaggcctctgaatgttcccggctgatgctgcctgatgacaccaccaaccacagcaacagcagcaaggaggtgcccagcagcgctgtgctgcggagcctgcgggtgaatgtgggcccagatggagaggagacccgggcccagacagtgcagaagagccctgagttcctgagcaccagcgagagcagcagcctgctgcaggacctgcagcccagcgacagcaccagcttcatcctgctgaacctgtag

SEQ ID NO: 85452 - DNA, 819 bp, Artificial Sequence
  derived and/or modified sequence
atgctgagtgatgagctggagagcaagccagagctgctggtgcagtttgtgcagaacaccagcatccccctgggccagggcctggtggagagcgaggccaaggacatcacctgcctgagcctgctgcctgtgacagaggcctctgaatgttcccggctgatgctgcctgatgacaccaccaaccacagcaacagcagcaaggaggtgcccagcagcgctgtgctgcggagcctgcgggtgaatgtgggcccagatggagaggagacccgggcccagacagtgcagaagagccctgagttcctgagcaccagcgagagcagcagcctgctgcaggacctgcagcccagcgacagcaccagcttcatcctgctgaacctgaccagggctggcctgggcagcagcgctgagcacctggtgtttgtgcaggatgaagctgaggacagcggaaatgacttcctgagcagcgagagcacagacagcagcatcccctggttcctgcgggtgcaggagctggcccatgacagcctgattgctgccacccgggcccagctggccaagaatgccaagaccagcagcaatggagaaaatgtgcacctgggcagcggagatggccagagcaaggacagcggccccctgccccaggtggagaagaagctgaagtgcaccgtggagggctgtgacaggacctttgtgtggccagcccacttcaagtaccacctgaagacccaccggcggctgtgggagaagctgctgtgtgccgctgaggccgagggcgcccacgaggacccccagtggagggaggccctgtatgtgccctag

SEQ ID NO: 85453 - DNA, 1296 bp, Artificial Sequence
  derived and/or modified sequence
atgctgagcgacgagctggagagcaagcccgagctgctggtgcagtttgtgcaaaatacaagtatccctctcggtcagggtctggtcgagtcagaagccaaggacatcacatgcttgtccttgctacctgtgacagaggccagcgagtgttctcgattaatgctgcccgatgacactacaaatcactctaatagctcaaaggaggtgcctagttctgctgttctccgatcgctgcgcgtcaatgttggacctgatggggaggaaacaagagcccagacggtgcaaaagtcaccggaatttctttctactagcgaatccagcagcctcctccaggatttgcaaccctccgactccacctcattcattttgctcaatctcacacgtgcaggtctaggcagctcagccgagcacttggtgttcgtgcaggacgaggccgaagacagcggcaacgactttctgtcttctgagagcacggatagcagtattccttggtttcttcgagtccaggagttggcccatgattctttgatagccgctacccgagcccagttggccaagaatgctaagacatcgagtaacggagagaacgtccacctgggttccggagacggacagtctaaagattccggcccactgccccaggtagagaagaagttgaagtgcacagttgaggggtgtgatagaactttcgtttggcccgcacattttaagtaccacctgaagactcacaggaatgataggtccttcatttgtcctgctgagggctgcggcaaaagcttctatgttctgcaacgcctgaaggtgcatatgcgcacacacaacggtgagaaacccttcatgtgccacgagtcggggtgtggaaaacagtttaccaccgctggaaatctgaagaaccatagacgcattcataccggcgagaagcccttcttgtgtgaagcgcaaggctgcggtaggtcgttcgcggaatactctagcctgcgtaagcacctggtcgtccactcaggcgaaaagccacaccagtgtcaggtttgcggcaagaccttctcacagagtggcagccggaacgtccatatgcgcaagcatcacttacaattaggggccgccggatctcaggaacaggaacagactgaggtgctcgccgagggttcaccacggagcctgtccagcgtccccgacgtgactcatcacctggtgactatgcagtccggtaggcagagttacgaagttagcgtcttgacagcagtaaacccccaggaattactaaatcagggcgacctgactgagagacgtacatag

SEQ ID NO: 85454 - DNA, 213 bp, Artificial Sequence
  derived and/or modified sequence
atgctgagcgacgagctggagagcaagcccgagctgctggtgcagtttgtccagaatactagcatccctttgggccaggggctggtggagtcagaggctaaagacatcacgtgtctgtctctgctgcctgttaccgaggccagcgagtgttcgcgtctcatgctcccagacgacaccactaaccatagcaattcctcaaaagaggtaccctag

SEQ ID NO: 85455 - DNA, 225 bp, Artificial Sequence
  derived and/or modified sequence
atgctgagcgacgagctggagagcaagcccgagctgctggtgcagtttgttcaaaatacctcaattcctctcggacagggattggtagagtctgaggccaaggatattacttgtttaagccttctacctgtgaccgaggcttccgagtgtagtcgcttgatgttgccagacgacacaacaaaccactctaacagctccaaggaggtgccttccagtgccgtgtag

SEQ ID NO: 85456 - DNA, 381 bp, Artificial Sequence
  derived and/or modified sequence
atgctgagcgacgagctggagagcaagcccgagctgctggtgcagttcgtacagaatacatctatcccactcgggcagggcctggttgaatccgaagccaaggatattacatgtttaagtctgctgcctgtgaccgaggccagcgagtgcagtaggctgatgcttcccgatgatactactaatcacagcaacagcagtaaagaggtcccatcctctgccgtcttgcggtccctgcgcgtcaacgttggacctgatggagaggaaactcgtgctcagacagtgcagaagtcacccgaatttttgtccaccagcgagtcatcttccttacttcaggatctccaaccctcagattctacgtctttcatattgcttaatttatag

SEQ ID NO: 85457 - DNA, 819 bp, Artificial Sequence
  derived and/or modified sequence
atgctgagcgacgagctggagagcaagcccgagctgctggtgcagttcgtgcaaaatacctccattccactggggcagggcctcgtcgaaagcgaagcaaaggatattacatgtctttcattgctgcccgtcacggaagctagcgaatgctcccgcctgatgctgcctgatgatacaacgaaccactctaatagtagtaaagaggttccttcctccgccgtgctgaggagcctgagggtcaatgtgggacccgacggcgaagagactcgagcccagactgtccaaaagtccccagagttcctttcaacctcagagtcctcaagtctcctccaggacttacagccgagtgattcaacaagctttatcttgttaaacttgacccgagcaggtctggggtcgtctgccgagcacttggtcttcgtgcaggacgaggccgaggactcaggtaacgattttttatcatctgagtcaacagattcctctataccttggtttctgagagtccaggaattggcccatgactcacttattgcagccacacgcgcccagttggccaagaacgctaagactagttctaatggggagaacgtccatttaggatctggggacgggcagtccaaagattccggtccattaccgcaggtggagaaaaaactgaaatgtactgtggaaggatgcgaccgcacttttgtctggcctgctcactttaagtatcatcttaagacccatcgaagactatgggagaagctactttgcgccgccgaagcggaaggtgcgcacgaggacccacagtggagggaggcactgtacgtaccctag

SEQ ID NO: 85458 - DNA, 1296 bp, Artificial Sequence
  derived and/or modified sequence
atgctgtctgatgagctcgagtctaagcctgaactactggtgcaattcgtgcagaacacatcaatcccgttaggtcaaggactggttgagagtgaagccaaagatattacctgtctgtcgctgcttccagtgaccgaggcctccgagtgctcccgcctgatgttgcccgacgacacaaccaaccactccaatagtagcaaggaggtgccatcctctgctgttctcaggtccctaagggtgaacgtcggaccagacggggaagagacccgggctcagactgtccagaaatctccagaatttctctctacctccgaatccagtagcctgctccaggatctgcagccctcagatagcacgtcattcatacttttgaatctcacccgggcagggctgggatcctccgccgaacacttggtttttgtccaggatgaggcggaggattccggtaacgattttctttccagcgaatctactgacagcagcattccgtggttcttaagagtgcaggagttggcccacgacagcctgatcgccgcaaccagggcccagctggccaagaacgctaaaacgtcgagtaacggagaaaatgtgcatttggggtccggtgatggccagtcaaaagactcagggcctttgccacaggttgagaaaaagctgaagtgcacggttgaaggatgtgaccgcacatttgtgtggcctgctcatttcaagtaccacctaaagacccacagaaatgaccggtcattcatttgcccagctgagggatgtgggaagtctttctatgtactccagcggctaaaggtgcatatgagaacgcacaacggcgagaaaccttttatgtgccacgaatctggttgcggcaaacagtttacgaccgctggaaaccttaaaaatcaccgccgtatccacaccggcgagaagccatttctttgtgaggcgcaagggtgtggtcgctcatttgcggagtactcctccctgcgcaagcatctggtggttcatagcggtgagaagccacatcaatgccaggtgtgcggtaagactttcagtcaatctgggagccggaacgtgcatatgaggaaacaccatctacagctcggcgcagccggaagccaggaacaggaacagaccgaggtgcttgctgaagggagtccccgatcactgagttcagtcccagacgtgacacatcacctcgtgactatgcagtccggtaggcagtcttatgaagtgtcagtgctgacagccgtcaacccacaggagctactaaaccaaggggatctgactgagcgcagaacctag

SEQ ID NO: 85459 - DNA, 213 bp, Artificial Sequence
  derived and/or modified sequence
atgctgtccgatgagctggagtcgaaaccagagttgcttgtccagtttgtgcagaacaccagcatcccgcttgggcaagggctagttgaaagtgaagccaaagatatcacctgtttgagtttgctgcctgtaactgaggcatccgaatgttccagactcatgctgcccgacgataccacaaaccacagcaattcgtccaaagaagtcccttag

SEQ ID NO: 85460 - DNA, 225 bp, Artificial Sequence
  derived and/or modified sequence
atgttgagtgacgaactggaatcgaagccagaattactggtccaattcgtccagaacacctcaatccccctcggtcagggtctagtcgaatccgaggctaaggatattacatgcttgtccttgctgcccgtgaccgaggcgtctgagtgttctagactcatgctaccggacgacaccaccaaccacagtaatagctctaaagaggttccctcatctgccgtgtag

SEQ ID NO: 85461 - DNA, 381 bp, Artificial Sequence
  derived and/or modified sequence
atgctcagcgatgaattggagagtaagccagagctgctagtccagtttgtccagaacacgagtatccctcttggacagggattagtggagagcgaggccaaggatattacctgcttatctttgctgcccgttacagaagctagtgagtgcagtcggctgatgttacctgacgacaccacgaaccattctaacagtagcaaagaagtgcccagcagcgcggttctgcgctctctgagggtcaacgtggggccagacggggaggaaaccagagcccagaccgtccaaaaatcccccgaatttctgtccacaagtgagtcctcctctctcctgcaggatctgcagccctcagactcgacaagctttatcttgctgaatctctag

SEQ ID NO: 85462 - DNA, 819 bp, Artificial Sequence
  derived and/or modified sequence
atgctcagtgacgagctcgaaagcaaaccggaactgctagtgcagttcgtacagaacacaagtattcccctgggccaaggtctggtcgagagtgaggcaaaggacattacttgcctttccctgctgcctgtaaccgaggcttctgagtgtagcagactgatgctgcctgatgacaccacaaatcattccaatagctccaaagaagttccatcctcagccgtacttcgcagcctcagggtcaatgtcggaccagacggtgaggagaccagggctcagacagttcagaaatcccccgagtttttatctacgtcagagtctagctcccttctacaagacctccaaccgtccgactcgaccagcttcatattgctcaaccttacgcgggcaggcctgggttctagcgcagagcacctggtcttcgtgcaagacgaagctgaagacagcggcaacgacttcctctcttccgaaagcactgactcctcgataccatggttcctccgcgtgcaagaacttgctcacgatagcctgattgctgccaccagagcacaactggccaagaacgctaaaacctcctctaacggcgaaaacgtgcatctggggtctggcgacggacaatctaaggatagtggccctctgcctcaggtagagaagaaattaaagtgtaccgtggagggttgtgatcggacgtttgtttggcctgcccattttaaataccatctgaagactcatagaagactgtgggaaaagttgctgtgcgccgcagaagccgagggcgcacatgaggatccccagtggcgcgaagccctctatgtgccatag

SEQ ID NO: 85463 - DNA, 2293 bp, Artificial Sequence
  derived and/or modified sequence
gccaaacttcctgtcccgcgctcgagctgcttccggcgggagccggaagacgctgtgtgtggacggaattcgggaccgactgacggccggccggcttcccggaactggaaggttacattgattacccacctagtacaacatcttacgggaagagcatagtatttcctagaggaatatgaacataacaggaaggtatcattggctctgaattaaatttgaacttgtcccctgaatagctacaggttttggaagctgaatcaatgttatcagatgagttagaatccaaaccagagctcctggtacagtttgttcagaatacgtccatcccattgggacaggggcttgtagaatcagaagctaaagatattacttgcttgtccctccttcccgtgactgaagcctcagaatgcagtcggctaatgttaccagatgatactacaaatcattctaactcctccaaggaggtcccttcctcagctgttttgagaagccttcgggtgaatgtgggtccagacggagaggagacgagagctcagactgtacagaaatccccggagtttttgtccacttcagagtcttctagcttgttgcaagatctacagccaagtgatagcacttcttttattcttcttaacctaacaagagcaggtctgggctcttcagctgagcacttagtgtttgtacaggatgaggcagaagattcagggaatgatttcctctccagtgagagcacagacagtagcattccatggttcctccgggttcaggagttggcccatgacagtttgattgctgctactcgtgcacaactggcaaagaatgcaaaaaccagcagcaatggagaaaatgtccaccttggttctggtgatgggcagtcaaaagattctgggccccttcctcaagtggaaaagaagctcaagtgtacagttgaaggttgtgaccggacatttgtatggccagctcactttaaataccacctcaagactcatcgaaatgaccgctccttcatctgtcctgcagaaggttgtgggaaaagcttctatgtgctgcagaggctgaaggtgcacatgaggacccacaatggagagaagccctttatgtgccatgagtctggctgtggtaagcagtttactacagctggaaacctgaagaaccaccggcgcatccacacaggagagaaacctttcctttgtgaagcccaaggatgtggccgttcctttgctgagtattctagcctccgaaaacatctggtggttcactcaggagagaagcctcatcagtgccaagtctgtgggaagaccttctctcagagtggaagcaggaatgtgcatatgagaaagcatcacctgcagctgggagcagctgggagtcaagagcaggagcaaactgaggtgcttgctgaaggatccccacgttccctgtcttcagtgcctgatgtgacacatcacctggtgaccatgcagtcagggaggcaatcatatgaagtttctgtcttaactgcagtaaatccacaagagttactaaaccaaggagatttaactgaaagacggacatgagcgtgggtgctgactcctggaagagcaactctatctgatctcaaaatgcgtatactgggaacaggatgccttagcccacaacagaaccagaatgaatctttgaaggcacaagactctgcttttgccactcttcctctttcctggtatagaagatggatgtaggagagcttcttttctaactaccatctgatcagacaaggaatgaagcaatgactgtgggctgggaaactgtacctacctctcttcccactgcaaatttctgggatagaccaaaagtgaatttgattatgtgttggctgaagttcttcattctgactgttgaggggaggttttcctttgaagagttttcatcccagactcagctgtcttttcacatggatgaaataattcctgctaccaacaacagagcttcaccaggaagttgagttttcaagatgccttgttgctttgaagaagggagtgatgtcaattctcttgttacattctccctttagcaacctgagtaagagactctctgccactgggctgcaaaaaaataaattacttgaatctccccttggcccaggctgaggtactatcttgtcctatacacttctacttggtcactttgctttcttcgttaatggaacatacagtagcatgttaagagggatttcatgtttttgtttttttaaagttaaaaattacatgatgcagagattcaggttttcctttaaataaacaaaacagcccagtca

SEQ ID NO: 85464 - DNA, 537 bp, Artificial Sequence
  derived and/or modified sequence
ttttatgggttttgatgcctgttgagcttgttgtattttaaaagaagtgtttcggtttgaattctttatttgcttgcttgttgtgattttttttgtatatgtaaagaagtgtctttatgtacctgtgttttcccactgctcttaatgccccctctctcttttttacccctattctaggttacattgattacccacctagtacaacatcttacgggaagagcatagtatttcctagaggaatatgaacataacaggaaggtatcattggctctgaattaaatttgaacttgtcccctgaatagctacaggttttggaagctgaatcaatgttatcagatgagttagaatccaaaccagagctcctggtacagtttgttcagaatacgtccatcccattgggacaggggcttgtagaatcagaagctaaagatattacttgcttgtccctccttcccgtgactgaagcctcagaatgcagtcggctaatgttaccagatgatactacaaatcattctaactcctccaaggaggtccctt

SEQ ID NO: 85465 - DNA, 841 bp, Artificial Sequence
  derived and/or modified sequence
tggcgggcccgggagcggccagtctgaagccctgcggctttggcccttcccctcgcgggtttttaggggcgatgttcttgctcctttgcttggttttgggggtagggatataggaacagactgtcctgagaaagccagagtcagcgagtccccggggcgggggctcttggactgcacccgcagccggggcctgcctacggaccttggggccttatttctgaggcctttgtggtgtggggtagaggatgccaggaggccttgccctgaatgtttcagtccagagctaccctctcctttcataccacttactttctgggtttggaaaagggacagctgcctactcggctgggctgggtcgcccgtttctcctttgcctgtttgagatgctgttggatatacatgtggagatacctagcaagcagttagaaatgaaggtttggagttcagaagagatgactagagaaaaatgttacattgattacccacctagtacaacatcttacgggaagagcatagtatttcctagaggaatatgaacataacaggaaggtatcattggctctgaattaaatttgaacttgtcccctgaatagctacaggttttggaagctgaatcaatgttatcagatgagttagaatccaaaccagagctcctggtacagtttgttcagaatacgtccatcccattgggacaggggcttgtagaatcagaagctaaagatattacttgcttgtccctccttcccgtgactgaagcctcagaatgcagtcggctaatgttaccagatgatactacaaatcattctaactcctccaaggaggtcccttcctcagctgtttt

SEQ ID NO: 85466 - DNA, 595 bp, Artificial Sequence
  derived and/or modified sequence
gtgtgtggacggaattcgggaccgactgacggccggccggcttcccggaactggaaggtgagctccgaggttacattgattacccacctagtacaacatcttacgggaagagcatagtatttcctagaggaatatgaacataacaggaaggtatcattggctctgaattaaatttgaacttgtcccctgaatagctacaggttttggaagctgaatcaatgttatcagatgagttagaatccaaaccagagctcctggtacagtttgttcagaatacgtccatcccattgggacaggggcttgtagaatcagaagctaaagatattacttgcttgtccctccttcccgtgactgaagcctcagaatgcagtcggctaatgttaccagatgatactacaaatcattctaactcctccaaggaggtcccttcctcagctgttttgagaagccttcgggtgaatgtgggtccagacggagaggagacgagagctcagactgtacagaaatccccggagtttttgtccacttcagagtcttctagcttgttgcaagatctacagccaagtgatagcacttcttttattcttcttaacct

SEQ ID NO: 85467 - protein, 405 aa, Artificial Sequence
  derived and/or modified sequence
MLSDELESKPELLVQFVQNTSIPLGQGLVESEAKDITCLSLLPVTEASECSRLMLPGLGSSAEHLVFVQDEAEDSGNDFLSSESTDSSIPWFLRVQELAHDSLIAATRAQLAKNAKTSSNGENVHLGSGDGQSKDSGPLPQVEKKLKCTVEGCDRTFVWPAHFKYHLKTHRNDRSFICPAEGCGKSFYVLQRLKVHMRTHNGEKPFMCHESGCGKQFTTAGNLKNHRRIHTGEKPFLCEAQGCGRSFAEYSSLRKHLVVHSGEKPHQCQVCGKTFSQSGSRNVHMRKHHLQLGAAGSQEQEQTAEPLMGSSLLEEASVPSKNLVSMNSQPSLGGESLNLPNTNSILGVDDEVLAEGSPRSLSSVPDVTHHLVTMQSGRQSYEVSVLTAVNPQELLNQGDLTERRT

SEQ ID NO: 85468 - DNA, 1218 bp, Artificial Sequence
  derived and/or modified sequence
atgctgagcgacgagctggagagcaagcccgagctgctggtgcagttcgtgcagaacaccagcatccccctgggccagggcctggtggagagcgaggccaaggacatcacctgcctgagcctgctgcccgtgaccgaggccagcgagtgcagcagactgatgctgcccggcctgggcagcagcgccgagcacctggtgttcgtgcaggacgaggccgaggacagcggcaacgacttcctgagcagcgagagcaccgacagcagcatcccctggttcctgagagtgcaggagctggcccacgacagcctgatcgccgccaccagagcccagctggccaagaacgccaagaccagcagcaacggcgagaacgtgcacctgggcagcggcgacggccagagcaaggacagcggccccctgccccaggtggagaagaagctgaagtgcaccgtggagggctgcgacagaaccttcgtgtggcccgcccacttcaagtaccacctgaagacccacagaaacgacagaagcttcatctgccccgccgagggctgcggcaagagcttctacgtgctgcagagactgaaggtgcacatgagaacccacaacggcgagaagcccttcatgtgccacgagagcggctgcggcaagcagttcaccaccgccggcaacctgaagaaccacagaagaatccacaccggcgagaagcccttcctgtgcgaggcccagggctgcggcagaagcttcgccgagtacagcagcctgagaaagcacctggtggtgcacagcggcgagaagccccaccagtgccaggtgtgcggcaagaccttcagccagagcggcagcagaaacgtgcacatgagaaagcaccacctgcagctgggcgccgccggcagccaggagcaggagcagaccgccgagcccctgatgggcagcagcctgctggaggaggccagcgtgcccagcaagaacctggtgagcatgaacagccagcccagcctgggcggcgagagcctgaacctgcccaacaccaacagcatcctgggcgtggacgacgaggtgctggccgagggcagccccagaagcctgagcagcgtgcccgacgtgacccaccacctggtgaccatgcagagcggcagacagagctacgaggtgagcgtgctgaccgccgtgaacccccaggagctgctgaaccagggcgacctgaccgagagaagaacctag

SEQ ID NO: 85469 - DNA, 1218 bp, Artificial Sequence
  derived and/or modified sequence
atgctgtcggacgaactggaatcaaaacccgagctgctggtgcaattcgtccaaaatacctccatccccctggggcagggcctggtggagagtgaagcaaaagatatcacctgcctatccctgcttccagtgacggaggcaagcgagtgtagcaggctgatgctgcccggtctaggttccagtgctgagcacctcgtgttcgtccaggatgaggctgaagattcgggcaacgacttcctgtcaagcgagtccacagacagtagcatcccctggttcctccgggttcaggagttggcccatgactctctgatagccgccactcgcgcgcaactggccaagaatgcaaaaacctcgtccaatggcgagaacgtgcacctcggatcgggagatgggcagtcgaaagatagcgggcccctcccccaggtggagaagaaattgaagtgcacagtcgagggctgcgatagaacctttgtgtggcctgcccattttaaatatcacctgaagacccacagaaatgatagaagcttcatctgcccggcggaggggtgcggcaagagtttctacgtgcttcagagactaaaggtccatatgagaactcataatggtgaaaagcccttcatgtgtcatgaatctggttgcgggaagcagtttacaacggcgggcaacctcaagaaccatcgcagaattcatactggggagaagccatttctttgcgaagctcagggatgtggccggagttttgccgagtatagctctctcagaaagcacctcgtggtgcatagcggggaaaagccgcatcagtgccaagtctgcgggaagactttcagccagagcggaagtcggaatgtccatatgcggaaacatcacttgcaactgggagccgccgggagccaagagcaggagcagacagcggaaccactcatgggttcatctttactggaagaggctagtgtgccctctaagaacttagtgtcaatgaactcgcaaccttccctgggcggggagtctttgaaccttcctaatactaattcaatccttggcgtcgatgatgaggtgctagccgaaggaagcccaaggtccctttctagtgtgcccgatgtgacccaccatctcgtgacaatgcaatccggcagacaaagctacgaggtgagcgtactcacagcagtgaaccctcaggagctgttgaaccaaggtgacctgactgagaggcgaacatag

SEQ ID NO: 85470 - DNA, 1218 bp, Artificial Sequence
  derived and/or modified sequence
atgctgagtgatgagctggagagcaagccagagctgctggtgcagtttgtgcagaacaccagcatccccctgggccagggcctggtggagagcgaggccaaggacatcacctgcctgagcctgctgcctgtgacagaggcctctgaatgttcccggctgatgctgcccggcctgggcagcagcgctgagcacctggtgtttgtgcaggatgaagcagaagattctggaaatgacttcctgagcagcgagagcacagacagcagcatcccctggttcctgcgggtgcaggagctggcccatgacagcctgattgctgccacccgggcccagctggccaagaatgccaagaccagcagcaatggagaaaatgtgcacctgggcagcggagatggccagagcaaggacagcggccccctgccccaggtggagaagaagctgaagtgcaccgtggagggctgtgacaggacctttgtgtggccagcccacttcaagtaccacctgaagacccacagaaatgaccgctccttcatctgcccagctgagggctgcggcaagagcttctacgtgctgcagaggctgaaggtgcacatgaggacccacaatggagagaagcccttcatgtgccatgaaagtggctgcggcaagcagttcaccacagctggcaacctgaagaaccaccggcgcatccacactggagagaagcccttcctgtgtgaggcccagggctgcggccgcagctttgctgagtacagcagcctgaggaagcacctggtggtgcacagcggggagaagccccaccagtgccaggtgtgtgggaagaccttcagccagagcggcagcagaaatgtgcacatgaggaagcaccacctgcagctgggcgctgctggcagccaggagcaggagcagacagctgagcccctgatgggcagcagcctgctggaggaggcctctgtgcccagcaagaacctggtgtccatgaacagccagcccagcctgggcggggagagcctgaacctgcccaacaccaacagcatcctgggcgtggatgatgaggtgctggccgagggcagccccaggagcctgagctctgtgcctgatgtgacccaccacctggtgaccatgcagagcggccggcagagctatgaggtgtctgtgctgacagctgtgaacccccaggagctgctgaaccagggcgacctgacagaaagaagaacatag

SEQ ID NO: 85471 - DNA, 1218 bp, Artificial Sequence
  derived and/or modified sequence
atgctgagcgacgagctggagagcaagcccgagctgctggtgcagtttgtgcagaacacgagcatccccttaggccagggcctggttgagagtgaagccaaagacataacatgcttgagtctgctccccgttactgaggcttccgagtgcagccgccttatgctgcctggtctgggaagctccgccgagcatctggttttcgtgcaggatgaagctgaagacagtggaaacgattttctgtctagtgagtccaccgacagttcaattccctggtttttacgggtccaagaactggcacatgatagcctcatcgccgcgaccagggcgcagcttgctaagaacgctaagactagctctaacggcgagaacgtccacttgggatcaggagacggacagagcaaggactcgggacccctgccccaggttgaaaaaaagctcaaatgcaccgttgaaggctgcgatcgaacgtttgtatggcctgcacactttaagtaccatttgaaaacacacaggaacgatcgtagcttcatctgccccgccgagggttgcggtaagagtttctacgttttacagagattgaaggtgcacatgcgcacacacaatggagagaaaccctttatgtgccatgagtcagggtgtggcaagcagttcaccacagccgggaatctcaaaaaccaccggcggatacataccggcgaaaaaccctttctctgcgaggcccagggttgcggcaggtcgtttgcggagtatagctccttgcggaagcacctggttgtccattctggagagaagccccaccaatgtcaagtctgcggaaaaactttcagccagagcgggtccagaaatgtgcatatgcgaaaacaccatcttcaattaggcgctgctggttcacaagaacaggagcagacggccgagcctctcatgggatcatcacttttagaggaggccagtgtgccttccaagaatcttgtgtcgatgaattctcagccctccctgggcggcgagagtttaaaccttcctaatacaaactctattctgggggttgacgatgaagtcctcgctgaaggttcaccacggagtctgtcatcggtcccggacgtgacccaccacctggtcaccatgcagagcggtagacagagctatgaggtctcagtgctgactgccgttaacccccaggagctgctgaatcagggagatttaactgaacgccgcacctag

SEQ ID NO: 85472 - DNA, 1218 bp, Artificial Sequence
  derived and/or modified sequence
atgctgtccgatgaactggagtccaaacctgagcttttggtgcaattcgtgcaaaatacgtcaatacctctggggcaggggcttgtcgaaagtgaggctaaggatatcacatgtctctcactcctccctgtgaccgaagcctcagagtgttctaggctgatgctgcctggcctggggtccagcgccgaacacctggtttttgtgcaggatgaggccgaagattctgggaatgactttctgagctccgagtcaacagattccagcattccttggtttctccgggtgcaagaactggcccatgattcactcatcgccgctacgagagcacagctggctaagaatgcaaagacttcttcaaacggcgagaacgtgcacttggggagtggcgatggtcaatcaaaggactctgggccattacctcaagtggagaagaaactgaaatgtacagtggaaggctgcgaccgcaccttcgtgtggcccgctcactttaagtatcatctcaagacccaccggaacgaccgctctttcatttgcccagctgaaggctgtggaaagagcttttacgtgctgcagagactcaaagtgcacatgcgaacccacaacggcgaaaagccattcatgtgtcacgaaagtggctgcggcaagcagttcacgactgccggtaatctcaaaaaccatcgcagaattcacaccggggaaaaacccttcctgtgcgaagctcaggggtgtgggagaagttttgccgaatactcctctctgagaaagcacctggtggtccattccggggaaaagcctcaccagtgtcaagtgtgtggaaaaactttttcccaaagcggcagtagaaacgtgcatatgagaaagcaccacttacagttaggagccgctggcagccaggaacaggagcagacagccgagcctctgatgggaagctccctcctggaggaagccagtgtgcctagcaagaacctagtgagtatgaactctcagccttcactcgggggagagtcgctaaatctccctaataccaactctatcctgggcgtggacgatgaggtgctggcggagggaagtcccagaagcctttccagtgttcctgatgtcacacatcacttagtgacaatgcagagcggccgtcaaagctacgaggtgtcggttttaacggctgttaacccacaggaactgctcaatcaaggggacttgaccgaacggaggacgtag

SEQ ID NO: 85473 - DNA, 1722 bp, Artificial Sequence
  derived and/or modified sequence
aggagtcccgaaggccgagagtgagtgagtgagtgggagcggggcggctgcggctcctcctgtccggggcggagccctgcgtcgcgggcctggggaggccccgccagcacccttgacgtctgggtcccgagcagtgcggcagccacacgacactgaggcgagcgagtgggtgtgtgcgtggggggtcagccaaacttcctgtcccgcgctcgagctgcttccggcgggagccggaagacgctgtgtgtggacggaattcgggaccgactgacggccggccggcttcccggaactggaaggttacattgattacccacctagtacaacatcttacgggaagagcatagtatttcctagaggaatatgaacataacaggaaggtatcattggctctgaattaaatttgaacttgtcccctgaatagctacaggttttggaagctgaatcaatgttatcagatgagttagaatccaaaccagagctcctggtacagtttgttcagaatacgtccatcccattgggacaggggcttgtagaatcagaagctaaagatattacttgcttgtccctccttcccgtgactgaagcctcagaatgcagtcggctaatgttaccaggtctgggctcttcagctgagcacttagtgtttgtacaggatgaggcagaagattcagggaatgatttcctctccagtgagagcacagacagtagcattccatggttcctccgggttcaggagttggcccatgacagtttgattgctgctactcgtgcacaactggcaaagaatgcaaaaaccagcagcaatggagaaaatgtccaccttggttctggtgatgggcagtcaaaagattctgggccccttcctcaagtggaaaagaagctcaagtgtacagttgaaggttgtgaccggacatttgtatggccagctcactttaaataccacctcaagactcatcgaaatgaccgctccttcatctgtcctgcagaaggttgtgggaaaagcttctatgtgctgcagaggctgaaggtgcacatgaggacccacaatggagagaagccctttatgtgccatgagtctggctgtggtaagcagtttactacagctggaaacctgaagaaccaccggcgcatccacacaggagagaaacctttcctttgtgaagcccaaggatgtggccgttcctttgctgagtattctagcctccgaaaacatctggtggttcactcaggagagaagcctcatcagtgccaagtctgtgggaagaccttctctcagagtggaagcaggaatgtgcatatgagaaagcatcacctgcagctgggagcagctgggagtcaagagcaggagcaaactgctgagccactaatgggcagtagtttgcttgaagaggcttcagtacccagtaaaaacctggtgtctatgaattcccagcccagccttggtggagagtccttgaacctaccaaataccaattctatcctgggagttgatgatgaggtgcttgctgaaggatccccacgttccctgtcttcagtgcctgatgtgacacatcacctggtgaccatgcagtcagggaggcaatcatatgaagtttctgtcttaactgcagtaaatccacaagagttactaaaccaaggagatttaactgaaagacggacatgagcgtgggtgctgactcctggaagagcaactctatctgatctcaaaatgcgtatact

SEQ ID NO: 85474 - DNA, 2461 bp, Artificial Sequence
  derived and/or modified sequence
aattcgggaccgactgacggccggccggcttcccggaactggaaggttacattgattacccacctagtacaacatcttacgggaagagcatagtatttcctagaggaatatgaacataacaggaaggtatcattggctctgaattaaatttgaacttgtcccctgaatagctacaggttttggaagctgaatcaatgttatcagatgagttagaatccaaaccagagctcctggtacagtttgttcagaatacgtccatcccattgggacaggggcttgtagaatcagaagctaaagatattacttgcttgtccctccttcccgtgactgaagcctcagaatgcagtcggctaatgttaccagatgatactacaaatcattctaactcctccaaggaggtcccttcctcagctgttttgagaagccttcgggtgaatgtgggtccagacggagaggagacgagagctcagactgtacagaaatccccggagtttttgtccacttcagagtcttctagcttgttgcaagatctacagccaagtgatagcacttcttttattcttcttaacctaacaagagcaggtctgggctcttcagctgagcacttagtgtttgtacaggatgaggcagaagattcagggaatgatttcctctccagtgagagcacagacagtagcattccatggttcctccgggttcaggagttggcccatgacagtttgattgctgctactcgtgcacaactggcaaagaatgcaaaaaccagcagcaatggagaaaatgtccaccttggttctggtgatgggcagtcaaaagattctgggccccttcctcaagtggaaaagaagctcaagtgtacagttgaaggttgtgaccggacatttgtatggccagctcactttaaataccacctcaagactcatcgaaggttgtgggaaaagcttctatgtgctgcagaggctgaaggtgcacatgaggacccacaatggagagaagccctttatgtgccatgagtctggctgtggtaagcagtttactacagctggaaacctgaagaaccaccggcgcatccacacaggagagaaacctttcctttgtgaagcccaaggatgtggccgttcctttgctgagtattctagcctccgaaaacatctggtggttcactcaggagagaagcctcatcagtgccaagtctgtgggaagaccttctctcagagtggaagcaggaatgtgcatatgagaaagcatcacctgcagctgggagcagctgggagtcaagagcaggagcaaactgctgagccactaatgggcagtagtttgcttgaagaggcttcagtacccagtaaaaacctggtgtctatgaattcccagcccagccttggtggagagtccttgaacctaccaaataccaattctatcctgggagttgatgatgaggtgcttgctgaaggatccccacgttccctgtcttcagtgcctgatgtgacacatcacctggtgaccatgcagtcagggaggcaatcatatgaagtttctgtcttaactgcagtaaatccacaagaggtggagtcttgctatgttgcccaggctggagtgcagtggcaccatctcggctcactgcaacctctacctcccgaattcaagcggttcttctgcctcagcctcctgagtagctgggaccacagttactaaaccaaggagatttaactgaaagacggacatgagcgtgggtgctgactcctggaagagcaactctatctgatctcaaaatgcgtatactgggaacaggatgccttagcccacaacagaaccagaatgaatctttgaaggcacaagactctgcttttgccactcttcctctttcctggtatagaagatggatgtaggagagcttcttttctaactaccatctgatcagacaaggaatgaagcaatgactgtgggctgggaaactgtacctacctctcttcccactgcaaatttctgggatagaccaaaagtgaatttgattatgtgttggctgaagttcttcattctgactgttgaggggaggttttcctttgaagagttttcatcccagactcagctgtcttttcacatggatgaaataattcctgctaccaacaacagagcttcaccaggaagttgagttttcaagatgccttgttgctttgaagaagggagtgatgtcaattctcttgttacattctccctttagcaacctgagtaagagactctctgccactgggctgcaaaaaaataaattacttgaatctccccttggcccaggctgaggtactatcttgtcctatacacttctacttggtcactttgctttcttcgttaatggaacatacagtagcatgttaagagggatttcatgtttttgtttttttaaagttaaaaattacatgatgcagagattcaggttttcctttaaataaacaaaacagcccagtca

SEQ ID NO: 85475 - DNA, 492 bp, Artificial Sequence
  derived and/or modified sequence
ggtggctttgccgcggtggtggcagcggtggcagaggcgacaccgctggaggcggcggagggacgggcccaccaacgctgcaggccggttcttgctctgttgcccaggctggactgcagtggcaccagcatggctcactgcagcctcgaccccctaggctcaagtgatcctcctgcttcagcctcctgagtagctgggaccacaggtcatcagttgggtcaaagatggagctactagccaggcctgagacctgagcccctggacaccatgtttctattttctgcttctgtgaaattgcctcttctacatacctcatgcacctccgctgagcttttaaaccaagtcattgggacttagcgtctttctacccggcagggaagggaggagttggcaagaatttggctcacccattccccctgcaagcctccagcgtcgcggagcactagacatctactatgactgacaccgtgttcagcaacagttctaaccgtt

SEQ ID NO: 85476 - protein, 467 aa, Artificial Sequence
  derived and/or modified sequence
MAPIWSPPGRVSGCHLSSGPAPGSAVGPWLGTPHPSLPLPLAPHKPPPPGLPGSAGQTSLPAQRECVFPGDAAVHQELCGLGFEECLGSIPQAHQCYLTNGPKRRKCSPRRRGRAPAWLCGGSPPCHQGLGHEHPSSGPSTNCSPRPTAQWSVEDEEEAVHEQCQHERDRQLQAQDEEGGGHVPERPKQEMLLSLKPSEAPELDEDEGFGDWSQRPEQRQQHEGAQGALDSGEPPQCRSPEGEQEDRPGLHAYEKEDSDEVHLEELSLSKEGPGPEDTVQDNLGAAGAEEEQEEHQKCQQPRTPSPLVLEGTIEQSSPPLSPTTKLIDRTESLNRSIEKSNSVKKSQPDLPISKIDQWLEQYTQAIETAGRTPKLARQASIELPSMAVASTKSRWETGEVQAQSAAKTPSCKDIVAGDMSKKSLWEQKGGSKTSSTIKSTPSGKRYKFVATGHGKYEKVLVEGGPAP

SEQ ID NO: 85477 - DNA, 1404 bp, Artificial Sequence
  derived and/or modified sequence
atggcccctatttggagcccgccaggcagggtttccgggtgtcatctgtcctccggccctgcccctggatctgcagtaggcccctggcttggcacgccccacccatccctgccactgcccctcgcccctcacaaacctcccccccctgggcttcccggatctgccgggcagacctcactgcctgctcaacgggagtgtgtgtttccgggcgacgcagctgttcaccaggagttgtgtggcctaggcttcgaggagtgtctcggctctataccacaggcccatcaatgttacctgaccaatggtcccaagagaaggaagtgcagcccgcggcggcgtgggagagcccccgcttggctttgtggcggtagccccccatgtcaccagggactggggcacgaacacccctccagcggaccatccaccaattgttccccccgtcctactgcccaatggtcagtggaagatgaagaggaggccgttcacgaacagtgtcagcatgagcgagatagacagctccaggcccaggacgaggagggaggtgggcacgtgcccgagaggcccaagcaggagatgctgctcagtcttaaaccatcagaggcccccgaactagacgaagacgaggggtttggagattggagccagcgacccgagcagaggcagcagcacgaaggggcccagggcgcacttgactctggggagccacctcagtgtagaagtccagagggcgaacaagaagacagacctgggctccacgcttacgagaaggaagacagcgatgaggtgcatctggaggagttgagcctgagcaaagaggggcccggcccagaagatactgtgcaggacaatctcggcgccgccggcgccgaggaagagcaagaagagcatcagaagtgccagcaaccacgaacaccatcgccactggttctcgagggcactatcgaacagtctagcccgccactttcccccacgaccaagctcatcgataggactgagagcctgaatcgatctattgagaagtctaatagtgtgaaaaaaagccaacctgatctgcccatttccaagatcgaccaatggctggagcagtacacgcaggcgatcgagaccgccggccggactcctaagctcgccaggcaagcctccatcgagcttccttccatggctgtcgcgagtactaagtccaggtgggagaccggtgaagtccaggcacaatcggcagccaagacccctagttgtaaggacatagtggcaggggatatgtcaaaaaaatctttatgggagcagaaaggcggttcaaagacttcctcaacaatcaaatctaccccaagcggtaagcgatataagtttgttgccaccggacacggaaagtacgagaaggtgctagtcgagggtggacccgcgccatag

SEQ ID NO: 85478 - DNA, 1404 bp, Artificial Sequence
  derived and/or modified sequence
atggcccccatctggagccccccaggccgggtgtctggctgccacctgagcagcggccctgcccctggcagcgctgtgggcccctggctgggcaccccccaccccagcctgcccctgcccctggccccccacaagcccccacctcctggcctgcccggcagcgctggccagaccagcctgcctgcccagagagaatgtgtgtttcctggagatgctgctgtgcaccaggagctgtgtggcctgggctttgaagaatgtctgggcagcatcccccaggcccaccagtgctacctgaccaacggccccaagaggaggaagtgcagccccaggagaagaggccgggccccagcctggctgtgtggcggcagccccccctgccaccagggcctgggccacgagcaccccagcagcggccccagcaccaactgcagcccccggcccacagcccagtggagcgtggaggatgaggaggaggccgtgcatgagcagtgccagcacgagcgggaccggcagctgcaggcccaggatgaggagggcggcggccacgtgcctgagcggcccaagcaggagatgctgctgagcctgaagcccagcgaggcccctgagctggatgaagatgagggctttggagactggagccagaggcctgagcagaggcagcagcacgagggcgcccagggcgccctggacagcggggagcccccccagtgccgcagccctgagggggagcaggaggaccggcccggcctgcacgcctatgagaaggaggacagtgatgaggtgcacctggaggagctgagcctgagcaaggagggccctggccctgaggacacagtgcaggacaacctgggcgccgccggggctgaggaggagcaggaggagcaccagaagtgccagcagcccaggacccccagccccctggtgctggagggcaccatcgagcagagcagcccccccctgagccccaccaccaagctgattgacagaacagagagcctgaacagaagcattgagaagagcaacagcgtgaagaagagccagcctgacctgcccatcagcaagattgaccagtggctggagcagtacacccaggccatcgagacagctggccgcacccccaagctggcccggcaggccagcattgagctgcccagcatggctgtggccagcaccaagagccgctgggagactggagaggtgcaggcccagagcgctgccaagacccccagctgcaaggacatcgtggccggggacatgagcaagaagagcctgtgggagcagaagggcggcagcaagaccagcagcaccatcaagagcacccccagcggcaagcgctacaagtttgtggccactggacatggcaagtatgagaaggtgctggtggagggcggccctgccccctag

SEQ ID NO: 85479 - DNA, 682 bp, Artificial Sequence
  derived and/or modified sequence
acagcctcacccttgcttccctcagtgttcccaaggtgctgcgcaaccccaactccctggcctggccagggtcatgatagctggggaggcaagaggtggctgttctccttgaatgtagggacagagggtggcatgggcagatgagtgcccgtgcacagatggtggcccaggactaattgggtggccagcggccggcagatctggctctggttctggctgtgccaggccctcactctgtgaccttggatgccagtgctgctggctggaccttggtttctccatcctggacatgggtacatggtggttctgagtgccagcgagctgggcaaaccgccggatgtgagactgccgtcgcggagctgaccctcggcccactgctcagtggagcgtggaggacgaggaggaggccgtccacgagcaatgccagcatgagagagacaggcagcttcaggcccaggacgaggagggaggcggccatgtccccgagcggccgaagcaggagatgctcctcagcctgaagccctcggaggcccctgaactggatgaggacgagggctttggcgactggtcccagaggccagagcagcggcagcagcacgagggggcgcagggcgccttggacagcggagagcccccccagtgcaggagtcctgagggggagcaagaggacaggcccggcctg

SEQ ID NO: 85480 - DNA, 417 bp, Artificial Sequence
  derived and/or modified sequence
gtgggctgagacccgggaggcttgagggtcggctgctacccatgacgggttggggaggtattggtgcgagctgaggtggtgcttgcggaggcccactgctcagtggagcgtggaggacgaggaggaggccgtccacgagcaatgccagcatgagagagacaggcagcttcaggcccaggacgaggagggaggcggccatgtccccgagcggccgaagcaggagatgctcctcagcctgaagccctcggaggcccctgaactggatgaggacgagggctttggcgactggtcccagaggccagagcagcggcagcagcacgagggggcgcagggcgccttggacagcggagagcccccccagtgcaggagtcctgagggggagcaagaggacaggcccggcctgcatgcctacgaaaa

SEQ ID NO: 85481 - DNA, 2016 bp, Artificial Sequence
  derived and/or modified sequence
ggtcaggccaggtcgccgcctgagcagaggctgcagcctgggcagtcccgggcttctgaggaggaactctagcagacagggcctggatacctcttgagatgcagagagatggctccgatctggtccccacctggcagggtctccggctgtcacctgagttcaggaccagcaccaggatctgcagtgggcccctggctgggcacacctcatcccagcctccccctacccctggccccccataagcctcctcctcctgggcttccaggctctgctggtcagacctccctccctgcccaacgggaatgtgttttcccaggggacgctgctgtccaccaggagctctgtggcctgggatttgaggagtgcctggggtcaatcccccaggctcaccagtgctacttaacaaatgggcccaagagaaggaagtgcagcccccggaggaggggcagagcccctgcctggctgtgcggtggctcacccccttgtcaccaggggctcggccatgagcatccgtccagcgggcccagcaccaactgcagccccaggcccactgctcagtggagcgtggaggacgaggaggaggccgtccacgagcaatgccagcatgagagagacaggcagcttcaggcccaggacgaggagggaggcggccatgtccccgagcggccgaagcaggagatgctcctcagcctgaagccctcggaggcccctgaactggatgaggacgagggctttggcgactggtcccagaggccagagcagcggcagcagcacgagggggcgcagggcgccttggacagcggagagcccccccagtgcaggagtcctgagggggagcaagaggacaggcccggcctgcatgcctacgaaaaggaggacagtgatgaagtccacctggaggagttgagtctgagcaaggaggggccaggcccagaggacactgtccaggacaacctgggggccgcaggggctgaggaggaacaggaggagcaccagaaatgtcagcagcccaggacacccagccccttggtcttggaggggaccatcgaacagagctcgcctcccctgagccctaccaccaaactcatcgacaggaccgagtccctaaaccgctccatagagaagagtaacagtgtgaagaaatcccagccagacttgcccatctccaagattgatcagtggctggaacaatacacccaggccatcgagaccgctggccggacccccaagctagcccgccaggcctccatagagctgcccagcatggctgtggccagtaccaagagtcggtgggagacgggtgaggtacaggctcagtctgcggccaagactccgtcctgcaaggatattgtggctggagacatgagcaagaaaagcctctgggagcagaagggaggctccaagacctcatcaacaattaagagcaccccatctgggaagaggtataagtttgtggccaccgggcatgggaagtatgagaaggtgcttgtggaagggggcccggctccctaggcgtcccatctcgcttcctgggtctgcaggtccagccggctggcaccctccatgtacccaggggagattccagccagacacccgccccccggccctggctaagaagttgcttcctgttgccagcatgacctaccctcgcctctttgatgccatccgctgccacctccttttgctcctggaccctttagcctctctgcccttccactctctgaccaccgcccccgccctccccacccagctccgcttcttgttacttgggggaggaaagaaactcctgatcattggccaaagggacttacccctggagaggccaagtgccttctaggaagttaggaggttgaggcacagcctgtgcagagagggtgggtcacccccccagatccaaggagaaactgcaggtcaagggctgataacggccatgcaggatgcttgatgctgcgtcccccgctgcttgccgccccccaccccgccattttgtataataaagctccctgtgtattctca

SEQ ID NO: 85482 - DNA, 1404 bp, Artificial Sequence
  derived and/or modified sequence
atggcccccatctggagcccccccggccgggtgagcggctgccacctctcttccggcccggcccccggatctgcggttggcccatggctgggtactccacacccttcactcccactgcctctggcacctcacaagcccccccctcctggtttgccagggtcagccggacaaacttcactacccgcacaacgtgaatgtgtgttccccggcgatgccgccgtccatcaggaactttgtggtctgggatttgaggaatgcctgggttcaattccccaggctcatcaatgctacctcaccaacgggcccaaacgcagaaaatgttcaccaaggcggcggggcagagctcctgcttggttatgtggaggttcccccccctgccatcaaggtctgggccacgagcacccatcttcaggacccagtacgaattgtagccccagaccaactgcccagtggtctgtggaagatgaggaggaggctgttcacgaacaatgtcagcacgagcgggaccgacagttgcaggcacaggatgaggaggggggcggccacgtgcccgagaggcctaagcaagagatgcttctgtctctgaaaccctcagaagcccccgaactcgacgaggacgaaggttttggcgattggtctcagcggcccgaacaacgccagcagcatgagggagcccagggcgccttggactccggagagcccccacagtgtcggagccctgagggcgaacaagaagacagaccagggcttcacgcctacgagaaggaggacagtgatgaggttcatctggaggaactctcgttgtctaaagaaggacccggacccgaggacactgtacaggacaatcttggggctgcaggggccgaagaagaacaggaggagcatcaaaagtgtcaacagccccggaccccttctcccctggtactagaaggcacaatcgagcagagctcccctccgctgtctccaacaacaaagcttatagatcggaccgagagtctcaacaggtctattgaaaaatcaaattccgtcaagaagtcccagccagacctaccaatttccaaaatagaccagtggctcgagcagtatacgcaggctattgaaaccgccggccgtactcccaagctggcccgccaggcaagcatcgagctgccatctatggccgtcgcatcgacaaaaagtcgatgggagacaggtgaggtccaggcccagtctgcagccaaaacccctagttgcaaagacattgtggccggggacatgagcaaaaagtctctgtgggaacagaagggcggatcgaagacaagctcgactattaaaagcacgccttcagggaaaagatataaatttgtggcgacaggccatggtaaatacgagaaggttctggtggagggcggcccagcaccgtag

SEQ ID NO: 85483 - DNA, 1404 bp, Artificial Sequence
  derived and/or modified sequence
atggcaccaatctggtctccgcctgggagggtgtcaggttgccacctgtcaagcggccctgccccaggatcagcggtggggccatggctcggcactccacacccctcattacctctgccccttgcgccacataaacccccacctccaggacttcctggaagcgccggacagacctctctgcccgcacagcgggagtgcgtgtttcctggagacgctgccgtccaccaggaactttgcggactgggattcgaggagtgtttgggaagtattccgcaggctcaccagtgttatctgaccaatggccctaagcggcgaaaatgcagcccacgcaggcggggacgggctccagcttggttgtgtggcggatcacccccatgtcatcaaggcctgggccacgagcacccctcgtccggaccaagcacaaattgctcaccgagacctaccgctcagtggtctgttgaggacgaggaggaagcagtgcatgagcaatgccagcacgagagagatcgacagctgcaggctcaagacgaagaaggaggtggccatgtgcctgaaaggcctaaacaggagatgctactgtctttgaagccttctgaggccccagaactcgatgaagacgagggattcggtgactggtcacagagaccagagcagcgccagcaacacgagggtgctcaaggggctctggattctggggaaccccctcagtgccgaagccctgaaggggagcaagaggaccggccagggttgcatgcctatgaaaaggaagactctgatgaggttcacctggaggagctctcattgagcaaggaaggacccggacctgaggatacagtgcaggacaatctgggagccgctggcgctgaagaggaacaggaggagcaccaaaaatgtcaacagccgcgaacaccctcaccacttgtcctagaggggacaattgaacagtctagtcctcccctgagtcctacgactaagctgattgataggacagagagtctaaaccgctctattgagaaatctaattctgtcaaaaagtctcagccagacttgcctattagtaagattgaccagtggttagaacagtatacccaggccatcgagaccgctgggagaaccccgaaactggcaagacaggcatctattgagctgccttctatggctgtagccagcactaaatctcggtgggagaccggcgaagtccaagcacagtcagcagctaagaccccgagctgcaaggatattgttgccggtgacatgtcgaagaagtcgctctgggagcagaagggcggatcaaaaaccagctcaacgatcaaatctactccttctggtaagcgctacaagtttgtggctacgggccacgggaagtatgagaaggtcctcgtagagggaggacctgcgccatag

SEQ ID NO: 85484 - DNA, 1404 bp, Artificial Sequence
  derived and/or modified sequence
atggcccccatctggagcccccccggcagagtgagcggctgccacctgagcagcggccccgcccccggcagcgccgtgggcccctggctgggcaccccccaccccagcctgcccctgcccctggccccccacaagccccccccccccggcctgcccggcagcgccggccagaccagcctgcccgcccagagagagtgcgtgttccccggcgacgccgccgtgcaccaggagctgtgcggcctgggcttcgaggagtgcctgggcagcatcccccaggcccaccagtgctacctgaccaacggccccaagagaagaaagtgcagccccagaagaagaggcagagcccccgcctggctgtgcggcggcagccccccctgccaccagggcctgggccacgagcaccccagcagcggccccagcaccaactgcagccccagacccaccgcccagtggagcgtggaggacgaggaggaggccgtgcacgagcagtgccagcacgagagagacagacagctgcaggcccaggacgaggagggcggcggccacgtgcccgagagacccaagcaggagatgctgctgagcctgaagcccagcgaggcccccgagctggacgaggacgagggcttcggcgactggagccagagacccgagcagagacagcagcacgagggcgcccagggcgccctggacagcggcgagcccccccagtgcagaagccccgagggcgagcaggaggacagacccggcctgcacgcctacgagaaggaggacagcgacgaggtgcacctggaggagctgagcctgagcaaggagggccccggccccgaggacaccgtgcaggacaacctgggcgccgccggcgccgaggaggagcaggaggagcaccagaagtgccagcagcccagaacccccagccccctggtgctggagggcaccatcgagcagagcagcccccccctgagccccaccaccaagctgatcgacagaaccgagagcctgaacagaagcatcgagaagagcaacagcgtgaagaagagccagcccgacctgcccatcagcaagatcgaccagtggctggagcagtacacccaggccatcgagaccgccggcagaacccccaagctggccagacaggccagcatcgagctgcccagcatggccgtggccagcaccaagagcagatgggagaccggcgaggtgcaggcccagagcgccgccaagacccccagctgcaaggacatcgtggccggcgacatgagcaagaagagcctgtgggagcagaagggcggcagcaagaccagcagcaccatcaagagcacccccagcggcaagagatacaagttcgtggccaccggccacggcaagtacgagaaggtgctggtggagggcggccccgccccctag

SEQ ID NO: 85485 - DNA, 1812 bp, Artificial Sequence
  derived and/or modified sequence
atgacctacctgatccagagccaccacagcagaagaagccagaactgcgccgaggacgtgatcagaaagaccaagaccgaccagaacggccagctggagtgcgtgagatggatggtgagcgagaccgaggccatcgccgagctgagctgcagcaaggacttccccagcctgatccactacgccggctgctacggccaggagaagatcctgctgtggctgctgcagttcatgcaggagcagggcatcagcctggacgaggtggaccaggacggcaacagcgccgtgcacgtggccagccagcacggctacctgggctgcatccagaccctggtggagtacggcgccaacgtgaccatgcagaaccacgccggcgagaagcccagccagagcgccgagagacagggccacaccctgtgcagcagatacctggtggtggtggagacctgcatgagcctggccagccaggtggtgaagctgaccaagcagctgaaggagcagaccgtggagagagtgaccctgcagaaccagctgcagcagttcctggaggcccagaagagcgagggcaagagcctgcccagcagccccagcagccccagcagccccgccagcagaaagagccagtggaagagccccgacgccgacgacgacagcgtggccaagagcaagcccggcgtgcaggagggcatccaggtgctgggcagcctgagcgccagcagcagagccagacccaaggccaaggacgaggacagcgacaagatcctgagacagctgctgggcaaggagatcagcgagaacgtgtgcacccaggagaagctgagcctggagttccaggacgcccaggccagcagcagaaacagcaagaagatccccctggagaagagagagctgaagctggccagactgagacagctgatgcagagaagcctgagcgagagcgacaccgacagcaacaacagcgaggaccccaagaccacccccgtgagaaaggccgacagacccagaccccagcccatcgtggagagcgtggagagcatggacagcgccgagagcctgcacctgatgatcaagaagcacaccctggccagcggcggcagaagattccccttcagcatcaaggccagcaagagcctggacggccacagccccagccccaccagcgagagcagcgagcccgacctggagagccagtaccccggcagcggcagcatcccccccaaccagcccagcggcgacccccagcagcccagccccgacagcaccgccgcccagaaggtggccaccagccccaagagcgccctgaagagccccagcagcaagagaagaaccagccagaacctgaagctgagagtgaccttcgaggagcccgtggtgcagatggagcagcccagcctggagctgaacggcgagaaggacaaggacaagggcagaaccctgcagagaaccagcaccagcaacgagagcggcgaccagctgaagagacccttcggcgccttcagaagcatcatggagaccctgagcggcaaccagaacaacaacaacaactaccaggccgccaaccagctgaagaccagcaccctgcccctgaccagcctgggcagaaagaccgacgccaagggcaaccccgccagcagcgccagcaagggcaagaacaaggccgagatgtacagcagctgcatcaacctgagcagcaacatgctgatcgaggagcacctgtgcaacgacaccagacacaacgacatcaacagaaagatgaagaagagctacagcatcaagcacatcgccgagcccgagagcaaggagctgttcctgtag

SEQ ID NO: 85486 - DNA, 1812 bp, Artificial Sequence
  derived and/or modified sequence
atgacatatctcatccagtcccatcacagccgcaggtcacagaattgcgccgaggatgttattaggaagaccaaaacagaccaaaatggtcaactggaatgtgttaggtggatggtctcggagacggaggccatcgcagagctcagctgcagcaaagattttcccagcctcatccattatgcgggttgctacggacaggagaagattctgctgtggcttctccagttcatgcaagaacaaggcatctcactcgacgaggtggatcaggatggaaactccgccgtgcatgtggcctctcaacacggctatctcggatgcattcagactctagttgagtatggcgctaatgtgacaatgcagaaccacgccggcgagaagccctcccagagtgcagaaaggcagggccacacactctgcagccgctacctggtggtggtggagacatgcatgtccctggcgagccaggtagtgaagttgacgaagcagctaaaagagcagactgtagaacgggttaccttgcagaatcagctgcaacagttcctggaggcccagaaaagtgaagggaagtccctcccgagcagtccgagttctccgagtagccctgcgagtcggaaatcccagtggaagtcccctgatgcagatgatgatagcgtcgccaaatcaaagcctggggtacaggaaggaattcaggttctaggctcactgtcagcatccagtagggctcggcccaaggctaaagatgaggacagcgataagattttacgccaactcctgggaaaagagatcagtgaaaatgtgtgtacccaagaaaaactatccctggaattccaggacgcgcaggcctccagtcgcaactccaaaaaaatcccactcgaaaagcgtgagctcaaactggctcgtttgaggcaactcatgcaacgatctctgtccgagtctgacaccgatagtaacaacagtgaagatccgaaaactacccctgtccgaaaggctgataggcctagaccccaacctattgtggagagtgttgaaagcatggatagcgccgagagtctgcatttgatgattaagaagcacaccttggctagcggggggcgacggtttccattttccatcaaggcttcaaagtctctcgacggccattccccctcccctaccagcgagtcgtccgagcctgatctggaaagccaataccccggcagcggcagcatccctcctaaccagccctcaggggatcctcagcagccttctcctgactcaaccgccgctcagaaggtggctacatcaccaaagtcagccttaaagtccccaagctccaaacgccggacctcgcagaacctgaagcttagagttacattcgaggagcccgtggtccagatggaacagcctagcctggaactcaatggagaaaaggataaggacaaagggcgcaccctacagaggactagcacttcaaacgaaagcggagaccagctgaaacgcccttttggagctttccgctcaatcatggagaccctgagtggtaatcaaaacaacaacaacaattatcaagccgctaatcagctgaagacgtccaccctaccgttaaccagcctgggccgcaagaccgatgcgaagggaaatccagcaagttcagctagtaagggcaagaacaaagctgagatgtatagctcttgtatcaatttaagttcaaatatgctcatagaggaacacctgtgtaacgatacacggcacaatgacatcaataggaaaatgaagaaaagctatagcatcaagcatattgcagaacccgaaagcaaggaactgttcctgtag

SEQ ID NO: 85487 - DNA, 1812 bp, Artificial Sequence
  derived and/or modified sequence
atgacctacctgatccagagccaccacagcagaagaagccagaactgtgccgaggatgtgatcaggaagaccaagacagaccagaatggccagctggagtgtgtgcgctggatggtgtctgaaacagaggccatcgccgagctgagctgcagcaaggacttccccagcctcatccactacgccggctgctacggccaggagaagatcctgctgtggctgctgcagttcatgcaggagcagggcatcagcctggatgaggtggaccaggacggcaacagcgctgtgcacgtggccagccagcacggctacctgggctgcatccagaccctggtggagtatggagccaacgtgaccatgcagaaccacgccggggagaagcccagccagagcgctgagcggcagggccacaccctgtgcagccgctacctggtggtggtggagacctgcatgagcctggccagccaggtggtgaagctgaccaagcagctgaaggagcagacagtggagcgggtgaccctgcagaaccagctgcagcagttcctggaggcccagaagtctgagggcaagagcctgcccagcagccccagcagccccagcagccctgccagcaggaagagccagtggaagagcccagatgctgatgatgattctgtggccaagagcaagccaggagtgcaggagggcatccaggtgctgggcagcctgagcgccagcagccgggcccggcccaaggccaaggatgaggacagcgacaagatcctgcggcagctgctgggcaaggagatcagtgaaaatgtgtgcacccaggagaagctgagcctggagttccaggatgcccaggccagcagcaggaacagcaagaagatccccctggagaagcgggagctgaagctggcccggctgcggcagctgatgcagaggagcctgtctgagagtgacacagacagcaacaacagcgaggaccccaagaccacccctgtgaggaaggctgaccggccccggccccagcccatcgtggagagcgtggagagcatggattctgctgagagcctgcacctgatgatcaagaagcacaccctggccagcggcggccgccgcttccccttcagcatcaaggccagcaagagcctggatggccacagccccagccccaccagcgagagcagcgagccagacctggagagccagtacccaggcagcggcagcatcccccccaaccagcccagcggggacccccagcagcccagcccagacagcacagctgcccagaaggtggccaccagccccaagagcgccctgaagagccccagcagcaagaggaggaccagccagaacctgaagctgcgggtgacctttgaggagcctgtggtgcagatggagcagcccagcctggagctgaatggagagaaggacaaggacaagggccgcaccctgcagaggaccagcaccagcaatgaaagtggggaccagctgaagaggccctttggagccttccgcagcatcatggagaccctgagcggcaaccagaacaacaacaacaactaccaggccgccaaccagctgaagaccagcaccctgcccctgaccagcctgggcaggaagacagatgccaagggcaacccagccagcagcgccagcaagggcaagaacaaggccgagatgtacagcagctgcatcaacctgagcagcaacatgctgattgaggagcacctgtgcaatgacaccaggcacaatgacatcaacaggaagatgaagaagagctacagcatcaagcacatcgccgagcctgagagcaaggagctgttcctgtag

SEQ ID NO: 85488 - DNA, 1812 bp, Artificial Sequence
  derived and/or modified sequence
atgacctacctgatccagagccaccacagccggcggagccagaactgtgcagaggacgtgattcgcaagacaaaaacagaccaaaacggccaattggaatgtgtgcggtggatggtgtcagagactgaagcaatcgcggagcttagctgttccaaagatttcccttctctgattcactatgcagggtgttatgggcaggaaaagatactgctttggctactgcaatttatgcaggaacaggggatttccctggacgaggtcgaccaggatggtaacagcgcggtgcacgttgccagccagcacgggtacctaggttgcatccagactctggtggagtacggggccaacgttaccatgcaaaatcacgccggagaaaaaccctcacagagcgcagaaaggcaagggcatactctctgtagccgatatctggtagtggtggaaacgtgtatgagcctagcttcccaggtcgttaagctgactaagcagctgaaggaacagaccgtggaacgggtgacactgcaaaatcagctgcagcaattcctcgaggcccagaagtccgaagggaagtcactgcccagttcccctagtagcccatccagtccggcttcccgcaagtcccaatggaagagcccagacgccgatgacgattctgtggccaaaagtaaaccaggagtgcaggaaggcatacaggttctggggagtcttagtgcttcatcccgcgcccgcccaaaagcaaaagatgaagacagcgacaagatcctcagacagcttctgggcaaggaaatttctgagaacgtatgcacacaagagaagctaagtctggagttccaggatgctcaggcctcctcacgaaactctaaaaaaatccctttggaaaaacgtgagctgaagctcgcccgcctgcgacagctgatgcaacggagcttgagtgaatccgatactgatagtaataactccgaggatcccaaaaccactcccgttcgcaaggctgatcgcccccgaccgcaaccgattgtggaatctgttgaatctatggacagcgctgaaagtctccatctaatgattaagaaacacacattagccagtgggggacgaagattcccattctcgatcaaagcaagcaagtcactggacgggcattccccctctccaactagcgagtcctcagagccagacctagaaagccagtacccaggaagcggctctatccctccgaaccagccctctggagacccgcagcagcccagccccgattctactgccgctcagaaagtagcaactagcccgaagtccgctctcaaaagccccagctccaaaaggcgcacaagccagaatttgaaacttcgcgtgacttttgaggaacctgtcgtccagatggaacagccttctttggaattaaacggagaaaaggataaagataagggacgcactctccagagaacctctacctctaatgaaagcggcgaccagctcaaacgcccatttggggctttcaggagcattatggaaacactctctggaaatcagaataacaacaataactaccaggctgccaatcaactgaaaacctccaccctacctctgacttcgctgggtaggaaaactgacgccaagggaaaccctgcttctagtgcctccaaaggtaaaaataaggccgaaatgtatagcagctgcatcaatctgagtagtaacatgctcatcgaggagcatctgtgcaacgatactcggcacaatgacattaataggaaaatgaaaaaatcttactctatcaagcatatcgctgaacctgagtccaaagagttgttcctgtag

SEQ ID NO: 85489 - DNA, 1812 bp, Artificial Sequence
  derived and/or modified sequence
atgacttatctgattcagagccatcacagcaggcgttctcagaactgtgccgaggatgttatcaggaaaacaaagaccgatcagaatggtcagctggagtgcgtgaggtggatggtctcagaaacagaggcaatcgcagagttgtcatgctccaaggattttcctagtctcattcattatgcgggatgctatggccaagagaagatcctcctatggcttctacaattcatgcaggagcagggtatatcattggacgaagtggaccaagatggtaacagtgcagtgcacgtggctagccagcacggctacctcggctgcatccagacgctggtggagtacggcgcaaatgtcacaatgcagaatcacgccggagagaaacctagtcagtcagctgaaaggcagggccacacgctgtgttcaagatatctggtagtggttgaaacctgtatgtcactggcttcacaagtggtaaagctcaccaagcaactgaaggaacagactgtcgagcgggtgaccttgcagaaccagctacagcagtttttggaggctcagaagagcgagggcaagagtctgccaagctccccatcctctccatcaagtccagcgagtagaaaatcccagtggaagagtcctgacgccgatgacgattctgtggccaagtcgaagcccggtgtacaggaagggatccaggttttggggtctttgtctgcctcgagcagggctaggcccaaagcaaaggacgaggatagcgacaaaattctccgccagcttctgggcaaggagattagcgagaatgtttgtactcaggaaaagttgagtctggagttccaagacgcccaagccagctcccgaaactcaaagaaaataccacttgagaaacgggagctaaaattggccaggctccgacagctcatgcagcgcagcttgagcgagtctgacacagacagcaataacagtgaggaccccaaaaccactcctgtgagaaaagcggatcgcccaagaccccagcctatagtggagagcgtcgaatctatggactccgctgaatcattgcatcttatgatcaaaaagcatactctagccagcggtggccgtagatttcccttctccatcaaagccagcaaatcactggacggccattcaccttcccccacctcagagtcctccgagcctgatctggaatcacaatacccaggtagcggctcgattcccccaaaccaaccttctggcgacccgcagcagcccagcccagactctaccgccgctcagaaagtcgctacatctccaaagtctgcactgaagtctcctagttcaaagcgccgaacatcacaaaatttaaagctcagggtgaccttcgaggagcctgtcgtgcagatggagcagccttccctggaattaaacggcgagaaggacaaagacaagggaaggacactgcagcgcacttccacttcaaacgagtccggtgaccagttgaaacgtcctttcggcgcttttcgatccataatggaaacactgtccgggaatcaaaacaataataacaattaccaggcagccaaccagttaaagacttcaactctccccctgacttcactgggcaggaaaacagatgctaagggtaatccagcctcctccgcttcaaaggggaagaacaaagccgagatgtattcgtcctgtattaaccttagcagcaatatgctcatagaggagcatctatgtaatgatactcggcacaatgatatcaatagaaagatgaaaaaaagctacagtatcaaacatatagccgaacccgaatctaaagagttgttcctgtag

SEQ ID NO: 85490 - protein, 382 aa, Artificial Sequence
  derived and/or modified sequence
MGESGLGKSTLINSLFLTDLYSPEYPGPSHRIKKTVQVEQSKVLIKEGGVQLLLTIVDTPGFGDAVDNSNCWQPVIDYIDSKFEDYLNAESRVNRRQMPDNRVQCCLYFIAPSGHGLKPLDIEFMKRLHEKVNIIPLIAKADTLTPEECQQFKKQIMKEIQEHKIKIYEFPETDDEEENKLVKKIKDRLPLAVVGSNTIIEVNGKRVRGRQYPWGVAEVENGEHCDFTILRNMLIRTHMQDLKDVTNNVHYENYRSRKLAAVTYNGVDNNKNKGQLTKSPLAQMEEERREHVAKMKKMEMEMEQVFEMKVKEKVQKLKDSEAELQRRHEQMKKNLEAQHKELEEKRRQFEDEKANWEAQQRILEQQNSSRTLEKNKKKGKIF

SEQ ID NO: 85491 - DNA, 267 bp, Artificial Sequence
  derived and/or modified sequence
atgaagaagatggagatggagatggagcaggtgttcgagatgaaggtgaaggagaaggtgcagaagctgaaggacagcgaggccgagctgcagagaagacacgagcagatgaagaagaacctggaggcccagcacaaggagctggaggagaagagaagacagttcgaggacgagaaggccaactgggaggcccagcagagaatcctggagcagcagaacagcagcagaaccctggagaagaacaagaagaagggcaagatcttctag

SEQ ID NO: 85492 - DNA, 1149 bp, Artificial Sequence
  derived and/or modified sequence
atgggcgagagcggcctgggcaagagcaccctgatcaacagcctgttcctgaccgacctgtacagccccgagtaccccggccccagccacagaatcaagaagaccgtgcaggtggagcagagcaaggtgctgatcaaggagggcggcgtgcagctgctgctgaccatcgtggacacccccggcttcggcgacgccgtggacaacagcaactgctggcagcccgtgatcgactacatcgacagcaagttcgaggactacctgaacgccgagagcagagtgaacagaagacagatgcccgacaacagagtgcagtgctgcctgtacttcatcgcccccagcggccacggcctgaagcccctggacatcgagttcatgaagagactgcacgagaaggtgaacatcatccccctgatcgccaaggccgacaccctgacccccgaggagtgccagcagttcaagaagcagatcatgaaggagatccaggagcacaagatcaagatctacgagttccccgagaccgacgacgaggaggagaacaagctggtgaagaagatcaaggacagactgcccctggccgtggtgggcagcaacaccatcatcgaggtgaacggcaagagagtgagaggcagacagtacccctggggcgtggccgaggtggagaacggcgagcactgcgacttcaccatcctgagaaacatgctgatcagaacccacatgcaggacctgaaggacgtgaccaacaacgtgcactacgagaactacagaagcagaaagctggccgccgtgacctacaacggcgtggacaacaacaagaacaagggccagctgaccaagagccccctggcccagatggaggaggagagaagagagcacgtggccaagatgaagaagatggagatggagatggagcaggtgttcgagatgaaggtgaaggagaaggtgcagaagctgaaggacagcgaggccgagctgcagagaagacacgagcagatgaagaagaacctggaggcccagcacaaggagctggaggagaagagaagacagttcgaggacgagaaggccaactgggaggcccagcagagaatcctggagcagcagaacagcagcagaaccctggagaagaacaagaagaagggcaagatcttctag

SEQ ID NO: 85493 - DNA, 267 bp, Artificial Sequence
  derived and/or modified sequence
atgaagaagatggaaatggagatggaacaggtcttcgagatgaaagtcaaggaaaaagtacagaagctgaaagactccgaggcagaactccagcgacgccatgagcagatgaaaaagaaccttgaagctcagcataaggagctggaggagaagaggcgccaattcgaagacgagaaagcaaattgggaggcccagcagaggatcctggagcaacagaactcgagtcggaccctggaaaagaataagaagaaaggcaaaatcttttag

SEQ ID NO: 85494 - DNA, 1149 bp, Artificial Sequence
  derived and/or modified sequence
atgggggaatccggcctgggcaagtcaactttgatcaattctctgttcttgacggacctctactccccagagtatccagggcctagtcaccgcattaaaaaaaccgtgcaagttgaacagagcaaggtgctgataaaagaggggggtgtgcaattgctcctgaccatcgtggacaccccgggctttggcgacgcggtcgacaattcaaactgctggcagcctgtcattgattatattgatagtaagttcgaagactatctcaatgccgagagccgcgtgaaccgcaggcaaatgcccgacaacagagtacaatgctgcttatacttcattgctccatccggccacggcctcaagccactggacatcgaattcatgaagcgtttacacgagaaagtgaatatcatcccactcattgccaaggcggataccttaacccccgaggaatgccaacagttcaagaagcaaatcatgaaggaaattcaggaacataaaataaagatctacgagtttccagaaactgatgacgaagaggagaacaagctcgtgaaaaaaataaaggaccgactacctttagcggttgtgggatccaacactatcattgaagtcaacgggaaacgagtgcggggcagacagtatccttggggcgtggcagaggtggaaaatggcgagcactgcgattttacaatcttaaggaatatgcttattagaacacatatgcaagatctgaaggacgtaacaaataatgtccactacgaaaactatagatcaaggaagctcgcagcagtgacttacaacggcgtggataataacaaaaacaaggggcagcttaccaaatctcctctggctcaaatggaagaggaacggagagagcatgtggcaaagatgaagaagatggagatggagatggagcaggtgtttgagatgaaggtaaaggagaaagttcagaaacttaaggactctgaagcagagctccagcgaaggcacgagcagatgaaaaagaatctcgaagctcagcataaagaactcgaagagaagcggcgtcagtttgaagacgaaaaggctaactgggaagcccagcaacgcatcttggagcagcagaactcctccaggactcttgagaaaaataagaagaagggaaagattttctag

SEQ ID NO: 85495 - DNA, 267 bp, Artificial Sequence
  derived and/or modified sequence
atgaagaagatggagatggagatggagcaggtgtttgagatgaaggtgaaggagaaggtgcagaagctgaaggacagcgaggccgagctgcagaggagacatgagcagatgaagaagaacctggaggcccagcacaaggagctggaggagaagaggcggcagtttgaagatgagaaggccaactgggaggcccagcagaggatcctggagcagcagaacagcagcaggaccctggagaagaacaagaagaagggcaagatcttctag

SEQ ID NO: 85496 - DNA, 1149 bp, Artificial Sequence
  derived and/or modified sequence
atgggagagagcggcctgggcaagagcaccctcatcaacagcctcttcctgacagacctgtacagccctgagtacccaggccccagccaccgcatcaagaagacagtgcaggtggagcagagcaaggtgctgatcaaggagggcggcgtgcagctgctgctgaccatcgtggacaccccaggctttggagatgctgtggacaacagcaactgctggcagcccgtcatcgactacatcgacagcaagtttgaggactacctgaatgctgagagccgggtgaacagacggcagatgccagacaacagagtgcagtgctgcctgtacttcatcgcccccagcggccacggcctgaagcccctggacatcgagttcatgaagaggctgcacgagaaggtgaacatcatccccctcatcgccaaggctgacaccctgaccccagaggagtgccagcagttcaagaagcagatcatgaaggagatccaggagcacaagatcaagatctatgagttccctgagacagatgatgaggaggagaacaagctggtgaagaagatcaaggaccggctgcccctggccgtggtgggcagcaacaccatcatcgaggtgaatggcaagagggtgcggggccggcagtacccctggggcgtggccgaggtggagaatggagagcactgtgacttcaccatcctgaggaacatgctgatccgcacccacatgcaggacctgaaggatgtgaccaacaacgtgcactatgagaactaccgcagcaggaagctggccgctgtgacctacaatggagtggacaacaacaagaacaagggccagctgaccaagagccccctggcccagatggaggaggagcggcgggagcacgtggccaagatgaagaagatggagatggagatggagcaggtgtttgagatgaaggtgaaggagaaggtgcagaagctgaaggacagcgaggccgagctgcagaggagacatgagcagatgaagaagaacctggaggcccagcacaaggagctggaggagaagaggcggcagtttgaagatgagaaggccaactgggaggcccagcagaggatcctggagcagcagaacagcagcaggaccctggagaagaacaagaagaagggcaagatcttctag

SEQ ID NO: 85497 - DNA, 267 bp, Artificial Sequence
  derived and/or modified sequence
atgaagaagatggagatggagatggagcaggtgttcgagatgaaggtaaaggaaaaggtgcaaaagctcaaagactctgaagcagagctgcagaggaggcatgagcagatgaaaaagaatctagaggctcagcataaagaactggaagaaaagaggcgccaattcgaggatgaaaaggcaaattgggaggcccagcagaggattctggaacaacagaactcctctaggacccttgagaagaacaaaaaaaaagggaaaattttttag

SEQ ID NO: 85498 - DNA, 1149 bp, Artificial Sequence
  derived and/or modified sequence
atgggcgagagcggcctgggcaagagcaccctgatcaacagcctgttcctgaccgacttgtactcaccggaatatccagggccttcacatcggattaaaaagacagtgcaggtggagcaatccaaagtcctgattaaagaggggggagttcagctgctgcttacaatcgttgacacacccggctttggagacgcagtcgacaattcaaattgctggcagcctgtcattgattatattgatagcaaattcgaggactatctgaacgccgagtctcgcgtgaataggagacagatgcctgacaatagagttcagtgttgcctctattttatcgccccctccggccacggcctgaaaccactcgacattgaattcatgaaacgtctccacgaaaaggtgaatattatccccctgatagccaaggccgatactttgactcctgaggagtgtcagcagtttaagaaacagatcatgaaggaaattcaggagcataagatcaagatctatgagttcccggagaccgatgatgaagaagagaataagcttgtcaagaaaattaaagatcggctccctttggcagtggtaggctcaaatacaatcatcgaggttaatggtaagagagtgcgcggcagacaatacccatggggggtcgctgaagtggaaaatggggaacactgtgatttcaccatcttgcggaatatgcttattcgaacacacatgcaggatcttaaggatgtcactaacaacgtccactacgagaattatcggagtcggaagctagccgccgtcacttataatggtgttgacaataacaagaacaagggacagctgaccaagtcacctctggcacaaatggaggaagagcggagagagcatgttgcaaaaatgaaaaagatggaaatggaaatggagcaggttttcgagatgaaagtcaaggaaaaggttcaaaaattgaaagactccgaagcagagctgcagcgtcgccatgagcagatgaaaaagaatctggaagcccaacacaaagagcttgaggaaaaacgaaggcagtttgaggacgagaaagctaactgggaagctcagcagcgaatactggagcagcagaacagtagtaggaccctggaaaagaacaagaagaaagggaaaatcttctag

SEQ ID NO: 85499 - DNA, 267 bp, Artificial Sequence
  derived and/or modified sequence
atgaagaaaatggagatggagatggaacaggtgttcgagatgaaagttaaggagaaggttcaaaagctcaaggactctgaggcagagctccagcgaagacatgagcagatgaaaaaaaatctagaggcacagcataaagaactggaggagaaacgacgccagtttgaagacgagaaggcgaattgggaagcccaacagcggatcttggaacagcagaactcttctcgtaccctggagaagaataagaagaagggcaagatcttttag

SEQ ID NO: 85500 - DNA, 1149 bp, Artificial Sequence
  derived and/or modified sequence
atgggcgaatcggggctgggtaaatccacccttataaactctctgtttctgacagacctgtattcacctgagtatcccggaccaagtcataggatcaagaagactgttcaggtggagcagagcaaagttctgattaaagaaggaggagtgcaactcttgttaacgattgtagacacgccagggttcggcgacgccgttgataacagcaattgctggcaaccagtcatagattacatcgatagcaagtttgaggactatctgaatgctgaatctcgggtgaaccgccgtcagatgccggacaatcgagtccagtgctgcctctactttattgccccatccggacatggattaaagcccctcgacattgagtttatgaaacgactacacgagaaggtgaacattatccctctaattgccaaggctgacaccctcactccggaagagtgtcagcagttcaaaaagcagatcatgaaggaaatccaagagcataagataaaaatctacgaatttcctgagaccgacgacgaggaggagaataagctggtgaaaaaaattaaagataggctgccacttgccgtggtgggttccaacactataattgaagtgaatggaaagagagtgcggggtcggcagtacccttggggagtggcagaggtcgagaatggggaacactgtgacttcacaatcctgagaaacatgttgatccggactcatatgcaagatctgaaagatgtgaccaataacgtacactatgagaattatcggagccgcaagcttgctgcggtcacttataacggggtagacaataataaaaacaagggacaactaaccaaaagtcctctggctcagatggaggaagagcggagggagcatgtagcaaaaatgaagaagatggagatggagatggaacaggtattcgagatgaaagttaaggagaaggtgcaaaaactgaaagactccgaggctgagcttcagagaagacatgagcaaatgaagaaaaacttagaagcccagcacaaggaattggaggagaagcgcagacagttcgaggatgaaaaagcaaactgggaggcccaacagagaattttagaacagcaaaattcaagccggactctcgaaaaaaacaagaaaaagggcaagatcttttag

SEQ ID NO: 85501 - DNA, 1362 bp, Artificial Sequence
  derived and/or modified sequence
ggaatgccaacagtttaaaaaacagataatgaaagaaatccaagaacataaaattaaaatatacgaatttccagaaacagatgatgaagaagatggagatggagatggagcaggtgtttgagatgaaggtcaaagaaaaagttcaaaaactgaaggactctgaagctgagctccagcggcgccatgagcaaatgaaaaagaatttggaagcacagcacaaagaattggaggaaaaacgtcgtcagttcgaggatgagaaagcaaactgggaagctcaacaacgtattttagaacaacagaactcttcaagaaccttggaaaagaacaagaagaaagggaagatcttttaaactctctattgaccaccagttaacgtattagttgccaatatgccagcttggacatcagtgtttgttggatccgtttgaccaatttgcaccagttttatccataatgatggatttaacagcatgacaaaaattatttttttttttgttcttgatggagattaagatgccttgaattgtctagggtgttctgtacttagaaagtaagagctctaagtacctttcctacattttctttttttattaaacagatatcttcagtttaatgcaagagaacattttactgttgtacaatcatgttctggtggtttgattgtttacaggatattccaaaataaaaggactctggaagattttcattgaggataaattgccataatatgatgcaaactgtgcttctctatgataattacaatacaaaggttccattcagtgcagcatatacaataatgtaatttagtctaacacagttgaccctattttttgacacttccattgtttaaaaatacacatggaaaaaaaaaaaaccctatatgcttactgtgcacctagagcttttttataacaacgtctttttgtttgtttgttttggattctttaaatatatattattctcatttagtgccctctttagccagaatctcattactgcttcatttttgtaataacatttaatttagatattttccatatattggcactgctaaaatagaatatagcatctttcatatggtaggaaccaacaaggaaactttcctttaactccctttttacactttatggtaagtagcagggggggaaatgcatttatagatcatttctaggcaaaattgtgaagctaatgaccaacctgtttctacctatatgcagtctctttattttactagaaatgggaatcatggcctcttgaagagaaaaaagtcaccattctgcatttagctgtattcatatattgcatttctgtattttttgtttgtattgtaaaaaattcacataataaacgatgttgtgatgt

SEQ ID NO: 85502 - DNA, 1404 bp, Artificial Sequence
  derived and/or modified sequence
agtgcgagatccgctgctgctgaggagaggagcgtcaacagcagcaccatgggtgaatctggattgggaaagtcgacattaatcaactcattattcctcacagatttgtattctccagagtatccaggtccttctcatagaattaaaaagactgtacaggtggaacaatccaaagttttaatcaaagaaggtggtgttcagttgctgctcacaatagttgataccccaggatttggagatgcagtggataatagtaattgctggcagcctgttatcgactacattgatagtaaatttgaggactacctaaatgcagaatcacgagtgaacagacgtcagatgcctgataacagggtgcagtgttgtttatacttcattgctccttcaggacatggacttaaaccattggatattgagtttatgaagcgtttgcatgaaaaagtgaatatcatcccacttattgccaaagcagacacactcacaccagaggaatgccaacagtttaaaaaacagataatgaaagaaatccaagaacataaaattaaaatatacgaatttccagaaacagatgatgaagaagaaaataaacttgttaaaaagataaaggaccgtttacctcttgctgtggtaggtagtaatactatcattgaagttaatggcaaaagggtcagaggaaggcagtatccttggggtgttgctgaagttgaaaatggtgaacattgtgattttacaatcctaagaaatatgttgataagaacacacatgcaggacttgaaagatgttactaataatgtccactatgagaactacagaagcagaaaacttgcagctgtgacttataatggagttgataacaacaagaataaagggcagctgactaagagccctctggcacaaatggaagaagaaagaagggagcatgtagctaaaatgaagaagatggagatggagatggagcaggtgtttgagatgaaggtcaaagaaaaagttcaaaaactgaaggactctgaagctgagctccagcggcgccatgagcaaatgaaaaagaatttggaagcacagcacaaagaattggaggaaaaacgtcgtcagttcgaggatgagaaagcaaactgggaagctcaacaacgtattttagaacaacagaactcttcaagaaccttggaaaagaacaagaagaaagggaagatcttttaaactctctattgaccaccagttaacgtattagttgccaatatgccagcttggacatcagtgtttgttggatccgtttgaccaatttgcaccagttttatccataatgatggatttaacagcatgacaaaaattatttttttttttgttcttgatggagattaagatgccttgaattgtctagggtgttctgtacttagaaagtaagag

SEQ ID NO: 85503 - DNA, 279 bp, Artificial Sequence
  derived and/or modified sequence
atggagcagagcaaggtgctgatcaaggagggcggcgtgcagctgctgctgaccatcgtggacacccccggcttcggcgacgccgtggacaacagcaactgctggcagcccgccatcaactacatcgacagcaagttcgaggactacctgaacgccgagagcagagtgaacagatgccagatgcccggcaacagagtgcagtgctgcctgtacttcatcgcccccagcggccacggctggcagaccagaaacatggactactgcgtggagttccactag

SEQ ID NO: 85504 - DNA, 279 bp, Artificial Sequence
  derived and/or modified sequence
atggaacagtctaaagttctgatcaaagaaggcggagtacagctgctcttgaccatcgtggacacccccggttttggtgatgccgtggataatagtaactgctggcaaccagccataaactacatcgattccaaattcgaggattacctgaacgctgagtctcgcgtgaaccgctgccagatgcccgggaatcgggtgcagtgctgtttatactttatagcacctagcgggcacggctggcagacccgcaatatggactactgtgtggagttccactag

SEQ ID NO: 85505 - DNA, 279 bp, Artificial Sequence
  derived and/or modified sequence
atggagcagagcaaggtcttgattaaagagggaggagttcagctgctgctgacaatcgtggacacacctggctttggagatgctgtggataacagtaactgctggcaacctgccatcaattacattgatagcaaattcgaggattatctcaatgccgaaagcagagttaacagatgtcagatgccaggaaaccgcgtccaatgttgtctgtacttcattgctccatcaggccacggatggcagacacgaaacatggattactgcgtcgaattccactag

SEQ ID NO: 85506 - DNA, 279 bp, Artificial Sequence
  derived and/or modified sequence
atggagcagagcaaggtgctgatcaaggagggcggcgtgcagctgctgctgaccatcgtggacaccccaggctttggagatgctgtggacaacagcaactgctggcagcctgccatcaactacatcgacagcaagtttgaggactacctgaatgctgagagccgggtgaaccgctgccagatgcctggcaacagagtgcagtgctgcctgtacttcatcgcccccagcggccacggctggcagaccaggaacatggactactgtgtggagttccactag

SEQ ID NO: 85507 - DNA, 279 bp, Artificial Sequence
  derived and/or modified sequence
atggagcagagcaaggtgctgatcaaggagggcggcgtgcagctgctcttaacaatcgtcgacacgccggggttcggagacgccgttgacaatagtaattgctggcagccagccatcaactatattgactccaagttcgaggactacctgaatgctgagagcagagtgaatcggtgtcagatgccaggcaatagagtgcagtgctgcctttattttatagctccatccggccacggatggcaaacgcgcaacatggattactgtgtggagtttcactag

SEQ ID NO: 85508 - DNA, 279 bp, Artificial Sequence
  derived and/or modified sequence
atggagcagagcaaggtgctgatcaaggagggcggcgtgcagctgctgctcactatagtggatacacccggtttcggcgatgctgtagataattcaaactgttggcaacctgctatcaattacatcgacagtaagttcgaagattacttgaatgctgagtccagggtgaatcgctgccagatgccaggtaacagagtgcagtgctgtctgtactttatagcacccagcggacatgggtggcagacgaggaacatggactactgtgtggagttccactag

SEQ ID NO: 85509 - DNA, 279 bp, Artificial Sequence
  derived and/or modified sequence
atggagcagagtaaggtgcttattaaggaggggggagtgcagttgttgctgactatcgttgacaccccagggttcggtgatgctgtggataatagcaactgctggcagcccgctatcaattatattgactctaagtttgaagactatcttaacgccgagtccagggttaaccgctgtcagatgccagggaacagggtccaatgttgtctgtatttcatagctccctcggggcacggctggcaaaccagaaacatggattactgcgtggaatttcattag

SEQ ID NO: 85510 - DNA, 279 bp, Artificial Sequence
  derived and/or modified sequence
atggagcagtctaaagtactgatcaaggagggcggtgtccaactcctactgaccattgtcgatacccctggcttcggggatgcagtcgacaattcgaactgttggcagcctgctattaactacattgactccaaattcgaagattatctgaacgctgagagtcgagtcaaccgctgccaaatgccaggcaatcgggtgcagtgctgtctgtattttatcgccccaagcgggcacggttggcagacaagaaacatggattactgcgtcgaattccactag

SEQ ID NO: 85511 - DNA, 574 bp, Artificial Sequence
  derived and/or modified sequence
gaatctggactgggaaagttgacattaatcaactcattattcctcacagatttgtattctccagagtatccaggtccttctcagagaattaaaaaacctgtacagatggaacaatccaaagttttaatcaaagaaggtggtgttcagttgctgcttacaatagttgataccccaggatttggagatgcagtggataatagtaattgctggcagcctgctatcaattatattgatagtaaatttgaggactacctaaatgcagaatcgcgagtgaacagatgtcagatgcctggtaacagggtgcagtgttgtttatacttcattgctccttcaggacatgggtggcagacaagaaacatggattattgcgtggagttccattagtaggaataagactcattctacattcttgttgttcttagtgttttttgtttttcatgagaaggaattgtatcagcacaaggcaatattctaacatgacaatgacagcagacagaacctcaataaactctgacttggtactgcaaacaccatttcatgataccttaattcaaataaacctttgtttaatcaa

SEQ ID NO: 85512 - DNA, 423 bp, Artificial Sequence
  derived and/or modified sequence
atggaacaatccaaagttttaatcaaagaaggtggtgttcagttgctgcttacaatagttgataccccaggatttggagatgcagtggataatagtaattgctggcagcctgctatcaattatattgatagtaaatttgaggactacctaaatgcagaatcgcgagtgaacagatgtcagatgcctggtaacagggtgcagtgttgtttatacttcattgctccttcaggacatgggtggcagacaagaaacatggattattgcgtggagttccattagtaggaataagactcattctacattcttgttgttcttagtgttttttgtttttcatgagaaggaattgtatcagcacaaggcaatattctaacatgacaatgacagcagacagaacctcaataaactctgacttggtactgcaaa

SEQ ID NO: 85513 - protein, 593 aa, Artificial Sequence
  derived and/or modified sequence
MEIIRSNFKSNLHKVYQAIEEADFFAIDGEFSGISDGPSVSALTNGFDTPEERSSPDVKFVCQSSSIDFLASQGFDFNKVFRNGIPYLNQEEERQLREQYDEKRSQANGAGALSYVSPNTSKCPVTIPEDQKKFIDQVVEKIEDLLQSEENKNLDLEPCTGFQRKLIYQTLSWKYPKGIHVETLETEKKERYIVISKVDEEERKRREQQKHAKEQEELNDAVGFSRVIHAIANSGKLVIGHNMLLDVMHTVHQFYCPLPADLSEFKEMTTCVFPRLLDTKLMASTQPFKDIINNTSLAELEKRLKETPFNPPKVESAEGFPSYDTASEQLHEAGYDAYITGLCFISMANYLGSFLSPPKIHVSARSKLIEPFFNKLFLMRVMDIPYLNLEGPDLQPKRDHVLHVTFPKEWKTSDLYQLFSAFGNIQISWIDDTSAFVSLSQPEQVKIAVNTSKYAESYRIQTYAEYMGRKQEEKQIKRKWTEDSWKEADSKRLNPQCIPYTLQNHYYRNNSFTAPSTVGKRNLSPSQEEAGLEDGVSGEISDTELEQTDSCAEPLSEGRKKAKKLKRMKKELSPAGSISKNSPATLFEVPDTW

SEQ ID NO: 85514 - DNA, 1782 bp, Artificial Sequence
  derived and/or modified sequence
atggagataatcaggtcaaatttcaaatcgaatctgcacaaggtttaccaggctattgaagaagccgacttcttcgccattgatggtgaattttctggaatctcagacggaccctccgtttctgccttgaccaacggcttcgacacccctgaggagcgcagtagccccgacgtcaaatttgtgtgccagtcatcaagcattgacttcctggcctcccaggggtttgatttcaacaaggtgttcaggaatgggatcccttacctgaaccaggaggaggagcggcaactcagagagcagtatgatgagaagagatcccaggctaatggggccggcgcgctcagttatgtgtctccaaatacctcaaaatgtcccgtgactatcccagaagatcagaagaaattcattgaccaagtagtcgaaaagatagaggatctcctgcagagtgaagaaaacaagaatctggatctggaaccctgtacaggttttcagagaaaactgatctatcagactttgtcctggaagtaccccaaaggcattcatgtagaaactcttgagaccgagaagaaggaacgatacatcgtaatctccaaggtcgatgaggaggagcgaaagaggcgggagcaacagaagcatgcgaaagagcaggaggaactaaatgatgctgttgggtttagcagggtcatccacgcaatcgctaatagtggtaaattggttatcgggcataatatgctgctcgacgtcatgcataccgtacaccagttttactgccccctgcccgcagacctgtcagaattcaaagagatgaccacgtgtgtcttcccccggttgctggacactaagctcatggccagtactcagccatttaaagacatcattaataacacaagcctggcagaactggagaaacggttgaaggaaacgccttttaaccctcccaaggtggagtccgcagagggcttcccatcctatgatacagctagtgagcagcttcacgaggcaggttacgatgcctacattactggactgtgctttatcagcatggccaactacctgggcagctttctcagcccaccaaaaatacatgtcagtgcccggtctaagctgatcgagccattttttaacaaactgtttctcatgagggtgatggacatcccatacctaaatctggagggaccagatctgcagcctaaaagggatcacgtgttgcacgtcaccttccccaaggagtggaaaactagcgacttgtatcagctgttttccgctttcggcaacatacagatatcttggattgacgataccagcgccttcgtcagcttgtcacaacccgaacaagtaaagatcgctgtgaacacttctaagtacgctgagtcgtatcgcatacagacatacgcagagtacatgggacgcaagcaggaggaaaagcagatcaagagaaaatggaccgaggacagctggaaggaggccgactccaaacggctcaacccacaatgcattccatataccctgcagaaccattattaccggaataacagcttcacagcgccaagcactgttggtaagcgcaatctatccccgtcacaagaagaggcgggactcgaggacggagtgagtggcgaaatcagcgacacagagctggagcagacagattcgtgcgcggagccactgtccgagggtagaaaaaaggccaagaaactcaaacgcatgaagaaagaattgtctcccgccggctctatctcaaaaaattcccctgccaccctgtttgaagtgccggacacatggtag

SEQ ID NO: 85515 - DNA, 1782 bp, Artificial Sequence
  derived and/or modified sequence
atggagatcatccgcagcaacttcaagagcaacctgcacaaggtgtaccaggccatcgaggaggccgacttctttgccattgatggagagttcagcggcatcagtgatggccccagcgtgtctgccctgaccaatggatttgacaccccagaggagaggagcagcccagatgtgaagtttgtgtgccagagcagcagcattgacttcctggccagccagggctttgacttcaacaaggtgttcagaaatggcatcccctacctgaaccaggaggaggagcggcagctgcgggagcagtatgatgagaagaggagccaggccaacggggccggggccctgtcctatgtgagccccaacaccagcaagtgccctgtgaccatccctgaggaccagaagaagttcatcgaccaggtggtggagaagattgaggacctgctgcagagcgaggagaacaagaacctggacctggagccctgcaccggcttccagaggaagctgatctaccagaccctgtcctggaagtaccccaagggcatccacgtggagaccctggagacagagaagaaggagcgctacatcgtcatcagcaaggtggatgaggaggagaggaagagaagagagcagcagaagcacgccaaggagcaggaggagctgaatgatgctgtgggcttcagcagggtcatccacgccatcgccaacagcggcaagctggtgattggccacaacatgctgctggatgtgatgcacacagtgcaccagttctactgccccctgcctgctgacctgtctgagttcaaggagatgaccacctgtgtgttcccccggctgctggacaccaagctgatggccagcacccagcccttcaaggacatcatcaacaacaccagcctggccgagctggagaagaggctgaaggagacccccttcaacccccccaaggtggagagcgctgagggcttccccagctatgacacagccagcgagcagctgcatgaagctggctatgatgcctacatcaccggcctgtgcttcatctccatggccaactacctgggcagcttcctgagcccccccaagatccacgtgtctgcccggagcaagctgattgagcccttcttcaacaagctgttcctgatgagggtgatggacatcccctacctgaacctggagggccctgacctgcagcccaagagggaccacgtgctgcacgtgaccttccccaaggagtggaagaccagtgacctgtaccagctgttcagcgccttcggcaacatccagatctcctggattgatgacaccagcgcctttgtgtccctgagccagcctgagcaggtgaagattgctgtgaacaccagcaaatatgcagagagctaccgcatccagacctacgccgagtacatgggcaggaagcaggaggagaagcagatcaagaggaagtggacagaggacagctggaaggaggccgacagcaagaggctgaacccccagtgcatcccctacaccctgcagaaccactactacagaaacaacagcttcaccgcccccagcacagtgggcaagaggaacctgagccccagccaggaggaggccggcctggaggatggagtgtctggagagatcagtgacacagagctggagcagacagacagctgtgccgagcccctgtctgagggcaggaagaaggccaagaagctgaagaggatgaagaaggagctgagccctgctggcagcatcagcaagaacagccctgccaccctgtttgaggtgcctgacacctggtag

SEQ ID NO: 85516 - DNA, 1782 bp, Artificial Sequence
  derived and/or modified sequence
atggagatcatccggagcaacttcaagagcaacctgcacaaggtgtaccaagcaattgaagaagctgacttctttgctattgacggtgagtttagcggcattagcgacggaccttctgtctcggccctgactaatggatttgatacaccagaggaaagatcatccccagatgtgaaattcgtgtgtcaaagctcatccatcgactttttggccagccagggctttgatttcaacaaagtgtttagaaatggcattccctacctgaatcaggaagaggaacggcaactgcgcgagcaatacgacgagaagaggtcccaggcaaacggggcgggggcactgagctatgtctcccctaataccagcaaatgccccgtcacaatcccggaggatcagaagaaatttatcgaccaggtagtcgaaaaaatcgaagatctgcttcaaagcgaggagaacaaaaacttagatctggaaccctgtacaggtttccaaaggaaattaatatatcagacgttgtcctggaagtaccctaagggcatacatgtggaaaccctggagacggagaaaaaggagcggtatattgtgatctccaaggtggacgaagaggaacgaaagaggagagaacaacagaaacatgcgaaagaacaagaggagctaaatgacgccgtgggcttctctagagttattcacgcgatcgcgaactcagggaaattggtcattggtcacaacatgctcctggatgtcatgcacaccgtgcatcagttctactgcccactgcccgcagacctgtcagagtttaaggagatgactacctgcgtgtttcctcgcctattggatactaagctcatggcatcaacccagccatttaaagacataatcaacaacacatctctggctgagttagagaaacgcctgaaagagacgcctttcaatccccctaaagttgaatccgcggagggctttccatcttacgatactgccagtgagcaacttcacgaggcgggttatgatgcttacatcacgggcttgtgtttcatcagcatggccaattatctgggcagtttcctgagcccgcctaagattcatgtgtcggcccggtctaagcttatcgagccgttcttcaataagctgttcttgatgcgagtcatggacattccatacttaaacctggaagggcccgacctacagcccaagagggatcatgtgctgcatgttaccttcccgaaggaatggaagacctccgatctgtatcagcttttttccgcattcggcaacatccagatctcatggattgatgacacgagcgcctttgtctcacttagccagcccgaacaggtaaagattgccgttaacacttcgaaatacgccgagtcttacagaatccagacctacgctgaatacatgggacgtaaacaagaggaaaagcaaatcaagcgaaagtggaccgaagattcctggaaggaagctgatagcaagaggcttaacccacagtgtataccctacacactgcaaaaccattactaccggaataactcttttactgctcccagcaccgtggggaagcggaatctctccccgtcgcaggaagaggctggcctcgaggacggggtgtccggagagatcagcgatacggagctggagcaaaccgactcatgcgccgaaccgctctctgagggtcggaagaaagctaagaaactaaaacgaatgaaaaaggagctgtcacctgccggcagcattagcaaaaattctcctgccacactgttcgaggtgcctgacacttggtag

SEQ ID NO: 85517 - DNA, 2360 bp, Artificial Sequence
  derived and/or modified sequence
tttccggaagtcgcggccggcgtcaccgctgcggctgcctcagctactgccgcagtcgccgcggaattcggcgagtagaaccgctgaggcgggcgcgggcccgggtggggccaaggttccggccactctgcagaatggagataatcaggagcaattttaagagtaatcttcacaaagtgtaccaggccatagaggaggccgacttcttcgccatcgatggggagttttcaggaatcagtgatggaccttcagtctctgcattaacaaatggttttgacactccagaagagagatcctcaccagatgtcaaatttgtttgtcagagctccagcattgactttctagcaagccagggatttgattttaataaagtttttcgaaatggaattccatatttaaatcaggaagaagaaagacagttaagagagcagtatgatgaaaaacgttcacaggcgaatggtgcaggagctctgtcctatgtatctcctaacacttcaaaatgtcctgtcacgattcctgaggatcaaaagaagtttattgaccaagtggtagagaaaatagaggatttattacaaagtgaagaaaacaagaacttggatttagagccatgtaccgggttccaaagaaaactaatttatcagactttgagctggaagtatccgaaaggcattcatgttgagactttagaaactgaaaagaaggagcgatatatagttatcagcaaagtagatgaagaagaacgcaaaagaagagagcagcagaaacatgccaaagaacaggaggagctgaatgatgctgtgggattttctagagtcattcacgccattgctaattcgggaaaacttgttattggacacaatatgctcttggacgtcatgcacacagttcatcagttctactgccctctgcctgcggacttaagtgagtttaaagagatgacaacatgtgttttccccagactcttggatactaaattgatggccagcacacaaccttttaaggatatcattaacaacacatcccttgcggaattggaaaagcggttaaaagagacacctttcaaccctcctaaagttgaaagtgccgaaggttttccaagttatgacacagcctctgaacaactccacgaggcaggctacgatgcctacatcacagggctgtgcttcatctccatggccaattacctaggttcttttctcagccctccaaaaattcatgtgtctgccagatcaaaactcattgaacctttttttaacaagttatttcttatgagggtcatggatatcccctatctaaacttggaaggaccagacttgcagcctaaacgtgatcatgttctccatgtgacattccccaaagaatggaaaaccagcgacctttaccagcttttcagtgcctttggtaacattcagatatcctggattgatgacacatcagcatttgtttcccttagccagcccgagcaagtaaagattgctgtcaataccagcaaatatgcagaaagctatcggatccaaacctatgctgaatatatggggagaaaacaggaagagaagcagatcaaaagaaagtggactgaagatagctggaaggaggctgacagcaaacggttaaacccccagtgcataccctacaccctgcagaatcactattaccgcaacaatagttttacagctcccagcacagtaggaaagagaaatttgagtcctagtcaagaggaagctggcctggaggacggagtgtcaggggagatttccgacactgagcttgagcagaccgattcctgtgcagagcccctctcagagggaaggaaaaaggccaagaaattaaaaagaatgaagaaggagctttctccagcaggaagcatctcgaagaacagccctgccacactctttgaagttcctgacacatggtaaccaagacctgagggcagcaaaccgctggtgctgtcgctgtgagcaagagccggctggcacatttggaagccgcactgtatttaacttaatcaaatgtggtatgggaggggttggaaaccaagttgtctcctgggggggagaaaacaggttttatttttgtggctgtggttttttcccctttttaatctaactgcctgttgacattgacactcatcacggttgtaggctgtcatgaatgtgtacgtgcttaaccagtgaattccgtgttgctcttgtgaggcctttcctgtcatgacccagtgtgcttaagaacctgcctgatggggagtgtcggctgtgaaatctgcaaaaagagctgacattccagctgctgtgatcatgaatttgggggtgtactgtcctgcctgtgcatcttctcgcactgagattttgaggcagttgcag

SEQ ID NO: 85518 - DNA, 1782 bp, Artificial Sequence
  derived and/or modified sequence
atggagataatccgctcgaactttaaaagcaatcttcacaaagtgtatcaagctatcgaggaagcagactttttcgccattgatggtgaattctcaggcatctcggatggtcccagcgtgtccgcgttgaccaacggattcgatactcccgaggagcggagtagccccgacgtgaagtttgtgtgccagtccagttccatcgactttctagcctcccagggtttcgacttcaataaggtcttcaggaacggcataccctacctgaaccaggaggaagagaggcaattgcgggagcagtatgatgaaaaacgaagccaggcaaacggtgctggagccctgagctatgtgtctccaaacaccagcaagtgtcccgtcacaatccctgaagatcagaaaaagtttattgaccaagtggtggaaaagattgaagatctgctccaatcggaagagaacaaaaatctggatctggaaccctgcacaggattccagcgcaagctaatctaccaaacgctctcatggaagtaccctaaaggcattcatgtggagaccttggagaccgagaaaaaagaacgatacatcgttatctctaaggtcgacgaagaggagcgtaagcggcgagagcagcaaaaacatgcaaaggagcaagaggaactaaatgatgcggtgggcttctcccgggtgatccacgctatcgcaaactcaggaaaactagtgatcgggcacaatatgctgcttgatgtgatgcacaccgtgcaccaattctactgcccactgcctgcagatttgtctgaattcaaagagatgaccacctgtgtctttccccgactgcttgacacaaagctgatggcgtcgacacagccttttaaagacatcattaacaataccagtttagccgaactggaaaaaaggctgaaggaaacacccttcaaccccccaaaggtggagtctgcagaaggattcccatcctacgacaccgcatcggagcagttacacgaggctggatatgatgcttatatcacaggcttgtgcttcatctctatggctaactatctgggcagctttctgagcccaccaaagattcatgtaagcgcccgaagcaaactgattgagcccttcttcaacaaactctttttgatgagagtcatggatatcccttacctgaaccttgaaggaccagatcttcagccaaagagggaccatgtgctgcacgtgacttttccgaaggagtggaaaacatctgacctctaccagttgtttagcgcattcgggaatattcaaataagctggattgatgatactagcgccttcgtgagtctcagccaaccagaacaagtgaaaattgccgtgaatacttcaaaatacgcagaatcctaccggatccaaacttacgcagagtatatgggaaggaagcaggaagaaaaacagatcaaaagaaagtggacagaagactcctggaaagaagctgatagtaagcggctcaacccacagtgtatcccttataccctgcagaatcattattacaggaataattctttcactgcccctagtaccgtgggaaaacgaaacctatcgccctctcaggaagaggctggattagaggacggtgtgagtggggaaattagcgacactgagttagaacagaccgatagctgcgcagagccgctgagcgaaggaagaaaaaaggcaaaaaaactgaagcgaatgaagaaggaattatcccctgcaggctccatttcgaaaaacagcccggcaaccctgttcgaggttcctgatacttggtag

SEQ ID NO: 85519 - DNA, 1782 bp, Artificial Sequence
  derived and/or modified sequence
atggagatcatcagaagcaacttcaagagcaacctgcacaaggtgtaccaggccatcgaggaggccgacttcttcgccatcgacggcgagttcagcggcatcagcgacggccccagcgtgagcgccctgaccaacggcttcgacacccccgaggagagaagcagccccgacgtgaagttcgtgtgccagagcagcagcatcgacttcctggccagccagggcttcgacttcaacaaggtgttcagaaacggcatcccctacctgaaccaggaggaggagagacagctgagagagcagtacgacgagaagagaagccaggccaacggcgccggcgccctgagctacgtgagccccaacaccagcaagtgccccgtgaccatccccgaggaccagaagaagttcatcgaccaggtggtggagaagatcgaggacctgctgcagagcgaggagaacaagaacctggacctggagccctgcaccggcttccagagaaagctgatctaccagaccctgagctggaagtaccccaagggcatccacgtggagaccctggagaccgagaagaaggagagatacatcgtgatcagcaaggtggacgaggaggagagaaagagaagagagcagcagaagcacgccaaggagcaggaggagctgaacgacgccgtgggcttcagcagagtgatccacgccatcgccaacagcggcaagctggtgatcggccacaacatgctgctggacgtgatgcacaccgtgcaccagttctactgccccctgcccgccgacctgagcgagttcaaggagatgaccacctgcgtgttccccagactgctggacaccaagctgatggccagcacccagcccttcaaggacatcatcaacaacaccagcctggccgagctggagaagagactgaaggagacccccttcaacccccccaaggtggagagcgccgagggcttccccagctacgacaccgccagcgagcagctgcacgaggccggctacgacgcctacatcaccggcctgtgcttcatcagcatggccaactacctgggcagcttcctgagcccccccaagatccacgtgagcgccagaagcaagctgatcgagcccttcttcaacaagctgttcctgatgagagtgatggacatcccctacctgaacctggagggccccgacctgcagcccaagagagaccacgtgctgcacgtgaccttccccaaggagtggaagaccagcgacctgtaccagctgttcagcgccttcggcaacatccagatcagctggatcgacgacaccagcgccttcgtgagcctgagccagcccgagcaggtgaagatcgccgtgaacaccagcaagtacgccgagagctacagaatccagacctacgccgagtacatgggcagaaagcaggaggagaagcagatcaagagaaagtggaccgaggacagctggaaggaggccgacagcaagagactgaacccccagtgcatcccctacaccctgcagaaccactactacagaaacaacagcttcaccgcccccagcaccgtgggcaagagaaacctgagccccagccaggaggaggccggcctggaggacggcgtgagcggcgagatcagcgacaccgagctggagcagaccgacagctgcgccgagcccctgagcgagggcagaaagaaggccaagaagctgaagagaatgaagaaggagctgagccccgccggcagcatcagcaagaacagccccgccaccctgttcgaggtgcccgacacctggtag

SEQ ID NO: 85520 - protein, 703 aa, Artificial Sequence
  derived and/or modified sequence
MRLWKAVVVTLAFMSVDICVTTAIYVFSHLDRSLLEDIRHFNIFDSVLDLWAACLYRSCLLLGATIGVAKNSALGPRRLRASWLVITLVCLFVGIYAMVKLLLFSEVRRPIRDPWFWALFVWTYISLGASFLLWWLLSTVRPGTQALEPGAATEAEGFPGSGRPPPEQASGATLQKLLSYTKPDVAFLVAASFFLIVAALGETFLPYYTGRAIDGIVIQKSMDQFSTAVVIVCLLAIGSSFAAGIRGGIFTLIFARLNIRLRNCLFRSLVSQETSFFDENRTGDLISRLTSDTTMVSDLVSQNINVFLRNTVKVTGVVVFMFSLSWQLSLVTFMGFPIIMMVSNIYGKYYKRLSKEVQNALARASNTAEETISAMKTVRSFANEEEEAEVYLRKLQQVYKLNRKEAAAYMYYVWGSGLTLLVVQVSILYYGGHLVISGQMTSGNLIAFIIYEFVLGDCMENVSFSLSPGKVTALVGPSGSGKSSCVNILENFYPLEGGRVLLDGKPISAYDHKYLHRVISLVSQEPVLFARSITDNISYGLPTVPFEMVVEAAQKANAHGFIMELQDGYSTETGEKGAQLSGGQKQRVAMARALVRNPPVLILDEATSALDAESEYLIQQAIHGNLQKHTVLIIAHRLSTVEHAHLIVVLDKGRVVQQGTHQQLLAQGGLYAKLVQRQMLGLQPAADFTAGHNEPVANGSHKA

SEQ ID NO: 85521 - DNA, 2112 bp, Artificial Sequence
  derived and/or modified sequence
atgcgcctctggaaggccgtggtggtgacccttgcatttatgtctgtggacatttgcgtgacaacggctatttacgtttttagtcacctggatcgcagtctgctcgaagacattcggcacttcaatatctttgactctgtactcgacttgtgggccgcctgtctgtacagatcttgtctgttactgggggcaacaattggtgtggccaagaactccgcactcggcccaagacggctgcgggcctcatggttagtgataaccctggtgtgtttgtttgtagggatttatgcgatggtaaagctgttgctcttctctgaggtcaggcggccaatcagagacccatggttttgggcgctgttcgtgtggacatacattagcctgggcgcttcctttctgctttggtggcttctgtcaaccgtgagacctggaactcaggccctagaacccggcgctgcgactgaggccgaagggtttcccggaagtgggcgtcctcctcccgaacaggcgtctggggccaccttacagaaactcctgagctataccaagcctgacgtcgcctttctggttgccgcttccttcttcctgattgttgcagctcttggcgaaacattcttaccctactacacgggaagggccatcgacggcatcgtgatccagaagtcaatggaccagttttccaccgccgttgttattgtgtgtctcctggctattggatccagcttcgccgctggcatcaggggaggcatttttacattgatattcgcccgactcaatatcagactgcgcaactgtctgtttcgcagtctggttagccaggagacctctttctttgatgaaaacaggacgggagatctcatatcccgactgacatctgatacaacgatggtgtccgatctcgtctctcaaaatattaatgtatttctaagaaataccgttaaggtgacgggggtggtggtattcatgttctcactgagctggcagctatcactggtgaccttcatggggttcccaatcatcatgatggtgagcaatatatacggtaagtactataaacgtctgtctaaggaggtgcagaatgcgctggctcgggcctcgaatacagcagaggaaacaatctctgccatgaaaaccgtgcggtcgtttgccaacgaggaagaagaggctgaggtctacctgagaaagcttcagcaggtctataagctaaaccggaaggaggctgcagcttatatgtattacgtgtggggcagtggcctgaccttacttgtggtacaggtcagcattctttattacgggggccacttggtgatttccggacagatgacatccggcaaccttattgccttcatcatatacgagtttgtgctgggcgactgcatggagaacgtcagtttttcactgtccccaggaaaggtgaccgctctggtcgggccctctggcagtggcaaatcatcctgcgtaaatatcctggagaatttctatcccctggagggcgggcgcgtcctgttagatggcaagcccatttctgcatacgatcataaatatttacacagagtaattagccttgtgtcacaagaacctgtgctgttcgctagatctattaccgacaacatttcttatggcttacccacagtgccattcgaaatggttgtggaagcagcacagaaagctaacgcccatgggttcatcatggagctgcaggatggctactcaacagagaccggggaaaagggagcccagctgtcgggcgggcagaagcagcgagtcgcgatggcaagggccttggtgcggaatcctcctgtcctgatcctggacgaagccacttcagccctcgatgcggagagcgaatacctgattcagcaagcaatccacggcaacctgcagaaacatacggttcttatcatagcccataggctgtctacagttgagcacgcccacttaatcgttgtgcttgataaaggtagagttgtccagcagggtacccaccagcaactgttggcacagggtggactgtatgccaaacttgtccagagacagatgctaggcctgcaacccgccgctgattttacagcaggtcataacgaaccagtggctaatggatcacacaaggcttag

SEQ ID NO: 85522 - DNA, 2112 bp, Artificial Sequence
  derived and/or modified sequence
atgaggctgtggaaggctgtggtggtgaccctggccttcatgtctgtggacatctgtgtgaccacagccatctacgtgttcagccacctggacaggagcctgctggaggacatccgccacttcaacatctttgacagcgtgctggacctgtgggccgcctgcctgtaccgcagctgcctgctgctgggcgccaccatcggcgtggccaagaacagcgccctgggcccccggcggctgcgggcctcctggctggtgatcaccctggtgtgcctgtttgtgggcatctatgccatggtgaagctgctgctcttcagcgaggtgcggcggcccatccgggacccctggttctgggccctgtttgtgtggacctacatcagcctgggcgccagcttcctgctgtggtggctgctgagcacagtgcggcccggcacccaggccctggagcctggagctgccacagaagctgagggcttccctggcagcggccggcccccacctgagcaggccagcggggccaccctgcagaagctgctgagctacaccaagccagatgtggccttcctggtggccgccagcttcttcctgattgtggccgccctgggggagaccttcctgccctactacacaggccgggccattgatggcatcgtcatccagaagtccatggaccagttcagcacagctgtggtgattgtgtgcctgctggccatcggcagcagctttgctgctggcatccggggcggcatcttcaccctcatctttgcccggctgaacatccggctgaggaactgcctcttccgcagcctggtgtcccaggagaccagcttctttgatgaaaatagaactggagacctgatcagccggctgaccagtgacaccaccatggtgtctgacctggtgtcccagaacatcaacgtgttcctgaggaacacagtgaaggtgactggagtggtggtgttcatgttcagcctgtcctggcagctgagcctggtgaccttcatgggcttccccatcatcatgatggtgagcaacatctacggcaagtactacaagaggctgagcaaggaggtgcagaatgccctggcccgggccagcaacacagctgaggagaccatcagcgccatgaagacagtgcgcagctttgccaatgaggaggaggaggccgaggtgtacctgaggaagctgcagcaggtgtacaagctgaacaggaaggaggccgccgcctacatgtactacgtgtggggcagcggcctgaccctgctggtggtgcaggtgtccatcctgtactacggcggccacctggtgatcagcggccagatgaccagcggcaacctgattgccttcatcatctatgaatttgtgctgggggactgcatggagaatgtgtccttcagcctgagccctgggaaggtgacagccctggtgggccccagcggcagcggcaagagcagctgtgtgaacatcctggagaacttctaccccctggagggcggccgggtgctgctggatggcaagcccatcagcgcctatgaccacaagtacctgcacagggtcatcagcctggtgtcccaggagcctgtgctgtttgcccggagcatcacagacaacatctcctatggcctgcccaccgtgccctttgagatggtggtggaggccgcccagaaggccaatgcccacggcttcatcatggagctgcaggacggctacagcacagaaacaggagagaagggggcccagctgagcggcggccagaagcagagggtggccatggcccgggccctggtgaggaacccccctgtgctgatcctggatgaggccaccagcgccctggatgctgagagcgagtacctgatccagcaggccatccacggcaacctgcagaagcacacagtgctgatcatcgcccaccggctgagcacagtggagcacgcccacctgattgtggtgctggacaagggccgggtggtgcagcagggcacccaccagcagctgctggcccagggcggcctgtatgccaagctggtgcagaggcagatgctgggcctgcagcctgctgctgacttcaccgctggccacaatgaacctgtggccaacggcagccacaaggcctag

SEQ ID NO: 85523 - DNA, 2112 bp, Artificial Sequence
  derived and/or modified sequence
atgcggctgtggaaggccgtggtggtgaccctggccttcatgagcgtcgacatttgtgttacaaccgccatttatgtattctcacacttagatcgctcgctgctggaagacataaggcacttcaatatcttcgattcagtcctcgacctctgggctgcctgtctttaccggagctgcctgctgctgggcgccactattggggtcgccaagaatagtgccctggggccacggcgcctgcgcgcatcatggttggtcattactttggtttgtctttttgtgggaatctacgcaatggttaaactactgctgttcagcgaggtcaggcgtcctattcgtgacccttggttttgggctcttttcgtctggacctacattagtttaggcgcttcgttcctgctgtggtggcttctctctaccgtgcgcccgggcactcaagctctcgagccgggggctgcaacggaggctgagggcttcccagggagcggcagaccacccccggaacaggcttctggtgccacactccagaagcttcttagttacaccaagccagatgtagccttcctggtggccgcctcctttttccttatcgtagcagccctcggcgagacatttttgccttactacaccggcagggccattgacggcatagtgatccagaagtcgatggaccaatttagcacagccgttgtaattgtgtgcttgcttgcgattgggagttcatttgctgccggcataagggggggcatctttactcttatctttgccaggttaaatattcggctgagaaattgcttattcagatccttggtcagccaagagacctcttttttcgacgaaaaccgcactggggatctgatttctaggctgactagcgatacaacgatggtcagtgaccttgtgtcccaaaatatcaacgttttcttacggaacacggtgaaggttaccggagtggttgtgttcatgttctccctgtcatggcagctctcattagttactttcatgggcttccctattatcatgatggtgtcgaacatctacggaaagtattataaaaggttgagcaaagaagtgcagaacgcactggctcgggcaagcaatactgcagaagagactattagcgccatgaagaccgtgcggagttttgccaacgaggaagaagaagccgaggtgtatctgcggaagctgcagcaggtatacaaacttaaccggaaggaggcagcagcctacatgtattatgtctggggatccgggctgacgctgcttgttgtgcaggtgtctattctttattatggagggcacctggtgataagtggtcagatgaccagtgggaacctcatcgctttcattatctatgaatttgtcctgggagactgcatggaaaacgtctcctttagcctgagtccgggaaaggtaactgcactggtagggccttctggatccggcaaatcctcatgcgtgaatatcctcgagaatttctaccctttggagggcggcagggtactgctggacggaaagcccatatccgcatacgaccacaagtatctgcaccgcgttataagtctggtgtcacaagaaccggtgctcttcgctcgttctataaccgacaacatttcctatggcctccccacagtccctttcgagatggttgtggaagctgcacaaaaggccaacgctcatggttttatcatggagcttcaggatgggtactccaccgaaaccggcgagaagggggcccagctttctggggggcagaaacagcgcgttgccatggcaagggccctggtgaggaaccctcctgtcttaatcctggatgaagccaccagcgcactcgatgcagaatctgaatatctcatccagcaagccattcatgggaacctccagaagcacaccgtgctcattatcgcccataggctgtccaccgtagaacacgcacacttgatagtcgtcctggacaaggggagggttgtacagcaggggactcaccagcaactgctggcacagggcgggctatacgccaagctggtgcagcgacagatgttggggctgcagcctgcagctgattttacagcaggccacaacgagccggttgctaatggaagccacaaggcttag

SEQ ID NO: 85524 - DNA, 2112 bp, Artificial Sequence
  derived and/or modified sequence
atgcgactgtggaaggctgtggtagtcaccctggccttcatgagtgtggacatctgtgtgacaactgccatttacgtctttagtcaccttgatagatcgcttttggaagatatcagacactttaacatcttcgactcagtgctcgacctgtgggctgcgtgcctctatcgatcttgtctgcttctcggagccactattggagtggccaagaatagtgcgctgggccctaggcggctgagagcctcctggctggtgattacacttgtctgtctgtttgtaggcatatatgccatggttaagctcctgttgttttcagaagtacggagaccgattcgagacccatggttctgggcgctgttcgtttggacatacatctctctaggggcatcgttcttactatggtggttgctgtccactgttcggccaggaactcaggccctagagcccggagctgccactgaggcggagggttttcctggctccggcagacctccaccagagcaggcttctggggctacacttcagaagctactgtcctatacgaagcccgacgtggccttcttggtcgctgcttctttcttccttatagtggccgctctaggcgagacctttctcccttactacacggggagggcgatcgatgggatcgtcattcagaagagtatggaccaatttagcacagcggtggtgatcgtttgcctcctggccatcgggagctcctttgctgctggtatccgcggaggtatctttacacttatttttgcacgtcttaacattagactgaggaattgtctgttcagaagccttgtgagtcaagagacctctttttttgacgagaacagaaccggtgatctgataagccgacttactagtgataccacgatggtgagcgatcttgtaagtcagaacattaatgtcttcctacgaaatacagtcaaggtcacaggagtagtcgtgtttatgttttctctgtcctggcaactatcactcgtgacattcatgggctttccgatcataatgatggtgagcaatatttatggaaagtattacaagagactctccaaggaagtccaaaacgccctggcccgagccagtaataccgcagaagagaccatctctgccatgaaaaccgtgcgatcgttcgccaacgaggaggaggaagctgaggtatacctgagaaagctgcagcaggtctataagctaaataggaaggaggcggctgcctatatgtattacgtatggggttctggtctcactcttctagtagtccaggtaagcattctgtactacggaggccacctggtgattagtggacagatgacaagcgggaatctgattgcctttattatctatgagtttgtcctcggcgattgcatggaaaacgtatccttttccctgtccccaggcaaagtgactgccctggtagggccttcaggcagcggcaagtctagctgtgttaacattcttgagaatttctacccactggagggcggtagggtgttactcgatggcaaacctattagtgcttatgatcataaatacctccatcgtgtgatctcgctggtttcccaggaacccgtgctcttcgctcggtccataacagacaatatctcttatggcctgcctacagtcccgtttgagatggtggttgaggccgcacagaaggcaaatgctcacggcttcattatggagttgcaagatggatacagcaccgaaactggcgagaaaggggctcagctctcagggggtcagaagcagcgggtggcaatggcgagggccctggtccgcaacccacccgtattaatcctggacgaggccacatcggccctggacgccgaaagcgagtaccttattcagcaggccatccacggaaacctgcaaaaacacaccgtgctgattattgcccatcgattgtccacagttgagcatgcccatctcatcgtggtgcttgacaaggggagagttgtgcagcaaggaactcaccagcaactgcttgcacagggaggactgtacgccaaactggtgcagcgacagatgctcggcctgcagcccgcagccgattttacagcaggccacaatgaacccgtcgcaaacggtagccataaggcttag

SEQ ID NO: 85525 - DNA, 3330 bp, Artificial Sequence
  derived and/or modified sequence
gccccgccccgtccatcagcctgtctcaacgcacgccagtctcagctccgaccttgcagcggcgcagcgcgggtgggaggcggggaggagcagcgggaagagcggagcgaggaccgcgtccggcgcagtcttcaatgagcagcgcggaaactgcaccccagacccgagcctgctgcgcgccccctcccagagctcacctggtgccaggtaacaggcctggcctcgccctgtggatgatgatggccttgcccccgtgagctacaacctggccttcagcacccgcccacctccaaccagcaggatgcggctgtggaaggcggtggtggtgactttggccttcatgagtgtggacatctgcgtgaccacggccatctatgtcttcagccacctggaccgcagcctcctggaggacatccgccacttcaacatctttgactcggtgctggatctctgggcagcctgcctgtaccgcagctgcctgctgctgggagccaccattggtgtggccaagaacagtgcgctggggccccggcggctgcgggcctcgtggctggtcatcaccctcgtgtgcctcttcgtgggcatctatgccatggtgaagctgctgctcttctcagaggtgcgcaggcccatccgggacccctggttttgggccctgttcgtgtggacgtacatttcactcggcgcatccttcctgctctggtggctgctgtccaccgtgcggccaggcacccaggccctggagccaggggcggccaccgaggctgagggcttccctgggagcggccggccaccgcccgagcaggcgtctggggccacgctgcagaagctgctctcctacaccaagcccgacgtggccttcctcgtggccgcctccttcttcctcatcgtggcagctctgggagagaccttcctgccctactacacgggccgcgccattgatggcatcgtcatccagaaaagcatggatcagttcagcacggctgtcgtcatcgtgtgcctgctggccattggcagctcatttgccgcaggtattcggggcggcatttttaccctcatatttgccagactgaacattcgccttcgaaactgtctcttccgctcactggtgtcccaggagacaagcttctttgatgagaaccgcacaggggacctcatctcccgcctgacctcggacaccaccatggtcagcgacctggtctcccagaacatcaatgtcttcctgcggaacacagtcaaggtcacgggcgtggtggtcttcatgttcagcctctcatggcagctctccttggtcaccttcatgggcttccccatcatcatgatggtgtccaacatctacggcaagtactacaagaggctctccaaagaggtccagaatgccctggccagagcgagcaacacggcggaggagaccatcagtgccatgaagactgtccggagcttcgccaatgaggaggaggaggcagaggtgtacctgcggaagctgcagcaggtgtacaagctgaacaggaaggaggcagctgcctacatgtactacgtctggggcagcgggctcacactgctggtggtccaggtcagcatcctctactacgggggccaccttgtcatctcaggccagatgaccagcggcaacctcatcgccttcatcatctacgagtttgtcctgggagattgtatggagaatgtctccttcagcctgtcccccggcaaggtgacggccctggtggggccctcgggcagtgggaagagctcctgtgtcaacatcctggagaacttctaccccctggaggggggccgggtgctgctggacggcaagcccatcagcgcctacgaccacaagtacttgcaccgtgtgatctccctggtgagccaggagcccgtgctgttcgcccgctccatcacggataacatctcctacggcctgcccactgtgcctttcgagatggtggtggaggccgcacagaaggccaatgcccacggcttcatcatggaactccaggacggctacagcacagagacaggggagaagggcgcccagctgtcaggtggccagaagcagcgggtggccatggcccgggctctggtgcggaaccccccagtcctcatcctggatgaagccaccagcgctttggatgccgagagcgagtatctgatccagcaggccatccatggcaacctgcagaagcacacggtactcatcatcgcgcaccggctgagcaccgtggagcacgcgcacctcattgtggtgctggacaagggccgcgtagtgcagcagggcacccaccagcagctgctggcccagggcggcctctacgccaagctggtgcagcggcagatgctggggcttcagcccgccgcagacttcacagctggccacaacgagcctgtagccaacggcagtcacaaggcctgatggggggcccctgcttctcccggtggggcagaggacccggtgcctgcctggcagatgtgcccacggaggcccccagctgccctccgagcccaggcctgcagcactgaaagacgacctgccatgtcccatggatcaccgcttcctgcatcttgcccctggtccctgccccattcccagggcactccttacccctgctgccctgagccaacgccttcacggacctccctagcctcctaagcaaaggtagagctgcctttttaaacctaggtcttaccagggtttttactgtttggtttgaggcaccccagtcaactcctagatttcaaaaacctttttctaattgggagtaatggcgggcactttcaccaagatgttctagaaacttctgagccaggagtgaatggcccttccttagtagcctgggggatgtccagagactaggcctctcccctttacccctccagagaaggggcttccctgtcccggagggagacacggggaacgggattttccgtctctccctcttgccagctctgtgagtctggccagggcgggtagggagcgtggagggcatctgtctgccatcgcccgctgccaatctaagccagtctcactgtgaaccacacgaaacctcaactgggggagtgaggggctggccaggtctggaggggcctcaggggtgcccccagcccggcacccagcgctttcgcccctcgtccacccacccctggctggcagcctccctccccacacccgcccctgtgctctgctgtctggaggccacgtggatgttcatgagatgcattctcttctgtctttggtggatgggatggtggcaaagcccaggatctggctttgccagaggttgcaacatgttgagagaacccggtcaataaagtgtactacctcttacccct

SEQ ID NO: 85526 - DNA, 2112 bp, Artificial Sequence
  derived and/or modified sequence
atgagactgtggaaggccgtggtggtgaccctggccttcatgagcgtggacatctgcgtgaccaccgccatctacgtgttcagccacctggacagaagcctgctggaggacatcagacacttcaacatcttcgacagcgtgctggacctgtgggccgcctgcctgtacagaagctgcctgctgctgggcgccaccatcggcgtggccaagaacagcgccctgggccccagaagactgagagccagctggctggtgatcaccctggtgtgcctgttcgtgggcatctacgccatggtgaagctgctgctgttcagcgaggtgagaagacccatcagagacccctggttctgggccctgttcgtgtggacctacatcagcctgggcgccagcttcctgctgtggtggctgctgagcaccgtgagacccggcacccaggccctggagcccggcgccgccaccgaggccgagggcttccccggcagcggcagacccccccccgagcaggccagcggcgccaccctgcagaagctgctgagctacaccaagcccgacgtggccttcctggtggccgccagcttcttcctgatcgtggccgccctgggcgagaccttcctgccctactacaccggcagagccatcgacggcatcgtgatccagaagagcatggaccagttcagcaccgccgtggtgatcgtgtgcctgctggccatcggcagcagcttcgccgccggcatcagaggcggcatcttcaccctgatcttcgccagactgaacatcagactgagaaactgcctgttcagaagcctggtgagccaggagaccagcttcttcgacgagaacagaaccggcgacctgatcagcagactgaccagcgacaccaccatggtgagcgacctggtgagccagaacatcaacgtgttcctgagaaacaccgtgaaggtgaccggcgtggtggtgttcatgttcagcctgagctggcagctgagcctggtgaccttcatgggcttccccatcatcatgatggtgagcaacatctacggcaagtactacaagagactgagcaaggaggtgcagaacgccctggccagagccagcaacaccgccgaggagaccatcagcgccatgaagaccgtgagaagcttcgccaacgaggaggaggaggccgaggtgtacctgagaaagctgcagcaggtgtacaagctgaacagaaaggaggccgccgcctacatgtactacgtgtggggcagcggcctgaccctgctggtggtgcaggtgagcatcctgtactacggcggccacctggtgatcagcggccagatgaccagcggcaacctgatcgccttcatcatctacgagttcgtgctgggcgactgcatggagaacgtgagcttcagcctgagccccggcaaggtgaccgccctggtgggccccagcggcagcggcaagagcagctgcgtgaacatcctggagaacttctaccccctggagggcggcagagtgctgctggacggcaagcccatcagcgcctacgaccacaagtacctgcacagagtgatcagcctggtgagccaggagcccgtgctgttcgccagaagcatcaccgacaacatcagctacggcctgcccaccgtgcccttcgagatggtggtggaggccgcccagaaggccaacgcccacggcttcatcatggagctgcaggacggctacagcaccgagaccggcgagaagggcgcccagctgagcggcggccagaagcagagagtggccatggccagagccctggtgagaaacccccccgtgctgatcctggacgaggccaccagcgccctggacgccgagagcgagtacctgatccagcaggccatccacggcaacctgcagaagcacaccgtgctgatcatcgcccacagactgagcaccgtggagcacgcccacctgatcgtggtgctggacaagggcagagtggtgcagcagggcacccaccagcagctgctggcccagggcggcctgtacgccaagctggtgcagagacagatgctgggcctgcagcccgccgccgacttcaccgccggccacaacgagcccgtggccaacggcagccacaaggcctag

SEQ ID NO: 85527 - DNA, 2046 bp, Artificial Sequence
  derived and/or modified sequence
atgcgcctgtggaaggccgtggtcgttacactggctttcatgagtgttgacatctgcgtgaccaccgctatttacgtattttctcacctggaccgaagccttctggaggacatcaggcatttcaatatctttgactctgtgctagatctgtgggccgcatgtctgtacaggtcatgtctgctgctgggggccacaatcggcgtcgccaagaacagcgcactgggccccaggaggttacgggcctcctggctagtcatcacattggtgtgcctgttcgtcgggatttatgccatggtgaagttgctgctcttctcggaagtcagacgacccataagggacccctggttttgggccctcttcgtgtggacgtacatctccctcggagcctcctttctactctggtggttgctgagcacagtacggcccggcacacaggcattagagcctggcgctgctaccgaggctgaaggttttcctggttcaggaaggcctcctcccgaacaggcctccggagcgacattacaaaagctcctttcctacacaaagccagatgtggccttcctggttgcagccagtttcttcttgattgtcgccgctcttggtgaaacgttcctaccttactacactgggagggcaattgacggaatcgtgatccagaagtctatggaccagttctccaccgccgtcgtcatcgtgtgtctgttggccattggctcctccttcgctgcaggtataagaggaggtatatttactctaatatttgcccgattgaacattaggctgcggaactgtctcttcaggagcctggtctctcaggaaacgtctttcttcgacgagaatcggaccggagaccttatcagcagacttacctcggacactacaatggtctcggatctcgttagtcagaatatcaatgtgttcctcagaaacaccgtcaaagtcactggtgtggtcgtgttcatgttctctctaagctggcaactgtctctggtgacctttatgggatttccaataatcatgatggtctccaacatctatggaaaatactataagaggttgtctaaagaagttcagaacgccctggcccgtgcctcgaacacggccgaggagacaatctcagccatgaaaacagttagatctttcgcgaatgaagaggaagaggcggaggtgtatttgcgaaaactgcagcaagtctataagctcaaccggaaggaagccgctgcatatatgtattatgtgtggggatccgggttgactctgctggtggtacaagtgtcaatattgtattatgggggccatctcgttatctctggccaaatgacctccgggaacctcattgcttttattatttatgaatttgttttgggtgattgtatggaatcagtggggtcagtctacagtggactgatgcagggcgttggggccgccgagaaagtgtttgagtttattgatcgtcaacctaccatggtccatgatggcagtcttgctccagaccacttggaaggccgggtggacttcgagaacgttaccttcacatatagaacacgtccccacactcaggtcctgcagaatgttagcttcagtcttagcccaggcaaagtcacagcacttgtcgggccaagcggctcagggaaaagctcttgtgtgaacatattggaaaacttctatcctttggagggcggcagagtactgcttgacggcaagccaatcagcgcttacgatcacaagtacctacacagggtgattagtctcgtgagccaggaacccgtgcttttcgcaagaagcatcacggacaacataagctatggactgcccacagtgccctttgagatggttgtggaggccgcccagaaagctaacgctcacggctttatcatggagctgcaggacggttacagcactgagaccggggagaagggtgcccagctctcgggcggccaaaaacagcgggtcgctatggcaagggctctcgtacggaatccccctgtgctcatcctggatgaggccacctctgcacttgacgctgagtcagagtaccttatctag

SEQ ID NO: 85528 - DNA, 2046 bp, Artificial Sequence
  derived and/or modified sequence
atgaggctgtggaaggctgtggtggtgaccctggccttcatgtctgtggacatctgtgtgaccacagccatctacgtgttcagccacctggacaggagcctgctggaggacatccgccacttcaacatctttgacagcgtgctggacctgtgggccgcctgcctgtaccgcagctgcctgctgctgggcgccaccatcggcgtggccaagaacagcgccctgggcccccggcggctgcgggcctcctggctggtgatcaccctggtgtgcctgtttgtgggcatctatgccatggtgaagctgctgctcttcagcgaggtgcggcggcccatccgggacccctggttctgggccctgtttgtgtggacctacatcagcctgggcgccagcttcctgctgtggtggctgctgagcacagtgcggcccggcacccaggccctggagcctggagctgccacagaagctgagggcttccctggcagcggccggcccccacctgagcaggccagcggggccaccctgcagaagctgctgagctacaccaagccagatgtggccttcctggtggccgccagcttcttcctgattgtggccgccctgggggagaccttcctgccctactacacaggccgggccattgatggcatcgtcatccagaagtccatggaccagttcagcacagctgtggtgattgtgtgcctgctggccatcggcagcagctttgctgctggcatccggggcggcatcttcaccctcatctttgcccggctgaacatccggctgaggaactgcctcttccgcagcctggtgtcccaggagaccagcttctttgatgaaaatagaactggagacctgatcagccggctgaccagtgacaccaccatggtgtctgacctggtgtcccagaacatcaacgtgttcctgaggaacacagtgaaggtgactggagtggtggtgttcatgttcagcctgtcctggcagctgagcctggtgaccttcatgggcttccccatcatcatgatggtgagcaacatctacggcaagtactacaagaggctgagcaaggaggtgcagaatgccctggcccgggccagcaacacagctgaggagaccatcagcgccatgaagacagtgcgcagctttgccaatgaggaggaggaggccgaggtgtacctgaggaagctgcagcaggtgtacaagctgaacaggaaggaggccgccgcctacatgtactacgtgtggggcagcggcctgaccctgctggtggtgcaggtgtccatcctgtactacggcggccacctggtgatcagcggccagatgaccagcggcaacctgattgccttcatcatctatgaatttgtgctgggggactgcatggagagcgtgggctctgtgtacagcggcctgatgcagggcgtgggcgctgctgagaaggtgtttgagttcatcgaccggcagcccaccatggtgcatgatggcagcctggccccagaccacctggagggccgggtggactttgaaaatgtgaccttcacctaccgcacccggccccacacccaggtgctgcagaatgtgtccttcagcctgagccctgggaaggtgacagccctggtgggccccagcggcagcggcaagagcagctgtgtgaacatcctggagaacttctaccccctggagggcggccgggtgctgctggatggcaagcccatcagcgcctatgaccacaagtacctgcacagggtcatcagcctggtgtcccaggagcctgtgctgtttgcccggagcatcacagacaacatctcctatggcctgcccaccgtgccctttgagatggtggtggaggccgcccagaaggccaatgcccacggcttcatcatggagctgcaggacggctacagcacagagaccggggagaagggggcccagctgagcggcggccagaagcagagggtggccatggcccgggccctggtgagaaatcctcctgtgctgatcctggatgaggccaccagcgccctggatgctgagagcgagtacctgatctag

SEQ ID NO: 85529 - DNA, 2046 bp, Artificial Sequence
  derived and/or modified sequence
atgcggctgtggaaggccgtggtggtgaccctggccttcatgagcgtcgacatctgtgtaaccaccgctatatacgttttttcgcacctggatcgcagcctgctggaagacattcgtcatttcaatatcttcgactcagtattagacctgtgggccgcctgtctttaccgaagttgcctgctcctgggcgcgaccataggtgtcgccaagaattccgctctggggccccgacggttgagagcatcatggctggtgatcaccctggtatgcctgtttgtgggtatttatgcgatggttaagctgctgctattctccgaagtgcgtcggcccattcgagatccgtggttttgggctctctttgtatggacatacatatccctgggagcttcctttcttctgtggtggttgctgagcaccgtcaggcccgggacacaggcccttgagccaggtgcagccacagaggctgaagggttccctggctcaggccggccaccccctgagcaggctagtggcgcaactcttcaaaagctgctgagttacactaagcctgacgttgcgttcctggtggccgctagttttttcctgatcgtggctgcactgggggagacttttcttccatattacaccggacgcgctatcgacggaattgtcattcagaaatcaatggatcagttcagcaccgccgtggtgatcgtgtgcctgctggctattggctcttcattcgcagcaggcatccgggggggcatctttactctgatctttgcccggctgaacatcagactgagaaattgtcttttcaggtcgctggtttctcaagagacttccttcttcgacgaaaacaggacgggagatctaatcagcaggttgaccagcgacactacaatggtgtcagatctggtgtcccagaatataaacgttttcctgagaaatacagtaaaggtgactggagtggtggttttcatgttctcgcttagctggcagctgtccctcgttacattcatgggcttcccaatcatcatgatggtctccaacatatacgggaaatactacaagaggctgtccaaggaggtgcagaacgccctggctcgcgcttccaacacagcggaggaaactatctcagctatgaagacagtcagaagcttcgcgaacgaggaggaggaggccgaagtttacttgagaaaattgcagcaggtgtataagctgaaccgtaaagaggctgctgcatacatgtattatgtatggggcagtggcttgacattgcttgtggtgcaggtgtccatcttgtattacggcgggcaccttgttatttcagggcagatgacttccggcaacctcattgctttcatcatctatgaattcgtgttgggagattgcatggaaagcgtgggatcagtgtactcaggtcttatgcagggcgttggagctgcggagaaggtgtttgaattcatcgataggcagcctacaatggttcacgatggctcccttgccccagaccacctggagggccgcgtggactttgaaaacgtaacatttacctatcgcacacggccgcatacccaggtgctgcagaatgtgagcttttcactttctcctggtaaagttacggctctagttggccccagtgggtcaggcaaaagtagctgtgtgaatattctcgagaatttctaccctcttgaagggggacgtgtgcttctggatggcaagcccatcagcgcatatgatcataaatacctgcaccgagtcatctctttagtgagtcaagagccagttctgttcgccagatccatcaccgataatatttcatatggactgccaacggtgccttttgaaatggtcgtggaagctgctcagaaggccaacgcgcatggcttcattatggagcttcaggacggatactcaacagagacaggtgaaaaaggagcgcaacttagcgggggtcagaagcagcgcgtggctatggcccgggcactggtaagaaacccacccgttttaatcctagatgaagccacatccgcgctggatgcagagtccgagtacctgatttag

SEQ ID NO: 85530 - DNA, 2046 bp, Artificial Sequence
  derived and/or modified sequence
atgcgcctatggaaagcagtagtcgttactctggcatttatgagcgtggacatctgcgtgaccacagccatttacgtcttttcgcacctcgatcgctccctgctcgaggatattcggcattttaacatattcgatagcgtgttggatctgtgggccgcatgtctgtatcggagttgtctgcttctgggtgctaccataggcgtggctaaaaatagtgccttgggtcccaggcggctccgcgctagttggttagtaattacattggtctgcctgtttgtgggcatctatgcgatggtcaaactactgctgttctcagaagttcgcaggccaataagggacccttggttctgggccctcttcgtgtggacatatatctccctgggagcctccttcctcctctggtggttgctgtcgaccgtgaggcctggcacccaggcactggaacccggagctgccacagaagctgagggcttccccggttctggtagaccgcctccagaacaggcctccggggctacgctgcagaaactgttatcttatacaaagccagatgtggcttttcttgtcgcagcttcattcttcctgattgtggccgctctgggcgagacatttctgccttactataccggccgtgctatcgatgggattgtgatccagaagtcgatggaccagttttcaactgccgtcgtgatcgtgtgtctcctggcaatcgggtccagcttcgcggctgggatccggggtggtattttcaccctgatttttgctagactgaacattagactccgcaactgcctgtttagaagtctggtttcacaagagacatccttttttgacgaaaatcgcacgggtgatctcatctccagactaacatccgataccaccatggtcagtgatttggtgtcccaaaatataaacgtgtttctccggaataccgtgaaggtcacgggcgttgtagtgtttatgttctccttaagctggcagcttagtctggtcaccttcatgggtttccctataattatgatggtgtccaacatatacggcaagtattacaagagactgtccaaggaagtgcagaacgccctcgccagagcttctaatacggccgaggaaacgatttctgcaatgaagacagtgcggagcttcgctaatgaggaggaagaagccgaggtgtacctgagaaagctgcaacaggtgtacaagctcaatcgcaaggaagcagcagcgtacatgtactacgtctggggcagcggactgaccctcctggtggtgcaagtgtcaatcctttattatggaggacacctggtgattagcgggcagatgaccagtggcaacctgatcgcgttcattatctatgaattcgtacttggcgactgtatggaatctgtcggctctgtgtactctggactgatgcaaggcgtcggtgccgcagaaaaggtgtttgagtttatcgaccgccagccaactatggtgcacgacggctctcttgcacccgaccacctcgagggcagggtggatttcgagaatgtgacttttacgtaccggacaagacctcacactcaggttctgcagaacgtctcctttagtctcagtcccggaaaggtgaccgctttagtcgggccaagcggttcgggcaagtcttcttgcgtcaacatcttggagaatttctaccccctagagggcggtagagtcctgctggacggtaagcccatttccgcatacgatcacaagtatctgcaccgcgtcataagtttagtcagccaagagcccgtgctatttgctagatcaattacagataatatctcatacgggcttcccactgttcctttcgaaatggtcgtcgaggctgcacaaaaggccaacgctcacggctttatcatggagctgcaggacggctattcgaccgagaccggtgaaaagggtgcgcagctctccggtggccagaagcagcgggttgctatggcccgtgcccttgtaaggaatcctcccgtgcttatactggatgaagcaacaagcgcccttgatgctgagagcgagtacctcatatag

SEQ ID NO: 85531 - DNA, 2394 bp, Artificial Sequence
  derived and/or modified sequence
ctcagctccgaccttgcagcggcgcagcgcgggtgggaggcggggaggagcagcgggaagagcggagcgaggaccgcgtccggcgcagtcttcaatgagcagcgcggaaactgcaccccagacccgagcctgctgcgcgccccctcccagagctcacctggtgccaggtaacaggcctggcctcgccctgtggatgatgatggccttgcccccgtgagctacaacctggccttcagcacccgcccacctccaaccagcaggatgcggctgtggaaggcggtggtggtgactttggccttcatgagtgtggacatctgcgtgaccacggccatctatgtcttcagccacctggaccgcagcctcctggaggacatccgccacttcaacatctttgactcggtgctggatctctgggcagcctgcctgtaccgcagctgcctgctgctgggagccaccattggtgtggccaagaacagtgcgctggggccccggcggctgcgggcctcgtggctggtcatcaccctcgtgtgcctcttcgtgggcatctatgccatggtgaagctgctgctcttctcagaggtgcgcaggcccatccgggacccctggttttgggccctgttcgtgtggacgtacatttcactcggcgcatccttcctgctctggtggctgctgtccaccgtgcggccaggcacccaggccctggagccaggggcggccaccgaggctgagggcttccctgggagcggccggccaccgcccgagcaggcgtctggggccacgctgcagaagctgctctcctacaccaagcccgacgtggccttcctcgtggccgcctccttcttcctcatcgtggcagctctgggagagaccttcctgccctactacacgggccgcgccattgatggcatcgtcatccagaaaagcatggatcagttcagcacggctgtcgtcatcgtgtgcctgctggccattggcagctcatttgccgcaggtattcggggcggcatttttaccctcatatttgccagactgaacattcgccttcgaaactgtctcttccgctcactggtgtcccaggagacaagcttctttgatgagaaccgcacaggggacctcatctcccgcctgacctcggacaccaccatggtcagcgacctggtctcccagaacatcaatgtcttcctgcggaacacagtcaaggtcacgggcgtggtggtcttcatgttcagcctctcatggcagctctccttggtcaccttcatgggcttccccatcatcatgatggtgtccaacatctacggcaagtactacaagaggctctccaaagaggtccagaatgccctggccagagcgagcaacacggcggaggagaccatcagtgccatgaagactgtccggagcttcgccaatgaggaggaggaggcagaggtgtacctgcggaagctgcagcaggtgtacaagctgaacaggaaggaggcagctgcctacatgtactacgtctggggcagcgggctcacactgctggtggtccaggtcagcatcctctactacgggggccaccttgtcatctcaggccagatgaccagcggcaacctcatcgccttcatcatctacgagtttgtcctgggagattgtatggagtccgtgggctccgtctacagtggcctgatgcagggagtgggggctgctgagaaggtgttcgagttcatcgaccggcagccgaccatggtgcacgatggcagcttggcccccgaccacctggagggccgggtggactttgagaatgtgaccttcacctaccgcactcggccccacacccaggtcctgcagaatgtctccttcagcctgtcccccggcaaggtgacggccctggtggggccctcgggcagtgggaagagctcctgtgtcaacatcctggagaacttctaccccctggaggggggccgggtgctgctggacggcaagcccatcagcgcctacgaccacaagtacttgcaccgtgtgatctccctggtgagccaggagcccgtgctgttcgcccgctccatcacggataacatctcctacggcctgcccactgtgcctttcgagatggtggtggaggccgcacagaaggccaatgcccacggcttcatcatggaactccaggacggctacagcacagagacaggggagaagggcgcccagctgtcaggtggccagaagcagcgggtggccatggcccgggctctggtgcggaaccccccagtcctcatcctggatgaagccaccagcgctttggatgccgagagcgagtatctgatctgaatgaccagcctgcagatatcagaaccgagatggattgatgatgatgacaatgataaccattcaggtataaaacattttcagtgcagc

SEQ ID NO: 85532 - DNA, 2046 bp, Artificial Sequence
  derived and/or modified sequence
atgagactgtggaaggccgtggtggtgaccctggccttcatgagcgtggacatctgcgtgaccaccgccatctacgtgttcagccacctggacagaagcctgctggaggacatcagacacttcaacatcttcgacagcgtgctggacctgtgggccgcctgcctgtacagaagctgcctgctgctgggcgccaccatcggcgtggccaagaacagcgccctgggccccagaagactgagagccagctggctggtgatcaccctggtgtgcctgttcgtgggcatctacgccatggtgaagctgctgctgttcagcgaggtgagaagacccatcagagacccctggttctgggccctgttcgtgtggacctacatcagcctgggcgccagcttcctgctgtggtggctgctgagcaccgtgagacccggcacccaggccctggagcccggcgccgccaccgaggccgagggcttccccggcagcggcagacccccccccgagcaggccagcggcgccaccctgcagaagctgctgagctacaccaagcccgacgtggccttcctggtggccgccagcttcttcctgatcgtggccgccctgggcgagaccttcctgccctactacaccggcagagccatcgacggcatcgtgatccagaagagcatggaccagttcagcaccgccgtggtgatcgtgtgcctgctggccatcggcagcagcttcgccgccggcatcagaggcggcatcttcaccctgatcttcgccagactgaacatcagactgagaaactgcctgttcagaagcctggtgagccaggagaccagcttcttcgacgagaacagaaccggcgacctgatcagcagactgaccagcgacaccaccatggtgagcgacctggtgagccagaacatcaacgtgttcctgagaaacaccgtgaaggtgaccggcgtggtggtgttcatgttcagcctgagctggcagctgagcctggtgaccttcatgggcttccccatcatcatgatggtgagcaacatctacggcaagtactacaagagactgagcaaggaggtgcagaacgccctggccagagccagcaacaccgccgaggagaccatcagcgccatgaagaccgtgagaagcttcgccaacgaggaggaggaggccgaggtgtacctgagaaagctgcagcaggtgtacaagctgaacagaaaggaggccgccgcctacatgtactacgtgtggggcagcggcctgaccctgctggtggtgcaggtgagcatcctgtactacggcggccacctggtgatcagcggccagatgaccagcggcaacctgatcgccttcatcatctacgagttcgtgctgggcgactgcatggagagcgtgggcagcgtgtacagcggcctgatgcagggcgtgggcgccgccgagaaggtgttcgagttcatcgacagacagcccaccatggtgcacgacggcagcctggcccccgaccacctggagggcagagtggacttcgagaacgtgaccttcacctacagaaccagaccccacacccaggtgctgcagaacgtgagcttcagcctgagccccggcaaggtgaccgccctggtgggccccagcggcagcggcaagagcagctgcgtgaacatcctggagaacttctaccccctggagggcggcagagtgctgctggacggcaagcccatcagcgcctacgaccacaagtacctgcacagagtgatcagcctggtgagccaggagcccgtgctgttcgccagaagcatcaccgacaacatcagctacggcctgcccaccgtgcccttcgagatggtggtggaggccgcccagaaggccaacgcccacggcttcatcatggagctgcaggacggctacagcaccgagaccggcgagaagggcgcccagctgagcggcggccagaagcagagagtggccatggccagagccctggtgagaaacccccccgtgctgatcctggacgaggccaccagcgccctggacgccgagagcgagtacctgatctag

SEQ ID NO: 85533 - protein, 382 aa, Artificial Sequence
  derived and/or modified sequence
MRAIQMVANSLKQRAPGEDPMDYKCGSPSDSSTTEEMEVAVSKARAKVTMNDFDYLKLLGKGTFGKVILVREKATGRYYAMKILRKEVIIAKDEVAHTVTESRVLQNTRHPFLTALKYAFQTHDRLCFVMEYANGGELFFHLSRERVFTEERARFYGAEIVSALEYLHSRDVVYRDIKLENLMLDKDGHIKITDFGLCKEGISDGATMKTFCGTPEYLAPEVLEDNDYGRAVDWWGLGVVMYEMMCGRLPFYNQDHERLFELILMEEIRFPRTLSPEAKSLLAGLLKKDPKQRLGGGPSDAKEVMEHRFFLSINWQDVVQKKLLPPFKPQVTSEVDTRYFDDEFTAQSITITPPDRYDSLGLLELDQRTHFPQFSYSASIRE

SEQ ID NO: 85534 - DNA, 1149 bp, Artificial Sequence
  derived and/or modified sequence
atgagagccatccagatggtggccaacagcctgaagcagagagcccccggcgaggaccccatggactacaagtgcggcagccccagcgacagcagcaccaccgaggagatggaggtggccgtgagcaaggccagagccaaggtgaccatgaacgacttcgactacctgaagctgctgggcaagggcaccttcggcaaggtgatcctggtgagagagaaggccaccggcagatactacgccatgaagatcctgagaaaggaggtgatcatcgccaaggacgaggtggcccacaccgtgaccgagagcagagtgctgcagaacaccagacaccccttcctgaccgccctgaagtacgccttccagacccacgacagactgtgcttcgtgatggagtacgccaacggcggcgagctgttcttccacctgagcagagagagagtgttcaccgaggagagagccagattctacggcgccgagatcgtgagcgccctggagtacctgcacagcagagacgtggtgtacagagacatcaagctggagaacctgatgctggacaaggacggccacatcaagatcaccgacttcggcctgtgcaaggagggcatcagcgacggcgccaccatgaagaccttctgcggcacccccgagtacctggcccccgaggtgctggaggacaacgactacggcagagccgtggactggtggggcctgggcgtggtgatgtacgagatgatgtgcggcagactgcccttctacaaccaggaccacgagagactgttcgagctgatcctgatggaggagatcagattccccagaaccctgagccccgaggccaagagcctgctggccggcctgctgaagaaggaccccaagcagagactgggcggcggccccagcgacgccaaggaggtgatggagcacagattcttcctgagcatcaactggcaggacgtggtgcagaagaagctgctgccccccttcaagccccaggtgaccagcgaggtggacaccagatacttcgacgacgagttcaccgcccagagcatcaccatcaccccccccgacagatacgacagcctgggcctgctggagctggaccagagaacccacttcccccagttcagctacagcgccagcatcagagagtag

SEQ ID NO: 85535 - DNA, 1149 bp, Artificial Sequence
  derived and/or modified sequence
atgagagccatccagatggtcgctaattcattaaaacagcgcgctcctggggaggaccctatggattataaatgcggatcacccagcgactcttcgaccaccgaggagatggaggtcgccgtctctaaggctcgggccaaagtcaccatgaacgattttgactacctcaagctgctggggaagggtactttcggaaaagtgattcttgtgagagagaaagccaccgggcgctactacgccatgaagattttacgaaaggaagtgattatcgcaaaagacgaggtggcccacaccgtgaccgaaagccgcgttcttcaaaacacacgtcatccatttcttacagcccttaagtacgctttccagacacatgatagactctgttttgtgatggaatacgccaatgggggtgaactgttctttcatctgtcacgggaaagagtctttactgaagaacgcgctagattttacggcgctgaaatcgttagcgccttggagtacctccactccagagacgttgtctaccgcgacattaagcttgagaaccttatgttggacaaggatgggcacatcaaaattacagatttcggtctgtgtaaggagggcatttccgatggcgctactatgaagaccttctgcggtacaccagaatatctagcgcctgaggtgctggaggacaatgattatgggcgggcagtggactggtggggcctgggagtggtaatgtatgagatgatgtgcggccgacttcccttttacaatcaggaccacgaaaggttgtttgaactcatcctaatggaggaaattcgatttcctcgtaccctctcaccagaagcgaagtcattgttggcgggcttgctcaaaaaagaccccaagcagcgattaggcggcggaccctctgatgccaaggaggtgatggagcaccggttctttctgtctattaactggcaggacgtcgtccagaaaaaactactgccgcctttcaaaccacaggtaaccagtgaggtggacactaggtactttgacgatgaattcactgcccaaagcatcactatcacgccccccgaccgctatgactcacttggcttattagagttagaccagcgaacccactttccccaattctcatattccgcgtcgataagagaatag

SEQ ID NO: 85536 - DNA, 1149 bp, Artificial Sequence
  derived and/or modified sequence
atgagggccatccagatggtggccaacagcctgaagcagagggcccctggagaggaccccatggactacaagtgtggcagccccagcgacagcagcaccacagaggagatggaggtggccgtgtccaaggcccgggccaaggtgaccatgaatgactttgactacctgaagctgctgggcaagggcaccttcggcaaggtgatcctggtgcgggagaaggccaccggccgctactatgccatgaagatcctgaggaaggaggtgatcatcgccaaggatgaggtggcccacacagtgacagagagccgggtgctgcagaacaccaggcaccccttcctgacagccctgaagtatgccttccagacccatgaccggctgtgctttgtgatggagtatgccaacggcggggagctgttcttccacctgagccgggagagggtcttcacagaggagcgggcccgcttctacggggctgagatcgtgtctgccctggagtacctgcacagcagagatgtggtgtacagagacatcaagctggagaacctgatgctggacaaggatggccacatcaagatcacagactttggcctgtgcaaggagggcatcagtgatggagccaccatgaagaccttctgtggcaccccagagtacctggcccctgaggtgctggaggacaatgactatggccgggctgtggactggtggggcctgggcgtggtgatgtatgagatgatgtgtggccgcctgcccttctacaaccaggaccacgagcggctgtttgagctgatcctgatggaggagatccgcttccccaggaccctgagccctgaggccaagagcctgctggccggcctgctgaagaaggaccccaagcagaggctgggcggcggccccagtgatgccaaggaggtgatggagcaccgcttcttcctgagcatcaactggcaggatgtggtgcagaagaagctgctgccccccttcaagccccaggtgaccagcgaggtggacacccgctactttgatgatgagttcaccgcccagagcatcaccatcaccccaccagacagatatgacagcctgggcctgctggagctggaccagaggacccacttcccccagttctcctacagcgccagcatccgggagtag

SEQ ID NO: 85537 - DNA, 1149 bp, Artificial Sequence
  derived and/or modified sequence
atgcgggccatccagatggtggccaacagcctgaagcagcgggcccctggcgaggatcccatggattacaaatgcggcagtccatctgatagttctaccaccgaagagatggaggtcgctgtcagcaaggcacgtgcaaaagttactatgaacgatttcgattatcttaagcttctcggcaagggcactttcggcaaggtgattttggtccgggagaaggctactggtcgatattacgccatgaagattctgaggaaagaagtgatcatcgctaaggacgaagtggcccacaccgtgaccgaatccagggtactgcagaacacccgccatccgtttttaaccgcacttaagtacgctttccagactcacgacaggctgtgttttgtgatggagtacgctaacggtggcgaactcttttttcatctgagccgcgagcgagtgtttacagaggagcgcgcaagattctacggcgctgaaatcgtttcagcactcgagtatctgcactcacgggacgttgtttaccgtgacattaagctagaaaacctcatgctggacaaggacgggcacatcaaaattaccgacttcggattgtgtaaggaaggcatcagtgacggagcaactatgaagactttctgcggaacccctgaatacctggctccagaagtgttagaggacaacgattacggaagggctgtggactggtggggcttgggtgtggtcatgtacgagatgatgtgcggacgactgcctttctacaatcaggaccacgagcgtctgttcgaactgattcttatggaagaaatcagattccccaggactctttctcctgaagccaagagcttactggccggtcttctcaaaaaggacccaaaacagaggctcggcggcggcccctctgatgcaaaagaagtcatggagcaccgcttctttttgtctattaactggcaggatgtagtccaaaagaagctactcccaccctttaagccccaggtcacatccgaggtggatactcgatactttgacgacgaattcacagcccaatctatcacaataacgcctccggatagatacgacagtctggggctactcgaacttgatcagaggacgcatttccctcaattcagttactccgctagtatccgcgaatag

SEQ ID NO: 85538 - DNA, 1149 bp, Artificial Sequence
  derived and/or modified sequence
atgagggcgatccagatggtggccaacagcctaaagcagagggctcccggtgaggatccaatggattataaatgcggatcaccttcggactccagcacaacggaggaaatggaagtggccgtgtcaaaggccagagcaaaggtgaccatgaacgactttgactacctgaagctgctgggtaaaggaacatttggcaaagtgatactcgtgcgcgagaaggcgacagggcgatactatgctatgaaaattctgagaaaggaggttatcattgccaaggatgaggtggcgcacacagtgacagagagtcgtgtcctgcaaaatacacgccaccctttcctgacagccctgaagtacgcattccaaacgcacgatcgcctgtgtttcgtcatggaatacgccaacgggggagaactgttcttccacctgagccgcgagcgggtctttaccgaggagagagctagattttatggggctgagatcgtttctgccctagagtacttgcacagccgcgatgtcgtgtaccgtgatattaagctcgagaaccttatgctcgataaagacggtcatattaagataaccgactttggtctctgcaaggagggcatttcagacggcgcaacgatgaagaccttctgcggtacccccgaatacttggcccctgaagtgttagaggataatgactacgggagagccgtggattggtgggggctgggagtcgtcatgtacgagatgatgtgcgggaggctgccattctacaatcaagatcacgagcggctcttcgagctgatcctgatggaggagatcagattcccaaggactctgagtcctgaggccaaatctctcctggccggactgctgaagaaggatcccaaacagaggctggggggaggtccttccgacgctaaggaggtgatggaacacaggttctttctcagtatcaattggcaggatgtagtacagaaaaaactgctgccaccattcaaacctcaggttacctcagaggtggacaccagatactttgatgacgagttcaccgctcagtcaattacgataacccctcccgaccgttatgacagtctgggcctgctcgagctggatcagaggacacattttccacagttctcctatagtgcttccatcagggagtag

SEQ ID NO: 85539 - DNA, 3213 bp, Artificial Sequence
  derived and/or modified sequence
attcaaggctcagggtggtggctcattttcaaggggctgtgaaaagagagggtcactcctttttgatcatttccctgctgcctggcttcaaatggccctcaggccaggtcactttagggaaattggtgatcgctcttggtattccactttttttttttttttgagacggagtctcgcactgtcaccaggctggagtgcagtggtgcgatctctgctcactgcaccctccgcctcccgggttcaagcaattctcctgcctcagcctcctgagtagctgggattaggcgaatgccacccctgactaatttttgtatttttagtagagacggggtttcaccatgttggccaggctggtctcgaactcctgaccttgtgatccatccgcctcagcctcccaaagtgctgggattataggcatgagccactgcgcctggcgtggaatttcactcaggtcccttcagctctctctggttctgacagatcttgcccaaattcccatggttatgtggtcatttgcttgcctgttgctgggggtggctgggaggtggcactcagctgttcgactctgaggcccaggactcctggctgctgggactcacgtgtgtccctgcacagggaggagtggatgcgggccatccagatggtcgccaacagcctcaagcagcgggccccaggcgaggaccccatggactacaagtgtggctcccccagtgactcctccacgactgaggagatggaagtggcggtcagcaaggcacgggctaaagtgaccatgaatgacttcgactatctcaaactccttggcaagggaacctttggcaaagtcatcctggtgcgggagaaggccactggccgctactacgccatgaagatcctgcggaaggaagtcatcattgccaaggatgaagtcgctcacacagtcaccgagagccgggtcctccagaacaccaggcacccgttcctcactgcgctgaagtatgccttccagacccacgaccgcctgtgctttgtgatggagtatgccaacgggggtgagctgttcttccacctgtcccgggagcgtgtcttcacagaggagcgggcccggttttatggtgcagagattgtctcggctcttgagtacttgcactcgcgggacgtggtataccgcgacatcaagctggaaaacctcatgctggacaaagatggccacatcaagatcactgactttggcctctgcaaagagggcatcagtgacggggccaccatgaaaaccttctgtgggaccccggagtacctggcgcctgaggtgctggaggacaatgactatggccgggccgtggactggtgggggctgggtgtggtcatgtacgagatgatgtgcggccgcctgcccttctacaaccaggaccacgagcgcctcttcgagctcatcctcatggaagagatccgcttcccgcgcacgctcagccccgaggccaagtccctgcttgctgggctgcttaagaaggaccccaagcagaggcttggtggggggcccagcgatgccaaggaggtcatggagcacaggttcttcctcagcatcaactggcaggacgtggtccagaagaagctcctgccacccttcaaacctcaggtcacgtccgaggtcgacacaaggtacttcgatgatgaatttaccgcccagtccatcacaatcacaccccctgaccgctatgacagcctgggcttactggagctggaccagcggacccacttcccccagttctcctactcggccagcatccgcgagtgagcagtctgcccacgcagaggacgcacgctcgctgccatcaccgctgggtggttttttccccctaactttttacttagcctttttggtttgtgtccccacccccacctcctcaccccctttccagttcttcttcaggcccctcccagacgcaccccagcggcccctgcagcccctgcctccagcctccagcctcacctttgtgcccagactcgcatttggaagactccacctcccgcccaggcctgggctgttgggcggttggagattcaggttttaatccacacaagccccagtgaggggtgaagcatggcgcctggggcctgcctgagtttctggcctgggtgtcgtgctggtgtctgcctccgcgctgctgcatctggacgaaggctgccttctggtgggacgcgacacccggcagacagtggtgctgccttccaggccccgtggcctaggctcggagtggccaggcacggggcggtccaatcccccacccgctgtccccctatgggggcagaaaagcaataatgtccaggggcaggcaggggcccttgggagctgcagggctgggggttagggctgctccctggtgaatggagtcagatcctaggatctgtaccatggggaaccaggagtggccgggctgggtgccgcctcctggtccggcctcctccccaccaaactgtcctcaccctatggatgaggcaggaggaacatttggggccaaacctgcctgcctcccagccccgtgccttactagggcttccttccagctggccttacctcccgctggaccctgggcctggcctggccccactgggggctatgggctgggctcaccctctcctctgcgggggtggagggccaccagccttggctgttacaatcttacaccggacagtattgggcccctccctctccccagggccccacgttctgcagccttaaggttgaacatgagtgcacgtccatgtcagtgctgtgggactcctgtgcgtgcctcggactgcgtgtgtcggcgggacgcaggcacacgtgggtgtgtgtgcatgtgtgtttgtgtgagggcagcgtgtcctccagtgtgcatggtgtgtgggcttgggccccatccctggcccgagcatttcatcctgtgggggaggggtgctgacctagtgggaggagccccactgtgatccatgagctgccctgcccacgcctcccctccctgtagcaacacctctgggtgtttggagtttagcttttgtgggtttgctctccctatcccatctcctgtactacacagttcatggcagggtggggaggggtggggttggttcgggtgggtgagggtctttttcctctgtgtgcgatgttgttatctgacagttctccgtccctactggcctttctcctcgtcttcatatttgtacggtacaagcaataaagacactcatttc

SEQ ID NO: 85540 - protein, 397 aa, Artificial Sequence
  derived and/or modified sequence
MRVMAPRTLILLLSGALALTETWACSHSMRYFYTAVSRPGRGEPRFIAVGYVDDTQFVRFDSDAASPRGEPRAPWVEQEGPEYWDRETQKYKRQAQTDRVSLRNLRGYYNQSEAGSHTLQWMYGCDLGPDGRLLRGYDQSAYDGKDYIALNEDLRSWTAADTAAQITQRKWEAARAAEQQRAYLEGTCVEWLRRYLENGKETLQRAEHPKTHVTHHLVSDHEATLRCWALGFYPAEITLTWQRDGEDQTQDTELVETRPAGDGTFQKWAAVVVPSGEEQRYTCHVQHEGLPEPLTLRWEPSSQPTIPIVGIVAGLAVLAVLAVLGAVVAVVMCRRKSSGREGVRSGVWPATVPRALMSLSSLVKPETAACVGLRCRISSHLSFVTSRASGISFCKGI

SEQ ID NO: 85541 - protein, 339 aa, Artificial Sequence
  derived and/or modified sequence
MRVMAPRTLILLLSGALALTETWACSHSMRYFYTAVSRPGRGEPRFIAVGYVDDTQFVRFDSDAASPRGEPRAPWVEQEGPEYWDRETQKYKRQAQTDRVSLRNLRGYYNQSEAGSHTLQWMYGCDLGPDGRLLRGYDQSAYDGKDYIALNEDLRSWTAADTAAQITQRKWEAARAAEQQRAYLEGTCVEWLRRYLENGKETLQRAEHPKTHVTHHLVSDHEATLRCWALGFYPAEITLTWQRDGEDQTQDTELVETRPAGDGTFQKWAAVVVPSGEEQRYTCHVQHEGLPEPLTLRWEPSSQPTIPIVGIVAGLAVLAVLAVLGAVVAVVMCRRKSSA

SEQ ID NO: 85542 - protein, 366 aa, Artificial Sequence
  derived and/or modified sequence
MRVMAPRTLILLLSGALALTETWACSHSMRYFDTAVSRPGRGEPRFISVGYVDDTQFVRFDSDAASPRGEPRAPWVEQEGPEYWDRETQKYKRQAQADRVNLRKLRGYYNQSEDGSHTLQWMYGCDLGPDGRLLRGYDQSAYDGKDYIALNEDLRSWTAADTAAQITQRKWEAAREAEQWRAYLEGTCVEWLRRYLENGKETLQRAEHPKTHVTHHPVSDHEATLRCWALGFYPAEITLTWQRDGEDQTQDTELVETRPAGDGTFQKWAAVVVPSGEEQRYTCHVQHEGLPEPLTLRWEPSSQPTIPIVGIVAGLAVLAVLAVLGAVMAVVMCRRKSSGGKGGSCSQAASSNSAQGSDESLIACKA

SEQ ID NO: 85543 - protein, 368 aa, Artificial Sequence
  derived and/or modified sequence
MRVMAPRALLLLLSGGLALTETWACSHSMRYFDTAVSRPGRGEPRFISVGYVDDTQFVRFDSDAASPRGEPRAPWVEQEGPEYWDRETQNYKRQAQADRVSLRNLRGYYNQSEDGSHTLQRMYGCDLGPDGRLLRGYDQSAYDGKDYIALNEDLRSWTAADTAAQITQRKLEAARAAEQLRAYLEGTCVEWLRRYLENGKETLQRAEPPKTHVTHHPLSDHEATLRCWALGFYPAEITLTWQRDGEDQTQDTELVETRPAGDGTFQKWAAVVVPSGQEQRYTCHMQHEGLQEPLTLSWEPSSQPTIPIMGIVAGLAVLVVLAVLGAVVTAMMCRRKSSAACVGLRCRISSHLSFVTSRASGISFCKGV

SEQ ID NO: 85544 - protein, 397 aa, Artificial Sequence
  derived and/or modified sequence
MRVMAPRTLILLLSGALALTETWACSHSMRYFDTAVSRPGRGEPRFISVGYVDDTQFVRFDSDAASPRGEPRAPWVEQEGPEYWDRETQKYKRQAQADRVNLRKLRGYYNQSEDGSHTLQWMYGCDLGPDGRLLRGYDQSAYDGKDYIALNEDLRSWTAADTAAQITQRKWEAAREAEQWRAYLEGTCVEWLRRYLENGKETLQRAEHPKTHVTHHPVSDHEATLRCWALGFYPAEITLTWQRDGEDQTQDTELVETRPAGDGTFQKWAAVVVPSGEEQRYTCHVQHEGLPEPLTLRWEPSSQPTIPIVGIVAGLAVLAVLAVLGAVMAVVMCRRKSSGREGVRSGVWPATVPRALMSLSSLVKPETAACVGLRCRISSHLSFVTSRASGISFCKGI

SEQ ID NO: 85545 - protein, 372 aa, Artificial Sequence
  derived and/or modified sequence
MRVMAPRALLLLLSGGLALTETWACSHSMRYFDTAVSRPGRGEPRFISVGYVDDTQFVRFDSDAASPRGEPRAPWVEQEGPEYWDRETQNYKRQAQADRVSLRNLRGYYNQSEDGSHTLQRMYGCDLGPDGRLLRGYDQSAYDGKDYIALNEDLRSWTAADTAAQITQRKLEAARAAEQLRAYLEGTCVEWLRRYLENGKETLQRAEPPKTHVTHHPLSDHEATLRCWALGFYPAEITLTWQRDGEDQTQDTELVETRPAGDGTFQKWAAVVVPSGQEQRYTCHMQHEGLQEPLTLSWEPSSQPTIPIMGIVAGLAVLVVLAVLGAVVTAMMCRRKSSGHFLPTGGKGGSCSQAACSNSAQGSDESLITCKA

SEQ ID NO: 85546 - protein, 366 aa, Artificial Sequence
  derived and/or modified sequence
MRVMAPRALLLLLSGGLALTETWACSHSMRYFDTAVSRPGRGEPRFISVGYVDDTQFVRFDSDAASPRGEPRAPWVEQEGPEYWDRETQNYKRQAQADRVSLRNLRGYYNQSEDGSHTLQRMYGCDLGPDGRLLRGYDQSAYDGKDYIALNEDLRSWTAADTAAQITQRKLEAARAAEQLRAYLEGTCVEWLRRYLENGKETLQRAEPPKTHVTHHPLSDHEATLRCWALGFYPAEITLTWQRDGEDQTQDTELVETRPAGDGTFQKWAAVVVPSGQEQRYTCHMQHEGLQEPLTLSWEPSSQPTIPIMGIVAGLAVLVVLAVLGAVVTAMMCRRKSSGGKGGSCSQAACSNSAQGSDESLITCKA

SEQ ID NO: 85547 - protein, 397 aa, Artificial Sequence
  derived and/or modified sequence
MRVMAPRALLLLLSGGLALTETWACSHSMRYFDTAVSRPGRGEPRFISVGYVDDTQFVRFDSDAASPRGEPRAPWVEQEGPEYWDRETQNYKRQAQADRVSLRNLRGYYNQSEDGSHTLQRMYGCDLGPDGRLLRGYDQSAYDGKDYIALNEDLRSWTAADTAAQITQRKLEAARAAEQLRAYLEGTCVEWLRRYLENGKETLQRAEPPKTHVTHHPLSDHEATLRCWALGFYPAEITLTWQRDGEDQTQDTELVETRPAGDGTFQKWAAVVVPSGQEQRYTCHMQHEGLQEPLTLSWEPSSQPTIPIMGIVAGLAVLVVLAVLGAVVTAMMCRRKSSGREGVKSGVWAATVPRALMSLSSLVKPETAACVGLRCRISSHLSFVTSRASGISFCKGV

SEQ ID NO: 85548 - protein, 355 aa, Artificial Sequence
  derived and/or modified sequence
MRVMAPRTLILLLSGALALTETWAGSHSMRYFYTAVSRPGRGEPHFIAVGYVDDTQFVRFDSDAASPRGEPRAPWVEQEGPEYWDRETQKYKRQAQTDRVSLRNLRGYYNQSEAGSHIIQRMYGCDVGPDGRLLRGYDQYAYDGKDYIALNEDLRSWTAADTAAQITQRKWEAAREAEQLRAYLEGLCVEWLRRYLKNGKETLQRAEHPKTHVTHHPVSDHEATLRCWALGFYPAEITLTWQWDGEDQTQDTELVETRPAGDGTFQKWAAVVVPSGEEQRYTCHVQHEGLPEPLTLRWEPSSQPTIPIVGIVAGLAVLAVLAVLGAVVAVVMCRRKSSASNSAQGSDESLIACKA

SEQ ID NO: 85549 - protein, 261 aa, Artificial Sequence
  derived and/or modified sequence
  misc_feature (1)..(1): Xaa can be any naturally occurring amino acid
XRVMAPRTLILLLSGALALTETWACSHSMRYFYTAVSRPGRGEPRFIAVGYVDDTQFVRFDSDAASPRGEPRAPWVEQEGPEYWDRETQKYKRQAQTDRVSLRNLRGYYNQSEAGSHTLQWMYGCDLGPDGRLLRGYDQSAYDGKDYIALNEDLRSWTAADTAAQITQRKWEAARAAEQQRAYLEGTCVEWLRRYLENGKETLQRAEHPKTHVTHHLVSDHEASRRWNLPEVGSCGGAFWRRAEIHVPCAARGAAGAPHPE

SEQ ID NO: 85550 - protein, 366 aa, Artificial Sequence
  derived and/or modified sequence
MRVMAPRTLILLLSGALALTETWACSHSMRYFYTAVSRPGRGEPRFIAVGYVDDTQFVRFDSDAASPRGEPRAPWVEQEGPEYWDRETQKYKRQAQTDRVSLRNLRGYYNQSEAGSHTLQWMYGCDLGPDGRLLRGYDQSAYDGKDYIALNEDLRSWTAADTAAQITQRKWEAARAAEQQRAYLEGTCVEWLRRYLENGKETLQRAEHPKTHVTHHLVSDHEATLRCWALGFYPAEITLTWQRDGEDQTQDTELVETRPAGDGTFQKWAAVVVPSGEEQRYTCHVQHEGLPEPLTLRWEPSSQPTIPIVGIVAGLAVLAVLAVLGAVVAVVMCRRKSSGGKGGSCSQAASSNSAQGSDESLIACKA

SEQ ID NO: 85551 - protein, 261 aa, Artificial Sequence
  derived and/or modified sequence
  misc_feature (1)..(1): Xaa can be any naturally occurring amino acid
XRVMAPRTLILLLSGALALTETWACSHSMRYFYTAVSRPGRGEPRFIAVGYVDDTQFVQFDSDAASPRGEPRAPWVEQEGPEYWDRETQKYKRQAQTDRVNLRKLRGYYNQSEAGSHTLQRMYGCDLGPDGRLLRGYNQFAYDGKDYIALNEDLRSWTAADKAAQITQRKWEAAREAEQRRAYLEGTCVEWLRRYLENGKKTLQRAEHPKTHVTHHPVSDHEASRRWNLPEVGSCGGAFWRRAEIHVPCAARGAARAPHPE

SEQ ID NO: 85552 - protein, 372 aa, Artificial Sequence
  derived and/or modified sequence
MRVMAPRTLILLLSGALALTETWACSHSMRYFYTAVSRPGRGEPRFIAVGYVDDTQFVRFDSDAASPRGEPRAPWVEQEGPEYWDRETQKYKRQAQTDRVSLRNLRGYYNQSEAGSHTLQWMYGCDLGPDGRLLRGYDQSAYDGKDYIALNEDLRSWTAADTAAQITQRKWEAARAAEQQRAYLEGTCVEWLRRYLENGKETLQRAEHPKTHVTHHLVSDHEATLRCWALGFYPAEITLTWQRDGEDQTQDTELVETRPAGDGTFQKWAAVVVPSGEEQRYTCHVQHEGLPEPLTLRWEPSSQPTIPIVGIVAGLAVLAVLAVLGAVVAVVMCRRKSSGHFLPTGGKGGSCSQAASSNSAQGSDESLIACKA

SEQ ID NO: 85553 - protein, 261 aa, Artificial Sequence
  derived and/or modified sequence
  misc_feature (1)..(1): Xaa can be any naturally occurring amino acid
XRVMAPRTLILLLSGALALTETWACSHSMRYFDTAVSRPGRGEPRFISVGYVDDTQFVRFDSDAASPRGEPRAPWVEQEGPEYWDRETQKYKRQAQADRVNLRKLRGYYNQSEDGSHTLQWMYGCDLGPDGRLLRGYDQSAYDGKDYIALNEDLRSWTAADTAAQITQRKWEAAREAEQWRAYLEGTCVEWLRRYLENGKETLQRAEHPKTHVTHHPVSDHEASRRWNLPEVGSCGGAFWRRAEIHVPCAARGAARAPHPE

SEQ ID NO: 85554 - protein, 368 aa, Artificial Sequence
  derived and/or modified sequence
MRVMAPRTLILLLSGALALTETWACSHSMRYFDTAVSRPGRGEPRFISVGYVDDTQFVRFDSDAASPRGEPRAPWVEQEGPEYWDRETQKYKRQAQADRVNLRKLRGYYNQSEDGSHTLQWMYGCDLGPDGRLLRGYDQSAYDGKDYIALNEDLRSWTAADTAAQITQRKWEAAREAEQWRAYLEGTCVEWLRRYLENGKETLQRAEHPKTHVTHHPVSDHEATLRCWALGFYPAEITLTWQRDGEDQTQDTELVETRPAGDGTFQKWAAVVVPSGEEQRYTCHVQHEGLPEPLTLRWEPSSQPTIPIVGIVAGLAVLAVLAVLGAVMAVVMCRRKSSAACVGLRCRISSHLSFVTSRASGISFCKGI

SEQ ID NO: 85555 - protein, 261 aa, Artificial Sequence
  derived and/or modified sequence
  misc_feature (1)..(1): Xaa can be any naturally occurring amino acid
XRVMAPRALLLLLSGGLALTETWACSHSMRYFDTAVSRPGRGEPRFISVGYVDDTQFVRFDSDAASPRGEPRAPWVEQEGPEYWDRETQNYKRQAQADRVSLRNLRGYYNQSEDGSHTLQRMYGCDLGPDGRLLRGYDQSAYDGKDYIALNEDLRSWTAADTAAQITQRKLEAARAAEQLRAYLEGTCVEWLRRYLENGKETLQRAEPPKTHVTHHPLSDHEASRRWNLPEVGSCGGAFWTRAEIHVPYAARGAARAPHPE

SEQ ID NO: 85556 - protein, 372 aa, Artificial Sequence
  derived and/or modified sequence
MRVMAPRTLILLLSGALALTETWACSHSMRYFDTAVSRPGRGEPRFISVGYVDDTQFVRFDSDAASPRGEPRAPWVEQEGPEYWDRETQKYKRQAQADRVNLRKLRGYYNQSEDGSHTLQWMYGCDLGPDGRLLRGYDQSAYDGKDYIALNEDLRSWTAADTAAQITQRKWEAAREAEQWRAYLEGTCVEWLRRYLENGKETLQRAEHPKTHVTHHPVSDHEATLRCWALGFYPAEITLTWQRDGEDQTQDTELVETRPAGDGTFQKWAAVVVPSGEEQRYTCHVQHEGLPEPLTLRWEPSSQPTIPIVGIVAGLAVLAVLAVLGAVMAVVMCRRKSSGHFLPTGGKGGSCSQAASSNSAQGSDESLIACKA

SEQ ID NO: 85557 - protein, 224 aa, Artificial Sequence
  derived and/or modified sequence
MRVMAPRTLILLLSGALALTETWACSHSMRYFYTAVSRPGRGEPRFIAVGYVDDTQFVQFDSDAASPRGEPRAPWVEQEGPEYWDRETQKYKRQAQTDRVNLRKLRGYYNQSEAGSHTLQRMYGCDLGPDGRLLRGYNQFAYDGKDYIALNEDLRSWTAADKAAQITQRKWEAAREAEQRRAYLEGTCVEWLRRYLENGKKTLQRAGQDQKSLFLPQRLELSNE

SEQ ID NO: 85558 - protein, 224 aa, Artificial Sequence
  derived and/or modified sequence
MRVMAPRALLLLLSGGLALTETWACSHSMRYFDTAVSRPGRGEPRFISVGYVDDTQFVRFDSDAASPRGEPRAPWVEQEGPEYWDRETQNYKRQAQADRVSLRNLRGYYNQSEDGSHTLQRMYGCDLGPDGRLLRGYDQSAYDGKDYIALNEDLRSWTAADTAAQITQRKLEAARAAEQLRAYLEGTCVEWLRRYLENGKETLQRAGQDQKSLFLPQRLELSNE

SEQ ID NO: 85559 - protein, 131 aa, Artificial Sequence
  derived and/or modified sequence
MRVMAPRALLLLLSGGLALTETWACSHSMRYFDTAVSRPGRGEPRFISVGYVDDTQFVRFDSDAASPRGEPRAPWVEQEGPEYWDRETQNYKRQAQADRVSLRNLRGYYNQSEDEDVWLRPGARRAPPPRV

SEQ ID NO: 85560 - protein, 403 aa, Artificial Sequence
  derived and/or modified sequence
MRVMAPRALLLLLSGGLALTETWACECGVGREAASAERSEGPPGEPRREVGRAGLSPSSPPGSHSMRYFDTAVSRPGRGEPRFISVGYVDDTQFVRFDSDAASPRGEPRAPWVEQEGPEYWDRETQNYKRQAQADRVSLRNLRGYYNQSEDGSHTLQRMYGCDLGPDGRLLRGYDQSAYDGKDYIALNEDLRSWTAADTAAQITQRKLEAARAAEQLRAYLEGTCVEWLRRYLENGKETLQRAEPPKTHVTHHPLSDHEATLRCWALGFYPAEITLTWQRDGEDQTQDTELVETRPAGDGTFQKWAAVVVPSGQEQRYTCHMQHEGLQEPLTLSWEPSSQPTIPIMGIVAGLAVLVVLAVLGAVVTAMMCRRKSSGGKGGSCSQAACSNSAQGSDESLITCKA

SEQ ID NO: 85561 - DNA, 1119 bp, Artificial Sequence
  derived and/or modified sequence
atgagagtgatggcccccagaaccctgatcctgctgctgagcggcgccctggccctgaccgagacctgggcctgcagccacagcatgagatacttctacaccgccgtgagcagacccggcagaggcgagcccagattcatcgccgtgggctacgtggacgacacccagttcgtgcagttcgacagcgacgccgccagccccagaggcgagcccagagccccctgggtggagcaggagggccccgagtactgggacagagagacccagaagtacaagagacaggcccagaccgacagagtgaacctgagaaagctgagaggctactacaaccagagcgaggccggcagccacaccctgcagagaatgtacggctgcgacctgggccccgacggcagactgctgagaggctacaaccagttcgcctacgacggcaaggactacatcgccctgaacgaggacctgagaagctggaccgccgccgacaaggccgcccagatcacccagagaaagtgggaggccgccagagaggccgagcagagaagagcctacctggagggcacctgcgtggagtggctgagaagatacctggagaacggcaagaagaccctgcagagagccgagcaccccaagacccacgtgacccaccaccccgtgagcgaccacgaggccaccctgagatgctgggccctgggcttctaccccgccgagatcaccctgacctggcagagagacggcgaggaccagacccaggacaccgagctggtggagaccagacccgccggcgacggcaccttccagaagtgggccgccgtggtggtgcccagcggcgaggagcagagatacacctgccacgtgcagcacgagggcctgcccgagcccctgaccctgagatggggccccagcagccagcccaccatccccatcgtgggcatcgtggccggcctggccgtgctggccgtgctggccgtgctgggcgccgtgatggccgtggtgatgtgcagaagaaagagcagcggccacttcctgcccaccggcggcaagggcggcagctgcagccaggccgccagcagcaacagcgcccagggcagcgacgagagcctgatcgcctgcaaggcctag

SEQ ID NO: 85562 - DNA, 1194 bp, Artificial Sequence
  derived and/or modified sequence
atgagagtgatggcccccagaaccctgatcctgctgctgagcggcgccctggccctgaccgagacctgggcctgcagccacagcatgagatacttctacaccgccgtgagcagacccggcagaggcgagcccagattcatcgccgtgggctacgtggacgacacccagttcgtgcagttcgacagcgacgccgccagccccagaggcgagcccagagccccctgggtggagcaggagggccccgagtactgggacagagagacccagaagtacaagagacaggcccagaccgacagagtgaacctgagaaagctgagaggctactacaaccagagcgaggccggcagccacaccctgcagagaatgtacggctgcgacctgggccccgacggcagactgctgagaggctacaaccagttcgcctacgacggcaaggactacatcgccctgaacgaggacctgagaagctggaccgccgccgacaaggccgcccagatcacccagagaaagtgggaggccgccagagaggccgagcagagaagagcctacctggagggcacctgcgtggagtggctgagaagatacctggagaacggcaagaagaccctgcagagagccgagcaccccaagacccacgtgacccaccaccccgtgagcgaccacgaggccaccctgagatgctgggccctgggcttctaccccgccgagatcaccctgacctggcagagagacggcgaggaccagacccaggacaccgagctggtggagaccagacccgccggcgacggcaccttccagaagtgggccgccgtggtggtgcccagcggcgaggagcagagatacacctgccacgtgcagcacgagggcctgcccgagcccctgaccctgagatggggccccagcagccagcccaccatccccatcgtgggcatcgtggccggcctggccgtgctggccgtgctggccgtgctgggcgccgtgatggccgtggtgatgtgcagaagaaagagcagcggcagagagggcgtgagaagcggcgtgtggcccgccaccgtgcccagagccctgatgagcctgagcagcctggtgaagcccgagaccgccgcctgcgtgggcctgagatgcagaatcagcagccacctgagcttcgtgaccagcagagccagcggcatcagcttctgcaagggcatctag

SEQ ID NO: 85563 - DNA, 1101 bp, Artificial Sequence
  derived and/or modified sequence
atgagagtgatggcccccagaaccctgatcctgctgctgagcggcgccctggccctgaccgagacctgggcctgcagccacagcatgagatacttctacaccgccgtgagcagacccggcagaggcgagcccagattcatcgccgtgggctacgtggacgacacccagttcgtgcagttcgacagcgacgccgccagccccagaggcgagcccagagccccctgggtggagcaggagggccccgagtactgggacagagagacccagaagtacaagagacaggcccagaccgacagagtgaacctgagaaagctgagaggctactacaaccagagcgaggccggcagccacaccctgcagagaatgtacggctgcgacctgggccccgacggcagactgctgagaggctacaaccagttcgcctacgacggcaaggactacatcgccctgaacgaggacctgagaagctggaccgccgccgacaaggccgcccagatcacccagagaaagtgggaggccgccagagaggccgagcagagaagagcctacctggagggcacctgcgtggagtggctgagaagatacctggagaacggcaagaagaccctgcagagagccgagcaccccaagacccacgtgacccaccaccccgtgagcgaccacgaggccaccctgagatgctgggccctgggcttctaccccgccgagatcaccctgacctggcagagagacggcgaggaccagacccaggacaccgagctggtggagaccagacccgccggcgacggcaccttccagaagtgggccgccgtggtggtgcccagcggcgaggagcagagatacacctgccacgtgcagcacgagggcctgcccgagcccctgaccctgagatggggccccagcagccagcccaccatccccatcgtgggcatcgtggccggcctggccgtgctggccgtgctggccgtgctgggcgccgtgatggccgtggtgatgtgcagaagaaagagcagcggcggcaagggcggcagctgcagccaggccgccagcagcaacagcgcccagggcagcgacgagagcctgatcgcctgcaaggcctag

SEQ ID NO: 85564 - DNA, 1194 bp, Artificial Sequence
  derived and/or modified sequence
atgagagtgatggcccccagaaccctgatcctgctgctgagcggcgccctggccctgaccgagacctgggcctgcagccacagcatgagatacttctacaccgccgtgagcagacccggcagaggcgagcccagattcatcgccgtgggctacgtggacgacacccagttcgtgagattcgacagcgacgccgccagccccagaggcgagcccagagccccctgggtggagcaggagggccccgagtactgggacagagagacccagaagtacaagagacaggcccagaccgacagagtgagcctgagaaacctgagaggctactacaaccagagcgaggccggcagccacaccctgcagtggatgtacggctgcgacctgggccccgacggcagactgctgagaggctacgaccagagcgcctacgacggcaaggactacatcgccctgaacgaggacctgagaagctggaccgccgccgacaccgccgcccagatcacccagagaaagtgggaggccgccagagccgccgagcagcagagagcctacctggagggcacctgcgtggagtggctgagaagatacctggagaacggcaaggagaccctgcagagagccgagcaccccaagacccacgtgacccaccacctggtgagcgaccacgaggccaccctgagatgctgggccctgggcttctaccccgccgagatcaccctgacctggcagagagacggcgaggaccagacccaggacaccgagctggtggagaccagacccgccggcgacggcaccttccagaagtgggccgccgtggtggtgcccagcggcgaggagcagagatacacctgccacgtgcagcacgagggcctgcccgagcccctgaccctgagatgggagcccagcagccagcccaccatccccatcgtgggcatcgtggccggcctggccgtgctggccgtgctggccgtgctgggcgccgtggtggccgtggtgatgtgcagaagaaagagcagcggcagagagggcgtgagaagcggcgtgtggcccgccaccgtgcccagagccctgatgagcctgagcagcctggtgaagcccgagaccgccgcctgcgtgggcctgagatgcagaatcagcagccacctgagcttcgtgaccagcagagccagcggcatcagcttctgcaagggcatctag

SEQ ID NO: 85565 - DNA, 1119 bp, Artificial Sequence
  derived and/or modified sequence
atgagagtgatggcccccagaaccctgatcctgctgctgagcggcgccctggccctgaccgagacctgggccggcagccacagcatgagatacttctacaccgccgtgagcagacccggcagaggcgagccccacttcatcgccgtgggctacgtggacgacacccagttcgtgagattcgacagcgacgccgccagccccagaggcgagcccagagccccctgggtggagcaggagggccccgagtactgggacagagagacccagaagtacaagagacaggcccagaccgacagagtgagcctgagaaacctgagaggctactacaaccagagcgaggccggcagccacatcatccagagaatgtacggctgcgacgtgggccccgacggcagactgctgagaggctacgaccagtacgcctacgacggcaaggactacatcgccctgaacgaggacctgagaagctggaccgccgccgacaccgccgcccagatcacccagagaaagtgggaggccgccagagaggccgagcagctgagagcctacctggagggcctgtgcgtggagtggctgagaagatacctgaagaacggcaaggagaccctgcagagagccgagcaccccaagacccacgtgacccaccaccccgtgagcgaccacgaggccaccctgagatgctgggccctgggcttctaccccgccgagatcaccctgacctggcagtgggacggcgaggaccagacccaggacaccgagctggtggagaccagacccgccggcgacggcaccttccagaagtgggccgccgtggtggtgcccagcggcgaggagcagagatacacctgccacgtgcagcacgagggcctgcccgagcccctgaccctgagatgggagcccagcagccagcccaccatccccatcgtgggcatcgtggccggcctggccgtgctggccgtgctggccgtgctgggcgccgtggtggccgtggtgatgtgcagaagaaagagcagcggccacttcctgcccaccggcggcaagggcggcagctgcagccaggccgccagcagcaacagcgcccagggcagcgacgagagcctgatcgcctgcaaggcctag

SEQ ID NO: 85566 - DNA, 1020 bp, Artificial Sequence
  derived and/or modified sequence
atgagagtgatggcccccagaaccctgatcctgctgctgagcggcgccctggccctgaccgagacctgggcctgcagccacagcatgagatacttctacaccgccgtgagcagacccggcagaggcgagcccagattcatcgccgtgggctacgtggacgacacccagttcgtgagattcgacagcgacgccgccagccccagaggcgagcccagagccccctgggtggagcaggagggccccgagtactgggacagagagacccagaagtacaagagacaggcccagaccgacagagtgagcctgagaaacctgagaggctactacaaccagagcgaggccggcagccacaccctgcagtggatgtacggctgcgacctgggccccgacggcagactgctgagaggctacgaccagagcgcctacgacggcaaggactacatcgccctgaacgaggacctgagaagctggaccgccgccgacaccgccgcccagatcacccagagaaagtgggaggccgccagagccgccgagcagcagagagcctacctggagggcacctgcgtggagtggctgagaagatacctggagaacggcaaggagaccctgcagagagccgagcaccccaagacccacgtgacccaccacctggtgagcgaccacgaggccaccctgagatgctgggccctgggcttctaccccgccgagatcaccctgacctggcagagagacggcgaggaccagacccaggacaccgagctggtggagaccagacccgccggcgacggcaccttccagaagtgggccgccgtggtggtgcccagcggcgaggagcagagatacacctgccacgtgcagcacgagggcctgcccgagcccctgaccctgagatgggagcccagcagccagcccaccatccccatcgtgggcatcgtggccggcctggccgtgctggccgtgctggccgtgctgggcgccgtggtggccgtggtgatgtgcagaagaaagagcagcgcctag

SEQ ID NO: 85567 - DNA, 1101 bp, Artificial Sequence
  derived and/or modified sequence
atgagagtgatggcccccagaaccctgatcctgctgctgagcggcgccctggccctgaccgagacctgggcctgcagccacagcatgagatacttcgacaccgccgtgagcagacccggcagaggcgagcccagattcatcagcgtgggctacgtggacgacacccagttcgtgagattcgacagcgacgccgccagccccagaggcgagcccagagccccctgggtggagcaggagggccccgagtactgggacagagagacccagaagtacaagagacaggcccaggccgacagagtgaacctgagaaagctgagaggctactacaaccagagcgaggacggcagccacaccctgcagtggatgtacggctgcgacctgggccccgacggcagactgctgagaggctacgaccagagcgcctacgacggcaaggactacatcgccctgaacgaggacctgagaagctggaccgccgccgacaccgccgcccagatcacccagagaaagtgggaggccgccagagaggccgagcagtggagagcctacctggagggcacctgcgtggagtggctgagaagatacctggagaacggcaaggagaccctgcagagagccgagcaccccaagacccacgtgacccaccaccccgtgagcgaccacgaggccaccctgagatgctgggccctgggcttctaccccgccgagatcaccctgacctggcagagagacggcgaggaccagacccaggacaccgagctggtggagaccagacccgccggcgacggcaccttccagaagtgggccgccgtggtggtgcccagcggcgaggagcagagatacacctgccacgtgcagcacgagggcctgcccgagcccctgaccctgagatgggagcccagcagccagcccaccatccccatcgtgggcatcgtggccggcctggccgtgctggccgtgctggccgtgctgggcgccgtgatggccgtggtgatgtgcagaagaaagagcagcggcggcaagggcggcagctgcagccaggccgccagcagcaacagcgcccagggcagcgacgagagcctgatcgcctgcaaggcctag

SEQ ID NO: 85568 - DNA, 1107 bp, Artificial Sequence
  derived and/or modified sequence
atgagagtgatggcccccagagccctgctgctgctgctgagcggcggcctggccctgaccgagacctgggcctgcagccacagcatgagatacttcgacaccgccgtgagcagacccggcagaggcgagcccagattcatcagcgtgggctacgtggacgacacccagttcgtgagattcgacagcgacgccgccagccccagaggcgagcccagagccccctgggtggagcaggagggccccgagtactgggacagagagacccagaactacaagagacaggcccaggccgacagagtgagcctgagaaacctgagaggctactacaaccagagcgaggacggcagccacaccctgcagagaatgtacggctgcgacctgggccccgacggcagactgctgagaggctacgaccagagcgcctacgacggcaaggactacatcgccctgaacgaggacctgagaagctggaccgccgccgacaccgccgcccagatcacccagagaaagctggaggccgccagagccgccgagcagctgagagcctacctggagggcacctgcgtggagtggctgagaagatacctggagaacggcaaggagaccctgcagagagccgagccccccaagacccacgtgacccaccaccccctgagcgaccacgaggccaccctgagatgctgggccctgggcttctaccccgccgagatcaccctgacctggcagagagacggcgaggaccagacccaggacaccgagctggtggagaccagacccgccggcgacggcaccttccagaagtgggccgccgtggtggtgcccagcggccaggagcagagatacacctgccacatgcagcacgagggcctgcaggagcccctgaccctgagctgggagcccagcagccagcccaccatccccatcatgggcatcgtggccggcctggccgtgctggtggtgctggccgtgctgggcgccgtggtgaccgccatgatgtgcagaagaaagagcagcgccgcctgcgtgggcctgagatgcagaatcagcagccacctgagcttcgtgaccagcagagccagcggcatcagcttctgcaagggcgtgtag

SEQ ID NO: 85569 - DNA, 1194 bp, Artificial Sequence
  derived and/or modified sequence
atgagagtgatggcccccagaaccctgatcctgctgctgagcggcgccctggccctgaccgagacctgggcctgcagccacagcatgagatacttcgacaccgccgtgagcagacccggcagaggcgagcccagattcatcagcgtgggctacgtggacgacacccagttcgtgagattcgacagcgacgccgccagccccagaggcgagcccagagccccctgggtggagcaggagggccccgagtactgggacagagagacccagaagtacaagagacaggcccaggccgacagagtgaacctgagaaagctgagaggctactacaaccagagcgaggacggcagccacaccctgcagtggatgtacggctgcgacctgggccccgacggcagactgctgagaggctacgaccagagcgcctacgacggcaaggactacatcgccctgaacgaggacctgagaagctggaccgccgccgacaccgccgcccagatcacccagagaaagtgggaggccgccagagaggccgagcagtggagagcctacctggagggcacctgcgtggagtggctgagaagatacctggagaacggcaaggagaccctgcagagagccgagcaccccaagacccacgtgacccaccaccccgtgagcgaccacgaggccaccctgagatgctgggccctgggcttctaccccgccgagatcaccctgacctggcagagagacggcgaggaccagacccaggacaccgagctggtggagaccagacccgccggcgacggcaccttccagaagtgggccgccgtggtggtgcccagcggcgaggagcagagatacacctgccacgtgcagcacgagggcctgcccgagcccctgaccctgagatgggagcccagcagccagcccaccatccccatcgtgggcatcgtggccggcctggccgtgctggccgtgctggccgtgctgggcgccgtgatggccgtggtgatgtgcagaagaaagagcagcggcagagagggcgtgagaagcggcgtgtggcccgccaccgtgcccagagccctgatgagcctgagcagcctggtgaagcccgagaccgccgcctgcgtgggcctgagatgcagaatcagcagccacctgagcttcgtgaccagcagagccagcggcatcagcttctgcaagggcatctag

SEQ ID NO: 85570 - DNA, 1119 bp, Artificial Sequence
  derived and/or modified sequence
atgagagtgatggcccccagagccctgctgctgctgctgagcggcggcctggccctgaccgagacctgggcctgcagccacagcatgagatacttcgacaccgccgtgagcagacccggcagaggcgagcccagattcatcagcgtgggctacgtggacgacacccagttcgtgagattcgacagcgacgccgccagccccagaggcgagcccagagccccctgggtggagcaggagggccccgagtactgggacagagagacccagaactacaagagacaggcccaggccgacagagtgagcctgagaaacctgagaggctactacaaccagagcgaggacggcagccacaccctgcagagaatgtacggctgcgacctgggccccgacggcagactgctgagaggctacgaccagagcgcctacgacggcaaggactacatcgccctgaacgaggacctgagaagctggaccgccgccgacaccgccgcccagatcacccagagaaagctggaggccgccagagccgccgagcagctgagagcctacctggagggcacctgcgtggagtggctgagaagatacctggagaacggcaaggagaccctgcagagagccgagccccccaagacccacgtgacccaccaccccctgagcgaccacgaggccaccctgagatgctgggccctgggcttctaccccgccgagatcaccctgacctggcagagagacggcgaggaccagacccaggacaccgagctggtggagaccagacccgccggcgacggcaccttccagaagtgggccgccgtggtggtgcccagcggccaggagcagagatacacctgccacatgcagcacgagggcctgcaggagcccctgaccctgagctgggagcccagcagccagcccaccatccccatcatgggcatcgtggccggcctggccgtgctggtggtgctggccgtgctgggcgccgtggtgaccgccatgatgtgcagaagaaagagcagcggccacttcctgcccaccggcggcaagggcggcagctgcagccaggccgcctgcagcaacagcgcccagggcagcgacgagagcctgatcacctgcaaggcctag

SEQ ID NO: 85571 - DNA, 1101 bp, Artificial Sequence
  derived and/or modified sequence
atgagagtgatggcccccagagccctgctgctgctgctgagcggcggcctggccctgaccgagacctgggcctgcagccacagcatgagatacttcgacaccgccgtgagcagacccggcagaggcgagcccagattcatcagcgtgggctacgtggacgacacccagttcgtgagattcgacagcgacgccgccagccccagaggcgagcccagagccccctgggtggagcaggagggccccgagtactgggacagagagacccagaactacaagagacaggcccaggccgacagagtgagcctgagaaacctgagaggctactacaaccagagcgaggacggcagccacaccctgcagagaatgtacggctgcgacctgggccccgacggcagactgctgagaggctacgaccagagcgcctacgacggcaaggactacatcgccctgaacgaggacctgagaagctggaccgccgccgacaccgccgcccagatcacccagagaaagctggaggccgccagagccgccgagcagctgagagcctacctggagggcacctgcgtggagtggctgagaagatacctggagaacggcaaggagaccctgcagagagccgagccccccaagacccacgtgacccaccaccccctgagcgaccacgaggccaccctgagatgctgggccctgggcttctaccccgccgagatcaccctgacctggcagagagacggcgaggaccagacccaggacaccgagctggtggagaccagacccgccggcgacggcaccttccagaagtgggccgccgtggtggtgcccagcggccaggagcagagatacacctgccacatgcagcacgagggcctgcaggagcccctgaccctgagctgggagcccagcagccagcccaccatccccatcatgggcatcgtggccggcctggccgtgctggtggtgctggccgtgctgggcgccgtggtgaccgccatgatgtgcagaagaaagagcagcggcggcaagggcggcagctgcagccaggccgcctgcagcaacagcgcccagggcagcgacgagagcctgatcacctgcaaggcctag

SEQ ID NO: 85572 - DNA, 1107 bp, Artificial Sequence
  derived and/or modified sequence
atgagagtgatggcccccagaaccctgatcctgctgctgagcggcgccctggccctgaccgagacctgggccggcagccacagcatgagatacttctacaccgccgtgagcagacccggcagaggcgagccccacttcatcgccgtgggctacgtggacgacacccagttcgtgagattcgacagcgacgccgccagccccagaggcgagcccagagccccctgggtggagcaggagggccccgagtactgggacagagagacccagaagtacaagagacaggcccagaccgacagagtgagcctgagaaacctgagaggctactacaaccagagcgaggccggcagccacatcatccagagaatgtacggctgcgacgtgggccccgacggcagactgctgagaggctacgaccagtacgcctacgacggcaaggactacatcgccctgaacgaggacctgagaagctggaccgccgccgacaccgccgcccagatcacccagagaaagtgggaggccgccagagaggccgagcagctgagagcctacctggagggcctgtgcgtggagtggctgagaagatacctgaagaacggcaaggagaccctgcagagagccgagcaccccaagacccacgtgacccaccaccccgtgagcgaccacgaggccaccctgagatgctgggccctgggcttctaccccgccgagatcaccctgacctggcagtgggacggcgaggaccagacccaggacaccgagctggtggagaccagacccgccggcgacggcaccttccagaagtgggccgccgtggtggtgcccagcggcgaggagcagagatacacctgccacgtgcagcacgagggcctgcccgagcccctgaccctgagatgggagcccagcagccagcccaccatccccatcgtgggcatcgtggccggcctggccgtgctggccgtgctggccgtgctgggcgccgtggtggccgtggtgatgtgcagaagaaagagcagcgccgcctgcgtgggcctgagatgcagaatcagcagccacctgagcttcgtgaccagcagagccagcggcatcagcttctgcaagggcatctag

SEQ ID NO: 85573 - DNA, 1194 bp, Artificial Sequence
  derived and/or modified sequence
atgagagtgatggcccccagagccctgctgctgctgctgagcggcggcctggccctgaccgagacctgggcctgcagccacagcatgagatacttcgacaccgccgtgagcagacccggcagaggcgagcccagattcatcagcgtgggctacgtggacgacacccagttcgtgagattcgacagcgacgccgccagccccagaggcgagcccagagccccctgggtggagcaggagggccccgagtactgggacagagagacccagaactacaagagacaggcccaggccgacagagtgagcctgagaaacctgagaggctactacaaccagagcgaggacggcagccacaccctgcagagaatgtacggctgcgacctgggccccgacggcagactgctgagaggctacgaccagagcgcctacgacggcaaggactacatcgccctgaacgaggacctgagaagctggaccgccgccgacaccgccgcccagatcacccagagaaagctggaggccgccagagccgccgagcagctgagagcctacctggagggcacctgcgtggagtggctgagaagatacctggagaacggcaaggagaccctgcagagagccgagccccccaagacccacgtgacccaccaccccctgagcgaccacgaggccaccctgagatgctgggccctgggcttctaccccgccgagatcaccctgacctggcagagagacggcgaggaccagacccaggacaccgagctggtggagaccagacccgccggcgacggcaccttccagaagtgggccgccgtggtggtgcccagcggccaggagcagagatacacctgccacatgcagcacgagggcctgcaggagcccctgaccctgagctgggagcccagcagccagcccaccatccccatcatgggcatcgtggccggcctggccgtgctggtggtgctggccgtgctgggcgccgtggtgaccgccatgatgtgcagaagaaagagcagcggcagagagggcgtgaagagcggcgtgtgggccgccaccgtgcccagagccctgatgagcctgagcagcctggtgaagcccgagaccgccgcctgcgtgggcctgagatgcagaatcagcagccacctgagcttcgtgaccagcagagccagcggcatcagcttctgcaagggcgtgtag

SEQ ID NO: 85574 - DNA, 1068 bp, Artificial Sequence
  derived and/or modified sequence
atgagagtgatggcccccagaaccctgatcctgctgctgagcggcgccctggccctgaccgagacctgggccggcagccacagcatgagatacttctacaccgccgtgagcagacccggcagaggcgagccccacttcatcgccgtgggctacgtggacgacacccagttcgtgagattcgacagcgacgccgccagccccagaggcgagcccagagccccctgggtggagcaggagggccccgagtactgggacagagagacccagaagtacaagagacaggcccagaccgacagagtgagcctgagaaacctgagaggctactacaaccagagcgaggccggcagccacatcatccagagaatgtacggctgcgacgtgggccccgacggcagactgctgagaggctacgaccagtacgcctacgacggcaaggactacatcgccctgaacgaggacctgagaagctggaccgccgccgacaccgccgcccagatcacccagagaaagtgggaggccgccagagaggccgagcagctgagagcctacctggagggcctgtgcgtggagtggctgagaagatacctgaagaacggcaaggagaccctgcagagagccgagcaccccaagacccacgtgacccaccaccccgtgagcgaccacgaggccaccctgagatgctgggccctgggcttctaccccgccgagatcaccctgacctggcagtgggacggcgaggaccagacccaggacaccgagctggtggagaccagacccgccggcgacggcaccttccagaagtgggccgccgtggtggtgcccagcggcgaggagcagagatacacctgccacgtgcagcacgagggcctgcccgagcccctgaccctgagatgggagcccagcagccagcccaccatccccatcgtgggcatcgtggccggcctggccgtgctggccgtgctggccgtgctgggcgccgtggtggccgtggtgatgtgcagaagaaagagcagcgccagcaacagcgcccagggcagcgacgagagcctgatcgcctgcaaggcctag

SEQ ID NO: 85575 - DNA, 1107 bp, Artificial Sequence
  derived and/or modified sequence
atgagagtgatggcccccagaaccctgatcctgctgctgagcggcgccctggccctgaccgagacctgggcctgcagccacagcatgagatacttctacaccgccgtgagcagacccggcagaggcgagcccagattcatcgccgtgggctacgtggacgacacccagttcgtgcagttcgacagcgacgccgccagccccagaggcgagcccagagccccctgggtggagcaggagggccccgagtactgggacagagagacccagaagtacaagagacaggcccagaccgacagagtgaacctgagaaagctgagaggctactacaaccagagcgaggccggcagccacaccctgcagagaatgtacggctgcgacctgggccccgacggcagactgctgagaggctacaaccagttcgcctacgacggcaaggactacatcgccctgaacgaggacctgagaagctggaccgccgccgacaaggccgcccagatcacccagagaaagtgggaggccgccagagaggccgagcagagaagagcctacctggagggcacctgcgtggagtggctgagaagatacctggagaacggcaagaagaccctgcagagagccgagcaccccaagacccacgtgacccaccaccccgtgagcgaccacgaggccaccctgagatgctgggccctgggcttctaccccgccgagatcaccctgacctggcagagagacggcgaggaccagacccaggacaccgagctggtggagaccagacccgccggcgacggcaccttccagaagtgggccgccgtggtggtgcccagcggcgaggagcagagatacacctgccacgtgcagcacgagggcctgcccgagcccctgaccctgagatggggccccagcagccagcccaccatccccatcgtgggcatcgtggccggcctggccgtgctggccgtgctggccgtgctgggcgccgtgatggccgtggtgatgtgcagaagaaagagcagcgccgcctgcgtgggcctgagatgcagaatcagcagccacctgagcttcgtgaccagcagagccagcggcatcagcttctgcaagggcatctag

SEQ ID NO: 85576 - DNA, 786 bp, Artificial Sequence
  derived and/or modified sequence
tgaagagtgatggcccccagaaccctgatcctgctgctgagcggcgccctggccctgaccgagacctgggcctgcagccacagcatgagatacttctacaccgccgtgagcagacccggcagaggcgagcccagattcatcgccgtgggctacgtggacgacacccagttcgtgagattcgacagcgacgccgccagccccagaggcgagcccagagccccctgggtggagcaggagggccccgagtactgggacagagagacccagaagtacaagagacaggcccagaccgacagagtgagcctgagaaacctgagaggctactacaaccagagcgaggccggcagccacaccctgcagtggatgtacggctgcgacctgggccccgacggcagactgctgagaggctacgaccagagcgcctacgacggcaaggactacatcgccctgaacgaggacctgagaagctggaccgccgccgacaccgccgcccagatcacccagagaaagtgggaggccgccagagccgccgagcagcagagagcctacctggagggcacctgcgtggagtggctgagaagatacctggagaacggcaaggagaccctgcagagagccgagcaccccaagacccacgtgacccaccacctggtgagcgaccacgaggccagcagaagatggaacctgcccgaggtgggcagctgcggcggcgccttctggagaagagccgagatccacgtgccctgcgccgccagaggcgccgccggcgccccccaccccgagtag

SEQ ID NO: 85577 - DNA, 1101 bp, Artificial Sequence
  derived and/or modified sequence
atgagagtgatggcccccagaaccctgatcctgctgctgagcggcgccctggccctgaccgagacctgggcctgcagccacagcatgagatacttctacaccgccgtgagcagacccggcagaggcgagcccagattcatcgccgtgggctacgtggacgacacccagttcgtgagattcgacagcgacgccgccagccccagaggcgagcccagagccccctgggtggagcaggagggccccgagtactgggacagagagacccagaagtacaagagacaggcccagaccgacagagtgagcctgagaaacctgagaggctactacaaccagagcgaggccggcagccacaccctgcagtggatgtacggctgcgacctgggccccgacggcagactgctgagaggctacgaccagagcgcctacgacggcaaggactacatcgccctgaacgaggacctgagaagctggaccgccgccgacaccgccgcccagatcacccagagaaagtgggaggccgccagagccgccgagcagcagagagcctacctggagggcacctgcgtggagtggctgagaagatacctggagaacggcaaggagaccctgcagagagccgagcaccccaagacccacgtgacccaccacctggtgagcgaccacgaggccaccctgagatgctgggccctgggcttctaccccgccgagatcaccctgacctggcagagagacggcgaggaccagacccaggacaccgagctggtggagaccagacccgccggcgacggcaccttccagaagtgggccgccgtggtggtgcccagcggcgaggagcagagatacacctgccacgtgcagcacgagggcctgcccgagcccctgaccctgagatgggagcccagcagccagcccaccatccccatcgtgggcatcgtggccggcctggccgtgctggccgtgctggccgtgctgggcgccgtggtggccgtggtgatgtgcagaagaaagagcagcggcggcaagggcggcagctgcagccaggccgccagcagcaacagcgcccagggcagcgacgagagcctgatcgcctgcaaggcctag

SEQ ID NO: 85578 - DNA, 786 bp, Artificial Sequence
  derived and/or modified sequence
tgaagagtgatggcccccagaaccctgatcctgctgctgagcggcgccctggccctgaccgagacctgggcctgcagccacagcatgagatacttctacaccgccgtgagcagacccggcagaggcgagcccagattcatcgccgtgggctacgtggacgacacccagttcgtgcagttcgacagcgacgccgccagccccagaggcgagcccagagccccctgggtggagcaggagggccccgagtactgggacagagagacccagaagtacaagagacaggcccagaccgacagagtgaacctgagaaagctgagaggctactacaaccagagcgaggccggcagccacaccctgcagagaatgtacggctgcgacctgggccccgacggcagactgctgagaggctacaaccagttcgcctacgacggcaaggactacatcgccctgaacgaggacctgagaagctggaccgccgccgacaaggccgcccagatcacccagagaaagtgggaggccgccagagaggccgagcagagaagagcctacctggagggcacctgcgtggagtggctgagaagatacctggagaacggcaagaagaccctgcagagagccgagcaccccaagacccacgtgacccaccaccccgtgagcgaccacgaggccagcagaagatggaacctgcccgaggtgggcagctgcggcggcgccttctggagaagagccgagatccacgtgccctgcgccgccagaggcgccgccagagccccccaccccgagtag

SEQ ID NO: 85579 - DNA, 1119 bp, Artificial Sequence
  derived and/or modified sequence
atgagagtgatggcccccagaaccctgatcctgctgctgagcggcgccctggccctgaccgagacctgggcctgcagccacagcatgagatacttctacaccgccgtgagcagacccggcagaggcgagcccagattcatcgccgtgggctacgtggacgacacccagttcgtgagattcgacagcgacgccgccagccccagaggcgagcccagagccccctgggtggagcaggagggccccgagtactgggacagagagacccagaagtacaagagacaggcccagaccgacagagtgagcctgagaaacctgagaggctactacaaccagagcgaggccggcagccacaccctgcagtggatgtacggctgcgacctgggccccgacggcagactgctgagaggctacgaccagagcgcctacgacggcaaggactacatcgccctgaacgaggacctgagaagctggaccgccgccgacaccgccgcccagatcacccagagaaagtgggaggccgccagagccgccgagcagcagagagcctacctggagggcacctgcgtggagtggctgagaagatacctggagaacggcaaggagaccctgcagagagccgagcaccccaagacccacgtgacccaccacctggtgagcgaccacgaggccaccctgagatgctgggccctgggcttctaccccgccgagatcaccctgacctggcagagagacggcgaggaccagacccaggacaccgagctggtggagaccagacccgccggcgacggcaccttccagaagtgggccgccgtggtggtgcccagcggcgaggagcagagatacacctgccacgtgcagcacgagggcctgcccgagcccctgaccctgagatgggagcccagcagccagcccaccatccccatcgtgggcatcgtggccggcctggccgtgctggccgtgctggccgtgctgggcgccgtggtggccgtggtgatgtgcagaagaaagagcagcggccacttcctgcccaccggcggcaagggcggcagctgcagccaggccgccagcagcaacagcgcccagggcagcgacgagagcctgatcgcctgcaaggcctag

SEQ ID NO: 85580 - DNA, 786 bp, Artificial Sequence
  derived and/or modified sequence
tgaagagtgatggcccccagaaccctgatcctgctgctgagcggcgccctggccctgaccgagacctgggcctgcagccacagcatgagatacttcgacaccgccgtgagcagacccggcagaggcgagcccagattcatcagcgtgggctacgtggacgacacccagttcgtgagattcgacagcgacgccgccagccccagaggcgagcccagagccccctgggtggagcaggagggccccgagtactgggacagagagacccagaagtacaagagacaggcccaggccgacagagtgaacctgagaaagctgagaggctactacaaccagagcgaggacggcagccacaccctgcagtggatgtacggctgcgacctgggccccgacggcagactgctgagaggctacgaccagagcgcctacgacggcaaggactacatcgccctgaacgaggacctgagaagctggaccgccgccgacaccgccgcccagatcacccagagaaagtgggaggccgccagagaggccgagcagtggagagcctacctggagggcacctgcgtggagtggctgagaagatacctggagaacggcaaggagaccctgcagagagccgagcaccccaagacccacgtgacccaccaccccgtgagcgaccacgaggccagcagaagatggaacctgcccgaggtgggcagctgcggcggcgccttctggagaagagccgagatccacgtgccctgcgccgccagaggcgccgccagagccccccaccccgagtag

SEQ ID NO: 85581 - DNA, 1107 bp, Artificial Sequence
  derived and/or modified sequence
atgagagtgatggcccccagaaccctgatcctgctgctgagcggcgccctggccctgaccgagacctgggcctgcagccacagcatgagatacttcgacaccgccgtgagcagacccggcagaggcgagcccagattcatcagcgtgggctacgtggacgacacccagttcgtgagattcgacagcgacgccgccagccccagaggcgagcccagagccccctgggtggagcaggagggccccgagtactgggacagagagacccagaagtacaagagacaggcccaggccgacagagtgaacctgagaaagctgagaggctactacaaccagagcgaggacggcagccacaccctgcagtggatgtacggctgcgacctgggccccgacggcagactgctgagaggctacgaccagagcgcctacgacggcaaggactacatcgccctgaacgaggacctgagaagctggaccgccgccgacaccgccgcccagatcacccagagaaagtgggaggccgccagagaggccgagcagtggagagcctacctggagggcacctgcgtggagtggctgagaagatacctggagaacggcaaggagaccctgcagagagccgagcaccccaagacccacgtgacccaccaccccgtgagcgaccacgaggccaccctgagatgctgggccctgggcttctaccccgccgagatcaccctgacctggcagagagacggcgaggaccagacccaggacaccgagctggtggagaccagacccgccggcgacggcaccttccagaagtgggccgccgtggtggtgcccagcggcgaggagcagagatacacctgccacgtgcagcacgagggcctgcccgagcccctgaccctgagatgggagcccagcagccagcccaccatccccatcgtgggcatcgtggccggcctggccgtgctggccgtgctggccgtgctgggcgccgtgatggccgtggtgatgtgcagaagaaagagcagcgccgcctgcgtgggcctgagatgcagaatcagcagccacctgagcttcgtgaccagcagagccagcggcatcagcttctgcaagggcatctag

SEQ ID NO: 85582 - DNA, 786 bp, Artificial Sequence
  derived and/or modified sequence
tgaagagtgatggcccccagagccctgctgctgctgctgagcggcggcctggccctgaccgagacctgggcctgcagccacagcatgagatacttcgacaccgccgtgagcagacccggcagaggcgagcccagattcatcagcgtgggctacgtggacgacacccagttcgtgagattcgacagcgacgccgccagccccagaggcgagcccagagccccctgggtggagcaggagggccccgagtactgggacagagagacccagaactacaagagacaggcccaggccgacagagtgagcctgagaaacctgagaggctactacaaccagagcgaggacggcagccacaccctgcagagaatgtacggctgcgacctgggccccgacggcagactgctgagaggctacgaccagagcgcctacgacggcaaggactacatcgccctgaacgaggacctgagaagctggaccgccgccgacaccgccgcccagatcacccagagaaagctggaggccgccagagccgccgagcagctgagagcctacctggagggcacctgcgtggagtggctgagaagatacctggagaacggcaaggagaccctgcagagagccgagccccccaagacccacgtgacccaccaccccctgagcgaccacgaggccagcagaagatggaacctgcccgaggtgggcagctgcggcggcgccttctggaccagagccgagatccacgtgccctacgccgccagaggcgccgccagagccccccaccccgagtag

SEQ ID NO: 85583 - DNA, 1101 bp, Artificial Sequence
  derived and/or modified sequence
atgagagtgatggcccccagaaccctgatcctgctgctgagcggcgccctggccctgaccgagacctgggccggcagccacagcatgagatacttctacaccgccgtgagcagacccggcagaggcgagccccacttcatcgccgtgggctacgtggacgacacccagttcgtgagattcgacagcgacgccgccagccccagaggcgagcccagagccccctgggtggagcaggagggccccgagtactgggacagagagacccagaagtacaagagacaggcccagaccgacagagtgagcctgagaaacctgagaggctactacaaccagagcgaggccggcagccacatcatccagagaatgtacggctgcgacgtgggccccgacggcagactgctgagaggctacgaccagtacgcctacgacggcaaggactacatcgccctgaacgaggacctgagaagctggaccgccgccgacaccgccgcccagatcacccagagaaagtgggaggccgccagagaggccgagcagctgagagcctacctggagggcctgtgcgtggagtggctgagaagatacctgaagaacggcaaggagaccctgcagagagccgagcaccccaagacccacgtgacccaccaccccgtgagcgaccacgaggccaccctgagatgctgggccctgggcttctaccccgccgagatcaccctgacctggcagtgggacggcgaggaccagacccaggacaccgagctggtggagaccagacccgccggcgacggcaccttccagaagtgggccgccgtggtggtgcccagcggcgaggagcagagatacacctgccacgtgcagcacgagggcctgcccgagcccctgaccctgagatgggagcccagcagccagcccaccatccccatcgtgggcatcgtggccggcctggccgtgctggccgtgctggccgtgctgggcgccgtggtggccgtggtgatgtgcagaagaaagagcagcggcggcaagggcggcagctgcagccaggccgccagcagcaacagcgcccagggcagcgacgagagcctgatcgcctgcaaggcctag

SEQ ID NO: 85584 - DNA, 1119 bp, Artificial Sequence
  derived and/or modified sequence
atgagagtgatggcccccagaaccctgatcctgctgctgagcggcgccctggccctgaccgagacctgggcctgcagccacagcatgagatacttcgacaccgccgtgagcagacccggcagaggcgagcccagattcatcagcgtgggctacgtggacgacacccagttcgtgagattcgacagcgacgccgccagccccagaggcgagcccagagccccctgggtggagcaggagggccccgagtactgggacagagagacccagaagtacaagagacaggcccaggccgacagagtgaacctgagaaagctgagaggctactacaaccagagcgaggacggcagccacaccctgcagtggatgtacggctgcgacctgggccccgacggcagactgctgagaggctacgaccagagcgcctacgacggcaaggactacatcgccctgaacgaggacctgagaagctggaccgccgccgacaccgccgcccagatcacccagagaaagtgggaggccgccagagaggccgagcagtggagagcctacctggagggcacctgcgtggagtggctgagaagatacctggagaacggcaaggagaccctgcagagagccgagcaccccaagacccacgtgacccaccaccccgtgagcgaccacgaggccaccctgagatgctgggccctgggcttctaccccgccgagatcaccctgacctggcagagagacggcgaggaccagacccaggacaccgagctggtggagaccagacccgccggcgacggcaccttccagaagtgggccgccgtggtggtgcccagcggcgaggagcagagatacacctgccacgtgcagcacgagggcctgcccgagcccctgaccctgagatgggagcccagcagccagcccaccatccccatcgtgggcatcgtggccggcctggccgtgctggccgtgctggccgtgctgggcgccgtgatggccgtggtgatgtgcagaagaaagagcagcggccacttcctgcccaccggcggcaagggcggcagctgcagccaggccgccagcagcaacagcgcccagggcagcgacgagagcctgatcgcctgcaaggcctag

SEQ ID NO: 85585 - DNA, 675 bp, Artificial Sequence
  derived and/or modified sequence
atgagagtgatggcccccagaaccctgatcctgctgctgagcggcgccctggccctgaccgagacctgggcctgcagccacagcatgagatacttctacaccgccgtgagcagacccggcagaggcgagcccagattcatcgccgtgggctacgtggacgacacccagttcgtgcagttcgacagcgacgccgccagccccagaggcgagcccagagccccctgggtggagcaggagggccccgagtactgggacagagagacccagaagtacaagagacaggcccagaccgacagagtgaacctgagaaagctgagaggctactacaaccagagcgaggccggcagccacaccctgcagagaatgtacggctgcgacctgggccccgacggcagactgctgagaggctacaaccagttcgcctacgacggcaaggactacatcgccctgaacgaggacctgagaagctggaccgccgccgacaaggccgcccagatcacccagagaaagtgggaggccgccagagaggccgagcagagaagagcctacctggagggcacctgcgtggagtggctgagaagatacctggagaacggcaagaagaccctgcagagagccggccaggaccagaagagcctgttcctgccccagagactggagctgagcaacgagtag

SEQ ID NO: 85586 - DNA, 675 bp, Artificial Sequence
  derived and/or modified sequence
atgagagtgatggcccccagagccctgctgctgctgctgagcggcggcctggccctgaccgagacctgggcctgcagccacagcatgagatacttcgacaccgccgtgagcagacccggcagaggcgagcccagattcatcagcgtgggctacgtggacgacacccagttcgtgagattcgacagcgacgccgccagccccagaggcgagcccagagccccctgggtggagcaggagggccccgagtactgggacagagagacccagaactacaagagacaggcccaggccgacagagtgagcctgagaaacctgagaggctactacaaccagagcgaggacggcagccacaccctgcagagaatgtacggctgcgacctgggccccgacggcagactgctgagaggctacgaccagagcgcctacgacggcaaggactacatcgccctgaacgaggacctgagaagctggaccgccgccgacaccgccgcccagatcacccagagaaagctggaggccgccagagccgccgagcagctgagagcctacctggagggcacctgcgtggagtggctgagaagatacctggagaacggcaaggagaccctgcagagagccggccaggaccagaagagcctgttcctgccccagagactggagctgagcaacgagtag

SEQ ID NO: 85587 - DNA, 396 bp, Artificial Sequence
  derived and/or modified sequence
atgagagtgatggcccccagagccctgctgctgctgctgagcggcggcctggccctgaccgagacctgggcctgcagccacagcatgagatacttcgacaccgccgtgagcagacccggcagaggcgagcccagattcatcagcgtgggctacgtggacgacacccagttcgtgagattcgacagcgacgccgccagccccagaggcgagcccagagccccctgggtggagcaggagggccccgagtactgggacagagagacccagaactacaagagacaggcccaggccgacagagtgagcctgagaaacctgagaggctactacaaccagagcgaggacgaggacgtgtggctgagacccggcgccagaagagcccccccccccagagtgtag

SEQ ID NO: 85588 - DNA, 1212 bp, Artificial Sequence
  derived and/or modified sequence
atgagagtgatggcccccagagccctgctgctgctgctgagcggcggcctggccctgaccgagacctgggcctgcgagtgcggcgtgggcagagaggccgccagcgccgagagaagcgagggcccccccggcgagcccagaagagaggtgggcagagccggcctgagccccagcagcccccccggcagccacagcatgagatacttcgacaccgccgtgagcagacccggcagaggcgagcccagattcatcagcgtgggctacgtggacgacacccagttcgtgagattcgacagcgacgccgccagccccagaggcgagcccagagccccctgggtggagcaggagggccccgagtactgggacagagagacccagaactacaagagacaggcccaggccgacagagtgagcctgagaaacctgagaggctactacaaccagagcgaggacggcagccacaccctgcagagaatgtacggctgcgacctgggccccgacggcagactgctgagaggctacgaccagagcgcctacgacggcaaggactacatcgccctgaacgaggacctgagaagctggaccgccgccgacaccgccgcccagatcacccagagaaagctggaggccgccagagccgccgagcagctgagagcctacctggagggcacctgcgtggagtggctgagaagatacctggagaacggcaaggagaccctgcagagagccgagccccccaagacccacgtgacccaccaccccctgagcgaccacgaggccaccctgagatgctgggccctgggcttctaccccgccgagatcaccctgacctggcagagagacggcgaggaccagacccaggacaccgagctggtggagaccagacccgccggcgacggcaccttccagaagtgggccgccgtggtggtgcccagcggccaggagcagagatacacctgccacatgcagcacgagggcctgcaggagcccctgaccctgagctgggagcccagcagccagcccaccatccccatcatgggcatcgtggccggcctggccgtgctggtggtgctggccgtgctgggcgccgtggtgaccgccatgatgtgcagaagaaagagcagcggcggcaagggcggcagctgcagccaggccgcctgcagcaacagcgcccagggcagcgacgagagcctgatcacctgcaaggcctag

SEQ ID NO: 85589 - DNA, 981 bp, Artificial Sequence
  derived and/or modified sequence
atgagagtgatggcccccagaaccctgatcctgctgctgagcggcgccctggccctgaccgagacctgggcctgcagccacagcatgagatacttctacaccgccgtgagcagacccggcagaggcgagcccagattcatcgccgtgggctacgtggacgacacccagttcgtgagattcgacagcgacgccgccagccccagaggcgagcccagagccccctgggtggagcaggagggccccgagtactgggacagagagacccagaagtacaagagacaggcccagaccgacagagtgagcctgagaaacctgagaggctactacaaccagagcgaggccggcagccacaccctgcagtggatgtacggctgcgacctgggccccgacggcagactgctgagaggctacgaccagagcgcctacgacggcaaggactacatcgccctgaacgaggacctgagaagctggaccgccgccgacaccgccgcccagatcacccagagaaagtgggaggccgccagagccgccgagcagcagagagcctacctggagggcacctgcgtggagtggctgagaagatacctggagaacggcaaggagaccctgcagagagccgagcaccccaagacccacgtgacccaccacctggtgagcgaccacgaggccaccctgagatgctgggccctgggcttctaccccgccgagatcaccctgacctggcagagagacggcgaggaccagacccaggacaccgagctggtggagaccagacccgccggcgacggcaccttccagaagtgggccgccgtggtggtgcccagcggcgaggagcagagatacacctgccacgtgcagcacgagggcctgcccgagcccctgaccctgagatggggcggcaagggcggcagctgcagccaggccgccagcagcaacagcgcccagggcagcgacgagagcctgatcgcctgcaaggcctag

SEQ ID NO: 85590 - DNA, 1119 bp, Artificial Sequence
  derived and/or modified sequence
atgagggtgatggctccgcgaactctcatcctcctgctctccggtgccctcgcgctgactgagacctgggcttgctcacactcgatgcgatacttttacacagctgtttccaggcctggacgcggggaaccccgcttcatagccgtgggatacgtggacgacactcagtttgttcagttcgactcagatgccgcgagcccaagaggagaaccacgggccccctgggtggagcaggaggggcccgagtactgggacagagagactcagaagtataaacgccaggcccaaacagatcgtgtgaatttgcggaaattgaggggctattacaaccaatctgaagcgggtagtcatacgcttcagcgaatgtacgggtgtgacttaggtcctgacggtaggctactccgaggatataaccaattcgcctacgacggcaaggactatattgcactgaatgaggatctccgatcatggactgccgccgataaagccgcccagatcacacagcgtaaatgggaggctgcccgagaggcagagcaaagacgtgcctacctggaaggcacatgtgtggagtggctcaggagatacctggaaaatgggaaaaaaacgcttcagcgcgccgagcaccctaagacacacgttacacatcaccctgtatctgatcacgaagcgaccctgcgctgctgggcactgggtttttaccctgccgaaattactctgacttggcagagagacggagaagatcagacacaggacaccgagctggtagaaacccgtcccgccggggatggtacattccagaagtgggctgcagttgttgttccttcaggagaagagcaacggtacacgtgtcatgtccagcacgaaggtcttcccgaaccactgaccctacgctgggggcctagcagccaaccaaccattcccatcgtggggatagtcgccggattagccgtcctggccgtccttgctgtcctgggcgccgtcatggccgtcgtgatgtgtcgaaggaaatcatccggacatttcctgccaactggggggaaaggcgggtcttgtagccaagcggcgagttcgaatagcgcacagggtagtgacgagagccttatcgcctgcaaagcctag

SEQ ID NO: 85591 - DNA, 1194 bp, Artificial Sequence
  derived and/or modified sequence
atgcgcgtgatggctcccagaacactcattctacttttgagtggcgcgctggcgcttacagagacctgggcatgcagtcactcaatgcggtatttttatacagcagtgtcccgacccgggagaggagagccccgcttcattgccgtgggatatgtggacgatacccagttcgttcaatttgacagtgacgccgcctcaccccggggcgagcccagagccccttgggtggagcaggaaggcccggaatactgggacagagagactcagaagtataagcggcaagctcagactgacagggtcaatttaaggaaattgaggggctactacaatcagagcgaggccgggtcacacaccttgcagagaatgtacggatgtgatctaggacctgacggacggctactgagaggctataatcaattcgcgtacgatggaaaagactatattgccctgaatgaagatctgagatcctggactgctgccgataaggcagcccagatcactcagcggaaatgggaagcggcgcgcgaggccgaacagcgtcgcgcatacttagaaggaacttgtgtggagtggctgaggagataccttgaaaacgggaagaagaccctacagagggccgaacacccgaaaacccacgtgactcaccacccggtaagtgatcatgaggcaacgcttcgatgttgggccttgggattttatcccgccgagattacgctgacctggcagagagatggcgaggaccagacacaggacaccgaacttgtggagactagacccgcaggtgacggaacattccaaaagtgggccgcagtggtggtcccctctggcgaggagcagcgctacacttgtcacgtgcagcacgaaggattgcccgagccacttaccctcaggtggggaccctccagtcagcccactattcccattgtagggatcgtagcgggcctggctgtcctcgccgtattggccgtgttgggggctgttatggctgtggtgatgtgtcgccgaaagtcctccgggcgtgagggcgttcggagtggggtgtggcccgcaacagtcccacgcgcccttatgtcactgtctagtctggtgaagcccgagactgccgcatgcgtggggctccgatgtcggatttctagccacctgagttttgtgacatctagggcctctggtatctctttttgtaagggaatttag

SEQ ID NO: 85592 - DNA, 1119 bp, Artificial Sequence
  derived and/or modified sequence
atgagggtgatggctccgaggacactaatcctgctcttgtctggagccctggccctgaccgagacctgggcctgttcccacagcatgagatacttttacacagctgtcagtcgccccggacgcggtgagcctaggttcattgccgtcgggtatgttgacgatacgcaatttgttcagttcgatagcgacgccgcctcaccccgcggagagcccagagctccctgggtagagcaggagggccctgagtactgggatagagagacccagaagtacaaacggcaggcccagacagaccgcgtgaatttgcgcaaactgaggggctactataaccagtccgaagccgggtctcacacgctccagcgcatgtacggatgcgacctcgggccagacggtcgcctcttgcgcggatataaccaatttgcctacgacggaaaagactacatcgcccttaacgaagatttgcgctcgtggaccgctgccgacaaagccgcccagatcacacaaagaaaatgggaagctgctcgcgaagcggaacagaggagggcctacctggaggggacatgtgtcgagtggctgcggagatatctggaaaacggcaagaaaactttacaaagagccgaacatcccaaaactcatgtgacacaccaccccgttagcgatcatgaagccactttgcggtgctgggctctgggcttctaccctgctgagattaccctcacttggcaacgggacggggaagaccagactcaagatacagagctcgttgagaccagacccgccggggatggtacctttcagaagtgggccgcggtggtcgtgcctagcggcgaggaacaaaggtacacatgtcacgtgcagcacgagggcctgccagaacctctcactttgagatggggtccatcatctcagccgaccattcccattgttgggatcgttgcaggcctcgctgtcctggcggtgttggctgtgctgggggccgtgatggcagttgtgatgtgccgcagaaagtccagtggccactttctgcccacaggtggtaagggggggtcctgctctcaggcagcctccagcaactccgcacagggatcggatgaaagtctcattgcttgtaaagcatag

SEQ ID NO: 85593 - DNA, 1101 bp, Artificial Sequence
  derived and/or modified sequence
atgcgagtgatggcccctcggacgttgatactgctgctttctggcgccctcgcactcaccgaaacatgggcctgtagccactctatgcggtacttctacaccgccgtttctcgcccgggtcgcggtgaacctagatttattgctgtgggttacgtggacgatacgcagttcgtccagtttgactccgacgctgcctccccgcggggcgagcctcgcgctccgtgggtggaacaggaaggaccagagtactgggaccgcgagactcaaaagtataaacggcaggcccagaccgaccgcgtgaacctccgaaagctgagagggtattacaaccagagcgaggcgggcagccatacactacagcggatgtacggctgtgatcttggccccgatgggaggttactcaggggatacaaccagttcgcatacgatggtaaggattacattgccctgaacgaggatctcagatcctggactgccgcagataaggctgcacagattacacaacgaaagtgggaagctgcgagggaagcggagcagcgacgtgcctatttggaagggacttgcgtggaatggctccgccgctatttggagaatggaaaaaaaactctccagagagctgagcaccccaagacccacgtcacgcatcatcctgtctcagaccacgaagcgactctccgctgctgggccttgggattttaccccgctgagataacgctgacttggcagagggacggcgaagatcagacccaggacactgaactcgtggagactcgaccagctggtgatgggacattccaaaagtgggcagcagtcgtggtgccttcaggagaagagcagcgctacacctgtcacgttcagcatgaaggactgcccgagcccctcactttacggtggggtccatccagccagccaaccatccctatcgtgggcattgttgccggtctcgctgtattggccgtgctggctgtgctgggagccgtgatggccgtcgttatgtgccgccgcaaatctagtggggggaagggcggtagttgctcacaagctgcgagctctaactccgcacaaggcagcgatgagtcgctgattgcgtgtaaagcgtag

SEQ ID NO: 85594 - DNA, 1101 bp, Artificial Sequence
  derived and/or modified sequence
atgagagtgatggctccccgaacactgatactactcctgtctggggccctcgccctgactgagacttgggcttgctcacacagcatgcgttatttctacacagccgttagtagacctggacgtggggaaccaaggttcattgccgttgggtacgtcgacgatacgcaattcgtccagtttgattccgacgcggcaagcccccggggcgaaccacgcgccccttgggttgagcaggaagggccggaatattgggaccgagaaacacagaaatataaacgccaggcacaaaccgatcgcgtgaacttacggaagctgaggggatactacaaccaatccgaagctgggtctcacactctgcagcgcatgtatggctgcgatctgggccctgatggccgactcctgaggggctacaatcagtttgcctacgacggaaaggactatatcgctttgaacgaggatctaaggagttggacggccgcagacaaagcggcacaaatcactcagaggaaatgggaggcagccagagaagcggagcaacggagggcatatttggagggcacgtgcgtggagtggctcaggcggtatctggaaaacggaaaaaaaaccctgcagcgcgcagagcaccccaagactcacgtgacgcaccacccagtgtctgaccatgaagctacgcttaggtgttgggcattaggtttttatcccgccgagattaccctgacctggcaacgtgacggcgaggatcagacacaggacacagagctggtcgaaacgcgccccgcaggagatggcacgtttcagaaatgggcggccgtggtggtgcccagcggggaagagcagagatacacgtgtcacgttcaacatgaaggtctccctgaacctctcacactgcggtggggaccgagttcgcagcctaccattcctattgttggtatagtcgccggtctggcagttcttgccgtgctcgctgttttgggagcagtaatggccgtggtgatgtgccgtagaaagtcatccggcggcaaaggaggaagctgctcccaggcagcgagttccaattccgcccaagggtccgatgagtcgctgatagcctgtaaggcttag

SEQ ID NO: 85595 - DNA, 1194 bp, Artificial Sequence
  derived and/or modified sequence
atgcgcgtcatggctcctaggactctgatactgctgctgagtggcgcattggcccttacagaaacctgggcgtgctcccattctatgcgttacttttataccgccgtgtcccgacctgggcgcggagagccgaggttcatcgcggtggggtacgtggatgacactcagtttgtgcagttcgatagtgacgccgcgtccccaagaggagagcccagggcaccctgggtggagcaggaagggccagagtactgggacagggaaacccaaaagtataagcggcaggcccagaccgaccgggtgaacttaagaaaattgcgggggtattacaatcagagcgaagcagggtcccacacactgcagcgtatgtacggctgcgatctgggacctgatggacggctactgagaggatataaccaattcgcctacgacgggaaggattacatcgcccttaatgaggatctgaggagctggactgccgctgacaaagctgcccagattacccagcggaaatgggaagctgctagagaagccgaacagcggagagcttacctagaaggcacctgtgtcgagtggctgcggaggtatctggagaatggcaagaagactcttcagagggccgagcatcctaagactcacgtgacacaccatcccgtgtctgatcacgaagctacgttgaggtgttgggccctggggttctatcccgcagaaataacgctgacatggcaaagggatggagaggaccagactcaggatacagaactggtggaaaccagacccgccggggacggcacctttcaaaaatgggccgctgtggtggttccaagcggggaggagcagcgctacacatgtcatgtacagcatgagggcctgcctgaaccgttgactttgcggtgggggccatcctcccagccaacgatccctattgtggggatcgtggccggcctagccgtgcttgcagtgttagccgtgctgggggctgtaatggccgttgtgatgtgtcgacggaagtctagtggccgagaaggagtaaggagcggtgtgtggccagccaccgtcccacgggccctgatgtccctttcctctttagtcaaaccagagaccgcagcatgtgtaggactaagatgtcggatctcctctcatttgagttttgtgacctccagagcatcaggcatctcattttgcaagggaatctag

SEQ ID NO: 85596 - DNA, 1194 bp, Artificial Sequence
  derived and/or modified sequence
atgcgggtgatggcccccaggactttgatcctgttgctgtccggtgccctggccctaactgaaacatgggcttgtagtcacagtatgaggtatttttacacagccgtttctaggcccggcagaggcgaacctcggtttatagctgtgggctacgtggacgacactcagttcgtccgatttgatagtgacgctgcttccccgcggggcgagcccagggctccctgggtcgaacaggagggccccgaatactgggatcgcgagacccagaaatataaaaggcaggcacagacagaccgggtgtcacttagaaatctgagaggatattacaatcaatctgaagcaggctcccatacgcttcagtggatgtatgggtgcgacctaggtcccgacggccggctactgagaggctacgatcagagcgcctatgatggaaaagactacatcgcactgaacgaggacctcaggtcgtggacagcagcggacaccgcagcacagatcactcagcgcaagtgggaggccgccagggcggccgaacagcaacgagcctatctggaaggaacgtgcgtggagtggctgcggcgatacttagaaaacggtaaggaaaccttacaaagagccgaacatcccaaaactcacgtgacgcaccacctagtctcagaccacgaggccacactgcggtgctgggcattgggtttctatcctgctgagatcactcttacatggcagcgagacggcgaggatcagactcaggataccgaactcgttgagactcggcccgcgggagacggaacatttcagaaatgggctgccgtggtggtcccttccggggaggagcagaggtacacatgccatgtgcagcatgagggactgcccgaacctcttacgctgcgctgggagcccagctctcaaccgacaatccctattgtgggcatcgtggccggacttgccgtgctggctgttctggccgtgctgggagctgtggtcgccgttgtcatgtgccgtaggaaatctagcggaagagagggggtgcggagcggcgtttggccagcgacagtgcccagagccctcatgagcctgagttcactcgtgaagcctgagactgccgcatgcgtagggttacgctgccgaatctccagccatctgtcttttgtcacaagtagggcttccggaattagcttttgtaagggtatatag

SEQ ID NO: 85597 - DNA, 1119 bp, Artificial Sequence
  derived and/or modified sequence
atgagggttatggcacctcgaacccttattcttctcctgagcggagccttggccttgacggaaacatgggcgggatctcactctatgagatatttttataccgcggtatctcggccaggcagaggagagccccatttcatcgccgttggctacgttgacgatacacaatttgtgagattcgattccgatgccgccagtccacggggcgaaccccgagcaccatgggttgaacaggagggtcccgagtattgggaccgagagacccagaagtacaagcgccaggcccagacagaccgggtaagcctgcggaatctgcggggatactataaccaaagcgaggctggctctcacattattcagcggatgtatggttgtgacgtgggacctgatgggcgcctcctgcgcggctacgatcagtacgcctatgatgggaaagactatatcgccctgaacgaggacttacgctcctggaccgctgcggataccgcagcccaaataacacagcggaaatgggaggcagcccgggaggcggagcagttaagggcctaccttgaggggctatgtgtggagtggctcagacgttacctgaaaaacggcaaggagacccttcagcgagcagagcaccctaaaacacatgtcactcatcaccctgtctcagaccatgaggcgaccctgaggtgctgggccctaggcttttatccagccgagataaccttgacttggcagtgggacggcgaggatcagacccaggacactgaactggtggagactaggcccgcaggggacgggacttttcagaaatgggcggcggtagtggtaccgagtggcgaggaacagcgatacacttgtcacgtgcagcacgagggcctgccagagccgctgacactgaggtgggagccttcttcacagcccacaattcccatagtggggatcgtcgccggcctcgcagtgttagccgttctggcagtcctaggggctgtcgtggccgtcgtcatgtgcaggagaaaatctagcggccatttcctgcccactgggggaaaaggcggctcttgcagccaggctgcatcgtcaaactccgcccaaggcagtgatgaatcacttattgcttgtaaggcttag

SEQ ID NO: 85598 - DNA, 1020 bp, Artificial Sequence
  derived and/or modified sequence
atgcgggtaatggcccctaggaccctaatcctgcttctaagcggcgcccttgcgctgacagagacctgggcttgctcacacagcatgagatatttttataccgcagtcagtcggcccggtcgcggagagccacgttttattgccgtagggtatgtggatgatacccagttcgttcgctttgattcagatgcggccagcccgcggggtgaacccagagccccttgggttgagcaggagggccctgagtattgggatcgggagactcaaaagtacaagagacaagcccagactgaccgcgtgtctctccggaacttgcggggctactacaatcagagtgaagctgggagccataccctgcagtggatgtatggttgtgatcttgggcctgatggtaggctgcttcgcggctacgatcagtcagcgtacgatggcaaagattatatcgccctgaacgaggatttacgctcttggaccgctgcagacacggctgcccagattacacagagaaagtgggaagcagctcgggccgcggagcagcagagagcatacttagagggcacgtgtgtcgagtggcttcgccgatacctggagaatggcaaagaaactctccagcgagcggaacaccccaagacccacgtgactcaccacctggtatccgatcacgaggccacactacggtgttgggccctgggattttatccggcagaaatcaccctgacctggcagcgagacggagaggatcaaacgcaagacaccgagttggttgaaacaagaccagctggcgatggcacctttcagaaatgggctgcagtcgtggtccccagtggggaagagcagcgctatacatgccacgtgcaacatgagggtctacctgagccgctgactttgagatgggagccgtcctcccagcctacaattcccatcgtaggcattgtggctgggctcgcagtgctcgctgtgcttgccgtgttgggggcagtcgtggcagtggtgatgtgtcgacgtaagagttctgcctag

SEQ ID NO: 85599 - DNA, 1101 bp, Artificial Sequence
  derived and/or modified sequence
atgagagtgatggcacctcgcactttgatcctgcttctgtcaggcgcgctggctctcacagaaacctgggcgtgttctcactccatgcggtacttcgacacagccgtgtcccgcccaggccggggagagcccaggttcatcagcgttggatatgtagacgacacgcagtttgtgaggttcgatagcgacgccgcgtcacccagaggggagccacgcgcaccatgggtcgagcaggaagggcccgagtactgggatcgtgaaacgcagaaatataaacggcaggctcaggcagatcgagtgaacctccggaaactgcgggggtactacaaccaatccgaagatggcagccataccctccagtggatgtacgggtgcgacttaggcccagatggcaggctgttaaggggttatgaccaatctgcctatgatggcaaagattacattgcgctcaatgaagacttgcgatcatggaccgcggccgatacagcagcccagatcacccaaagaaagtgggaagccgcaagagaggcagaacagtggagagcttatctggaaggtacatgtgtggagtggctgagaagataccttgaaaatggcaaagagaccttgcaaagagcagagcatccaaagacccatgtcacacaccacccagtgtccgatcatgaggcaactttgcggtgctgggccctgggattttaccccgcagaaattaccctcacctggcaacgcgatggggaggatcagacccaggatacggagcttgtcgaaacacggccagctggagacggcacattccagaagtgggcagcagtggttgtcccatccggcgaggaacaacgctatacctgccacgtgcagcatgaaggactgccagaacccctgacacttcgttgggagccgagtagccagccaactatccccatagtcggtattgtggcaggtcttgctgtcctagcagtgctcgctgtgcttggggcggtaatggctgtggttatgtgtcggcggaagtcttctgggggtaagggtggctcctgctcacaggccgcctcctccaacagcgcccaggggtcggatgagagtctcatcgcctgtaaagcttag

SEQ ID NO: 85600 - DNA, 1107 bp, Artificial Sequence
  derived and/or modified sequence
atgcgcgtgatggcgcctcgagccctgctcttgctgctctctggcgggcttgcactcaccgaaacatgggcctgttcccattccatgaggtactttgacacagccgtgtcacgtccaggccggggagagccaagattcatctcagtgggctatgttgatgacacccagtttgtgcggtttgactccgatgccgcctctcctcgcggtgaacctcgggccccctgggtcgagcaggagggccctgaatattgggacagggaaacacagaactacaagcggcaggctcaggcagatagggtaagtctgcgcaacctacggggctactacaatcagtcagaagatgggagccacaccctccagcggatgtacgggtgcgaccttggacccgacggaaggttgctccgggggtatgaccagagcgcctatgacggaaaggattacatcgcactcaacgaggatctgcgctcatggactgccgcagacaccgccgctcagattacccagagaaagttggaggctgcaagggcagctgagcagctgagagcgtacctggagggcacatgtgtggagtggctccgcagatacctggagaacgggaaggagaccttacaacgggccgagccaccaaaaacgcatgtcacacaccacccactgtcagaccacgaggccacccttcgatgctgggctctcgggttctaccctgctgagattacactgacttggcagcgcgatggcgaggatcagacccaagatacagaactcgttgaaactaggccggcgggtgatggtacatttcagaagtgggccgcagtcgtggtgcctagcggccaggagcaacgttatacttgccacatgcagcacgaaggcctgcaggagcctttaaccctatcatgggagccctccagccagccaaccatacctatcatggggatagtcgccggtctcgccgtgctggtggtgcttgccgtattgggcgccgtggtaacggctatgatgtgcaggcgtaagtcaagcgcagcctgtgtggggcttcgttgccgcatttcctctcatctctctttcgtcacctcgagagcttcggggatctctttttgtaagggggtgtag

SEQ ID NO: 85601 - DNA, 1194 bp, Artificial Sequence
  derived and/or modified sequence
atgagggtcatggctccccggaccctcatcctactgcttagcggggctttagcgctgaccgagacatgggcttgttcacatagtatgagatactttgacaccgcagtgtcccgtcctggcaggggcgagccgcggtttatctccgtgggctatgtggatgacactcagtttgtgaggttcgactccgatgcagcaagcccacgaggcgagccaagagctccatgggtggagcaggaaggacccgaatattgggaccgggagacacagaaatataagagacaggcacaggccgaccgggtgaacctgagaaagctgaggggttactataatcagtccgaagacgggagccacactttacaatggatgtacgggtgcgatttagggccagatggccgactgctgaggggttacgatcagtcagcctacgatggcaaggattatatcgctctgaacgaggacttgaggagctggacggccgccgatactgctgcacagatcactcaaagaaagtgggaagccgcacgtgaggcagagcagtggagggcctatcttgaaggtacttgcgtcgagtggttgaggagatacctggaaaacggaaaggagaccctgcaaagagcggaacatccaaagactcacgtcactcaccacccagtgagtgatcatgaagcaaccctccggtgctgggcactgggcttttacccagccgagatcactctgacctggcaacgagatggggaggatcagacccaggatacggagctagtcgagacaaggcccgccggggatggcacttttcagaagtgggctgccgtggtcgtgccttcgggtgaagagcaaagatatacctgtcacgtacagcacgagggccttcccgaaccacttaccctgaggtgggaaccctcctcccagccaaccattccaatagtaggaattgtggccggcttggcggtcctggcggtcctcgcggtcttaggtgctgtgatggccgtcgttatgtgccgtaggaagtcatctggaagagagggcgtaagatctggggtctggccagctacggtgccacgagccctcatgagcctgtcttcactggtgaaacctgaaacggcagcctgtgtcggtctgcggtgtcgtatcagctcgcacctgagctttgtcactagccgggcttcgggaatttccttttgtaagggcatatag

SEQ ID NO: 85602 - DNA, 1119 bp, Artificial Sequence
  derived and/or modified sequence
atgagagtgatggccccaagagccctgctcttgttgctgagtggcggcttggccctgacggagacttgggcatgtagccattctatgcgttacttcgataccgctgtgtcaaggccaggaagaggtgaaccacggttcattagtgttggctacgtggacgatacgcagtttgttaggtttgactccgatgccgccagcccccggggggaacctagggcaccatgggtggaacaggaaggcccagagtactgggatagagaaacgcagaattacaagaggcaggctcaggctgaccgcgtgagtttgcgcaatttgcggggctattataaccagtcggaggacggcagccatactctgcagcggatgtacggatgtgacctaggtcctgatggtaggttactccgaggctacgaccagagtgcctatgatggtaaagattatatcgccctgaacgaggacctcaggagctggaccgctgccgacactgcggcccagataacacagcgtaaactggaggctgctcgcgctgccgagcagctccgggcttacctcgagggcacatgtgtggagtggctcaggcgctatctagagaacggaaaggaaacactccagagagcagaacctccaaaaacccacgttactcaccatcccctgagcgaccacgaggcgactctgcgctgttgggcattggggttttaccccgccgaaattacattaacttggcagagggatggggaagaccagacccaggataccgagctggttgagacacgacccgctggagacggaacattccagaagtgggcagcagttgtggtcccgtcggggcaggagcagcgttatacatgccacatgcagcacgagggactacaagaacctctcactctcagttgggagcctagctcccaaccgaccattcccattatgggaatcgtggctggactagccgtgctggtcgtacttgctgtcctgggcgcagtggtgacggccatgatgtgcaggcgcaagtcctctggacacttcttgccaacaggtggcaaaggtggtagttgttcacaagcagcctgctcaaatagcgcgcaggggagtgacgaaagcttaatcacatgcaaggcctag

SEQ ID NO: 85603 - DNA, 1101 bp, Artificial Sequence
  derived and/or modified sequence
atgcgcgtcatggccccccgagccctgcttctgctgttgagcggcggactggcactgaccgagacctgggcatgtagccacagcatgaggtacttcgacaccgccgtatcacgccccgggagaggagagccgaggtttatctcggtgggctacgtggacgacactcagttcgtccgctttgattctgacgctgcctcccccagaggggaaccccgggccccttgggtggagcaagaaggtcccgaatattgggatcgggagacacagaactacaagaggcaagcccaggccgatagagtatcattacgcaatctgagggggtattacaatcagtctgaggatggcagtcacacgctgcagcggatgtatggatgcgacctcggccccgacggcaggctcctccgcgggtacgatcaatcagcatatgacggaaaggactacatcgctctgaacgaagacttgcggtcctggacagctgctgataccgcggcccaaattactcagaggaaactggaggccgcgagagccgctgaacagttacgcgcatacttagaaggaacgtgcgttgaatggttaagaagatacctggagaacggcaaagagacacttcaaagagccgagcctcccaaaacgcacgtgactcatcaccccctgagtgaccacgaggctactttgaggtgctgggcactgggcttttaccccgcagagattactttgacttggcagcgggatggtgaagaccaaacccaggataccgagcttgtggagacacggccagccggtgacgggacattccagaagtgggccgccgtggtggtgccttccggtcaggagcagagatatacttgccacatgcagcacgagggcctgcaggagccacttacgcttagctgggagcccagcagccaaccaaccatacctattatgggcattgtggccggacttgcagttctcgtggtcctcgccgtcttgggcgctgtggtgaccgctatgatgtgcagaagaaaaagttcaggcggcaagggtggttcatgtagtcaggccgcttgttctaattccgctcagggatccgacgaatccctgatcacttgcaaggcctag

SEQ ID NO: 85604 - DNA, 1107 bp, Artificial Sequence
  derived and/or modified sequence
atgcgggtgatggccccacgcactctgatcctgcttttgtcgggcgcactggctttgactgaaacttgggccggatctcattcgatgagatatttttataccgcagtcagcagacccggccggggcgaaccccattttatcgccgttggatacgtagatgacactcaattcgtccggtttgactctgacgcggcttcgccgcggggggaaccgcgagcaccgtgggtcgaacaggaaggtccagagtactgggaccgggagacccaaaagtacaagagacaggcacagacagatcgagtgtcactcagaaatctccggggctattacaaccaatcagaggcagggagtcacatcatccagaggatgtatgggtgcgatgtgggccccgacggccggctactccgcggctatgatcagtatgcatatgatgggaaggattatattgcccttaacgaggatctgcgttcgtggaccgctgcggacactgctgcacagattactcagagaaaatgggaagcggctagggaggccgaacagctccgggcttacctagaaggcttgtgcgtggagtggctcagaaggtacctcaagaatggcaaagaaacccttcagagggccgaacaccctaaaactcatgtgactcaccaccccgtgtcagatcatgaggccacccttaggtgttgggccttgggattctaccccgctgagattacgctcacctggcagtgggatggagaagatcagactcaagatacagagctggtggagacacggcccgctggtgacggtaccttccaaaaatgggctgccgtagtcgtgccaagcggagaggaacagaggtacacttgccacgtgcagcatgagggcctgcctgagccccttacacttcggtgggaaccaagttcccagccaacaatccccatcgttggaatcgtagccggtcttgcagtgttggcggtcctggccgtgttaggggcagtggtggctgtcgtgatgtgcagaaggaaaagctcagcagcttgcgtaggattacggtgccgcattagtagccacctcagtttcgttacttcaagggcaagtggcatatccttttgcaaaggcatatag

SEQ ID NO: 85605 - DNA, 1194 bp, Artificial Sequence
  derived and/or modified sequence
atgcgggtgatggctccccgtgcgctgctcctgctcctctcaggcggtctcgcattgactgagacctgggcttgcagccattctatgaggtattttgacacagctgtatcccgccccgggcgcggggaaccacgattcatctcagttggatatgtggatgacactcagtttgtccgtttcgacagcgacgctgcctccccccgcggtgagcccagggctccttgggtggagcaggaggggccggaatattgggatcgcgagacacagaattacaaacggcaggcccaggccgatcgtgtctctctgaggaacctgcgcggatattacaaccaatcggaagacgggagtcacacactgcaacgcatgtacgggtgcgatctgggacctgacggtcgcttgcttcggggttacgaccaatcggcttatgatggcaaggattacattgccctcaacgaggatctgaggtcttggaccgccgccgataccgctgcacagatcacacagcggaaactggaggcagctagggccgctgaacagctgcgcgcttacctggaaggcacctgcgtcgagtggttgcgccggtacctggagaacggcaaggagaccctacagcgagccgagcccccaaaaacccacgtgacacaccatcccctctcagaccatgaagccacgctgcgctgttgggccctcggcttttaccccgcagagattactctgacctggcaacgcgacggcgaggaccaaacccaggatacagagctggtggagaccagaccagctggcgatggtaccttccagaagtgggctgcggttgtggttcccagcggccaggaacagcgctacacctgccatatgcagcatgaaggcctgcaggaaccgcttaccctctcatgggaacccagttcacagcccaccattccgattatggggattgtggccggcctcgccgtcctggtcgtactagctgtattgggcgccgtggtgactgcaatgatgtgcagaagaaagtcttctggccgggaaggcgtgaaatccggtgtgtgggctgcaacagtgccccgggctctgatgagtctgtccagcctggtaaagccagagaccgccgcctgtgtaggactacggtgtcgtattagctcccatctgtcgtttgtgacaagcagagccagcggcatctccttttgcaagggagtttag

SEQ ID NO: 85606 - DNA, 1068 bp, Artificial Sequence
  derived and/or modified sequence
atgcgggtgatggcccctcgaactctcatcctcctgctcagcggagctctcgccttaacagagacatgggctgggtctcattcaatgaggtatttctacacggctgtgtcccgccccggaagaggggaacctcatttcattgctgttggctatgtggatgatacgcagtttgtacggtttgactcagatgctgctagcccaaggggtgaacctagggccccttgggtcgaacaggaggggcccgaatattgggatagagaaactcagaagtacaagcggcaggcgcagactgaccgggtcagtctgaggaacttgcgtggctactataatcaatccgaggcgggatcacacataattcagcgtatgtatggatgtgatgtgggccctgatggtcggctgctccgcggttacgatcagtacgcttatgatggcaaagattatatcgccctaaacgaagatctgcgctcctggaccgcggctgatactgccgcccaaattacacagagaaagtgggaagctgcccgggaggccgagcaactcagggcataccttgaaggcctgtgcgttgaatggttgagacgctacttgaagaatggcaaagaaaccttacaaagagctgaacacccaaagacccacgttactcatcaccccgtcagtgatcatgaggccacacttcggtgttgggccctgggcttctacccagctgaaatcaccttgacttggcaatgggatggcgaggatcagacacaagacactgaacttgttgagacccgcccagccggcgatggcacttttcagaagtgggcagctgttgtcgtaccatcaggggaggaacagagatacacatgccacgtgcagcacgaaggtctgcccgagccgctcacactgcgttgggaaccgagtagtcagccgactatccctatcgtgggtattgtggccggcctggcagtgctcgctgtgctggccgttctcggcgctgtggtcgcagtggtcatgtgccgtagaaaaagtagtgcttctaattccgctcaaggctccgacgaatccctgatcgcgtgtaaggcatag

SEQ ID NO: 85607 - DNA, 1107 bp, Artificial Sequence
  derived and/or modified sequence
atgcgggttatggctccgcgaaccctcatcttattactctccggggctctagctcttactgagacctgggcctgctcccattctatgcgttacttttacaccgcagtctctagacccgggcgtggcgagcccagatttatcgccgtgggttatgtcgacgacactcagttcgtccaatttgactccgacgccgccagtccgcggggagaaccaagagctccctgggtggagcaagaaggcccagaatactgggacagagagacccagaagtataaacgacaggcccagactgatagagtgaatctcagaaaactcaggggatattacaatcagagcgaggccggaagccacacactgcagcgaatgtatggttgcgacttagggccagacgggcggttacttagagggtataatcagttcgcatatgacggcaaggattacatcgcccttaatgaggacctaaggagttggacagcagccgataaggccgctcagatcacgcagaggaagtgggaggccgctcgcgaggccgagcaacgcagggcctacttggaggggacctgtgtggaatggttacggagatatctggagaacggaaaaaaaactctccagcgagctgagcatcccaagacccacgttacacaccatccggtttctgatcacgaggcaactctgagatgctgggcattaggattctatcctgccgagattactctgacctggcagagggacggcgaggaccagacacaggacactgaactggtggagactaggcccgcaggtgatggaacgttccaaaaatgggctgccgttgtggtcccgagcggtgaggagcagaggtacacctgtcacgtacaacacgagggcctccccgaacccctcacattgaggtggggcccatcgagtcagccaactatcccaatcgtgggtatagtggcggggctggcagtgctggctgtgctggcggtcctcggagctgtcatggctgtggtgatgtgtcgtcggaagtccagcgccgcctgcgttggcctgaggtgccgcatctcaagccacctgagtttcgtgacctcaagggcaagcgggatatccttttgcaaaggcatctag

SEQ ID NO: 85608 - DNA, 786 bp, Artificial Sequence
  derived and/or modified sequence
tgacgtgttatggccccgcgtactctgatcctgctgctgtcaggcgccctggccctgaccgagacttgggcatgctcgcattctatgagatatttctacacagccgtgagcaggcctggtaggggagaacctcgattcatcgccgtggggtatgtggacgatacccagtttgttcggttcgactcggacgcagcatcaccacgcggtgagccccgggccccctgggtcgagcaggaaggccccgagtattgggaccgggaaacgcagaagtataaacgtcaggcacagaccgacagagtgtccttaaggaacttaagagggtactacaatcaatcagaggcggggtcacatacactccaatggatgtatggctgcgacttgggccctgacggtcgccttttgcgcggatacgaccaaagtgcctacgacggaaaagactatattgctctgaacgaggatctgagatcctggactgctgccgacaccgccgcacagatcacgcagagaaagtgggaggcggccagggcggccgagcaacagcgggcatacctggaggggacatgtgtagaatggctgcgccgctacctggaaaacggtaaagaaactctgcagagggctgagcaccccaaaactcatgtcacacatcaccttgtgtccgatcatgaggccagccggcggtggaacctgcccgaggttggttcctgcggcggcgcattctggcggcgggccgaaattcacgtcccttgtgctgccaggggggctgccggcgctcctcatcctgaatag

SEQ ID NO: 85609 - DNA, 1101 bp, Artificial Sequence
  derived and/or modified sequence
atgagagtgatggcccccagaaccctgatactgctcttgagtggagctctggctctcactgagacgtgggcttgttcacactcaatgagatacttttacaccgccgtcagcaggccagggcgaggcgagcctcgtttcatagcagtgggctacgtggatgatacccaatttgtgagattcgattccgatgctgcgtcacctcggggagagcctcgcgcgccttgggtcgagcaagaaggaccagagtactgggacagagagacacagaagtacaaacggcaagcccagaccgatcgggtgtctctaagaaatctgcgaggctactataatcagagtgaggcaggttctcatacactgcaatggatgtatggatgtgatctcggtcctgacggccggctgctgagaggctatgatcagagcgcctacgacggcaaggattatatcgcactaaacgaggatttgagatcctggacagccgccgatacagctgctcaaattacacagagaaaatgggaggccgccagggctgccgagcagcagcgcgcttatttggagggcacctgtgttgagtggcttagacgctatctggagaacgggaaagaaacactacaaagggcggagcatccgaaaactcacgtcacccaccacctggtatccgaccatgaagccacactacgatgttgggcactgggattctacccagccgaaattaccctgacctggcagcgggacggcgaggaccagactcaggacacagaattagtcgagaccagacccgcaggagatgggacttttcagaagtgggccgccgtcgtggtcccaagcggcgaggagcagaggtacacttgccacgttcagcatgagggcctgcccgaacccctgactcttcgttgggagccatcaagccaacccaccatccccatcgtgggaatcgtggcgggcttggcggtactagcagtccttgccgtgctcggagccgtggtggctgtggtcatgtgtcgacgtaaatcttccggtggcaagggagggtcctgttcccaagctgctagctctaattcagcgcagggtagcgatgagagtctgatcgcctgtaaggcatag

SEQ ID NO: 85610 - DNA, 786 bp, Artificial Sequence
  derived and/or modified sequence
tgaagggtgatggctccacggacactcattctgttgttaagcggagccttagccctgacggaaacatgggcctgttctcacagtatgcgctacttctacactgccgtctcccggcccggccgtggggagccgaggttcattgccgtgggatatgtggacgacacgcagtttgtgcagttcgactccgatgcagcatcccctagaggcgaaccccgcgcaccctgggttgagcaggagggccctgaatactgggaccgcgagacgcagaagtataagcggcaggcacagactgaccgggtgaatctccgaaagcttcgaggctattacaatcaaagtgaggccggatcacatactctacagcggatgtacggctgtgatttggggcctgatggacgcctactccgaggatacaatcagttcgcttacgacggaaaggattatattgcactgaatgaagatcttaggtcatggaccgccgccgacaaggctgcacagataacccagaggaaatgggaagccgctagggaggccgagcagcggagggcatacttggaaggaacctgcgttgagtggctgagacgataccttgagaatggcaaaaagactctgcagcgtgcagaacatcctaaaacgcacgttacccaccaccccgtaagcgaccacgaggccagtcgcaggtggaatctgccagaagttggaagctgcgggggggcgttttggcgccgagccgaaatccatgtgccctgtgccgcgagaggcgctgcccgggcgcctcaccccgagtag

SEQ ID NO: 85611 - DNA, 786 bp, Artificial Sequence
  derived and/or modified sequence
tagagggtcatggctcctcgtacgctgatcttgctgcttagtggagcattggctctgaccgaaacatgggcgtgctcacactctatgcggtacttctacaccgccgtgagccgaccaggtagaggcgagcccaggtttatcgcagtgggctacgtcgacgacactcaattcgttcagtttgacagcgatgcagccagtccacggggtgagcctcgcgcaccatgggtggaacaggagggccccgagtactgggacagggagacgcagaagtacaaacgtcaggcgcagactgatcgggtgaacttacggaaacttcggggttactataatcagagcgaagccggaagccacactctgcagcggatgtacggatgcgacctcggccccgacggcagactcttgcgaggatacaatcagttcgcatacgacggtaaggattatatcgctctgaatgaagacctgagatcatggactgctgccgataaggccgcacagattacgcagcgaaagtgggaagccgcacgcgaggccgagcagcgtcgtgcctacttagagggcacttgtgttgagtggctgcgaagatatctggaaaacgggaagaagacattgcagcgagccgagcacccaaaaacccatgtcacacaccacccagtgagtgaccacgaggccagcagacgatggaacctgcccgaggttggaagttgcgggggagccttctggcgcagggccgaaattcatgtaccctgcgccgccagaggcgctgccagggcccctcatcccgagtag

SEQ ID NO: 85612 - DNA, 1119 bp, Artificial Sequence
  derived and/or modified sequence
atgagagttatggccccaaggacgttgatccttctgctgtctggggcattggccctcacagaaacctgggcatgttcccattcaatgaggtatttttacacagccgtgagtagacccggacgcggcgagccccgatttatcgcagtaggctatgtggatgacacccagttcgtcaggtttgactcggacgcagcttcccctaggggcgagccaagagccccctgggtggagcaagaggggccagagtactgggatcgtgagactcagaagtacaagaggcaggcccagacagatcgagtgagcctgcgaaacttgcgcggttattacaaccagtctgaagcaggttcccacaccttgcagtggatgtatggatgcgacctgggacctgacggcaggctcttgcggggttacgaccagtctgcctatgatggcaaagactatatagctttaaacgaggatttgcgtagctggaccgccgcagatacagccgcacagatcactcagcgcaagtgggaggccgctagggcagccgaacagcagagagcttaccttgagggtacctgcgtagagtggttaagaaggtatctggagaatggcaaggagaccctccaacgcgcggagcacccgaagacccacgtgactcaccatttggtgagtgatcacgaagctaccctgcgttgttgggcgctaggcttttaccccgccgagatcacactaacgtggcagcgtgatggggaagaccagacgcaggacactgagttggtcgagacacgaccagctggggatggcaccttccaaaagtgggctgcggtggttgtccccagcggcgaagagcagaggtacacctgccacgtgcagcacgagggtctgccagaacctcttacccttagatgggagcctagctcccagcctacaatccccatcgtggggatagtcgcggggctcgctgttcttgcggtgctagctgtgctgggggcagtcgtggcagtggttatgtgccggcggaagtcttcaggacattttctgcctacaggagggaaggggggatcttgctcccaggcggctagttctaatagcgcccagggatcagatgagtcactgatcgcatgtaaagcctag

SEQ ID NO: 85613 - DNA, 786 bp, Artificial Sequence
  derived and/or modified sequence
tgacgagtaatggctccacggacgctcattttactgcttagcggcgcacttgcactgactgaaacatgggcgtgttcccactccatgagatacttcgacactgcggtgtctaggcctgggcggggtgaacccagatttatttccgtgggctatgtagatgacacacaatttgtcaggtttgattccgatgccgcctctccaaggggagaaccacgggccccatgggtcgaacaggaagggcctgaatattgggatagggagacacagaaatacaaaagacaagcacaggctgatagggtgaacctgcgaaaacttagagggtattacaatcagtctgaggacggaagtcacaccctccaatggatgtatggatgcgatctggggcctgacgggaggttgctgcgagggtatgaccagtctgcctacgacggcaaggactacatagcactgaatgaagacctgagatcatggacagcagccgacactgccgcccagataacgcaacgcaaatgggaggctgccagagaagccgaacaatggcgggcctacctcgaaggaacatgtgtggaatggcttcggcgatacctggaaaatgggaaagaaactctgcagcgcgccgagcacccaaaaacgcacgtgacacaccatcccgttagcgatcatgaagcgtcccgccgctggaacctcccagaagtgggttcttgcggtggcgccttttggcgccgggctgagattcacgtaccatgcgcggctagaggtgcagcccgagcacctcaccccgaatag

SEQ ID NO: 85614 - DNA, 1107 bp, Artificial Sequence
  derived and/or modified sequence
atgagggtgatggccccccgaaccctgatcctgctcttaagcggtgcgcttgccctcactgagacctgggcctgctcccattccatgagatacttcgacacagcagtttccaggcccggacgcggggagccccgctttattagtgtaggctacgtggacgatacccagttcgttcgctttgattctgacgctgcttctccgagaggcgagccacgtgcaccatgggtcgagcaggagggtcctgagtattgggacagagagacccagaagtacaaacgacaggcacaggctgacagggtgaatctgaggaaactgcggggttattacaatcagagcgaggacggctcccatacactgcagtggatgtatgggtgtgacctggggccagatgggcgactcctccgggggtacgaccaatccgcctacgatggcaaggactacattgctctcaacgaagatctgcggtcttggaccgcagccgacacagcagcccaaatcacgcagcgaaagtgggaagccgcgcgtgaggccgaacagtggagggcgtaccttgagggcacatgtgtcgagtggctgaggcgatatttggaaaacgggaaagaaaccctccagcgggctgaacacccaaagacacacgtgactcatcacccagtttctgaccatgaggctaccctgagatgttgggccctgggtttttaccccgccgaaattaccctgacatggcagagggatggagaggaccagacacaggacactgagttggtggagacacggcccgctggagatggtacattccagaaatgggcagctgtggtggttccgtcgggcgaggagcaaagatacacgtgccacgtgcagcatgaaggattgccagaacctctgaccctgcgttgggagcccagcagccagccaactatcccaattgtgggaatcgttgcggggttagctgtgttggcagtgctcgccgtgcttggcgcagtaatggctgttgtgatgtgcagaaggaagagtagcgctgcctgcgtgggcctgcgttgtagaattagtagccacttatccttcgtaactagccgagctagtgggatctcattttgtaaaggaatctag

SEQ ID NO: 85615 - DNA, 786 bp, Artificial Sequence
  derived and/or modified sequence
tgaagagtgatggcaccaagagctctcctgctgctgctgagtggaggactcgcactgactgagacatgggcctgtagccacagtatgaggtacttcgacaccgccgtcagccggccaggcagaggggaaccacgtttcattagcgtaggatatgtcgacgatacccaattcgtcagatttgacagcgatgccgcctctccacggggtgagccccgtgccccgtgggtggaacaagaaggcccggaatattgggaccgcgaaacacagaattacaagcggcaggcccaggccgatagagttagcctgagaaatctcaggggctactacaaccagtccgaggacgggtctcacacacttcagcgcatgtatgggtgtgatctcggaccagatggcagactgctgaggggatacgaccaatccgcctacgatgggaaagactatatcgccctcaatgaggatcttagatcctggacagccgccgataccgccgctcagatcacacagcgaaaactcgaggccgcgcgcgccgcagagcagctgcgagcttacctcgaaggcacctgcgtggaatggctgcgccgttacctggagaatggcaaagagaccctgcaacgcgctgaaccccccaagacccatgtgacccaccatccccttagcgatcatgaagctagcaggcggtggaatctcccagaagtgggcagctgcggcggagctttttggacccgagccgaaatccacgtgccttacgccgcacgaggagcggcccgagccccccatccagagtag

SEQ ID NO: 85616 - DNA, 1101 bp, Artificial Sequence
  derived and/or modified sequence
atgagagtgatggccccccggaccctgattctcctgctgagcggagccctagctctgactgagacatgggccggtagccattctatgaggtacttctacaccgccgtttctcgcccaggaaggggagagccgcatttcattgccgtcgggtatgtggatgacacccaattcgtgagatttgactcagacgcagcttctccaagaggggaaccacgggctccatgggtcgaacaagagggacctgagtactgggatagggaaacgcaaaaatacaagaggcaagctcagacagatagagtaagccttagaaatctccgtggttactataaccaatctgaggctggaagccatatcatacagaggatgtatggatgcgacgtgggccccgacgggaggctgctgcgagggtacgaccagtacgcttatgatggtaaggattacattgccctgaatgaggatctcaggtcttggacggccgcggacactgccgctcaaatcacccagcgaaaatgggaggcagcaagggaggccgaacagctgagagcctaccttgagggtttgtgtgtcgagtggttgagacgctatttaaagaatgggaaagagaccctgcagcgagccgagcaccctaaaacccacgtgacccatcatcccgtctctgaccatgaggcgaccctgagatgctgggccctgggtttttacccagcagagataacgctcacttggcagtgggacggtgaagaccaaactcaggatacggagcttgtggagacgcggcccgcaggagatggcacttttcaaaagtgggccgcggtggtcgtgcccagcggtgaggaacagaggtacacctgccatgtgcagcacgaagggcttcccgaacccctgacactccgctgggaaccatcttcccaacccacaattcctattgtcgggattgttgccggcctcgccgtgctggctgtgctggccgtattaggggccgtggtggccgtcgtgatgtgccgtcggaagagctcggggggtaagggggggtcgtgtagtcaggccgctagttcaaactcggcacagggatccgatgagagcttgatcgcctgtaaagcatag

SEQ ID NO: 85617 - DNA, 1119 bp, Artificial Sequence
  derived and/or modified sequence
atgagggtgatggcccctcgcactctcatcctccttctgtcgggcgcactggctctgaccgagacatgggcatgtagccattccatgagatatttcgacacagccgtatctcggccgggtcggggtgagcctaggttcataagtgtgggatacgtcgacgatactcaattcgtccgattcgacagtgacgccgcctcccctcgcggcgagcctcgggcaccttgggtggagcaagaggggccagagtactgggacagagagacgcaaaaatacaaaaggcaggctcaggcagatcgtgttaaccttagaaaactaagggggtattacaatcagtccgaggacgggagccatactctgcaatggatgtacggctgcgatctgggacctgacgggaggcttctgcggggctacgaccaatctgcttatgacggcaaagattacatcgccctgaatgaggatcttagaagctggacagctgccgacactgcggctcagattactcaaaggaagtgggaggcagcgcgggaggctgaacaatggcgtgcctacctggaaggaacatgcgtcgagtggcttcgccgctatctagagaacggaaaagagactctgcagcgtgccgaacaccctaagacacatgttacacaccaccccgtgagcgatcatgaggctaccctccgttgttgggccctagggttttaccccgccgaaatcaccctgacatggcagcgcgatggtgaagatcagacacaggacactgagttagtagagactaggccagctggggacgggacatttcagaagtgggccgccgttgtcgttccatcaggggaggaacagagatatacttgccacgtgcagcacgagggtctgcctgagcctcttaccctgaggtgggagccttctagtcaacctaccatccccattgtgggaatcgtggctggcctcgctgtcctggcagttcttgcagtcttgggtgctgtgatggctgtggtcatgtgtcggaggaaaagctccgggcactttttacccaccgggggtaagggcggttcgtgcagccaggccgctagtagcaactcagcgcagggctcagatgaatcgctgatagcgtgcaaggcctag

SEQ ID NO: 85618 - DNA, 1107 bp, Artificial Sequence
  derived and/or modified sequence
atgagggttatggcacctcgcacgcttattttgctgctgtctggtgctcttgcattgacggaaacatgggcttgcagccacagcatgcggtatttctataccgcggtaagccggcccgggcgtggcgagccacgattcattgccgttggctacgtggatgacactcaatttgtccagtttgacagcgatgctgcttcccctaggggggagccgcgggccccttgggtggaacaggagggcccagaatattgggatagggaaacacaaaaatacaaacgccaggcccagacagacagggttaacctacgcaagctacgaggatactataatcaatccgaagccggctcccacacgctacaaagaatgtatggctgcgacctgggtccggacgggcgcctattacggggctataaccagttcgcttatgatggtaaagattacattgctttgaacgaggacttgcgctcttggaccgctgcagataaggccgcccagattacacaacgcaagtgggaagccgcacgcgaagctgaacaacgtcgcgcctatttggaaggaacatgtgttgaatggctgcggcgctacctggagaatgggaagaagactctccaaagggctgaacaccccaaaactcacgtcacgcaccatccagtgtcagaccacgaggccactctgagatgctgggccctgggcttttatcccgctgaaatcactcttacttggcagagggatggggaagaccagacccaggatactgagctcgttgagacacgaccagcaggggatggaacctttcagaagtgggctgccgtagtagttccatcaggggaagagcagagatacacctgtcacgtccagcatgagggtctgccagagcccctgacactccgatggggtcccagctcccagcctactattcctattgtaggcatagtcgcagggcttgctgtccttgctgtcctggccgtgctaggagctgttatggcggtggtgatgtgcaggcgcaagagctcagctgcctgcgtcggactaaggtgtaggataagtagccatctgtctttcgtaacaagtagagcgtctggcatttccttctgtaagggcatttag

SEQ ID NO: 85619 - DNA, 675 bp, Artificial Sequence
  derived and/or modified sequence
atgcgcgtgatggcgcctagaacccttattcttctgctctctggagccctggccctgacagaaacatgggcctgcagccacagtatgagatacttctacaccgcagtaagccggcccggtcgcggtgagccaagatttatagcagtaggctacgtcgacgatacccaatttgttcagttcgacagcgatgctgctagcccacgcggagaaccacgcgcaccttgggtagagcaagagggccccgagtattgggatcgcgaaactcagaaatacaaaagacaagcacagacagatagagttaacctgcggaagcttaggggatactacaatcaaagtgaggcaggctcgcatacactgcaacgcatgtatggatgcgatctcgggcccgatggcagactgctccgtggctacaaccagttcgcttacgacggcaaggactacatcgctttaaacgaggacctaaggtcctggaccgcagccgataaggcagcccagataacacagaggaaatgggaggctgccagagaggccgaacaaagaagagcctatcttgaggggacatgtgtagagtggctgaggcggtacctcgagaacggcaagaagacccttcagagggccggtcaggatcagaaatcactcttcctgccccagagactcgaactgagcaatgagtag

SEQ ID NO: 85620 - DNA, 675 bp, Artificial Sequence
  derived and/or modified sequence
atgagggtgatggctccccgggccctcctgctgctcctcagcggtggacttgcacttacagaaacctgggcctgctcacatagcatgaggtattttgataccgccgtgtccaggccaggaaggggtgagcctcggttcatttccgtgggctatgtggacgacacacagtttgtacgcttcgatagcgatgcagctagcccgaggggggaacctagagccccttgggtggagcaagaaggacccgagtactgggacagagagacacagaattacaaacgtcaagctcaagccgaccgggtctctctgaggaacctgcgcggatactataaccagtctgaggacggaagccacactctgcagcgcatgtatggctgcgatctgggccctgatggccgactcttgcgaggttatgaccagagcgcgtatgatggcaaggactatatagcactgaatgaagaccttagatcttggaccgccgccgatacggcagcccagattacacagaggaagcttgaggctgctcgggctgcggaacaattgcgagcttatctagagggtacctgcgtcgagtggctgcggcgatacctcgagaatggtaaggagacactgcagcgggcagggcaagaccaaaagtcactgttcttgccccaaaggctcgagctctcaaatgaatag

SEQ ID NO: 85621 - DNA, 396 bp, Artificial Sequence
  derived and/or modified sequence
atgagggtgatggccccccgagcgttgctgctgcttttatccggcggccttgctctcacagagacgtgggcttgctcccacagcatgagatattttgatactgccgtatctcggcctgggagaggcgaaccaagattcatcagcgtgggctacgtggacgatacacagttcgtgcgctttgattcggatgccgccagcccccggggggaaccccgagctccttgggtcgagcaggaaggtccagagtattgggatagggaaactcagaattataagaggcaagcccaggcagaccgtgtcagtttacgtaatttgcgcggatactacaaccagtctgaagacgaagatgtgtggctccgaccaggcgccaggagggcgcccccccccagggtgtag

SEQ ID NO: 85622 - DNA, 1212 bp, Artificial Sequence
  derived and/or modified sequence
atgcgcgtaatggccccgcgggctcttctactgctgctttcaggaggtcttgctctcactgagacctgggcgtgcgagtgcggggtgggccgcgaggccgctagcgcagagcgcagtgaagggccacccggcgaaccccgtcgggaagtcgggcgggcggggctgtcacctagcagcccaccaggctctcattcaatgagatacttcgataccgccgtgtcacgccctggccgaggggagccccgtttcatctctgttggttacgtggacgacacgcaattcgttcggttcgactccgacgctgcctccccaaggggggagccacgggcgccctgggtggaacaggaaggcccggagtactgggaccgagaaacccaaaactacaagcggcaagcccaggccgatcgcgtgtcgttgcgcaacctccgcggatactacaaccaatctgaggacggcagccatactctgcagcgtatgtatggctgcgacctgggccccgacggtaggctgttgagaggatatgatcaaagcgcctatgacggaaaggactatattgctctaaacgaagatctgcgcagttggacagccgctgacaccgcagctcaaatcacccagaggaagctcgaagccgccagggctgctgagcagttgagagcctatctggaaggaacatgcgtggaatggttgaggagatacttggaaaatggcaaagagaccttacagcgcgctgagcctccaaagacccatgtgacacatcacccactgtctgatcatgaagcgacactcaggtgctgggccctgggtttttatccagccgaaataaccctgacgtggcagcgcgatggtgaagaccagacccaggatactgagctagtagagactagacctgccggcgacggaacttttcaaaagtgggcagcagtggttgtgccttctggacaagagcagagatacacctgccatatgcagcacgagggactacaggaaccactgaccctgtcctgggagccctcatctcagccaacaatccccattatgggtattgttgcgggcctagccgtgctcgtggtgttggccgtcctgggcgctgtagtcacagcgatgatgtgcaggcggaagagtagtggcgggaagggtggtagttgttctcaggccgcctgcagtaattccgcccagggcagtgacgaatccctgattacatgcaaagcatag

SEQ ID NO: 85623 - DNA, 981 bp, Artificial Sequence
  derived and/or modified sequence
atgcgagtgatggctccccggaccctgattctgctcctgagtggcgcccttgccctgacagagacatgggcgtgttctcatagtatgaggtacttttatacagctgtgtcccgcccaggtcgtggtgagcccaggtttatagctgttggctacgtggatgatactcagttcgtgagattcgacagcgatgccgcatcccctcgaggcgagccccgcgcgccatgggtcgagcaagagggacccgaatactgggaccgtgagactcagaaatataaacgccaggcacagacagacagggttagcctcagaaatcttaggggttactacaatcagtccgaagctggatcccatacgctccaatggatgtatggatgcgacttgggccccgacgggcgtcttctgaggggttacgatcagagcgcctatgacggcaaggattacatcgcgctcaatgaagatctgcgttcttggacagcagccgatacagctgctcagatcacccagaggaaatgggaagccgccagagctgccgaacagcagcgcgcgtacctcgaaggcacatgcgtagaatggctccgccggtatctcgaaaatggtaaggaaactctgcagcgggccgaacatcccaaaactcacgtaacacaccacctggtgagtgatcatgaagctacactcaggtgctgggctctgggcttctatcctgcagagatcacgctcacttggcaaagagacggagaggatcagacacaagacactgagcttgtcgagacaagacccgctggtgacgggacgttccagaaatgggctgcagtcgtggtcccatcaggagaagagcagcggtatacgtgccatgtacaacacgaagggctgccagagcccctcaccctcagatggggggggaagggcgggagctgttcccaggctgcctccagcaattccgcccagggatccgatgaaagcctcatcgcctgtaaagcttag

SEQ ID NO: 85624 - DNA, 1119 bp, Artificial Sequence
  derived and/or modified sequence
atgagggtgatggcccccaggaccctcatcctgctgctgagcggggccctggccctgacagagacctgggcctgcagccacagcatgagatacttctacacagctgtgtccaggcctggccgcggggagccccgcttcatcgctgtgggctacgtggatgacacccagtttgtgcagtttgacagtgatgctgccagccccagaggagagccccgggccccctgggtggagcaggagggccctgagtactgggaccgggagacccagaagtacaagaggcaggcccagacagacagagtgaacctgaggaagctgcggggctactacaaccagagcgaggccggcagccacaccctgcagaggatgtatggctgtgacctgggcccagatggccgcctgctgcggggctacaaccagtttgcctatgatggcaaggactacatcgccctgaatgaagacctgcgctcctggacagctgctgacaaggccgcccagatcacccagaggaagtgggaggccgcccgggaggccgagcagaggcgggcctacctggagggcacctgtgtggagtggctgcggcgctacctggagaatggcaagaagaccctgcagagagctgagcaccccaagacccacgtgacccaccaccctgtgtctgaccacgaggccaccctgcgctgctgggccctgggcttctacccagctgagatcaccctgacctggcagagagatggagaggaccagacccaggacacagagctggtggagaccaggcctgctggagatggcaccttccagaagtgggccgctgtggtggtgcccagcggggaggagcagcgctacacctgccacgtgcagcacgagggcctgcctgagcccctgaccctgcgctggggccccagcagccagcccaccatccccatcgtgggcatcgtggccggcctggccgtgctggccgtgctggccgtgctgggcgctgtgatggctgtggtgatgtgcaggaggaagagcagcggccacttcctgcccaccggcggcaaaggaggcagctgcagccaggccgccagcagcaacagcgcccagggcagtgatgagagcctcatcgcctgcaaggcctag

SEQ ID NO: 85625 - DNA, 1194 bp, Artificial Sequence
  derived and/or modified sequence
atgagggtgatggcccccaggaccctcatcctgctgctgagcggggccctggccctgacagagacctgggcctgcagccacagcatgagatacttctacacagctgtgtccaggcctggccgcggggagccccgcttcatcgctgtgggctacgtggatgacacccagtttgtgcagtttgacagtgatgctgccagccccagaggagagccccgggccccctgggtggagcaggagggccctgagtactgggaccgggagacccagaagtacaagaggcaggcccagacagacagagtgaacctgaggaagctgcggggctactacaaccagagcgaggccggcagccacaccctgcagaggatgtatggctgtgacctgggcccagatggccgcctgctgcggggctacaaccagtttgcctatgatggcaaggactacatcgccctgaatgaagacctgcgctcctggacagctgctgacaaggccgcccagatcacccagaggaagtgggaggccgcccgggaggccgagcagaggcgggcctacctggagggcacctgtgtggagtggctgcggcgctacctggagaatggcaagaagaccctgcagagagctgagcaccccaagacccacgtgacccaccaccctgtgtctgaccacgaggccaccctgcgctgctgggccctgggcttctacccagctgagatcaccctgacctggcagagagatggagaggaccagacccaggacacagagctggtggagaccaggcctgctggagatggcaccttccagaagtgggccgctgtggtggtgcccagcggggaggagcagcgctacacctgccacgtgcagcacgagggcctgcctgagcccctgaccctgcgctggggccccagcagccagcccaccatccccatcgtgggcatcgtggccggcctggccgtgctggccgtgctggccgtgctgggcgctgtgatggctgtggtgatgtgcaggaggaagagcagcggccgggagggcgtgcgctctggagtgtggccagccaccgtgccccgggccctgatgagcctgagcagcctggtgaagccagagacagctgcctgtgtgggcctgcgctgccgcatcagcagccacctgagctttgtgaccagccgggccagcggcatctccttctgcaagggcatctag

SEQ ID NO: 85626 - DNA, 1101 bp, Artificial Sequence
  derived and/or modified sequence
atgagggtgatggcccccaggaccctcatcctgctgctgagcggggccctggccctgacagagacctgggcctgcagccacagcatgagatacttctacacagctgtgtccaggcctggccgcggggagccccgcttcatcgctgtgggctacgtggatgacacccagtttgtgcagtttgacagtgatgctgccagccccagaggagagccccgggccccctgggtggagcaggagggccctgagtactgggaccgggagacccagaagtacaagaggcaggcccagacagacagagtgaacctgaggaagctgcggggctactacaaccagagcgaggccggcagccacaccctgcagaggatgtatggctgtgacctgggcccagatggccgcctgctgcggggctacaaccagtttgcctatgatggcaaggactacatcgccctgaatgaagacctgcgctcctggacagctgctgacaaggccgcccagatcacccagaggaagtgggaggccgcccgggaggccgagcagaggcgggcctacctggagggcacctgtgtggagtggctgcggcgctacctggagaatggcaagaagaccctgcagagagctgagcaccccaagacccacgtgacccaccaccctgtgtctgaccacgaggccaccctgcgctgctgggccctgggcttctacccagctgagatcaccctgacctggcagagagatggagaggaccagacccaggacacagagctggtggagaccaggcctgctggagatggcaccttccagaagtgggccgctgtggtggtgcccagcggggaggagcagcgctacacctgccacgtgcagcacgagggcctgcctgagcccctgaccctgcgctggggccccagcagccagcccaccatccccatcgtgggcatcgtggccggcctggccgtgctggccgtgctggccgtgctgggcgctgtgatggctgtggtgatgtgcaggaggaagagcagcggcggcaaaggaggcagctgcagccaggccgccagcagcaacagcgcccagggcagtgatgagagcctcatcgcctgcaaggcctag

SEQ ID NO: 85627 - DNA, 1194 bp, Artificial Sequence
  derived and/or modified sequence
atgagggtgatggcccccaggaccctcatcctgctgctgagcggggccctggccctgacagagacctgggcctgcagccacagcatgagatacttctacacagctgtgtccaggcctggccgcggggagccccgcttcatcgctgtgggctacgtggatgacacccagtttgtgcgctttgacagtgatgctgccagccccagaggagagccccgggccccctgggtggagcaggagggccctgagtactgggaccgggagacccagaagtacaagaggcaggcccagacagacagagtgtccctgaggaacctgcggggctactacaaccagagcgaggccggcagccacaccctgcagtggatgtatggctgtgacctgggcccagatggccgcctgctgcggggctatgaccagagcgcctatgatggcaaggactacatcgccctgaatgaagacctgcgctcctggacagctgctgacacagctgcccagatcacccagaggaagtgggaggccgcccgggctgctgagcagcagagggcctacctggagggcacctgtgtggagtggctgcggcgctacctggagaatggcaaggagaccctgcagagagctgagcaccccaagacccacgtgacccaccacctggtgtctgaccacgaggccaccctgcgctgctgggccctgggcttctacccagctgagatcaccctgacctggcagagagatggagaggaccagacccaggacacagagctggtggagaccaggcctgctggagatggcaccttccagaagtgggccgctgtggtggtgcccagcggggaggagcagcgctacacctgccacgtgcagcacgagggcctgcctgagcccctgaccctgcgctgggagcccagcagccagcccaccatccccatcgtgggcatcgtggccggcctggccgtgctggccgtgctggccgtgctgggcgctgtggtggccgtggtgatgtgcaggaggaagagcagcggccgggagggcgtgcgctctggagtgtggccagccaccgtgccccgggccctgatgagcctgagcagcctggtgaagccagagacagctgcctgtgtgggcctgcgctgccgcatcagcagccacctgagctttgtgaccagccgggccagcggcatctccttctgcaagggcatctag

SEQ ID NO: 85628 - DNA, 1119 bp, Artificial Sequence
  derived and/or modified sequence
atgagggtgatggcccccaggaccctcatcctgctgctgagcggggccctggccctgacagagacctgggccggcagccacagcatgagatacttctacacagctgtgtccaggcctggccgcggggagccccacttcatcgctgtgggctacgtggatgacacccagtttgtgcgctttgacagtgatgctgccagccccagaggagagccccgggccccctgggtggagcaggagggccctgagtactgggaccgggagacccagaagtacaagaggcaggcccagacagacagagtgtccctgaggaacctgcggggctactacaaccagagcgaggccggcagccacatcatccagaggatgtatggctgtgatgtgggcccagatggccgcctgctgcggggctatgaccagtatgcctatgatggcaaggactacatcgccctgaatgaagacctgcgctcctggacagctgctgacacagctgcccagatcacccagaggaagtgggaggccgcccgggaggccgagcagctgcgggcctacctggagggcctgtgtgtggagtggctgcggcgctacctgaagaatggcaaggagaccctgcagagagctgagcaccccaagacccacgtgacccaccaccctgtgtctgaccacgaggccaccctgcgctgctgggccctgggcttctacccagctgagatcaccctgacctggcagtgggatggagaggaccagacccaggacacagagctggtggagaccaggcctgctggagatggcaccttccagaagtgggccgctgtggtggtgcccagcggggaggagcagcgctacacctgccacgtgcagcacgagggcctgcctgagcccctgaccctgcgctgggagcccagcagccagcccaccatccccatcgtgggcatcgtggccggcctggccgtgctggccgtgctggccgtgctgggcgctgtggtggccgtggtgatgtgcaggaggaagagcagcggccacttcctgcccaccggcggcaaaggaggcagctgcagccaggccgccagcagcaacagcgcccagggcagtgatgagagcctcatcgcctgcaaggcctag

SEQ ID NO: 85629 - DNA, 1020 bp, Artificial Sequence
  derived and/or modified sequence
atgagggtgatggcccccaggaccctcatcctgctgctgagcggggccctggccctgacagagacctgggcctgcagccacagcatgagatacttctacacagctgtgtccaggcctggccgcggggagccccgcttcatcgctgtgggctacgtggatgacacccagtttgtgcgctttgacagtgatgctgccagccccagaggagagccccgggccccctgggtggagcaggagggccctgagtactgggaccgggagacccagaagtacaagaggcaggcccagacagacagagtgtccctgaggaacctgcggggctactacaaccagagcgaggccggcagccacaccctgcagtggatgtatggctgtgacctgggcccagatggccgcctgctgcggggctatgaccagagcgcctatgatggcaaggactacatcgccctgaatgaagacctgcgctcctggacagctgctgacacagctgcccagatcacccagaggaagtgggaggccgcccgggctgctgagcagcagagggcctacctggagggcacctgtgtggagtggctgcggcgctacctggagaatggcaaggagaccctgcagagagctgagcaccccaagacccacgtgacccaccacctggtgtctgaccacgaggccaccctgcgctgctgggccctgggcttctacccagctgagatcaccctgacctggcagagagatggagaggaccagacccaggacacagagctggtggagaccaggcctgctggagatggcaccttccagaagtgggccgctgtggtggtgcccagcggggaggagcagcgctacacctgccacgtgcagcacgagggcctgcctgagcccctgaccctgcgctgggagcccagcagccagcccaccatccccatcgtgggcatcgtggccggcctggccgtgctggccgtgctggccgtgctgggcgctgtggtggccgtggtgatgtgcaggaggaagagcagcgcctag

SEQ ID NO: 85630 - DNA, 1101 bp, Artificial Sequence
  derived and/or modified sequence
atgagggtgatggcccccaggaccctcatcctgctgctgagcggggccctggccctgacagagacctgggcctgcagccacagcatgagatactttgacacagctgtgtccaggcctggccgcggggagccccgcttcatctctgtgggctacgtggatgacacccagtttgtgcgctttgacagtgatgctgccagccccagaggagagccccgggccccctgggtggagcaggagggccctgagtactgggaccgggagacccagaagtacaagaggcaggcccaggccgacagagtgaacctgaggaagctgcggggctactacaaccagagtgaagatggcagccacaccctgcagtggatgtatggctgtgacctgggcccagatggccgcctgctgcggggctatgaccagagcgcctatgatggcaaggactacatcgccctgaatgaagacctgcgctcctggacagctgctgacacagctgcccagatcacccagaggaagtgggaggccgcccgggaggccgagcagtggagggcctacctggagggcacctgtgtggagtggctgcggcgctacctggagaatggcaaggagaccctgcagagagctgagcaccccaagacccacgtgacccaccaccctgtgtctgaccacgaggccaccctgcgctgctgggccctgggcttctacccagctgagatcaccctgacctggcagagagatggagaggaccagacccaggacacagagctggtggagaccaggcctgctggagatggcaccttccagaagtgggccgctgtggtggtgcccagcggggaggagcagcgctacacctgccacgtgcagcacgagggcctgcctgagcccctgaccctgcgctgggagcccagcagccagcccaccatccccatcgtgggcatcgtggccggcctggccgtgctggccgtgctggccgtgctgggcgctgtgatggctgtggtgatgtgcaggaggaagagcagcggcggcaaaggaggcagctgcagccaggccgccagcagcaacagcgcccagggcagtgatgagagcctcatcgcctgcaaggcctag

SEQ ID NO: 85631 - DNA, 1107 bp, Artificial Sequence
  derived and/or modified sequence
atgagggtgatggccccccgggccctgctgctgctgctgagcggcggcctggccctgacagagacctgggcctgcagccacagcatgagatactttgacacagctgtgtccaggcctggccgcggggagccccgcttcatctctgtgggctacgtggatgacacccagtttgtgcgctttgacagtgatgctgccagccccagaggagagccccgggccccctgggtggagcaggagggccctgagtactgggaccgggagacccagaactacaagaggcaggcccaggccgacagagtgtccctgaggaacctgcggggctactacaaccagagtgaagatggcagccacaccctgcagaggatgtatggctgtgacctgggcccagatggccgcctgctgcggggctatgaccagagcgcctatgatggcaaggactacatcgccctgaatgaagacctgcgctcctggacagctgctgacacagctgcccagatcacccagaggaagctggaggccgcccgggctgctgagcagctgcgggcctacctggagggcacctgtgtggagtggctgcggcgctacctggagaatggcaaggagaccctgcagagagctgagccccccaagacccacgtgacccaccaccccctgagtgaccacgaggccaccctgcgctgctgggccctgggcttctacccagctgagatcaccctgacctggcagagagatggagaggaccagacccaggacacagagctggtggagaccaggcctgctggagatggcaccttccagaagtgggccgctgtggtggtgcccagcggccaggagcagcgctacacctgccacatgcagcacgagggcctgcaggagcccctgaccctgtcctgggagcccagcagccagcccaccatccccatcatgggcatcgtggccggcctggccgtgctggtggtgctggccgtgctgggcgctgtggtgacagccatgatgtgcaggaggaagagcagcgctgcctgtgtgggcctgcgctgccgcatcagcagccacctgagctttgtgaccagccgggccagcggcatctccttctgcaagggcgtgtag

SEQ ID NO: 85632 - DNA, 1194 bp, Artificial Sequence
  derived and/or modified sequence
atgagggtgatggcccccaggaccctcatcctgctgctgagcggggccctggccctgacagagacctgggcctgcagccacagcatgagatactttgacacagctgtgtccaggcctggccgcggggagccccgcttcatctctgtgggctacgtggatgacacccagtttgtgcgctttgacagtgatgctgccagccccagaggagagccccgggccccctgggtggagcaggagggccctgagtactgggaccgggagacccagaagtacaagaggcaggcccaggccgacagagtgaacctgaggaagctgcggggctactacaaccagagtgaagatggcagccacaccctgcagtggatgtatggctgtgacctgggcccagatggccgcctgctgcggggctatgaccagagcgcctatgatggcaaggactacatcgccctgaatgaagacctgcgctcctggacagctgctgacacagctgcccagatcacccagaggaagtgggaggccgcccgggaggccgagcagtggagggcctacctggagggcacctgtgtggagtggctgcggcgctacctggagaatggcaaggagaccctgcagagagctgagcaccccaagacccacgtgacccaccaccctgtgtctgaccacgaggccaccctgcgctgctgggccctgggcttctacccagctgagatcaccctgacctggcagagagatggagaggaccagacccaggacacagagctggtggagaccaggcctgctggagatggcaccttccagaagtgggccgctgtggtggtgcccagcggggaggagcagcgctacacctgccacgtgcagcacgagggcctgcctgagcccctgaccctgcgctgggagcccagcagccagcccaccatccccatcgtgggcatcgtggccggcctggccgtgctggccgtgctggccgtgctgggcgctgtgatggctgtggtgatgtgcaggaggaagagcagcggccgggagggcgtgcgctctggagtgtggccagccaccgtgccccgggccctgatgagcctgagcagcctggtgaagccagagacagctgcctgtgtgggcctgcgctgccgcatcagcagccacctgagctttgtgaccagccgggccagcggcatctccttctgcaagggcatctag

SEQ ID NO: 85633 - DNA, 1119 bp, Artificial Sequence
  derived and/or modified sequence
atgagggtgatggccccccgggccctgctgctgctgctgagcggcggcctggccctgacagagacctgggcctgcagccacagcatgagatactttgacacagctgtgtccaggcctggccgcggggagccccgcttcatctctgtgggctacgtggatgacacccagtttgtgcgctttgacagtgatgctgccagccccagaggagagccccgggccccctgggtggagcaggagggccctgagtactgggaccgggagacccagaactacaagaggcaggcccaggccgacagagtgtccctgaggaacctgcggggctactacaaccagagtgaagatggcagccacaccctgcagaggatgtatggctgtgacctgggcccagatggccgcctgctgcggggctatgaccagagcgcctatgatggcaaggactacatcgccctgaatgaagacctgcgctcctggacagctgctgacacagctgcccagatcacccagaggaagctggaggccgcccgggctgctgagcagctgcgggcctacctggagggcacctgtgtggagtggctgcggcgctacctggagaatggcaaggagaccctgcagagagctgagccccccaagacccacgtgacccaccaccccctgagtgaccacgaggccaccctgcgctgctgggccctgggcttctacccagctgagatcaccctgacctggcagagagatggagaggaccagacccaggacacagagctggtggagaccaggcctgctggagatggcaccttccagaagtgggccgctgtggtggtgcccagcggccaggagcagcgctacacctgccacatgcagcacgagggcctgcaggagcccctgaccctgtcctgggagcccagcagccagcccaccatccccatcatgggcatcgtggccggcctggccgtgctggtggtgctggccgtgctgggcgctgtggtgacagccatgatgtgcaggaggaagagcagcggccacttcctgcccaccggcggcaaaggaggcagctgcagccaggccgcctgcagcaacagcgcccagggcagtgatgagagcctcatcacctgcaaggcctag

SEQ ID NO: 85634 - DNA, 1101 bp, Artificial Sequence
  derived and/or modified sequence
atgagggtgatggccccccgggccctgctgctgctgctgagcggcggcctggccctgacagagacctgggcctgcagccacagcatgagatactttgacacagctgtgtccaggcctggccgcggggagccccgcttcatctctgtgggctacgtggatgacacccagtttgtgcgctttgacagtgatgctgccagccccagaggagagccccgggccccctgggtggagcaggagggccctgagtactgggaccgggagacccagaactacaagaggcaggcccaggccgacagagtgtccctgaggaacctgcggggctactacaaccagagtgaagatggcagccacaccctgcagaggatgtatggctgtgacctgggcccagatggccgcctgctgcggggctatgaccagagcgcctatgatggcaaggactacatcgccctgaatgaagacctgcgctcctggacagctgctgacacagctgcccagatcacccagaggaagctggaggccgcccgggctgctgagcagctgcgggcctacctggagggcacctgtgtggagtggctgcggcgctacctggagaatggcaaggagaccctgcagagagctgagccccccaagacccacgtgacccaccaccccctgagtgaccacgaggccaccctgcgctgctgggccctgggcttctacccagctgagatcaccctgacctggcagagagatggagaggaccagacccaggacacagagctggtggagaccaggcctgctggagatggcaccttccagaagtgggccgctgtggtggtgcccagcggccaggagcagcgctacacctgccacatgcagcacgagggcctgcaggagcccctgaccctgtcctgggagcccagcagccagcccaccatccccatcatgggcatcgtggccggcctggccgtgctggtggtgctggccgtgctgggcgctgtggtgacagccatgatgtgcaggaggaagagcagcggcggcaaaggaggcagctgcagccaggccgcctgcagcaacagcgcccagggcagtgatgagagcctcatcacctgcaaggcctag

SEQ ID NO: 85635 - DNA, 1107 bp, Artificial Sequence
  derived and/or modified sequence
atgagggtgatggcccccaggaccctcatcctgctgctgagcggggccctggccctgacagagacctgggccggcagccacagcatgagatacttctacacagctgtgtccaggcctggccgcggggagccccacttcatcgctgtgggctacgtggatgacacccagtttgtgcgctttgacagtgatgctgccagccccagaggagagccccgggccccctgggtggagcaggagggccctgagtactgggaccgggagacccagaagtacaagaggcaggcccagacagacagagtgtccctgaggaacctgcggggctactacaaccagagcgaggccggcagccacatcatccagaggatgtatggctgtgatgtgggcccagatggccgcctgctgcggggctatgaccagtatgcctatgatggcaaggactacatcgccctgaatgaagacctgcgctcctggacagctgctgacacagctgcccagatcacccagaggaagtgggaggccgcccgggaggccgagcagctgcgggcctacctggagggcctgtgtgtggagtggctgcggcgctacctgaagaatggcaaggagaccctgcagagagctgagcaccccaagacccacgtgacccaccaccctgtgtctgaccacgaggccaccctgcgctgctgggccctgggcttctacccagctgagatcaccctgacctggcagtgggatggagaggaccagacccaggacacagagctggtggagaccaggcctgctggagatggcaccttccagaagtgggccgctgtggtggtgcccagcggggaggagcagcgctacacctgccacgtgcagcacgagggcctgcctgagcccctgaccctgcgctgggagcccagcagccagcccaccatccccatcgtgggcatcgtggccggcctggccgtgctggccgtgctggccgtgctgggcgctgtggtggccgtggtgatgtgcaggaggaagagcagcgctgcctgtgtgggcctgcgctgccgcatcagcagccacctgagctttgtgaccagccgggccagcggcatctccttctgcaagggcatctag

SEQ ID NO: 85636 - DNA, 1194 bp, Artificial Sequence
  derived and/or modified sequence
atgagggtgatggccccccgggccctgctgctgctgctgagcggcggcctggccctgacagagacctgggcctgcagccacagcatgagatactttgacacagctgtgtccaggcctggccgcggggagccccgcttcatctctgtgggctacgtggatgacacccagtttgtgcgctttgacagtgatgctgccagccccagaggagagccccgggccccctgggtggagcaggagggccctgagtactgggaccgggagacccagaactacaagaggcaggcccaggccgacagagtgtccctgaggaacctgcggggctactacaaccagagtgaagatggcagccacaccctgcagaggatgtatggctgtgacctgggcccagatggccgcctgctgcggggctatgaccagagcgcctatgatggcaaggactacatcgccctgaatgaagacctgcgctcctggacagctgctgacacagctgcccagatcacccagaggaagctggaggccgcccgggctgctgagcagctgcgggcctacctggagggcacctgtgtggagtggctgcggcgctacctggagaatggcaaggagaccctgcagagagctgagccccccaagacccacgtgacccaccaccccctgagtgaccacgaggccaccctgcgctgctgggccctgggcttctacccagctgagatcaccctgacctggcagagagatggagaggaccagacccaggacacagagctggtggagaccaggcctgctggagatggcaccttccagaagtgggccgctgtggtggtgcccagcggccaggagcagcgctacacctgccacatgcagcacgagggcctgcaggagcccctgaccctgtcctgggagcccagcagccagcccaccatccccatcatgggcatcgtggccggcctggccgtgctggtggtgctggccgtgctgggcgctgtggtgacagccatgatgtgcaggaggaagagcagcggccgggagggcgtgaagtctggagtgtgggccgccaccgtgccccgggccctgatgagcctgagcagcctggtgaagccagagacagctgcctgtgtgggcctgcgctgccgcatcagcagccacctgagctttgtgaccagccgggccagcggcatctccttctgcaagggcgtgtag

SEQ ID NO: 85637 - DNA, 1068 bp, Artificial Sequence
  derived and/or modified sequence
atgagggtgatggcccccaggaccctcatcctgctgctgagcggggccctggccctgacagagacctgggccggcagccacagcatgagatacttctacacagctgtgtccaggcctggccgcggggagccccacttcatcgctgtgggctacgtggatgacacccagtttgtgcgctttgacagtgatgctgccagccccagaggagagccccgggccccctgggtggagcaggagggccctgagtactgggaccgggagacccagaagtacaagaggcaggcccagacagacagagtgtccctgaggaacctgcggggctactacaaccagagcgaggccggcagccacatcatccagaggatgtatggctgtgatgtgggcccagatggccgcctgctgcggggctatgaccagtatgcctatgatggcaaggactacatcgccctgaatgaagacctgcgctcctggacagctgctgacacagctgcccagatcacccagaggaagtgggaggccgcccgggaggccgagcagctgcgggcctacctggagggcctgtgtgtggagtggctgcggcgctacctgaagaatggcaaggagaccctgcagagagctgagcaccccaagacccacgtgacccaccaccctgtgtctgaccacgaggccaccctgcgctgctgggccctgggcttctacccagctgagatcaccctgacctggcagtgggatggagaggaccagacccaggacacagagctggtggagaccaggcctgctggagatggcaccttccagaagtgggccgctgtggtggtgcccagcggggaggagcagcgctacacctgccacgtgcagcacgagggcctgcctgagcccctgaccctgcgctgggagcccagcagccagcccaccatccccatcgtgggcatcgtggccggcctggccgtgctggccgtgctggccgtgctgggcgctgtggtggccgtggtgatgtgcaggaggaagagcagcgccagcaacagcgcccagggcagtgatgagagcctgattgcctgcaaggcctag

SEQ ID NO: 85638 - DNA, 1107 bp, Artificial Sequence
  derived and/or modified sequence
atgagggtgatggcccccaggaccctcatcctgctgctgagcggggccctggccctgacagagacctgggcctgcagccacagcatgagatacttctacacagctgtgtccaggcctggccgcggggagccccgcttcatcgctgtgggctacgtggatgacacccagtttgtgcagtttgacagtgatgctgccagccccagaggagagccccgggccccctgggtggagcaggagggccctgagtactgggaccgggagacccagaagtacaagaggcaggcccagacagacagagtgaacctgaggaagctgcggggctactacaaccagagcgaggccggcagccacaccctgcagaggatgtatggctgtgacctgggcccagatggccgcctgctgcggggctacaaccagtttgcctatgatggcaaggactacatcgccctgaatgaagacctgcgctcctggacagctgctgacaaggccgcccagatcacccagaggaagtgggaggccgcccgggaggccgagcagaggcgggcctacctggagggcacctgtgtggagtggctgcggcgctacctggagaatggcaagaagaccctgcagagagctgagcaccccaagacccacgtgacccaccaccctgtgtctgaccacgaggccaccctgcgctgctgggccctgggcttctacccagctgagatcaccctgacctggcagagagatggagaggaccagacccaggacacagagctggtggagaccaggcctgctggagatggcaccttccagaagtgggccgctgtggtggtgcccagcggggaggagcagcgctacacctgccacgtgcagcacgagggcctgcctgagcccctgaccctgcgctggggccccagcagccagcccaccatccccatcgtgggcatcgtggccggcctggccgtgctggccgtgctggccgtgctgggcgctgtgatggctgtggtgatgtgcaggaggaagagcagcgctgcctgtgtgggcctgcgctgccgcatcagcagccacctgagctttgtgaccagccgggccagcggcatctccttctgcaagggcatctag

SEQ ID NO: 85639 - DNA, 786 bp, Artificial Sequence
  derived and/or modified sequence
tgaagagtgatggcccccaggaccctcatcctgctgctgagcggggccctggccctgacagagacctgggcctgcagccacagcatgagatacttctacacagctgtgtccaggcctggccgcggggagccccgcttcatcgctgtgggctacgtggatgacacccagtttgtgcgctttgacagtgatgctgccagccccagaggagagccccgggccccctgggtggagcaggagggccctgagtactgggaccgggagacccagaagtacaagaggcaggcccagacagacagagtgtccctgaggaacctgcggggctactacaaccagagcgaggccggcagccacaccctgcagtggatgtatggctgtgacctgggcccagatggccgcctgctgcggggctatgaccagagcgcctatgatggcaaggactacatcgccctgaatgaagacctgcgctcctggacagctgctgacacagctgcccagatcacccagaggaagtgggaggccgcccgggctgctgagcagcagagggcctacctggagggcacctgtgtggagtggctgcggcgctacctggagaatggcaaggagaccctgcagagagctgagcaccccaagacccacgtgacccaccacctggtgtctgaccacgaggccagccgccgctggaacctgcctgaggtgggcagctgtggcggggccttctggaggagagctgagatccacgtgccctgtgccgcccggggagctgctggggccccccaccctgagtag

SEQ ID NO: 85640 - DNA, 1101 bp, Artificial Sequence
  derived and/or modified sequence
atgagggtgatggcccccaggaccctcatcctgctgctgagcggggccctggccctgacagagacctgggcctgcagccacagcatgagatacttctacacagctgtgtccaggcctggccgcggggagccccgcttcatcgctgtgggctacgtggatgacacccagtttgtgcgctttgacagtgatgctgccagccccagaggagagccccgggccccctgggtggagcaggagggccctgagtactgggaccgggagacccagaagtacaagaggcaggcccagacagacagagtgtccctgaggaacctgcggggctactacaaccagagcgaggccggcagccacaccctgcagtggatgtatggctgtgacctgggcccagatggccgcctgctgcggggctatgaccagagcgcctatgatggcaaggactacatcgccctgaatgaagacctgcgctcctggacagctgctgacacagctgcccagatcacccagaggaagtgggaggccgcccgggctgctgagcagcagagggcctacctggagggcacctgtgtggagtggctgcggcgctacctggagaatggcaaggagaccctgcagagagctgagcaccccaagacccacgtgacccaccacctggtgtctgaccacgaggccaccctgcgctgctgggccctgggcttctacccagctgagatcaccctgacctggcagagagatggagaggaccagacccaggacacagagctggtggagaccaggcctgctggagatggcaccttccagaagtgggccgctgtggtggtgcccagcggggaggagcagcgctacacctgccacgtgcagcacgagggcctgcctgagcccctgaccctgcgctgggagcccagcagccagcccaccatccccatcgtgggcatcgtggccggcctggccgtgctggccgtgctggccgtgctgggcgctgtggtggccgtggtgatgtgcaggaggaagagcagcggcggcaaaggaggcagctgcagccaggccgccagcagcaacagcgcccagggcagtgatgagagcctcatcgcctgcaaggcctag

SEQ ID NO: 85641 - DNA, 786 bp, Artificial Sequence
  derived and/or modified sequence
tgaagagtgatggcccccaggaccctcatcctgctgctgagcggggccctggccctgacagagacctgggcctgcagccacagcatgagatacttctacacagctgtgtccaggcctggccgcggggagccccgcttcatcgctgtgggctacgtggatgacacccagtttgtgcagtttgacagtgatgctgccagccccagaggagagccccgggccccctgggtggagcaggagggccctgagtactgggaccgggagacccagaagtacaagaggcaggcccagacagacagagtgaacctgaggaagctgcggggctactacaaccagagcgaggccggcagccacaccctgcagaggatgtatggctgtgacctgggcccagatggccgcctgctgcggggctacaaccagtttgcctatgatggcaaggactacatcgccctgaatgaagacctgcgctcctggacagctgctgacaaggccgcccagatcacccagaggaagtgggaggccgcccgggaggccgagcagaggcgggcctacctggagggcacctgtgtggagtggctgcggcgctacctggagaatggcaagaagaccctgcagagagctgagcaccccaagacccacgtgacccaccaccctgtgtctgaccacgaggccagccgccgctggaacctgcctgaggtgggcagctgtggcggggccttctggaggagagctgagatccacgtgccctgtgccgcccggggggccgcccgggccccccaccctgagtag

SEQ ID NO: 85642 - DNA, 1119 bp, Artificial Sequence
  derived and/or modified sequence
atgagggtgatggcccccaggaccctcatcctgctgctgagcggggccctggccctgacagagacctgggcctgcagccacagcatgagatacttctacacagctgtgtccaggcctggccgcggggagccccgcttcatcgctgtgggctacgtggatgacacccagtttgtgcgctttgacagtgatgctgccagccccagaggagagccccgggccccctgggtggagcaggagggccctgagtactgggaccgggagacccagaagtacaagaggcaggcccagacagacagagtgtccctgaggaacctgcggggctactacaaccagagcgaggccggcagccacaccctgcagtggatgtatggctgtgacctgggcccagatggccgcctgctgcggggctatgaccagagcgcctatgatggcaaggactacatcgccctgaatgaagacctgcgctcctggacagctgctgacacagctgcccagatcacccagaggaagtgggaggccgcccgggctgctgagcagcagagggcctacctggagggcacctgtgtggagtggctgcggcgctacctggagaatggcaaggagaccctgcagagagctgagcaccccaagacccacgtgacccaccacctggtgtctgaccacgaggccaccctgcgctgctgggccctgggcttctacccagctgagatcaccctgacctggcagagagatggagaggaccagacccaggacacagagctggtggagaccaggcctgctggagatggcaccttccagaagtgggccgctgtggtggtgcccagcggggaggagcagcgctacacctgccacgtgcagcacgagggcctgcctgagcccctgaccctgcgctgggagcccagcagccagcccaccatccccatcgtgggcatcgtggccggcctggccgtgctggccgtgctggccgtgctgggcgctgtggtggccgtggtgatgtgcaggaggaagagcagcggccacttcctgcccaccggcggcaaaggaggcagctgcagccaggccgccagcagcaacagcgcccagggcagtgatgagagcctcatcgcctgcaaggcctag

SEQ ID NO: 85643 - DNA, 786 bp, Artificial Sequence
  derived and/or modified sequence
tgaagagtgatggcccccaggaccctcatcctgctgctgagcggggccctggccctgacagagacctgggcctgcagccacagcatgagatactttgacacagctgtgtccaggcctggccgcggggagccccgcttcatctctgtgggctacgtggatgacacccagtttgtgcgctttgacagtgatgctgccagccccagaggagagccccgggccccctgggtggagcaggagggccctgagtactgggaccgggagacccagaagtacaagaggcaggcccaggccgacagagtgaacctgaggaagctgcggggctactacaaccagagtgaagatggcagccacaccctgcagtggatgtatggctgtgacctgggcccagatggccgcctgctgcggggctatgaccagagcgcctatgatggcaaggactacatcgccctgaatgaagacctgcgctcctggacagctgctgacacagctgcccagatcacccagaggaagtgggaggccgcccgggaggccgagcagtggagggcctacctggagggcacctgtgtggagtggctgcggcgctacctggagaatggcaaggagaccctgcagagagctgagcaccccaagacccacgtgacccaccaccctgtgtctgaccacgaggccagccgccgctggaacctgcctgaggtgggcagctgtggcggggccttctggaggagagctgagatccacgtgccctgtgccgcccggggggccgcccgggccccccaccctgagtag

SEQ ID NO: 85644 - DNA, 1107 bp, Artificial Sequence
  derived and/or modified sequence
atgagggtgatggcccccaggaccctcatcctgctgctgagcggggccctggccctgacagagacctgggcctgcagccacagcatgagatactttgacacagctgtgtccaggcctggccgcggggagccccgcttcatctctgtgggctacgtggatgacacccagtttgtgcgctttgacagtgatgctgccagccccagaggagagccccgggccccctgggtggagcaggagggccctgagtactgggaccgggagacccagaagtacaagaggcaggcccaggccgacagagtgaacctgaggaagctgcggggctactacaaccagagtgaagatggcagccacaccctgcagtggatgtatggctgtgacctgggcccagatggccgcctgctgcggggctatgaccagagcgcctatgatggcaaggactacatcgccctgaatgaagacctgcgctcctggacagctgctgacacagctgcccagatcacccagaggaagtgggaggccgcccgggaggccgagcagtggagggcctacctggagggcacctgtgtggagtggctgcggcgctacctggagaatggcaaggagaccctgcagagagctgagcaccccaagacccacgtgacccaccaccctgtgtctgaccacgaggccaccctgcgctgctgggccctgggcttctacccagctgagatcaccctgacctggcagagagatggagaggaccagacccaggacacagagctggtggagaccaggcctgctggagatggcaccttccagaagtgggccgctgtggtggtgcccagcggggaggagcagcgctacacctgccacgtgcagcacgagggcctgcctgagcccctgaccctgcgctgggagcccagcagccagcccaccatccccatcgtgggcatcgtggccggcctggccgtgctggccgtgctggccgtgctgggcgctgtgatggctgtggtgatgtgcaggaggaagagcagcgctgcctgtgtgggcctgcgctgccgcatcagcagccacctgagctttgtgaccagccgggccagcggcatctccttctgcaagggcatctag

SEQ ID NO: 85645 - DNA, 786 bp, Artificial Sequence
  derived and/or modified sequence
tgaagagtgatggccccccgggccctgctgctgctgctgagcggcggcctggccctgacagagacctgggcctgcagccacagcatgagatactttgacacagctgtgtccaggcctggccgcggggagccccgcttcatctctgtgggctacgtggatgacacccagtttgtgcgctttgacagtgatgctgccagccccagaggagagccccgggccccctgggtggagcaggagggccctgagtactgggaccgggagacccagaactacaagaggcaggcccaggccgacagagtgtccctgaggaacctgcggggctactacaaccagagtgaagatggcagccacaccctgcagaggatgtatggctgtgacctgggcccagatggccgcctgctgcggggctatgaccagagcgcctatgatggcaaggactacatcgccctgaatgaagacctgcgctcctggacagctgctgacacagctgcccagatcacccagaggaagctggaggccgcccgggctgctgagcagctgcgggcctacctggagggcacctgtgtggagtggctgcggcgctacctggagaatggcaaggagaccctgcagagagctgagccccccaagacccacgtgacccaccaccccctgagtgaccacgaggccagccgccgctggaacctgcctgaggtgggcagctgtggcggggccttctggaccagggctgagatccacgtgccctatgctgcccggggggccgcccgggccccccaccctgagtag

SEQ ID NO: 85646 - DNA, 1101 bp, Artificial Sequence
  derived and/or modified sequence
atgagggtgatggcccccaggaccctcatcctgctgctgagcggggccctggccctgacagagacctgggccggcagccacagcatgagatacttctacacagctgtgtccaggcctggccgcggggagccccacttcatcgctgtgggctacgtggatgacacccagtttgtgcgctttgacagtgatgctgccagccccagaggagagccccgggccccctgggtggagcaggagggccctgagtactgggaccgggagacccagaagtacaagaggcaggcccagacagacagagtgtccctgaggaacctgcggggctactacaaccagagcgaggccggcagccacatcatccagaggatgtatggctgtgatgtgggcccagatggccgcctgctgcggggctatgaccagtatgcctatgatggcaaggactacatcgccctgaatgaagacctgcgctcctggacagctgctgacacagctgcccagatcacccagaggaagtgggaggccgcccgggaggccgagcagctgcgggcctacctggagggcctgtgtgtggagtggctgcggcgctacctgaagaatggcaaggagaccctgcagagagctgagcaccccaagacccacgtgacccaccaccctgtgtctgaccacgaggccaccctgcgctgctgggccctgggcttctacccagctgagatcaccctgacctggcagtgggatggagaggaccagacccaggacacagagctggtggagaccaggcctgctggagatggcaccttccagaagtgggccgctgtggtggtgcccagcggggaggagcagcgctacacctgccacgtgcagcacgagggcctgcctgagcccctgaccctgcgctgggagcccagcagccagcccaccatccccatcgtgggcatcgtggccggcctggccgtgctggccgtgctggccgtgctgggcgctgtggtggccgtggtgatgtgcaggaggaagagcagcggcggcaaaggaggcagctgcagccaggccgccagcagcaacagcgcccagggcagtgatgagagcctcatcgcctgcaaggcctag

SEQ ID NO: 85647 - DNA, 1119 bp, Artificial Sequence
  derived and/or modified sequence
atgagggtgatggcccccaggaccctcatcctgctgctgagcggggccctggccctgacagagacctgggcctgcagccacagcatgagatactttgacacagctgtgtccaggcctggccgcggggagccccgcttcatctctgtgggctacgtggatgacacccagtttgtgcgctttgacagtgatgctgccagccccagaggagagccccgggccccctgggtggagcaggagggccctgagtactgggaccgggagacccagaagtacaagaggcaggcccaggccgacagagtgaacctgaggaagctgcggggctactacaaccagagtgaagatggcagccacaccctgcagtggatgtatggctgtgacctgggcccagatggccgcctgctgcggggctatgaccagagcgcctatgatggcaaggactacatcgccctgaatgaagacctgcgctcctggacagctgctgacacagctgcccagatcacccagaggaagtgggaggccgcccgggaggccgagcagtggagggcctacctggagggcacctgtgtggagtggctgcggcgctacctggagaatggcaaggagaccctgcagagagctgagcaccccaagacccacgtgacccaccaccctgtgtctgaccacgaggccaccctgcgctgctgggccctgggcttctacccagctgagatcaccctgacctggcagagagatggagaggaccagacccaggacacagagctggtggagaccaggcctgctggagatggcaccttccagaagtgggccgctgtggtggtgcccagcggggaggagcagcgctacacctgccacgtgcagcacgagggcctgcctgagcccctgaccctgcgctgggagcccagcagccagcccaccatccccatcgtgggcatcgtggccggcctggccgtgctggccgtgctggccgtgctgggcgctgtgatggctgtggtgatgtgcaggaggaagagcagcggccacttcctgcccaccggcggcaaaggaggcagctgcagccaggccgccagcagcaacagcgcccagggcagtgatgagagcctcatcgcctgcaaggcctag

SEQ ID NO: 85648 - DNA, 675 bp, Artificial Sequence
  derived and/or modified sequence
atgagggtgatggcccccaggaccctcatcctgctgctgagcggggccctggccctgacagagacctgggcctgcagccacagcatgagatacttctacacagctgtgtccaggcctggccgcggggagccccgcttcatcgctgtgggctacgtggatgacacccagtttgtgcagtttgacagtgatgctgccagccccagaggagagccccgggccccctgggtggagcaggagggccctgagtactgggaccgggagacccagaagtacaagaggcaggcccagacagacagagtgaacctgaggaagctgcggggctactacaaccagagcgaggccggcagccacaccctgcagaggatgtatggctgtgacctgggcccagatggccgcctgctgcggggctacaaccagtttgcctatgatggcaaggactacatcgccctgaatgaagacctgcgctcctggacagctgctgacaaggccgcccagatcacccagaggaagtgggaggccgcccgggaggccgagcagaggcgggcctacctggagggcacctgtgtggagtggctgcggcgctacctggagaatggcaagaagaccctgcagagagctggccaggaccagaagagcctcttcctgccccagaggctggagctgagcaatgaatag

SEQ ID NO: 85649 - DNA, 675 bp, Artificial Sequence
  derived and/or modified sequence
atgagggtgatggccccccgggccctgctgctgctgctgagcggcggcctggccctgacagagacctgggcctgcagccacagcatgagatactttgacacagctgtgtccaggcctggccgcggggagccccgcttcatctctgtgggctacgtggatgacacccagtttgtgcgctttgacagtgatgctgccagccccagaggagagccccgggccccctgggtggagcaggagggccctgagtactgggaccgggagacccagaactacaagaggcaggcccaggccgacagagtgtccctgaggaacctgcggggctactacaaccagagtgaagatggcagccacaccctgcagaggatgtatggctgtgacctgggcccagatggccgcctgctgcggggctatgaccagagcgcctatgatggcaaggactacatcgccctgaatgaagacctgcgctcctggacagctgctgacacagctgcccagatcacccagaggaagctggaggccgcccgggctgctgagcagctgcgggcctacctggagggcacctgtgtggagtggctgcggcgctacctggagaatggcaaggagaccctgcagagagctggccaggaccagaagagcctcttcctgccccagaggctggagctgagcaatgaatag

SEQ ID NO: 85650 - DNA, 396 bp, Artificial Sequence
  derived and/or modified sequence
atgagggtgatggccccccgggccctgctgctgctgctgagcggcggcctggccctgacagagacctgggcctgcagccacagcatgagatactttgacacagctgtgtccaggcctggccgcggggagccccgcttcatctctgtgggctacgtggatgacacccagtttgtgcgctttgacagtgatgctgccagccccagaggagagccccgggccccctgggtggagcaggagggccctgagtactgggaccgggagacccagaactacaagaggcaggcccaggccgacagagtgtccctgaggaacctgcggggctactacaaccagagtgaagatgaagatgtgtggctgcggcctggggcccggcgggcccccccaccccgggtgtag

SEQ ID NO: 85651 - DNA, 1212 bp, Artificial Sequence
  derived and/or modified sequence
atgagggtgatggccccccgggccctgctgctgctgctgagcggcggcctggccctgacagagacctgggcctgtgaatgtggggtgggccgggaggccgccagcgctgagaggtctgagggccccccaggagagccccggcgggaggtgggccgggccggcctgagccccagcagccccccaggcagccacagcatgagatactttgacacagctgtgtcccggcccggccgcggggagccccgcttcatctctgtgggctacgtggatgacacccagtttgtgcgctttgacagtgatgctgccagccccagaggagagccccgggccccctgggtggagcaggagggccctgagtactgggaccgggagacccagaactacaagaggcaggcccaggccgacagagtgtccctgaggaacctgcggggctactacaaccagagtgaagatggcagccacaccctgcagaggatgtatggctgtgacctgggcccagatggccgcctgctgcggggctatgaccagagcgcctatgatggcaaggactacatcgccctgaatgaagacctgcgctcctggacagctgctgacacagctgcccagatcacccagaggaagctggaggccgcccgggctgctgagcagctgcgggcctacctggagggcacctgtgtggagtggctgcggcgctacctggagaatggcaaggagaccctgcagagagctgagccccccaagacccacgtgacccaccaccccctgagtgaccacgaggccaccctgcgctgctgggccctgggcttctacccagctgagatcaccctgacctggcagagagatggagaggaccagacccaggacacagagctggtggagaccaggcctgctggagatggcaccttccagaagtgggccgctgtggtggtgcccagcggccaggagcagcgctacacctgccacatgcagcacgagggcctgcaggagcccctgaccctgtcctgggagcccagcagccagcccaccatccccatcatgggcatcgtggccggcctggccgtgctggtggtgctggccgtgctgggcgctgtggtgacagccatgatgtgcaggaggaagagcagcggcggcaagggcggcagctgcagccaggccgcctgcagcaacagcgcccagggcagtgatgagagcctcatcacctgcaaggcctag

SEQ ID NO: 85652 - DNA, 981 bp, Artificial Sequence
  derived and/or modified sequence
atgagggtgatggcccccaggaccctcatcctgctgctgagcggggccctggccctgacagagacctgggcctgcagccacagcatgagatacttctacacagctgtgtccaggcctggccgcggggagccccgcttcatcgctgtgggctacgtggatgacacccagtttgtgcgctttgacagtgatgctgccagccccagaggagagccccgggccccctgggtggagcaggagggccctgagtactgggaccgggagacccagaagtacaagaggcaggcccagacagacagagtgtccctgaggaacctgcggggctactacaaccagagcgaggccggcagccacaccctgcagtggatgtatggctgtgacctgggcccagatggccgcctgctgcggggctatgaccagagcgcctatgatggcaaggactacatcgccctgaatgaagacctgcgctcctggacagctgctgacacagctgcccagatcacccagaggaagtgggaggccgcccgggctgctgagcagcagagggcctacctggagggcacctgtgtggagtggctgcggcgctacctggagaatggcaaggagaccctgcagagagctgagcaccccaagacccacgtgacccaccacctggtgtctgaccacgaggccaccctgcgctgctgggccctgggcttctacccagctgagatcaccctgacctggcagagagatggagaggaccagacccaggacacagagctggtggagaccaggcctgctggagatggcaccttccagaagtgggccgctgtggtggtgcccagcggggaggagcagcgctacacctgccacgtgcagcacgagggcctgcctgagcccctgaccctgcgctggggcggcaaaggaggcagctgcagccaggccgccagcagcaacagcgcccagggcagtgatgagagcctcatcgcctgcaaggcctag

SEQ ID NO: 85653 - DNA, 1119 bp, Artificial Sequence
  derived and/or modified sequence
atgcgggtgatggccccccggaccctgatcctgctgctgagcggcgcactcgcgctcaccgaaacctgggcctgttctcattccatgcggtatttctacacagcagtgtctagaccaggccgaggggagccccgtttcattgcggtaggttatgtcgacgatactcagtttgtgcaattcgattccgatgccgcatcacccagaggggaacctagggccccctgggtggagcaagaagggcccgaatactgggatcgggagacccaaaaatataagcgccaagcacagaccgaccgcgttaatttacggaaattgaggggatactacaaccaaagcgaggcaggatctcacactttgcagagaatgtacggttgcgatctcggaccagatggacgccttctgcggggttataatcagttcgcatatgatgggaaagactacatcgccctgaatgaggatttgcggtcttggacagcagcagataaggccgctcaaatcacacagaggaagtgggaagccgctagagaggcggaacaaagaagagcttatctggagggcacatgcgtcgagtggctgcgacgatatctggagaacggtaaaaaaacattgcagagagccgagcatcccaaaacacatgtgacacatcatcccgtgagtgaccacgaagcgacacttcgctgctgggcccttggtttttatcccgcggagataacgctgacctggcagagagacggagaggatcagactcaggacaccgagctggtcgaaaccagaccagctggtgatggcacctttcagaaatgggcagcagtcgttgtgccttccggcgaggaacagcgttatacgtgccacgtgcaacacgaaggccttccagagccgctgacgttacggtggggtcctagcagtcagccaacaattcccatcgtggggatcgtggccggactcgccgttctggccgtcctggccgtgctgggcgcagtcatggccgtggtgatgtgtaggagaaagagctccggtcattttctgccaacaggaggcaagggaggttcatgttcacaggccgcgagctcaaattccgctcaaggcagcgatgagtctctcatcgcctgtaaagcttag

SEQ ID NO: 85654 - DNA, 1194 bp, Artificial Sequence
  derived and/or modified sequence
atgcgggtgatggccccccggaccctgatcctgctgctgagcggcgctctggcactgactgagacatgggcctgctctcattctatgcggtatttctataccgccgtctcccgcccagggcgtggggagcctagattcattgccgtgggatacgtggacgacactcaattcgtccaattcgattctgacgccgcgtcaccccgtggcgagcctcgggccccttgggtggagcaggagggacccgaatactgggatcgggaaacgcagaaatacaagcggcaggctcagactgacagggttaatttacgaaagctgcggggatattataaccagtctgaagccgggagtcacacactgcaacggatgtacggctgtgatctgggccctgatggcagacttctgcggggatacaatcagtttgcatatgatggcaaggattacattgcattgaatgaggacttgagaagctggacagccgctgacaaggcagcccagataacccaacggaagtgggaagcagcccgtgaagccgagcagcggcgcgcctatctagaaggcacatgcgttgagtggctgcgccgctacctggaaaacggcaaaaagaccttacagagggcagagcaccccaagactcatgtcacccaccatccagtaagcgaccatgaagccaccctgcgatgctgggcactgggtttttatcctgcagagatcaccctaacctggcagagagacggcgaggaccagacccaggacaccgagctggtggaaactcggcctgcaggcgatggcacatttcagaagtgggccgctgtcgtagttcccagcggagaagaacaacgatatacatgtcacgtacagcacgagggtctgcctgagccactgacactcagatgggggccctcttcacagcccacaatccctattgtggggatcgtcgccggccttgctgtgctggcagtcctggctgtcctcggagcggtgatggctgtcgtgatgtgccgcaggaagagttccggcagggaaggcgtgcggagtggtgtgtggcccgcaactgtgccacgcgccctgatgtctctttccagccttgttaaacctgagaccgccgcttgcgtaggcctccgatgcaggatctcatctcatctgagcttcgtgacatctagggcttctggcatcagcttttgcaaagggatttag

SEQ ID NO: 85655 - DNA, 1119 bp, Artificial Sequence
  derived and/or modified sequence
atgcgggtgatggccccccggaccctgatcctgctgctgagcggcgccttggcactcaccgaaacctgggcttgcagtcactctatgagatacttctacacagccgtcagtcggccgggccgtggagaaccaagatttatcgcagttgggtatgttgacgacacccagtttgtgcaatttgacagcgacgccgcgagcccaaggggcgaaccacgggctccgtgggtggaacaggaaggacccgaatattgggatcgtgagacacaaaagtataagagacaggctcagacggatagagtgaacctccggaaactccggggctattataaccaatcagaggcaggttctcacactctccagagaatgtatggctgcgacctggggccggatggccgcctgctccgcggatacaatcagtttgcttatgatgggaaagactatatagccctgaatgaagacctgcgatcctggactgccgccgataaagcggctcagattactcagcgaaaatgggaggcagcacgtgaggctgaacagagacgtgcttacctggaaggcacatgtgttgagtggctgcgcaggtatttggaaaatggtaaaaagacgctccagcgggccgagcaccccaagacccacgtaacacatcacccagtgtctgaccatgaggccacactgcggtgctgggccctcggattctaccctgcagagatcacactcacctggcaacgggacggcgaggatcagacacaggacacggaactggtcgaaacacgtcccgccggtgatggtacattccagaagtgggcagccgtggtcgtcccttctggagaggaacagaggtatacatgccacgtccaacacgagggcttgccagagcccctcacactgcgctgggggccttccagtcagcccaccatccctattgtaggaatcgtggccgggctggccgtgctggctgtcctggccgtgttaggggccgtgatggctgtggtaatgtgccgccggaaatccagtggtcactttttgcccacaggcgggaaaggaggaagctgctcccaagccgcttcaagcaactcggctcaggggagcgacgaatctcttatagcctgcaaggcatag

SEQ ID NO: 85656 - DNA, 1101 bp, Artificial Sequence
  derived and/or modified sequence
atgcgggtgatggccccccggaccctgatcctgctgctgagcggcgcgctcgccctgacagagacatgggcatgtagccacagcatgcgctatttctacacagcagtgtccagacctggacgcggagaaccccgctttatagctgttggatatgtagacgatactcagttcgttcagttcgattccgacgctgcctcacccagaggggagcccagggcaccatgggttgagcaagaaggacctgaatattgggacagagagacacaaaagtacaaaaggcaagctcagactgatagagtcaacctccggaaacttcgaggatactacaaccagtcagaggccggcagccacacactgcaaaggatgtatggatgtgacctgggccccgacgggcgcctgctgaggggctacaaccaatttgcatacgacgggaaggattacatcgccctcaatgaggacctgcggtcgtggaccgccgccgataaagctgcccagattactcagcggaaatgggaggcagctagagaagccgaacagagaagggcatacctcgaaggcacttgtgtagagtggctgcgtcgctacctggagaatggtaagaagaccctgcagcgtgctgaacatcctaaaactcatgttacccaccaccctgtgtccgaccacgaagccactctcagatgttgggccttgggtttttacccggctgaaatcacattgacctggcaacgcgacggcgaggaccagacacaggatacagagttggtggagacgaggccagctggagatggaaccttccagaagtgggccgccgtggtggttccatcgggcgaggaacagcgttacacctgtcatgtgcagcacgagggtcttccggaacctttaacactaagatggggtcccagctcacagcccactatcccaatcgttggtattgtggccggtctggcagtgctcgctgtcctggccgttctcggcgctgtgatggcggtggtgatgtgtagacggaaatcatccggtggcaaaggaggctcctgctcacaggcagcctcctccaatagcgcacagggaagtgatgaaagcctgatcgcatgtaaggcctag

SEQ ID NO: 85657 - DNA, 1101 bp, Artificial Sequence
  derived and/or modified sequence
atgcgggtgatggccccccggaccctgatcctgctgctgagcggcgcgcttgctctgactgagacctgggcctgttcccacagtatgagatatttctacaccgctgtgtcccgccccggtcggggcgagccccgatttatcgcggttggatacgtggacgatactcagttcgtccagttcgattcggacgccgccagtccaaggggtgaaccccgggctccctgggtggaacaggaggggcctgagtactgggacagagagacccagaagtataaacgacaggcccagacagatcgcgtgaacctgcgaaaattacgggggtactataatcagagtgaggctggctctcatacactccagcgcatgtacggctgtgacctcggcccagacggaaggctactcagaggttataatcagttcgcgtatgacggtaaagattatattgccctaaacgaagatttgcgctcttggaccgccgcagataaggcagcccagatcacccagcgcaaatgggaagcagctagagaggctgagcagaggcgcgcttatcttgagggcacttgcgtggagtggctgaggcggtacctggagaacggcaaaaagacactgcagagagctgagcacccaaaaacacacgtcactcatcaccccgtctcagatcatgaggctactttgcgctgctgggcactgggtttttatcccgcggaaatcacgctcacttggcagagagatggagaggaccagacacaggacaccgaactggttgagacccgacctgcgggggacggcacctttcagaagtgggcagctgtcgttgtgccaagcggagaggaacagagatacacatgccatgtccagcacgaaggtctccccgaaccactaaccttgaggtggggaccctccagccaacctacaatccctatcgtcggaattgtggctggacttgctgtactggccgtcctagccgtgctaggcgcagttatggcggtggtgatgtgtcgtcggaagtcgtctgggggaaaaggcgggagctgttctcaggctgcctcttccaactctgcacaggggagtgatgaaagcctgattgcgtgtaaggcatag

SEQ ID NO: 85658 - DNA, 1194 bp, Artificial Sequence
  derived and/or modified sequence
atgcgggtgatggccccccggaccctgatcctgctgctgagcggcgccctggcacttactgaaacatgggcctgcagccactcaatgcgctatttctatacagctgtaagccgtcctgggagaggagagcccaggttcattgcagtgggctatgtcgacgacactcagtttgtccaatttgactcagatgccgccagtccccgcggggagccaagagccccatgggttgaacaggaagggcctgaatactgggatagggagacacaaaaatataagcggcaagctcagaccgaccgggtgaatttgcggaaactgagaggatactacaatcagtccgaggcaggttcacatacactgcagcggatgtacggttgcgatctcggtcctgacggccgtttactgaggggatataatcagttcgcttacgatggaaaggactatattgcgttgaacgaggacctgcggagttggacagcagctgataaggcggcacagattactcagaggaagtgggaagccgctcgcgaggctgagcagcgcagggcataccttgaaggaacgtgcgtcgaatggttgagacgctatctcgagaacgggaaaaagaccttgcagagagcggaacacccgaaaacacacgttactcaccaccccgtctctgaccatgaggcaacgctgcgttgctgggcccttggtttctacccagcagaaattacgctcacatggcaaagagacggggaagaccagacccaagataccgaactggtcgaaaccagacctgcgggcgacggcacattccagaagtgggctgctgtggtggtgccatccggagaggagcaaagatacacatgtcatgttcagcatgaggggcttccggaacccctgactttgcgatgggggccgtcttcccagcccacaatcccaattgtgggcatcgtggctgggctggcggttctggcggtcctcgctgtgctgggagccgtgatggccgtcgttatgtgtcgtagaaaaagtagtgggagggagggcgtgcgctctggggtgtggccagccaccgtgccccgggcacttatgtctctcagcagtctggtcaagcctgaaacagcagcgtgtgtgggactccggtgtcggatctcaagccatttgtccttcgtgacgtctcgggccagtggaatctccttctgtaagggcatctag

SEQ ID NO: 85659 - DNA, 1194 bp, Artificial Sequence
  derived and/or modified sequence
atgcgggtgatggccccccggaccctgatcctgctgctgagcggcgccctggccctcactgaaacttgggcatgcagtcattccatgcgatatttttacacagctgtgagcaggccaggtaggggcgaaccccgtttcatcgccgtggggtatgtagatgatactcagtttgtgcgctttgactccgatgccgctagccctagaggtgagccaagggcaccctgggttgaacaagaaggccccgaatactgggatcgggagacccaaaaatacaaacgtcaggcgcagactgatcgcgtgagtctccgtaatctgagaggttattacaatcagtcagaagccggcagtcacacacttcagtggatgtatggttgtgatctggggccagacgggagactgctgcgagggtacgatcagtccgcctacgatggcaaggactacatcgctcttaatgaggatctccggtcctggaccgccgccgatactgctgcgcagatcacccagaggaaatgggaagccgcccgcgctgcggagcaacaaagagcatatctcgaagggacctgcgtggagtggcttaggaggtacctcgagaacggcaaagagactttacagcgggccgagcatcctaaaactcatgtgacgcatcatcttgtctctgatcatgaggccaccctgaggtgctgggctttaggtttctatcctgcggaaattacactgacatggcagagagatggtgaagaccagacccaagatacagagctggttgagacgagacctgccggtgacggaacatttcagaagtgggccgcggttgttgtgccgagtggtgaggaacagcgctatacatgtcacgtgcagcatgagggcctgcccgaacccttaactcttagatgggagcccagtagccaacctaccattccaatcgtcgggatcgtcgcgggtctcgccgtgttagcagttctggcagtgctcggggccgtcgtagctgtggtcatgtgtagacgtaaaagttccggcagggagggggtgagaagcggggtctggcctgctaccgtaccacgggcattaatgtctctgagttcattggtcaagcccgaaacagccgcatgcgtaggcctaaggtgtcgcattagctcccatctctctttcgtgacatctcgcgcctccgggatctctttttgcaagggaatttag

SEQ ID NO: 85660 - DNA, 1119 bp, Artificial Sequence
  derived and/or modified sequence
atgcgggtgatggccccccggaccctgatcctgctgctgagcggcgccctggcccttacagaaacctgggcgggtagtcactctatgaggtatttctatacagccgtgagtaggccaggcagaggagagcctcattttattgccgttggatacgtcgatgacacccagtttgtaaggtttgacagcgacgccgcgtccccacggggtgagccaagggcaccctgggtggagcaagaagggcctgagtattgggaccgcgagacccagaaatacaaaaggcaggctcagactgatagagtgagtctgcgtaacctgaggggttattacaaccagagtgaagccggcagccacatcatccagaggatgtacggttgcgacgtcggaccagatggtcgactgctgagggggtacgaccagtatgcttatgatggaaaagattacatagcacttaatgaagatctccggtcttggaccgccgccgatacagcagctcagatcacacaacgtaagtgggaagccgcacgagaggctgagcaactgcgggcttacttagaagggctctgtgtcgaatggttgaggcgttacttgaaaaacggtaaagaaacactgcagcgtgcggagcaccctaagacacacgtgactcatcacccggtttctgatcacgaagccacccttaggtgctgggccctgggattttatcctgcagaaatcacattgacctggcagtgggatggcgaagaccaaactcaagacactgaactggtggagacgaggccagccggcgatggaacattccaaaaatgggctgcagtggtggtgccttcgggagaagaacagagatacacatgtcacgtgcagcatgaagggctgcccgaaccactcacactgcgttgggaaccttcttcacagccaactatacctattgtcggtattgtcgcaggtttggctgtgctggccgttcttgctgttctcggcgcagtggtggcggttgtaatgtgccgtaggaaaagctcgggacactttctcccaactgggggtaaggggggcagttgcagccaggctgcttcaagtaacagtgcccaaggaagtgacgagtctctcatcgcctgcaaagcgtag

SEQ ID NO: 85661 - DNA, 1020 bp, Artificial Sequence
  derived and/or modified sequence
atgcgggtgatggccccccggaccctgatcctgctgctgagcggcgccctggctcttactgagacttgggcgtgtagtcacagcatgcgttacttttatactgcagtttctaggcctggccgcggggaaccaaggttcatcgccgtaggctacgtagacgacacacagttcgtgcggttcgacagtgacgctgcaagcccccgtggagagccaagagcaccgtgggtggaacaagaaggcccagagtactgggacagggagacccaaaagtacaagagacaggcacaaaccgatagagttagtctgaggaacctccgaggttactataatcagagtgaggctggatcccacaccctacagtggatgtatggctgtgatctaggaccagacgggcggctgctgcgcggctatgaccaaagtgcctacgatggaaaggactatatcgcactgaacgaggatctgcggagctggacagcggccgatacggcggcccagattacacagcgtaaatgggaagcagcacgcgcagcagagcagcagcgcgcctacttggagggcacttgcgttgagtggttaaggaggtatctcgagaacggcaaggagacccttcaaagggccgaacaccccaagacccatgtaacacatcacctggtgtccgaccacgaagccaccctgcgttgctgggcactgggcttctaccccgcagagattactcttacctggcagcgagacggggaggaccagactcaagacacggagctggtcgaaacccgacccgcaggggatggtaccttccagaaatgggctgcggtagtcgtcccaagcggagaggagcagcgttacacgtgtcatgtgcagcatgaaggcctgcccgagcccctaacactccgatgggagccatcctctcagccaactatacctattgtgggcatcgtggccggcctcgccgtcttggcagtgctcgccgttctcggggctgtcgtggctgtggtgatgtgtagacggaaatcaagcgcgtag

SEQ ID NO: 85662 - DNA, 1101 bp, Artificial Sequence
  derived and/or modified sequence
atgcgggtgatggccccccggaccctgatcctgctgctgagcggcgcccttgccctaactgagacttgggcttgttcccacagcatgcgttattttgatactgccgtttcccggcccggccggggcgaacctcgcttcatttcggtggggtatgtggacgacacacaattcgtaagattcgactctgatgccgccagcccccggggcgaaccgcgcgccccttgggttgagcaggaggggccggaatattgggatcgggagacacaaaagtacaagcgccaggctcaggctgatagagttaacctgcgaaaactaaggggttactataatcagtccgaggacgggtcacacaccctccagtggatgtacgggtgtgatctgggcccagacgggcggctgcttaggggttatgaccaatccgcgtatgatggtaaagactacatagccctaaacgaagacctccggtcatggacagcggcagacactgccgcacagattactcagcgaaaatgggaagcagctcgggaagccgagcaatggagggcttacctggagggtacgtgcgtggagtggctgcgcaggtacctcgaaaacggaaaggagactctgcagcgcgccgagcacccgaagacccatgtcacccaccatcctgtgtcagatcacgaggccactctccgatgctgggccctggggttttacccagcagagataacattgacatggcagcgcgacggggaagaccaaacacaggatactgagctcgtcgaaactcgacccgctggagacggaacttttcaaaaatgggccgcagtcgtcgtccctagtggcgaggaacagagatacacctgtcacgtccagcatgaaggtttacccgagcctttgactctgcggtgggagcctagcagccagccaaccattccaattgtgggcattgttgctgggttagccgtgctggcggtgctggcggtacttggcgccgtgatggcagtagtgatgtgtagacgtaagagcagcggaggtaagggcggttcatgtagccaggccgcctccagcaatagtgctcagggttccgacgagtccctaattgcctgcaaggcatag

SEQ ID NO: 85663 - DNA, 1107 bp, Artificial Sequence
  derived and/or modified sequence
atgcgggtgatggccccccgggccctgctgctgctgctgagcggcgggctggccctcaccgagacttgggcgtgctcacacagcatgcggtatttcgacaccgccgtcagcaggcctggccgtggggaacctaggttcatctccgtaggatatgtcgatgacactcagtttgtcaggttcgactcagacgccgcaagtccacggggagaacctagggccccctgggtggagcaggaaggacctgagtattgggatagggaaacccagaattacaaacgtcaagcccaggctgacagggtcagcctgaggaacctgcgtggatactacaatcaatccgaagatggctcccatacactgcagcggatgtacgggtgcgatttgggcccggacggccgtctcctcagaggctacgaccagagtgcgtacgatggcaaagattacattgcactcaatgaggatctccgatcatggacggcagccgatacggccgcccagattactcaacgtaagcttgaggccgctcgcgccgctgagcagcttcgggcgtacctggagggcacctgtgtggaatggctcaggcgttatcttgagaatggcaaggaaactctacagagggccgagccacctaaaactcacgttacccaccaccctctcagtgatcacgaggccactctcagatgctgggctcttggattctaccccgctgaaattacgctgacatggcagagggacggcgaggaccagacacaggacactgaactcgtggaaacaagacctgcaggagacggcacttttcaaaaatgggccgctgtcgtagtgccaagcggacaagagcaacgctacacctgccatatgcagcacgagggactacaggagcctttgacgctgagctgggagccatcaagccagcccactatccctataatgggaatcgtagccgggttggccgtgctggtggtgttagcagtgctcggggccgttgtgaccgccatgatgtgccgtagaaagtcctctgcggcatgtgtggggctgagatgccggatctcctcccatctgagttttgttacctcaagagcttcaggaatatcgttctgtaaaggcgtgtag

SEQ ID NO: 85664 - DNA, 1194 bp, Artificial Sequence
  derived and/or modified sequence
atgcgggtgatggccccccggaccctgatcctgctgctgagcggcgccctcgctcttacggagacttgggcctgtagtcactctatgaggtacttcgatacagcggtttcccggcccggacgaggcgagcccaggttcatctccgtgggatacgtggatgacacccagttcgtcaggttcgattctgacgccgcttcacccaggggcgagccacgggcaccctgggttgaacaggaaggccccgaatactgggatcgtgagacacaaaagtacaaacgacaggcacaggctgatagggtcaacctccggaagttgagagggtactacaaccagtccgaagacggtagtcacacgctgcagtggatgtacggatgtgatctgggcccagacggccgccttctgaggggttacgatcagagcgcttatgatggcaaggactacattgctctgaacgaagatctgcgcagctggactgccgccgacacagctgcccagattacacaaaggaagtgggaggctgccagggaagctgagcaatggcgtgcctatctggaaggcacctgtgtcgaatggcttagaaggtatttggaaaatggcaaggagaccctgcagagggcggagcaccctaaaactcacgttacccaccaccctgtcagcgatcacgaggcaactcttagatgctgggcgttgggcttctacccagccgagatcacacttacatggcagagggatggtgaagaccagacccaggataccgagttggtggaaactcgccccgcaggcgatgggacatttcagaagtgggccgctgtggtggttcccagcggggaagaacaaaggtacacctgtcacgtacagcatgagggactcccagagccactaactctgcgatgggagccaagcagccagccgacaattccaatcgtcggcattgtggctggcctggccgtcctcgctgtgctagcagtgcttggagccgttatggccgtggtgatgtgtagacgcaagagctctggtcgcgaaggcgtgaggagcggtgtctggcctgctaccgtccctcgagcactgatgtcgctgtccagtcttgtcaaaccagaaactgctgcctgcgtgggcctaaggtgccgtatcagcagccacctgtcgttcgtgacctctagagcgtctggaatctctttctgcaagggcatttag

SEQ ID NO: 85665 - DNA, 1119 bp, Artificial Sequence
  derived and/or modified sequence
atgcgggtgatggccccccgggccctgctgctgctgctgagcggcggcttggccctgaccgagacttgggcatgttcgcacagtatgcggtactttgacacagctgtctctagacccggtcgaggtgaacctcgcttcatcagtgtgggatatgtggacgacactcagttcgttaggttcgatagcgacgcagctagcccgcgcggagaaccaagggcaccttgggtggagcaggaggggcccgaatattgggatagggaaactcagaactataaacggcaggcacaggcggatcgcgtatctctgagaaacctccggggatactacaaccagtctgaggatggcagtcacactttacagaggatgtacgggtgtgacctgggcccagatggtcgactgctgcggggatacgaccaatctgcctacgacggaaaagattatatcgcactgaatgaagacctccgcagttggaccgccgccgataccgctgcccagattacccaaagaaaactggaagccgcgagagccgcggagcaactccgggcctacctagaaggaacatgtgtcgaatggcttagacgatacctggagaatgggaaggagaccctgcagagggcagaaccacctaaaacacacgtgacacatcatccactcagcgaccacgaagccactctgaggtgttgggctcttggcttttacccagccgagataacactgacctggcagagggacggcgaggaccaaacgcaggacacagagctcgtcgagacccggcctgccggagatggcacctttcagaaatgggcagcagtcgtggtgccctctgggcaggagcagaggtatacatgtcacatgcagcacgaaggactgcaggagcccctcaccctgtcttgggagccaagttctcagcctactattccaattatgggcatcgtcgccggactggctgtactggttgtccttgccgtgttgggagccgttgtaacagcgatgatgtgcaggagaaagtcctccggccacttcctccccactggggggaaggggggtagttgctcacaggcagcttgtagtaactcagctcagggatccgacgagtctctgatcacttgtaaggcatag

SEQ ID NO: 85666 - DNA, 1101 bp, Artificial Sequence
  derived and/or modified sequence
atgcgggtgatggccccccgggccctgctgctgctgctgagcggcggtctcgctctcactgaaacttgggcctgtagtcactccatgaggtacttcgatacggcggtctcgcggccaggccgcggagagccccggttcataagcgtgggctacgtagacgacacacagtttgtacggtttgacagcgacgcagcctctccaagaggcgagcccagggccccatgggtggagcaggaggggcctgaatattgggatcgcgagacgcaaaactacaagagacaagcccaggcggatcgcgtttcactccgtaatttgagggggtactacaatcagtccgaagatggatcccacactctccagagaatgtacggctgtgacttgggtcccgacgggagattactgcggggatatgatcaatcagcatacgacggcaaggattacatcgctctgaacgaagatttgaggagctggactgcagctgataccgcggctcaaattactcagcgcaaactggaggcagcgcgggcggctgaacagctgcgggcatatttggagggtacttgcgtggagtggctccgccggtatctcgagaatgggaaagagactttgcagcgggcggagccacccaaaactcacgtaacccatcaccccctgagcgatcatgaagcgacactccggtgttgggcattggggttttacccagccgaaattacgttgacttggcagcgcgacggggaggaccagacccaagacacagagcttgtggaaacaaggccagccggggacggaacattccagaaatgggcagccgttgtagtgcctagcggacaggagcaaaggtatacatgtcacatgcagcatgaaggtctgcaggaacctctgacgctgagttgggagccgagctcccagcctactattccaatcatgggaattgtggcaggattagcagtccttgtagtcctggccgtcttgggcgctgtggtcacagccatgatgtgccgccgcaagtcatcaggcggcaaaggtggcagctgctcacaggccgcatgcagtaatagcgcccagggttccgacgagagtctcatcacctgcaaagcgtag

SEQ ID NO: 85667 - DNA, 1107 bp, Artificial Sequence
  derived and/or modified sequence
atgcgggtgatggccccccggaccctgatcctgctgctgagcggcgctctagcactgactgaaacatgggctgggtctcattcgatgaggtatttttacacagcagtaagcaggcctggtagaggggagccccactttatcgccgtggggtacgtggacgacacccaattcgtaaggtttgactcagatgccgcctcacctaggggtgagcctagagccccatgggttgagcaggaggggccggagtattgggatagggaaactcaaaagtataaaagacaggctcaaactgatagagtaagccttcgcaacctgcggggatattataatcaaagtgaggccgggtcccatataattcagcggatgtatggctgtgacgtgggcccagatgggagactcctgcggggctatgaccaatatgcctacgacggaaaagattacattgccttaaacgaggatctacggtcatggacggctgcagatacggcagctcagattactcaacgtaagtgggaggcagcgcgggaagctgaacagctcagagcctatctagagggactatgtgtggagtggctgcgacgttatctgaaaaacggaaaagagaccctgcagcgggccgagcacccgaaaacccacgtgacacatcatccagtgtccgatcatgaggctacactcagatgctgggctctcggtttttatccggcagagattacgctcacatggcagtgggatggcgaggatcagacccaggacacagaattagtagaaacacgacctgctggagatggcacctttcagaagtgggccgctgtggttgttccttccggagaagagcagcgctatacttgtcacgtgcaacacgaaggactccccgagcccctgaccctgagatgggaaccatcatcgcagccgacaatccccatagttggcatagtggccggccttgcggtgcttgccgtcctggccgtgctgggtgcagtggtcgccgtggttatgtgcagaaggaagtctagcgccgcctgcgtgggccttaggtgtaggataagttctcacctgtcctttgtgactagtcgtgcctcggggatttccttttgtaaaggaatttag

SEQ ID NO: 85668 - DNA, 1194 bp, Artificial Sequence
  derived and/or modified sequence
atgcgggtgatggccccccgggccctgctgctgctgctgagcggcggcttagccttgacagagacctgggcctgcagccactcaatgagatactttgataccgccgtatccagacctgggcgtggggaaccgcggttcatctcagtgggctacgtagatgatactcaatttgtcagatttgactccgacgctgcttcaccacggggggagcctcgggcaccatgggtcgagcaggaaggcccagagtactgggatcgcgagacacaaaactacaaaagacaggctcaggccgatagagtctcgttgcggaatctaagaggttattacaatcagtccgaggacggtagccataccttacaacggatgtatggctgtgatctggggccggatgggaggctgctccggggctatgaccagagtgcgtatgatggtaaagattacatcgccctcaacgaagatctccggtcttggacggcagcagataccgcggcccaaattacacaaaggaaactagaggccgcgcgggccgcagagcagttaagggcctacctggaaggaacatgtgtcgagtggcttaggcggtaccttgaaaacggcaaagaaacactgcaaagagccgagccgccgaaaactcacgtcacccaccaccccctgtccgatcacgaggccaccttgagatgctgggccctgggattctacccagcagaaatcactctgacctggcagcgcgacggggaggatcagactcaagatacagagttggtcgagacccgacccgcaggagatggtacctttcagaaatgggctgcggtcgttgtgccctctggccaggagcaacgctatacgtgccacatgcaacatgagggtctgcaagaaccccttaccttaagctgggaaccttccagccaacctacaatccctattatggggattgtggcaggtctggccgtgctggtagtgcttgccgtactgggagctgtggtcacagccatgatgtgccgccggaagtcctccggacgcgagggcgttaaaagcggcgtgtgggccgcaaccgttcctcgcgcattaatgagcctttctagtcttgtcaagcccgagacagcagcctgtgtcgggctgcgttgccgcatttctagtcatctgtctttcgttacatctagagccagcggtatctcattttgcaaaggagtctag

SEQ ID NO: 85669 - DNA, 1068 bp, Artificial Sequence
  derived and/or modified sequence
atgcgggtgatggccccccggaccctgatcctgctgctgagcggcgccttggccctgacggagacttgggcgggcagccatagcatgcggtatttttacaccgcagtgtcacgccccggacggggagaaccacatttcatcgccgttgggtatgtcgacgatacccagttcgtccgttttgacagcgatgccgcaagtcccagaggagaaccaagggcaccttgggtagaacaggaaggccccgaatattgggatcgcgagacccagaaatataagcggcaggctcagacagatagggtgagcctgaggaaccttcggggctattacaatcagagcgaagccggtagccatattatccagaggatgtacggctgcgacgtcggccccgacgggcgactcctccgtgggtatgaccagtacgcttacgatggcaaagactatatagccctgaacgaggacctgagatcgtggactgcagccgatacggccgcacagataacacagagaaagtgggaagccgcacgggaggcagagcagcttcgcgcctatctcgagggactctgtgtggaatggctgaggaggtacctgaagaatggcaaggaaacactgcagcgcgccgaacacccaaagactcacgtcactcaccatcccgttagtgatcatgaagccacccttagatgctgggcactgggattttacccagcagaaatcacactcacatggcagtgggatggagaggaccagactcaagacactgagctcgttgagacccgtccagccggcgacgggaccttccaaaagtgggctgcagtcgtcgttccctccggcgaggaacagaggtatacttgccacgtgcagcacgaggggttacccgaaccactgacgctgcgctgggaaccaagcagccagccaacaattcccatcgtaggaattgtcgccggtctggccgttctggctgtgctcgccgtgctgggcgcagtcgtcgcagtggtgatgtgccgccgcaaatcttctgcttcaaacagcgcccagggctcagacgaatctctgatcgcgtgcaaagcgtag

SEQ ID NO: 85670 - DNA, 1107 bp, Artificial Sequence
  derived and/or modified sequence
atgcgggtgatggccccccggaccctgatcctgctgctgagcggcgctctcgctcttactgagacctgggcctgttctcactccatgcggtatttctacaccgccgtgtcgaggccaggaagaggcgagcctcgtttcattgccgttggatacgtggacgacacccagttcgtccaatttgacagtgatgcggcttctcctagaggagagcctagagctccttgggtagaacaggagggaccagagtattgggacagggagacacagaagtataagagacaggcacagaccgacagagtgaacttacgaaagttaagagggtattacaaccagagcgaggcgggatcccacactctgcagcgcatgtacgggtgcgatttaggacccgatggtcggctgctccgagggtataatcagttcgcctacgatggtaaagactatatagccctcaacgaggatctccggtcttggactgccgccgataaggccgcccagatcacacagcgtaagtgggaggccgcaagggaagccgagcagcggagggcttatctagagggcacctgtgttgaatggcttaggcgctatctggaaaacggcaagaagactctgcagagagccgaacatccgaagacccatgtaacacaccatcctgtgtcagaccatgaggcgactcttcgctgttgggccctgggcttctaccccgccgagattacgctgacctggcagagggacggggaagatcaaacccaggatactgagcttgtggagacaagacctgccggagatggtactttccagaagtgggcggcggtggtggtcccgagtggcgaggaacaacggtacacttgtcacgtacagcatgaggggctcccagagccgctgacactgagatggggacctagcagccagcccactatacctattgtcggaatcgtcgcggggcttgctgtcctggccgttctcgccgtgcttggcgctgtgatggccgtggtaatgtgtcgaagaaagagctctgccgcctgtgtgggactccgctgccggatctcaagccatctttctttcgtgacatcacgcgcctctggtatatctttctgcaagggcatttag

SEQ ID NO: 85671 - DNA, 786 bp, Artificial Sequence
  derived and/or modified sequence
tgacgggtgatggccccccggaccctgatcctgctgctgagcggcgctttagcgcttaccgagacttgggcttgctcccacagcatgcggtacttctacacagctgtgtcccgcccagggcggggtgagccaaggttcatagccgtgggttacgtagacgacacacaattcgtcaggtttgattcagacgctgcatcaccaaggggagaaccccgtgctccatgggtcgagcaagaggggccagaatattgggaccgggagacccagaaatataagaggcaggcacagacagaccgtgtgagcctgaggaaccttcgcggatactacaaccagtcagaagccgggtctcacactctgcagtggatgtatggctgtgatttgggaccggacggcaggttgctgcgcggttatgaccagtcagcctacgacggcaaggactacatcgccctaaatgaagaccttcggagctggacagccgcagacaccgcggcccaaattactcagcgcaaatgggaggcagcccgggccgcggagcaacagcgtgcttatcttgaaggtacttgtgtggaatggctgaggaggtacctcgaaaatggtaaggaaactctacaacgcgcggaacatccaaagacccatgtgacgcaccatctcgtgtcggatcatgaagctagtcggagatggaatctgccagaggtcggcagctgcgggggcgcgttctggaggcgggctgaaatacacgtgccatgtgcagcgcggggtgctgccggcgctcctcacccggaatag

SEQ ID NO: 85672 - DNA, 1101 bp, Artificial Sequence
  derived and/or modified sequence
atgcgggtgatggccccccggaccctgatcctgctgctgagcggcgcattagccctcactgagacctgggcttgttctcactccatgaggtatttctacaccgccgtgtctcgccctggccgcggtgagcctcgcttcatagccgtgggatacgtggatgatacacagttcgtcaggttcgattccgatgcagctagcccccggggcgagccgcgggctccctgggtggaacaggagggtcctgaatactgggatcgggagacccaaaagtataagcggcaggcacagactgaccgtgtctcactccgcaacctccgtggttactataatcagagcgaggccggcagccatacccttcagtggatgtacgggtgcgatctcgggcctgacggccggctcctgagggggtacgatcaaagtgcctacgatggcaaggattatatcgccctcaatgaggacctccgctcctggaccgccgctgacaccgctgcacaaattactcagcgaaaatgggaggctgcaagggccgcagagcagcagcgtgcgtatcttgaagggacatgtgtcgaatggctccggaggtatttagagaacgggaaagagactttgcagagagccgagcatcccaagacgcatgtaactcaccacttggtttccgaccacgaagctacgctgaggtgctgggcgcttggtttttatcctgccgaaatcacgctcacttggcagcgagatggggaggaccagacccaagacaccgaattggtggagacccgacctgctggcgatggcaccttccagaagtgggccgctgtggtcgtgccctcaggcgaagagcaaaggtacacttgccatgtccaacacgaaggattacccgagccgctcaccctgcggtgggagccgtcctcccaacctacgattcctatagtcggcattgtagcaggcctggccgttttagccgtcctcgccgtcctgggtgctgttgttgccgtcgttatgtgtcggagaaaatcatccggcggaaagggagggtcctgcagtcaggctgcatcatccaacagtgcccagggctcagacgaaagcctaatcgcttgcaaagcatag

SEQ ID NO: 85673 - DNA, 786 bp, Artificial Sequence
  derived and/or modified sequence
tgacgggtgatggccccccggaccctgatcctgctgctgagcggcgcattggccctgaccgagacttgggcttgttcacacagcatgcgctacttttacacagccgtgtccagacccgggagaggcgaaccaagatttattgctgtaggttacgtggatgatacccagtttgttcaattcgatagtgacgcagccagcccgcgcggagagcctcgggcgccttgggtagaacaggaagggccggagtactgggaccgcgagacacagaagtacaaacggcaggctcagaccgatagagttaatctgcgcaagttgcgcggctattacaaccagtcagaggccggaagtcacaccctgcagagaatgtacggctgcgatctgggacccgacggcagattactgaggggctataaccagtttgcgtacgacggaaaagattacatcgctttgaacgaggatctgagaagttggactgccgccgataaggctgctcagattacccagagaaaatgggaagcagcacgcgaggcagagcagcgaagggcgtacctcgaaggaacctgcgttgaatggcttagaaggtatcttgagaacggcaaaaaaacgctgcagagagctgaacacccaaagactcatgtcacacaccacccagtgtccgatcacgaggcgtcccgtcggtggaatctgcccgaggttgggtcttgcgggggcgccttctggcggcgagcggaaatccacgtgccatgcgcagcacgcggagctgctcgggcccctcacccagaatag

SEQ ID NO: 85674 - DNA, 786 bp, Artificial Sequence
  derived and/or modified sequence
tgacgggtgatggccccccggaccctgatcctgctgctgagcggcgcgttggctctaactgaaacatgggcctgtagtcactccatgagatatttctacactgcagtttcgcgtcccggcagaggcgagccccgcttcattgccgttgggtatgttgacgatacccagttcgtgcagtttgactccgatgccgcgtctccccgcggggaaccgagagccccttgggtggagcaggagggccctgagtattgggatcgcgagacgcagaagtataaaagacaagcccagacagacagggtaaacttacggaaactgagaggctattataaccagagtgaggcaggaagccacactctccaaaggatgtatgggtgtgacttgggtcctgacggcagactgctaaggggctataatcaatttgcctacgacggtaaggattatatcgctcttaacgaggatctgcgcagctggaccgctgcggataaggcagcacagattacacaaagaaagtgggaggcagcaagagaggccgagcagcggagggcctatttagagggtacctgcgtggagtggctgcgtagatatctggagaatggaaagaagacgttgcaaagggccgaacatccgaaaacccacgtaacccatcaccctgtcagcgaccacgaggccagtcggcggtggaacctgcctgaagttggcagctgtggcggggccttttggcgccgggcagagatccacgtgccctgcgccgctagaggcgccgcccgcgcccctcacccggagtag

SEQ ID NO: 85675 - DNA, 1119 bp, Artificial Sequence
  derived and/or modified sequence
atgcgggtgatggccccccggaccctgatcctgctgctgagcggcgctctggcccttacagaaacctgggcctgcagtcactcgatgcgatatttctataccgccgtgtcacggcccggccgtggggagccgaggttcatagctgtcggctatgtggatgatacccaatttgttaggttcgacagcgacgccgccagccctcggggcgaacctcgcgcaccctgggtggagcaagaaggtcccgagtactgggatagggagacccagaagtataagagacaggcccagacggaccgtgtaagtttaaggaacctaaggggctattataaccagtcagaagccggctcccacactctgcaatggatgtatggttgcgacttaggcccagatggtagactgctgagaggttatgatcagagtgcttatgacgggaaggattacatagctcttaacgaggacctgcgaagctggacagctgccgatactgctgcacagatcactcagcgaaagtgggaagccgcacgcgccgccgagcagcaaagagcatacctggaaggcacctgcgtggagtggctgaggcgataccttgagaatgggaaagagactcttcaaagagccgaacatcccaagactcacgtgacgcatcatctggtatcggatcatgaagccacactgaggtgttgggcactgggattctatcctgctgagattacactcacatggcagagggacggcgaggatcagacccaggacacggagcttgtggaaacgcgcccggccggtgacggtaccttccagaagtgggccgccgttgtcgtgccttccggcgaagagcaaaggtacacctgccatgtccagcacgagggcctgcctgagcctctcacgcttcgctgggaaccatcatctcagccaactattcccattgtcggaatagttgctgggttagccgtgttggctgttttagctgtactaggcgcagtggtagccgtggttatgtgtaggcgaaagtcttcaggacactttctccctaccgggggtaaggggggtagctgtagtcaggccgccagtagcaattccgcccagggatctgacgagagcctcattgcatgcaaggcctag

SEQ ID NO: 85676 - DNA, 786 bp, Artificial Sequence
  derived and/or modified sequence
tgacgggtgatggccccccggaccctgatcctgctgctgagcggcgctctagctttgaccgaaacatgggcatgttcgcattccatgcgttacttcgacaccgctgtgagcagacccggtcggggcgaacctcgctttataagtgtggggtatgtagacgacacgcagttcgttaggtttgattccgacgcagctagccccagaggagagcctagggccccgtgggttgagcaggagggacctgagtactgggatagggaaacacagaagtacaagcgccaagcacaagcggacagagtgaatctgcgcaagctgcgagggtattataaccagtccgaagatgggtcccatacattacaatggatgtatgggtgtgacctggggccagacggcaggctgttgcggggttacgatcagagcgcatatgatggcaaagattatattgccctgaacgaagatttgcgatcttggacagcggccgacactgccgctcagattactcagaggaagtgggaagctgcaagagaagcagagcagtggagagcctacctagagggaacttgtgtggagtggctaagaagataccttgaaaatggtaaggagacactgcagcgggccgagcatcccaaaacccacgtcacccaccacccagtttccgatcatgaggcctctaggcgatggaatcttcccgaagttgggtcatgcggaggagccttctggcgtcgcgccgagatccatgttccctgtgccgcaagaggcgctgcccgtgctcctcaccccgaatag

SEQ ID NO: 85677 - DNA, 1107 bp, Artificial Sequence
  derived and/or modified sequence
atgcgggtgatggccccccggaccctgatcctgctgctgagcggcgcactcgctctcacggagacctgggcctgctctcatagcatgaggtactttgataccgccgtctcacggcccggtagaggcgaaccgaggttcatttctgtggggtacgtcgatgatacacagtttgtgaggtttgactctgatgctgctagcccacggggtgaacctcgcgctccctgggtggaacaggagggccccgagtattgggatcgggagacacaaaaatacaagcgccaggcccaggcagaccgagtcaacttacggaagctgcgtggatactataaccagtccgaggacgggtcacataccctccagtggatgtacggctgtgacctaggacctgatggcaggctgcttcgaggttatgatcagagcgcctatgacggcaaagactacatcgctctcaatgaggatctgcgatcctggaccgccgccgataccgcggctcagattactcagcggaagtgggaagccgctcgggaagcagagcaatggcgagcttatctagaagggacctgcgtggaatggctgcgacggtacctggagaacggcaaggaaaccttacaacgagccgagcatccgaaaactcatgtgactcatcacccggtgagtgaccacgaagccacgctcagatgctgggcactggggttttaccccgcggaaataactctgacttggcaaagggatggggaagatcagacccaggatacagaacttgttgagaccagacccgcgggggacggtacatttcagaaatgggctgctgtggtggtgccaagtggggaagagcaaaggtacacctgccatgtgcagcacgaagggctgcctgaacctcttacattacggtgggaaccttctagccaacccacaatccccatcgtcggcattgtcgctgggctcgcggtgttggccgtcttagcagtgttaggggcagtgatggccgtagtgatgtgccggcggaagtctagcgccgcgtgcgttggactaaggtgccggataagttcccacttgtcctttgttaccagccgcgcatccgggataagtttctgcaagggtatctag

SEQ ID NO: 85678 - DNA, 786 bp, Artificial Sequence
  derived and/or modified sequence
tgacgggtgatggccccccgggccctgctgctgctgctgagcggcgggctggccttaactgagacatgggcatgctctcactctatgcgatattttgacaccgcagtctcaaggcccggtcgcggagagccgagatttatttcagtcggatacgtcgacgacacccagttcgtgagattcgattctgatgctgcttccccacggggcgaacctcgcgccccgtgggtggaacaggaagggccagaatattgggatcgcgaaacccagaactacaagcgccaagcacaagccgacagagtgtccctgagaaatctaaggggctactataatcagtcagaagacggtagtcacacactgcagagaatgtatggctgtgatttggggccggacggtcgcctcctcaggggatatgatcagagcgcctacgatggaaaggattacattgcactgaacgaggatttacgctcttggactgccgcagacacggccgctcagatcacacagcgtaagctggaggctgcgcgcgcagctgagcaactgcgagcttacctcgagggcacttgcgtcgagtggctcagacgttatttggagaacgggaaggaaaccctccagcgagctgaacccccaaaaacgcatgtcactcaccatccgctctctgaccacgaagcctctagaagatggaacctgccggaggtcggctcgtgtggcggggccttttggaccagagcagagatccacgttccttacgcggccagaggagccgctcgtgcgcctcatcccgagtag

SEQ ID NO: 85679 - DNA, 1101 bp, Artificial Sequence
  derived and/or modified sequence
atgcgggtgatggccccccggaccctgatcctgctgctgagcggcgcactggctcttaccgagacttgggcaggttcacatagtatgagatatttctataccgccgtctcacggcctggccggggagagccacactttatcgcagttggatacgtggacgacacacaatttgtgcgcttcgatagcgacgctgcatctcctcggggcgagccacgcgctccctgggttgaacaagagggaccagagtattgggacagggaaacccagaaatacaagagacaagcccagacagatagggtgtcactgcggaacctgcgcggctactacaatcagagcgaagctgggtcccacattatacaaaggatgtatgggtgtgacgtgggcccagacggaagattactacgcggctacgaccagtatgcatacgacggcaaggactacattgctctcaatgaggatctgcgctcttggacagctgctgacactgcagcacaaatcactcaaagaaaatgggaggcagcccgagaagctgaacagttgcgcgcttatcttgagggtctgtgcgtggagtggttgcgccggtacctgaaaaacggaaaggagactctgcagcgtgctgagcatccaaaaacacacgtgacacaccacccagtgtccgatcatgaggccactctgcgctgctgggccctgggtttctatccagccgagattaccctcacatggcaatgggacggggaggaccagacccaggatactgaactagtagaaacacgacctgcaggcgacggaacgttccagaagtgggctgccgttgtcgtgccaagtggtgaggaacagcgatatacctgccacgtacaacacgagggactgcccgagcctctaaccctgcgatgggaaccgtcatcccagcccactatccctatcgttggtattgtcgcaggtctcgctgtgctggctgtgttagcggtacttggtgccgttgtggccgttgtaatgtgtcggcgtaagtctagcggggggaagggcggctcttgcagccaggccgccagctcgaatagtgcccaaggttccgacgagtctctgattgcctgtaaagcatag

SEQ ID NO: 85680 - DNA, 1119 bp, Artificial Sequence
  derived and/or modified sequence
atgcgggtgatggccccccggaccctgatcctgctgctgagcggcgccttagccctgacagaaacctgggcatgctcccactccatgagatactttgatactgctgtctcccgccctggtcgaggcgaaccccgatttatctccgtgggctacgttgacgacacgcaattcgtgaggttcgactcagatgccgccagccctcggggagaaccccgggccccttgggtcgaacaggagggaccggagtattgggaccgcgaaactcagaagtataagcgacaggcgcaggccgacagggtgaaccttagaaagctgcgcggctactataatcagtctgaggacggctcccacaccctccaatggatgtatgggtgtgacttagggcctgacggcaggttgctcagagggtatgatcagagcgcctacgacggtaaagactatattgccctgaacgaagacctgaggagttggacagctgctgatacagcagcacaaattacacagagaaagtgggaagcagcccgcgaagccgaacaatggcgtgcatacctggaaggaacatgcgttgaatggctgcgccgctaccttgaaaacggcaaggaaacactgcagagggccgagcatcctaagactcatgtgacccatcaccccgtgtctgaccatgaagccaccctgaggtgctgggcactcgggttctaccccgctgaaatcactttgacttggcagcgtgatggtgaagatcagacccaagacactgagctcgtggagacccgaccagccggtgatggtacctttcagaagtgggctgccgtggtagtaccttccggagaggagcaacgctatacatgccatgtacagcacgaaggattacctgaacccctgaccctgcgttgggagccaagttcccagcccactatcccaatagtcgggatagtcgccgggttggccgtccttgcggtcttggcagtgttaggagcagtaatggctgtagtgatgtgtagacgcaagtccagcgggcacttcctccctactggaggaaagggagggtcttgtagccaagctgcctcttcgaacagcgctcagggatccgacgagagcctcatcgcctgtaaagcttag

SEQ ID NO: 85681 - DNA, 1107 bp, Artificial Sequence
  derived and/or modified sequence
atgcgggtgatggccccccggaccctgatcctgctgctgagcggcgcattagctctgaccgagacatgggcttgttcccacagcatgagatatttctacaccgcagtgtctaggcctggtagaggtgagccccgatttatcgctgtggggtacgtcgatgatactcaatttgttcagtttgactcagatgctgccagccctagaggggaaccgagagccccttgggtggaacaagaaggcccggagtattgggaccgcgaaacacagaaatacaaaaggcaggctcaaaccgaccgggttaaccttagaaaacttcgtggctactacaaccaatccgaggctggcagtcataccctgcagcgcatgtacggatgcgatcttggacccgatgggagattgctgcggggctacaatcaatttgcctatgatgggaaagattacattgccctgaacgaggatctcaggtcttggactgcagcagataaagccgcacagattacccagcgaaaatgggaagccgcacgtgaggctgagcagcgacgagcttacctggagggcacctgtgttgagtggttacggagatacctcgaaaatggaaagaagaccctgcaacgcgccgagcatcccaaaacccacgtgacccaccacccggtgtctgatcacgaggcgaccctcaggtgttgggcactgggattttatccagccgagatcacacttacctggcagcgagatggcgaagatcaaacccaggacactgaactagttgaaactaggccagcaggtgacggcaccttccaaaagtgggctgccgtggtggtgccatcaggcgaagaacaaagatacacatgccacgtccaacatgaaggcctacccgagccgctcacccttcgctggggaccatcttctcaacctacaatacccattgtcggcattgtcgccggactggcagtgctggctgttctcgccgttctgggcgctgttatggcagtggtcatgtgccgacggaagtccagtgccgcttgcgtcggcctacgttgtaggatatcttcgcacctgtcgtttgtcacctctagagccagcggaatatcgttctgcaaggggatttag

SEQ ID NO: 85682 - DNA, 675 bp, Artificial Sequence
  derived and/or modified sequence
atgcgggtgatggccccccggaccctgatcctgctgctgagcggcgccttggcactgaccgaaacttgggcctgctcccacagtatgcggtatttctatactgccgtgagccgccccgggcggggagaacctcgattcatcgcagtgggatacgtggatgatacacagtttgtgcagttcgactcggacgctgcttctccacggggggagccccgggccccatgggtggaacaggagggacctgagtactgggatagggaaactcagaagtataaaaggcaggcacagacagacagagtgaacctgaggaagctgagaggttactacaaccagtccgaggcgggttcacacaccctgcaacgtatgtatgggtgtgacctgggccccgacgggagacttttaagagggtataatcagttcgcatatgatggaaaggactatatagccctcaacgaggacctgcggtcttggactgccgctgataaggcggctcagattacccagcgtaagtgggaggcagctcgggaagctgagcagcggcgggcctatctggagggcacctgcgtcgaatggttacgtcggtacctcgagaacggcaagaagaccctgcaaagagccggtcaggatcagaagagtctgtttctgccccagagacttgagttatcaaacgaatag

SEQ ID NO: 85683 - DNA, 675 bp, Artificial Sequence
  derived and/or modified sequence
atgcgggtgatggccccccgggccctgctgctgctgctgagcggcggcttagcactgaccgaaacatgggcttgctcccattccatgcgatactttgatacggccgtctctcgtcctggccgaggcgagccccgcttcattagtgtcgggtacgtggatgatacccaattcgtgcgcttcgactcggatgccgctagtcctagaggcgagcctagagctccatgggtcgaacaagaggggccggaatattgggatcgggaaacccagaactacaagcgccaggcccaagccgatagggtgagtttgagaaacctgcgtgggtattacaatcagtctgaagatggctcccacacgctccagaggatgtacggctgtgatcttggcccggatggtcgattgcttaggggttacgatcagagtgcttatgacggtaaagattacatcgctctgaacgaagacctcaggtcctggactgccgctgacaccgctgctcaaattacacaaaggaagctggaagctgcccgtgccgctgagcagctccgtgcttacctggaaggaacgtgcgtggagtggctccgccgctacctggagaacggcaaggagaccctccagcgggcaggccaggaccagaagtctctcttcctgccacagcgattagagttatcgaacgaatag

SEQ ID NO: 85684 - DNA, 396 bp, Artificial Sequence
  derived and/or modified sequence
atgcgggtgatggccccccgggccctgctgctgctgctgagcggcggccttgctctgactgaaacttgggcctgctcccattctatgaggtactttgacactgccgtgtccagaccaggccgcggcgagccccgattcatatccgtagggtacgtcgatgacacacagttcgttcgctttgattccgacgccgccagccctcggggcgagccgagggcaccatgggtggagcaagaaggcccggagtactgggatcgagaaacccagaattacaaacgacaggcacaggccgaccgcgtctccttaagaaatcttagggggtattacaatcagtcagaagatgaggatgtctggctgaggcccggggcgcggcgggcacccccgccccgagtttag

SEQ ID NO: 85685 - DNA, 1212 bp, Artificial Sequence
  derived and/or modified sequence
atgcgggtgatggccccccgggccctgctgctgctgctgagcggcgggctggccctcaccgagacctgggcctgcgagtgcggcgtgggacgggaggccgcgtccgcagaacgtagcgaggggccccctggagagccgcggcgagaagtgggcagagcaggattgtcccctagttccccgccgggtagtcactctatgagatactttgatacagccgtgagccgacctggccggggggagccacggtttatttctgttggctatgtggatgatactcagtttgtgaggttcgatagcgatgcagcatctcctagaggggagccccgggccccttgggtggagcaggaaggccctgagtattgggacagagaaacccaaaattacaagagacaggctcaagccgaccgagtatccctgcgaaatctgaggggatattacaatcagtctgaagacgggtcccacacactgcagcgcatgtacggttgcgacttgggccccgatggcagattactgagaggctacgaccagtccgcctatgacggaaaagattatatcgccttaaacgaggatctgcggtcatggacggcagcggatacggctgcccaaataacccaacgaaaactggaggcagcccgggccgccgaacagctccgcgcttacctcgagggtacgtgtgtggaatggttgaggcgctatcttgaaaacggcaaggagaccctccagagagccgaaccccccaagactcacgttacccaccacccattaagcgatcacgaggccacccttagatgttgggccctgggattttaccccgcagagattactctcacctggcagcgagatggagaggatcaaacccaggataccgaactggtggaaactcgtccagccggagacggtacattccagaaatgggccgccgtggtagtcccatctggtcaagagcagagatacacgtgccatatgcagcacgaaggcctgcaagaacctctgactctgtcatgggaaccgtccagccagcctacaatacctattatgggcatcgtggccgggctggccgtcctggttgtcctggcagtcctgggcgcagtggtgacagccatgatgtgccgccgtaaatcttcagggggtaagggaggttcctgcagccaggccgcctgtagcaactcggctcaaggctctgatgaatctctgataacatgcaaagcttag

SEQ ID NO: 85686 - DNA, 981 bp, Artificial Sequence
  derived and/or modified sequence
atgcgggtgatggccccccggaccctgatcctgctgctgagcggcgccctcgccctgactgagacatgggcctgcagccatagtatgcggtatttttacacagcagtgagtcgccccggtcggggcgaaccccggtttattgccgtgggatatgtggatgatacacagttcgttcgcttcgacagcgacgccgcatccccacgcggcgagcctcgtgccccttgggttgaacaggaaggccctgaatactgggaccgcgaaacacagaaatacaagagacaggcccaaactgatcgcgtgtcattacgaaacctgcgcggttactacaatcaatctgaagccggttcccacactctgcagtggatgtatggctgtgacctcggtcccgatggtaggctcctgaggggatatgaccagtccgcctatgacggaaaggattatattgctcttaatgaggatttacgaagctggactgcagcggatacggccgctcagatcacccaacggaaatgggaggccgcacgggctgccgagcagcagcgcgcctacctcgaaggtacttgcgtggagtggctgcgaaggtatctcgagaatggaaaagaaacacttcagagagcagaacatccaaagactcatgtaacccaccacctggtgtccgatcatgaggctactttacgttgttgggctttggggttctatccggccgagatcacactcacgtggcagagagacggcgaagatcagacacaggatactgagcttgtggagacccgccccgctggggacggcaccttccagaagtgggccgctgttgtagtgccctctggcgaggagcaacgatacacctgccacgtccagcacgaaggactgccagagccccttactcttagatgggggggcaaaggagggtcttgcagccaagcagcatcaagtaatagcgctcagggcagcgatgagtctcttatcgcttgtaaagcatag

SEQ ID NO: 85687 - DNA, 1119 bp, Artificial Sequence
  derived and/or modified sequence
atgcgggtcatggcaccccgaaccctcattctcctgctgagtggcgcacttgccttaaccgagacttgggcttgtagccattccatgcggtatttctacacagctgtgtccagacccggtcggggagagcctaggtttatcgctgtgggttatgtcgatgatacccagttcgtgcaatttgacagtgatgctgcgtcgcccaggggagagcccagggccccttgggtggagcaagaaggaccagagtactgggatcgtgagacacagaaatacaaaagacaggcccagactgacagggtcaatctccgcaagctcagagggtattacaatcagtccgaagccggaagtcataccttacagaggatgtacggatgtgatctcgggcctgatggcagactgctccgcggatataatcaatttgcctacgacgggaaagactacatcgcactgaacgaggacctccgcagctggactgccgctgataaggcagcgcagatcactcaaagaaagtgggaggccgcaagggaagccgaacaacgaagggcctacctcgaaggaacttgtgtggagtggcttcgcaggtatttggaaaatggtaagaagacgttacaaagagctgagcatcctaaaacccacgtgacgcaccatccagtatctgaccacgaggcgacactgaggtgctgggcacttgggttttacccagccgagatcaccctgacgtggcagagggacggcgaagatcagacacaggacacagagcttgtggagacacgtcctgcaggcgatggaacatttcagaagtgggccgctgtagttgtgccaagtggggaagaacagcgctacacctgtcacgtccagcatgaaggattgccagaaccgctgacactccgttggggcccttcgtctcaacccacgatccctatagtcgggatcgtcgcagggctagccgtcctcgcagtgctcgctgtcctgggggctgtgatggccgtggtcatgtgtcgtaggaaatcttcgggccattttctccctactggaggaaaggggggttcttgctcccaggccgcttcatcaaacagtgcccagggctccgatgaaagtctcattgcttgtaaagcatag

SEQ ID NO: 85688 - DNA, 1194 bp, Artificial Sequence
  derived and/or modified sequence
atgagagttatggcccctcgcactctcatcctcttactcagcggcgcattggcactgaccgagacttgggcctgcagtcacagtatgcgctacttttacacggcagtgtcgcgtccaggaagaggtgagcccagatttattgcagtcgggtacgtagatgacactcagttcgtgcagttcgacagcgatgcagcctctccgaggggagagcccagagccccatgggtcgagcaggaggggccagaatattgggatagagagactcaaaagtataagaggcaagctcagacagaccgagtcaacttgcggaaattgagagggtattacaaccagtccgaagctggatcccacacactccaacgaatgtacgggtgcgacctgggtcccgacgggagactgctaagaggatataaccaattcgcgtatgacggtaaagattacatcgccctgaatgaagatcttaggtcctggacggctgctgataaagctgctcagattacacagagaaagtgggaagctgccagggaagcagagcaaaggcgggcatatctcgagggtacatgcgtggagtggttaaggcgttacttggaaaatgggaagaagaccctccagagggcagagcaccctaaaacacacgtcactcatcatcccgtgtccgaccacgaagcgacactgcgctgctgggcactcgggttttatcctgccgaaatcactctgacctggcagagagatggcgaggaccagacccaggacacagaactggtggagacccgtccggctggagacggcacctttcagaagtgggctgctgtggtggtgccaagcggcgaagaacaaagatacacctgtcatgttcagcatgaaggtctgcctgagccgctaacactgaggtgggggccttcaagccagcctactattcccatcgtgggcatcgtagccggtctagccgtgctggcagtcttagctgtgcttggagctgtcatggccgtggtgatgtgtcggagaaagtcttctggtagggagggcgtgcggagcggagtctggccagccacagtgcctcgcgcactaatgtccctgtcgtccctggtgaagcctgagaccgccgcttgtgttggccttcggtgtcggatctctagccacctcagttttgtgacctctcgagcaagcggaatcagcttctgtaagggcatttag

SEQ ID NO: 85689 - DNA, 1119 bp, Artificial Sequence
  derived and/or modified sequence
atgcgggttatggcacccaggacgctgattctgctgctatctggggcactcgcactcaccgaaacttgggcctgtagccactccatgcggtacttttataccgcagtctcccgccctgggaggggggagcctcggttcattgccgtgggatacgtggatgatacccagttcgtccagttcgactcagacgctgcttctccccgaggagagccacgcgctccttgggtggagcaagaagggccagaatactgggaccgggagacacagaagtacaaaagacaggctcagactgacagggttaacttgagaaagctaaggggatattacaaccaaagcgaagcagggagccataccttacaaaggatgtacggctgtgacttggggcctgatggccgactgctacggggatataatcagttcgcatatgatggtaaagattacatagctctgaatgaggacctcagaagctggaccgctgcggataaggcagcacagatcacacaaaggaaatgggaagcggctagagaagcagaacagagaagagcttacctggagggtacttgtgttgagtggctgcgaaggtacctggagaatgggaaaaaaactctgcagcgtgctgaacatcccaagacacatgtcacccaccatcccgtttctgatcacgaggcgacactgcggtgctgggctcttggtttttatcccgcagagataactttgacctggcagagagatggagaagaccagacacaggatactgagctggtggagacaaggcccgcaggagacggcacgtttcagaagtgggctgctgtagtggtacccagcggcgaggaacagaggtacacctgccatgttcagcacgaaggcctcccagaaccactgacactcaggtggggaccgtcttctcaaccaactatcccaattgtgggcattgtggccggactggccgtgttagctgtgctggcagtcctgggagccgtgatggccgtggtcatgtgtcggagaaagagctcggggcacttcctgcccactggaggcaaaggcggtagctgttctcaggctgcctcctccaattccgctcagggaagtgatgagtccttgatagcttgcaaggcgtag

SEQ ID NO: 85690 - DNA, 1101 bp, Artificial Sequence
  derived and/or modified sequence
atgcgggttatggctcccagaacactcatactactgctgagcggcgcactggctcttacggagacatgggcttgcagtcactctatgaggtacttttataccgcagtcagtcgacccggaagaggcgagcctcgtttcatagccgttgggtacgtcgatgacacgcagttcgtacagtttgacagtgacgccgcaagtccgaggggcgagcctagagcaccctgggtcgaacaggaggggccagagtattgggacagggaaacgcagaaatataaaaggcaagcccagacagacagagttaaccttagaaagttaaggggttactataaccagtcagaggccggtagccatacgctgcagagaatgtatggctgcgacctcggccctgatggcaggctcttacgcggatataaccaattcgcgtacgatgggaaagattacatcgctctgaatgaagacctgaggtcctggactgccgctgacaaagccgctcagattacacaaaggaaatgggaggcagccagagaggcagagcagcggagggcttacctggaggggacctgcgtggagtggctaaggcggtacctcgaaaacggcaaaaaaacgctacagagggcggagcacccaaagacccacgtaacccatcaccccgtctctgaccatgaggctacccttcgttgctgggccctgggcttctaccctgccgagataacactaacctggcagagagatggcgaggatcagacacaggataccgagcttgtggagaccaggccagccggtgacggcacattccaaaaatgggccgcagttgtcgtcccgtccggggaggaacagcggtatacctgccacgtccagcatgaagggcttcccgagcccttgacactgaggtggggaccctcctcacagcccacgattcccatagtggggattgtggccggtctcgccgtcctggcagtgttggcagtcctgggagctgtcatggctgtagtaatgtgcagaaggaagtcttcaggtgggaaaggcggttcctgtagtcaggccgcttcatctaattccgcgcagggctctgacgagtccctcatcgcctgtaaagcttag

SEQ ID NO: 85691 - DNA, 1101 bp, Artificial Sequence
  derived and/or modified sequence
atgagagtgatggctccaagaacgctgatcttgctgctttccggggcactggcactgaccgaaacctgggcgtgtagccattcgatgcggtatttttacacggcagtctctcgtcctggcaggggagaaccaaggttcattgcagtcgggtacgtggacgatacccaattcgtgcaatttgactccgatgccgcatcaccacgaggcgagccgagggccccttgggttgagcaggaaggaccagaatattgggatcgcgagacgcaaaaatacaagaggcaggcccagacggatcgagttaacctgagaaaactccgtggctactataatcaaagcgaggctggaagtcatactctccagaggatgtacggctgtgatttaggacctgacggccgactgttgcgaggctacaaccagtttgcctacgatggtaaggattacatcgcattaaacgaggatctccggtcctggacagcagcagataaggctgcccagatcacacagcgcaagtgggaagctgcaagagaggccgaacaaagaagggcctacctggaggggacatgtgttgaatggctcagacgctacctggagaatgggaaaaagaccctgcagagggctgaacacccaaaaacacacgtcactcaccatcctgtgtccgaccacgaagctactctaaggtgctgggcacttggattttaccccgcagaaatcacgctcacctggcagagagatggggaagaccagacacaagacaccgagctggttgagacacggcctgccggagacggcacttttcagaagtgggcagcggttgtagtgcccagcggcgaggagcaacgatatacttgtcacgtgcagcacgaggggctccccgagcccttaaccctgcgctgggggcctagtagtcagcctacgatcccgatagtcgggatcgtggccggactggcagtgctcgccgttctggctgttctcggtgccgttatggcagtcgtaatgtgtcgtagaaaatcatcaggaggaaagggcggtagctgcagtcaggccgcttcctcaaactccgcccagggcagcgacgaatcacttattgcttgtaaggcctag

SEQ ID NO: 85692 - DNA, 1194 bp, Artificial Sequence
  derived and/or modified sequence
atgagggttatggccccacgcactctgatactgctgctttccggggctctggcattgaccgagacttgggcatgtagccatagcatgagatacttttacactgcagttagtcggcctggcaggggagaaccgcgattcattgcagtcggctacgtcgatgatacacagttcgtccaattcgattcagacgcagcctcccccagaggagagcctcgtgccccatgggtggagcaggagggtcccgaatattgggacagagagactcagaagtacaagcgacaggcccagacagacagagtcaatctgagaaagctacgcggatattataatcaaagcgaagccggatctcacacactgcagcgcatgtatggatgtgacctgggaccggacggcaggcttttaaggggctataaccaattcgcctatgacggcaaggattacatcgctttgaatgaggatctgcgatcatggacagccgctgacaaggccgctcaaattacacaaagaaaatgggaagcagctagggaggcagagcaacgcagagcatatctggaaggcacatgtgtggaatggctgaggagatacctggagaatggtaagaagactctgcaacgcgcagagcaccctaagacgcatgttacccaccatcctgtgtccgaccacgaggcgacattaaggtgttgggcgctcgggttctaccctgctgaaattacactgacatggcagagggacggtgaggatcagacacaagacacggagctcgtcgagacccgacccgcaggagatgggactttccagaagtgggctgctgtagtggtcccctctggcgaggaacagagatatacctgccatgtccagcatgaaggcttaccggaaccactgacactaagatggggacctagcagtcagcctactattccaatcgttggcatagtcgctggcctggccgtgctggcagtgctggccgtactgggggcagtaatggccgtagtgatgtgtagacggaaatccagtgggagggaaggggttcgatccggagtgtggccagcaactgtgcctcgggctctcatgtccctgagcagcctggtcaagcccgaaaccgccgcatgtgtggggttgagatgcagaatctcgtcccacctgtccttcgttacatctagggcatcaggcattagcttttgtaagggaatctag

SEQ ID NO: 85693 - DNA, 1194 bp, Artificial Sequence
  derived and/or modified sequence
atgagggtgatggctcccagaaccttgattctgcttctttccggcgcattggccctaacagagacctgggcctgttcccactctatgaggtacttctataccgctgtgagccgaccaggccgtggggagccccgtttcatagccgtcggatatgtcgatgacacccagtttgtgcggtttgactcagacgctgccagcccacgaggagaacctcgcgcaccctgggtggagcaggaagggccagagtactgggatagggagacccagaagtataaaaggcaagcccaaacggatcgtgtgagcctgaggaacctgcgaggctactataatcagtcagaagccggatctcacacccttcagtggatgtacggctgcgatcttggacctgacggtcgactcctgcgcggatatgaccagtcagcatacgacgggaaagactacattgcgctgaacgaggatctgcgttcctggaccgctgccgataccgcggctcagatcacacagcggaagtgggaagccgctagggctgccgaacagcaaagggcctatcttgaaggaacctgtgtggagtggttgcgaagatatttggaaaacggcaaagagaccctccagagggcagagcacccaaagacacatgtgacacatcacctggtcagcgatcacgaggctactctgcgttgctgggctctgggattctacccggctgagataacactcacatggcaaagggatggagaggaccagacacaggataccgagttagtcgaaaccaggccagctggtgacggaacattccaaaagtgggccgcagtggtcgttcctagcggagaggagcagcgctacacatgccacgttcagcacgagggcctgccagagccgcttacactaaggtgggagccgtcgagtcaaccaacgatccccatcgtaggaatcgtggccggtctggccgtgctcgctgtgcttgccgtgctaggagccgttgtagccgttgtgatgtgtcggaggaaaagttccggaagagaaggcgtgcggagcggagtatggcccgctactgtcccacgcgctttaatgtcattgtctagcctggtcaagcctgagaccgccgcatgtgtggggttgaggtgtcggatctcaagtcatcttagcttcgtgacaagtagagcctctgggatctcattttgtaagggaatctag

SEQ ID NO: 85694 - DNA, 1119 bp, Artificial Sequence
  derived and/or modified sequence
atgcgtgttatggcccctcgtacgttgatcctgctgttgagtggtgcacttgccctcactgaaacctgggcgggttcccattcaatgcgttacttttatacagcggtgtctcgtcccggtaggggcgagccccacttcatcgccgtcggctacgtagatgacacccagttcgtccgcttcgatagcgacgcagcatctcccaggggtgagccccgagccccttgggtcgaacaggaaggcccagaatattgggatagagagacccagaagtacaagcgccaggcccagacggatcgcgtttccttgcggaacctgcggggatattataatcagagcgaggccggaagtcacattattcagaggatgtatggttgcgatgttggacctgatggccgattgcttcggggatacgaccagtacgcctacgacgggaaagactacatcgcactcaatgaggacttacgttcatggacagctgccgacactgccgcacaaatcactcagcgcaagtgggaggccgctcgggaagccgagcaacttagggcgtacttagaaggattgtgcgtggagtggctgagacgctatctgaagaacggcaaggagacactccagagggccgaacatcccaagacccacgtgactcaccaccccgtttccgaccacgaggccacactcaggtgctgggcccttggattctatccagccgagatcacactcacttggcagtgggatggtgaagatcaaactcaggatactgaactcgtggagacccggcctgccggagacgggacattccagaagtgggcggctgtcgtagtgccctccggggaggaacagagatatacctgtcacgtccagcatgagggcctgcctgaacctctgacacttcggtgggaaccttcttctcaacccaccattccgatagtggggatcgtggccggacttgccgtcctcgctgtgcttgccgttctgggcgcagtcgtggccgtggtgatgtgtcgtcgaaagagctctgggcactttcttccaaccggtgggaaggggggtagttgcagccaggctgcctcaagcaactctgcacagggttccgacgaatcactgatcgcctgtaaggcttag

SEQ ID NO: 85695 - DNA, 1020 bp, Artificial Sequence
  derived and/or modified sequence
atgagggtcatggctcccagaaccctgatcctgctcctcagcggcgctcttgccttaacagaaacatgggcctgttctcactctatgagatatttctatacggctgttagcaggcctggtagaggcgagcccaggtttatagccgtgggctatgtcgacgatactcagttcgtgagatttgactccgacgccgcatccccaaggggggaacctcgggcaccctgggtggaacaggaagggcctgagtattgggaccgggaaacccagaaatacaaaaggcaagcacagactgaccgtgtatcccttaggaatctgcgcggttattataaccagagtgaagcaggctcccataccctgcagtggatgtacggttgcgacctcggtcctgatggtagactcttgaggggatatgatcagagtgcctatgatgggaaggattacatagctctgaacgaggacttacgcagttggacggcagccgacaccgccgctcagattacgcagagaaagtgggaggctgccagggccgctgagcagcagcgagcatatctggagggtacatgtgtggaatggctgcgcagataccttgagaacggaaaagaaacattgcagagggcagagcatcctaagactcacgtcacccaccatttggttagcgaccacgaagctaccctacgatgctgggcccttggcttttatccagccgagattacgctgacatggcaacgcgacggcgaagatcagacccaagacaccgaattggtggagactcgcccagccggagatggtacctttcagaaatgggcggctgtcgtcgtcccgagcggggaggagcagaggtatacctgtcacgtacagcatgaaggtttgcccgagcctctgacccttcggtgggaaccctcatcgcaaccgacgattcccattgtaggtatcgtcgccggactagccgtactagcagtcctggctgtgcttggcgctgttgtggcagtggtaatgtgccgtaggaaaagctccgcttag

SEQ ID NO: 85696 - DNA, 1101 bp, Artificial Sequence
  derived and/or modified sequence
atgcgggtgatggcccctcgcacgcttatactcctgctctcgggagcactggcactgaccgaaacctgggcctgctcccactctatgcgttatttcgacacagctgtctcacgccctgggaggggcgagcctcgctttatatcagtggggtacgtcgatgatactcagttcgtgaggttcgacagcgatgcagcctctccacgcggtgaacccagggcgccttgggttgagcaggaggggccagagtattgggaccgagaaactcagaaatataagcgacaagctcaggccgaccgcgtaaatctccgcaaacttaggggctactataatcagagtgaggacggaagtcacaccctgcagtggatgtatgggtgcgacttgggccctgacgggcgactcctgaggggatatgaccagagcgcatacgacgggaaggactacatagcacttaatgaagatctacgctcatggaccgccgcagacactgctgcccaaattacccaaaggaagtgggaggccgcacgggaagcagagcaatggcgcgcatacttagaagggacctgcgtcgaatggttaaggaggtacctcgagaacggcaaggagacactgcagcgcgcagagcacccaaaaacccatgttacccatcatcctgtgagcgaccacgaagccactctgagatgctgggcactcggcttttacccagcggaaattaccctgacctggcagagagatggtgaagatcagacacaggacacagagttggtagaaacccggccagctggggatggaaccttccagaaatgggccgctgtggtcgtaccatcaggggaggaacagcgctacacttgccatgtacagcacgaaggcctacccgaacctctgacactcagatgggaacccagctcgcagcctacgattccgatagttggtatcgtggccggattggccgtgctcgccgtgctggctgtcctgggtgctgtgatggcagtagtgatgtgcagaaggaagtcctctggcggaaaagggggttcttgctcccaagccgcatcgtccaattcggcacaagggtcagatgagtcactgattgcgtgtaaagcctag

SEQ ID NO: 85697 - DNA, 1107 bp, Artificial Sequence
  derived and/or modified sequence
atgagggttatggcacctcgagcccttttgttgctgctttcaggcggtctagccttgacagagacttgggcctgctcacactcaatgagatacttcgataccgcagtgtctcggcctgggaggggggagcccaggttcatatctgtaggctacgtcgacgatactcagttcgtccgatttgattccgatgccgcatctccaaggggcgaaccacgcgcaccttgggtcgaacaggagggccctgaatattgggaccgagaaacccagaattacaaaaggcaggctcaagcagaccgcgtgagcttacgtaacctccgaggctactataatcagtcagaagacggatcccacacccttcagagaatgtatgggtgtgatcttggccctgatggcagattgttacggggttacgatcaaagtgcctacgatggcaaggattatatcgcactaaacgaggatctcagatcatggactgcagctgataccgctgcccagatcacacagcggaagctggaagcagcacgtgctgctgagcagttgcgcgcttatctagagggaacctgtgtggagtggctacgtaggtacctcgagaatggcaaggaaacgctgcagcgcgcagagccaccgaaaacacacgtgacacaccacccattgagcgatcatgaggcaactcttagatgctgggcgcttggtttttaccccgcagaaatcacactcacgtggcagagggacggcgaagaccagacccaggacacggagctggtcgagacacgtccggctggagacggtacgttccagaaatgggctgccgtagttgttccgtcaggtcaggagcagcggtacacctgtcatatgcagcatgaaggtcttcaagagcccttgaccctgtcgtgggaacccagcagccaaccaaccatacctattatgggtattgtggcagggctggcagtcctggttgtactcgcagtactgggggctgttgtcacagccatgatgtgcagaagaaagagttccgcagcttgtgtggggcttagatgtcgcatctctagccacctgagctttgtaacctcacgggcatccggcattagcttctgcaagggagtgtag

SEQ ID NO: 85698 - DNA, 1194 bp, Artificial Sequence
  derived and/or modified sequence
atgagagttatggcccctcgtacccttatcttactgctatccggcgcattagctctgaccgaaacatgggcatgctcacacagcatgagatattttgatacagcggtgtcgaggcctggccgaggagagccacgtttcatatccgtgggctacgtggatgatacgcagttcgtccgattcgattccgatgcagctagtcctcgcggagaacctagggcaccttgggtcgaacaggagggccctgaatattgggatcgggaaacccagaagtacaagcgccaggctcaagccgacagggtcaacctgcgcaagttgcgagggtactacaatcagtctgaagacgggtcacacaccttgcagtggatgtacggatgcgacctaggtccagatggacgcctgctgcggggttatgaccagtccgcctacgacggaaaggattacatcgccctgaatgaggacctgaggtcctggaccgccgcagacacagccgctcagatcacacaaaggaaatgggaggccgctagagaggccgagcagtggagagcctacctggaggggacgtgtgtggagtggctgcggaggtatttggagaatggcaaagagaccttacagagggccgagcacccaaagacccatgtcacccaccaccctgtgtcagaccatgaggccactctgagatgctgggcgctgggattttaccctgctgagatcactttaacctggcagagagatggtgaggatcagactcaagataccgaacttgtagagactcgacctgctggggacgggacattccagaaatgggccgctgtggtcgtgccttccggggaggagcagcgttacacctgtcatgtgcagcacgagggacttcccgaacccctgacactgaggtgggagcctagcagtcagccaacaatcccaatagtcggtatcgttgccggactcgcagttctggccgtcttggctgtgctgggggctgtcatggccgtggttatgtgccgacgtaagtcctccggcagagagggcgtgagatccggcgtctggcccgcaactgtgcctagagccctcatgtccctgagctctttagtgaagcccgaaacagccgcatgtgtcgggctgcggtgccggattagcagccacctctcgtttgtgaccagccgcgctagcggaatctcattctgcaaaggcatatag

SEQ ID NO: 85699 - DNA, 1119 bp, Artificial Sequence
  derived and/or modified sequence
atgcgagtaatggcacccagagcgctgttgctgctgttaagcgggggtctagccctgacagagacatgggcatgttcacactcgatgcgctattttgacaccgctgtctctaggcctgggcgaggagagcctcgatttatctccgtgggatacgtggatgacactcagttcgtccggttcgactctgacgcggctagccccaggggagagcccagagcaccctgggtagagcaggaaggcccagagtactgggatcgggaaactcaaaattataagcggcaggcccaggcagaccgcgtctctctccgtaacctgagaggctactacaatcagagtgaggatggatcgcacaccctccagaggatgtatgggtgtgacctgggaccagacggcagactgttgagaggatacgatcagtctgcctatgatggtaaggattatatcgccttaaacgaggaccttaggtcatggaccgcagctgatactgcagcgcaaatcactcagagaaagctggaggcagctcgtgccgcagagcagctgcgagcctacctggagggcacatgtgtagaatggctacgaagatatttagagaatggaaaagagacgttgcaacgcgctgaacccccaaagacacacgtcacccatcacccactgtctgatcacgaagctacactacgatgctgggctttggggttttaccccgctgagattaccctgacatggcagcgcgacggggaagatcaaacacaggatacagagctcgtggagacccgcccagccggtgacggaacattccagaaatgggccgcagtggtagtccccagtggccaagagcagcgctacacatgccatatgcaacacgaagggctgcaggagccgcttactctgagctgggagcccagctcacaacctacaatccccattatgggaatcgtagccggtctcgctgtgctagtcgtcctcgcggttctgggcgcagtggtaaccgctatgatgtgtaggaggaagtcgtcggggcattttctgcccaccggcggaaaaggaggaagctgcagtcaggcggcttgtagcaactcagctcagggctccgatgagtcactcatcacgtgcaaggcctag

SEQ ID NO: 85700 - DNA, 1101 bp, Artificial Sequence
  derived and/or modified sequence
atgcgcgttatggcacccagggcactcctgcttcttctgtctggcggactcgctctgactgaaacctgggcctgctcgcactccatgcggtattttgacaccgctgtgagtaggcccggacggggtgaaccacggttcatttcagtcgggtacgtggacgatacacagttcgttcggtttgacagtgacgctgcatcccctagaggagagccgagagctccgtgggtggagcaagagggccctgaatactgggaccgggaaacacagaactacaaaagacaggcccaggccgatagggtctctctacgcaacctgcgaggttattacaatcagagcgaagacggatcgcacactctccaaaggatgtatggctgcgacctcggacctgacgggagactgctgagaggctacgaccagagcgcctatgatgggaaggactacatagcgctcaacgaggatctacgctcttggaccgccgcagacactgctgcacagatcacccaaaggaaactggaagccgctcgagccgcagagcaactgcgtgcctacctcgaggggacatgtgtcgagtggctccgcaggtatttagaaaatggtaaggaaacccttcagagagccgagccccctaaaacccatgtgactcaccacccgttgtccgaccatgaggccacactcaggtgttgggctctagggttctaccccgctgagatcacattgacctggcaaagggacggggaggaccagacccaagatacggaacttgtggagaccaggcccgcaggtgacggcacatttcagaaatgggccgctgtggttgtacctagtggtcaggaacaacgctacacgtgccatatgcagcacgagggcctccaggagcctctgaccttatcatgggaaccctcatctcagccaacaatacccattatgggaatcgtggcgggtttggctgttctggtggttctggcagtgcttggcgcagtggtcaccgcaatgatgtgccgccgaaagagcagcgggggaaaaggcggtagctgttctcaggccgcttgtagtaacagtgcccagggctccgacgagagcttaattacctgtaaggcctag

SEQ ID NO: 85701 - DNA, 1107 bp, Artificial Sequence
  derived and/or modified sequence
atgcgagtcatggcaccaaggacactgatattgttactgagcggagctctggccctcaccgaaacgtgggccggtagtcacagcatgcgttacttttatactgctgtaagccgacccggacgtggggaaccccattttatagctgtgggctatgtcgatgatacccaatttgtgcggtttgatagcgacgccgctagtccgaggggcgaaccaagggccccttgggtcgaacaggaaggaccagaatactgggacagagaaacccagaagtacaagaggcaggcacagaccgatcgggtgtccttacgcaatttaaggggctattacaaccagtccgaggctggaagtcatattatccaaagaatgtacggctgcgacgtcggccctgacggacgccttctgcgcggttatgatcagtatgcctacgacggcaaagactacatcgcgctcaacgaggatcttcggtcatggacggcagctgacacggctgctcagatcactcaacgcaaatgggaagccgctcgagaagccgagcaactgagggcttatttggaagggctgtgcgttgagtggttgcgacgatacctgaaaaatggaaaagaaacccttcaacgagcagagcatcctaaaacacatgtaactcaccaccccgtatcagatcacgaagccactctgcggtgctgggcactgggcttttacccagccgaaattaccctgacttggcagtgggacggggaagatcagacacaggataccgaattggtggaaacaaggccagcgggagatggaacatttcagaagtgggctgcggtggttgtgccgagcggggaggaacagagatacacctgccacgtccagcacgaaggattaccagagccgcttaccttgcggtgggagccgtcaagccagccgactatacccattgttggtatagtggcgggattggctgtgctcgcagtcctcgccgtgctgggtgccgtggtggctgtagtcatgtgcagacgcaaaagctctgcagcctgcgtgggactgaggtgtcggatcagctcccacctgtcctttgtgacttccagagcctctggtatatccttttgtaaaggaatctag

SEQ ID NO: 85702 - DNA, 1194 bp, Artificial Sequence
  derived and/or modified sequence
atgcgagtcatggctccacgggcactcctcctgctgctgtccgggggtttggctctgacagaaacttgggcatgcagtcatagcatgcggtatttcgatacagcagtgtcacggcctggaaggggggagcctcgcttcatttccgtcggctacgtcgatgacacacaattcgtgcgattcgactccgacgcggctagccctcgcggtgagcccagggctccctgggtcgagcaggaagggcctgaatattgggaccgcgaaacccaaaactataagagacaggcacaagccgacagggtaagcttgcggaatctgagaggttactataatcagtctgaagacgggtcccatactctccagcgcatgtacggttgtgatctggggccagacggtagactgcttaggggatacgaccaaagcgcgtatgacggcaaggactacatcgctcttaatgaggacttgagatcctggacagcagctgatacagcagcgcaaatcacacagcgcaagttggaggccgctcgagccgctgagcagttgcgcgcatatttggaggggacgtgtgtggagtggttgaggagatatctcgagaatggcaaggaaaccctacagcgcgcagagccgcctaaaacccacgtgactcaccatcccctgagtgatcatgaggccacgcttcggtgctgggcactcggattctatccagccgagataaccttaacttggcagagggacggtgaggaccaaacccaggacacggaattagtcgagacaaggccggctggcgacgggacatttcaaaaatgggcggctgtagtggttccatcagggcaagagcaacgatacacgtgtcacatgcaacacgagggcctgcaggagcccctcacgctgtcatgggagcctagctcccaacccaccattcctattatgggcatcgtcgcgggtctggcggtgcttgtggtgcttgcggtcctaggcgctgtggttaccgctatgatgtgtcgacgcaagagctctggtagagagggcgtgaaaagtggcgtttgggcagccaccgtcccacgggctctcatgtccctgagtagtcttgtcaagccggagactgctgcgtgtgtaggtcttaggtgcaggatcagttcacatctgagtttcgttactagcagggctagcggcatcagcttttgcaagggagtctag

SEQ ID NO: 85703 - DNA, 1068 bp, Artificial Sequence
  derived and/or modified sequence
atgagggtgatggctccacgaaccctgattctgctgttaagcggggctctggcccttaccgagacctgggcgggaagtcatagtatgaggtacttttataccgccgtgtcccgacctggacggggagagccgcacttcatcgccgtgggatacgtcgatgacacacagttcgtccggttcgactcagacgccgcaagccctagaggtgaacctcgagccccatgggtggagcaagagggccctgaatactgggatcgggagacacaaaaatacaagagacaggctcagacagatcgcgtgtcccttaggaacctgcgcggatattataatcagtctgaggctggttctcatatcatccagcgcatgtatggctgtgacgtgggtcctgacggacggctcctcaggggatacgaccaatatgcctacgatggaaaggactacatcgcccttaacgaggatctgcgctcctggaccgccgctgataccgctgcacagatcacacaacggaagtgggaagcagctagggaggccgagcagcttagggcttacctcgaaggactgtgcgtggaatggctccgacgctatctaaagaacggaaaggagacccttcaacgggctgaacatcccaagacccacgtcacgcaccacccagtctccgaccacgaggcaacattaaggtgttgggccttgggtttctatcccgcagaaatcacgctcacctggcagtgggacggagaggaccaaacccaggacactgaattggtggagactcgcccagcaggtgatgggaccttccaaaagtgggccgcagttgtcgtcccctcaggtgaagaacaacgttatacttgtcacgtccaacacgagggccttcccgaacctttgactctgcggtgggagccgagctctcagcccactataccgattgtgggaattgtggccggactggccgtcctcgccgtgctagcggttctgggggctgtcgtggccgtcgtaatgtgtaggcggaagagctcagcctcgaattctgcacaaggaagcgatgaatccctgatcgcgtgtaaggcctag

SEQ ID NO: 85704 - DNA, 1107 bp, Artificial Sequence
  derived and/or modified sequence
atgcgcgtcatggctccacgaaccttgatattgttgctgagcggagctctggctctgactgagacttgggcatgcagccactcaatgcgatacttttacacagccgtctcgcgccctggacgtggagagccccgtttcattgccgtaggatatgtggacgatactcagttcgtgcaattcgattctgacgctgcttctccccgaggggagccgagggccccttgggtcgaacaggaggggcctgaatattgggacagggaaacccagaaatacaagaggcaggctcagaccgatagagtcaacctgcgaaaactccggggatactataatcagagtgaagcgggatcccacactcttcagaggatgtatggatgtgacctgggccctgacggcagactgttacggggttacaaccaatttgcttatgatgggaaggattatatcgcgcttaatgaggatctgcggagctggaccgccgctgacaaagctgctcaaatcactcagagaaaatgggaggccgcaagggaagcagaacaacggagggcctatctggaaggcacttgtgttgagtggcttcgacgctatttagaaaacgggaaaaagactttacagcgcgctgagcaccccaagacccatgttacccaccatccagtatccgatcatgaagctacattgcgctgctgggctcttgggttctatcccgctgaaattaccttgacctggcaaagagatggtgaagatcagacccaggatactgagctcgttgaaactcgcccagccggtgacggcaccttccagaagtgggcggctgtagtggtgccgtccggggaagagcaacgctacacctgccacgttcagcatgaaggccttcctgagcccctgaccctgaggtggggcccaagttcccagccgaccattcccatcgtcgggatcgtggcagggttggccgttcttgccgttctggccgttctgggcgctgttatggcggtcgtaatgtgtcggagaaagtccagcgccgcttgcgttgggttaagatgccgtatctcgagtcacctgagcttcgtgacctcccgagcgtcaggcatttctttctgtaaaggtatctag

SEQ ID NO: 85705 - DNA, 786 bp, Artificial Sequence
  derived and/or modified sequence
tagcgagtgatggctcctaggaccttaattttactgttatctggggcactggcgttgacggagacatgggcctgtagtcatagcatgcgctacttttacacagcagtgtcgcggcctggcaggggagaacccaggttcattgctgtcggttacgtggacgatacccagttcgtcaggtttgactctgacgctgcctcccccaggggggaacccagagctccctgggtcgaacaggagggcccagagtactgggatcgggaaacacagaagtacaaacggcaggcccaaaccgaccgggtcagcctgcgaaacctccggggatactataatcagtcagaagccggatcccataccctgcagtggatgtacggctgtgacctgggtcccgatgggcgacttctgagaggttacgatcaaagcgcttatgacggtaaggactatatagccctgaatgaggacctgcggtcctggaccgccgcagatacagccgctcagataacgcagaggaaatgggaagccgctagagctgctgagcaacagcgagcctacctggagggaacgtgcgttgagtggctaaggcgctatctagaaaacggcaaggaaactctgcagcgagctgaacaccctaaaacccatgtgacccaccatctagtgtctgaccatgaggcaagcagaagatggaatttgcccgaagtgggctcttgcggcggtgctttctggcgacgagccgaaatccacgtcccttgtgccgctagaggcgctgccggagccccacatccagagtag

SEQ ID NO: 85706 - DNA, 1101 bp, Artificial Sequence
  derived and/or modified sequence
atgagggtcatggcaccccgaaccttgattctgctactcagcggcgctctggcgctcacagaaacatgggcctgttcacactctatgaggtatttctatacagccgtctcacggcctggacgcggtgaacccagatttatcgccgtgggctacgtagacgatacccagttcgtcagattcgacagcgatgccgcaagcccacgtggggagcccagggctccatgggtcgaacaggaagggcctgagtactgggacagggagactcagaaatataagagacaggcacagactgacagggtcagcctacggaacttaagggggtattacaaccaaagtgaagcaggaagtcacaccctacagtggatgtacggatgcgacctaggaccggatgggagacttctgcgtggttatgatcagtctgcatacgatggcaaagattacatcgccttaaatgaggacctgaggtcgtggactgccgcagataccgcggcacaaatcacccagcggaaatgggaggccgcacgagcagctgaacagcaacgagcgtacctggaaggtacatgtgttgagtggctacgtagatacctcgaaaacggcaaggaaactctgcaaagagccgagcacccaaaaactcacgtgactcaccatctggttagcgaccacgaggctaccctccgctgctgggcccttgggttctatcccgctgaaattactttgacctggcaaagggacggagaagaccagactcaagatactgagctggtggagaccagacccgctggagacggcaccttccagaagtgggccgctgtggttgtgcccagcggcgaagagcaaaggtacacctgccacgtgcaacacgagggtttgcccgaaccactgacactgcggtgggaaccctcaagccaacctaccattcctattgtaggcatcgttgcaggacttgccgttctggccgtgcttgcggtgctgggggctgttgttgccgttgtgatgtgtagaaggaagtcatccgggggtaaagggggttcttgcagtcaggctgccagcagcaacagtgctcaaggatcagacgagagtctgatcgcctgtaaagcttag

SEQ ID NO: 85707 - DNA, 786 bp, Artificial Sequence
  derived and/or modified sequence
taacgcgtgatggcaccgagaacactgatcctgctgctgtccggagccctggctctcaccgagacgtgggcctgcagccactctatgaggtacttttatactgctgtctccagacctggaagaggtgaacccagattcatcgccgtggggtacgtggacgacactcaattcgtacaatttgacagcgacgctgcgagcccccgaggagagccgcgtgccccatgggtcgaacaggaaggccctgagtactgggaccgcgagactcagaagtacaagcgacaggcgcagactgatcgggtgaacctccgcaagctccgaggctactataaccagtctgaagccggatctcacacactgcagaggatgtacggatgcgatctgggacccgacgggcgacttctcaggggttacaatcagtttgcctacgatgggaaagactacatcgctctgaatgaggatctccgctcttggaccgccgctgacaaggctgcacaaataacccaaaggaagtgggaggcagctagggaagctgaacaacgcagggcttaccttgaaggcacatgcgttgaatggttaaggcggtatttggaaaacggtaaaaagaccctacagcgcgcagagcatcccaagacacacgtcactcaccatcctgtgagtgatcacgaggcaagcaggaggtggaacctccctgaagttggatcgtgtggaggagctttctggcggcgagccgaaatccacgttccttgcgcagcaagaggcgctgctcgagcgcctcatcccgagtag

SEQ ID NO: 85708 - DNA, 786 bp, Artificial Sequence
  derived and/or modified sequence
taacgtgtcatggcgcctcggactctaattttactactgagcggggctctggcactgacagaaacctgggcttgttcccactcaatgcgttacttctatactgcagtctcacggccagggaggggcgagccgaggtttattgctgtaggatacgtagacgacacccaattcgtgcagttcgattcagacgccgcaagtccccgtggtgagccacgggcaccctgggtggaacaagagggcccagaatactgggatcgcgagacgcagaagtataaaagacaggctcagaccgacagggtgaatctgaggaagctgaggggatattacaatcagagcgaggctggctcccacaccttacagaggatgtatggatgtgatcttgggccagacggaaggttactgcggggttacaaccaattcgcttatgacggcaaagattacattgccctgaatgaagacctaagaagttggaccgctgccgacaaagccgctcagatcactcagaggaaatgggaggctgctagagaagctgagcaacgccgtgcatatctggagggcacctgcgtggagtggctacggcgttacctggagaacgggaaaaaaacactccagagggccgaacatcccaaaacccacgttacccatcatccagtgtccgaccatgaggcatcgaggaggtggaacctacccgaagtcggctcctgtggcggtgcattctggcgcagagccgaaatccacgttccttgcgcagcgaggggggctgctcgagctcctcatcctgaatag

SEQ ID NO: 85709 - DNA, 1119 bp, Artificial Sequence
  derived and/or modified sequence
atgagagtgatggcgccacgcaccctgattctcctgctgtctggggctctggctctgaccgagacctgggcttgcagccactccatgagatacttttacaccgcagtgtcccgacccggacgtggcgagcccaggtttattgccgtggggtacgtcgacgatacccagtttgtgcggttcgatagcgatgctgccagcccgaggggagagccgcgagccccttgggttgaacaggaagggcctgagtattgggatcgtgagacccagaagtataagcggcaggcacagacagatcgggtttccttgcggaatcttcgcggatactacaatcaatcagaggctgggagccataccctgcaatggatgtacggttgtgatctggggcctgatggccgacttctcagggggtacgaccagtcagcctatgatggcaaggactatattgccttgaatgaggacctcagaagttggacggccgctgacacggccgctcagatcacacagagaaaatgggaggcagcccgagccgcagagcagcaaagggcttacctagaagggacctgcgtagaatggcttcggaggtaccttgagaacggtaaggagacattacaaagggcagaacaccctaaaacacacgtgactcaccacctggtgtccgatcatgaggctacactcagatgttgggccctgggattttaccccgcagagattacacttacctggcaaagagacggggaagaccagacacaggataccgaactggttgaaacccgtcctgcaggggatggaacttttcaaaagtgggctgctgtggttgtgccgtcaggcgaggagcagcggtatacttgccatgtgcagcatgaaggattacctgagcccctgacactgcgctgggaaccttcatcccagcccacaattccgatagtcggcatcgtcgccggactggctgttctggcagtcttggccgtgctgggagccgtggtggcagtcgttatgtgccggcgaaaatccagcggccacttcctacccacaggcggtaagggcggatcatgctcccaagccgcaagctccaacagcgcccagggatctgatgaatctctgattgcatgcaaggcatag

SEQ ID NO: 85710 - DNA, 786 bp, Artificial Sequence
  derived and/or modified sequence
tgacgggtgatggcccctcggactttaatcctgctgctcagtggggcactcgcactaaccgaaacatgggcatgcagccatagtatgcggtacttcgacactgccgtttctaggcctggcaggggtgagcccaggttcatatcagtgggctatgtggacgacacacaatttgtccgatttgacagcgatgcagcttcccccagaggagagccacgcgcaccatgggtggagcaggaaggaccggaatattgggaccgtgaaacacagaagtacaagcgacaggctcaagctgacagggttaacttgcgcaagctccgcggttattacaatcagtccgaagatggttcccacacactccagtggatgtatggctgtgacctgggccctgacgggagactcctgcgcggatacgaccagtctgcttatgacggaaaagactacattgctctgaatgaggatctgaggtcatggaccgctgcagataccgctgcccaaatcacccagcggaaatgggaagctgctcgtgaggccgaacagtggcgcgcatatctcgagggtacgtgcgtcgagtggttaaggcggtacttggaaaacggaaaggagacattgcagcgcgctgaacaccccaagacccacgtcacccatcacccagtgtcagaccacgaggcaagtcgcaggtggaatctccccgaagtcgggagttgcggcggagctttttggcgcagagctgagatccacgtcccctgcgcagcacggggtgctgcccgagctcctcaccctgaatag

SEQ ID NO: 85711 - DNA, 1107 bp, Artificial Sequence
  derived and/or modified sequence
atgcgtgtaatggctcctcgtaccctaatcctcttgctatcgggcgcactggctttgaccgagacctgggcctgtagccactctatgcgctacttcgacacagctgtctcccggccaggaagaggtgagccacgcttcatctccgtgggatatgttgatgacacacagttcgtgagattcgatagcgacgctgcttcccctcgaggcgagccaagagccccatgggttgaacaggaagggccagagtactgggatcgggagacccagaagtataagagacaagcacaagctgatcgcgtgaacttgcgaaaattacgcggttactataaccagagcgaagacggatcacacaccctgcaatggatgtatggatgtgacctgggtcccgacggcagactgcttcgtggctacgaccagagtgcttacgacgggaaagactacatcgccttaaacgaagacctgagatcttggactgcggcagatactgccgctcagattacccagcgaaagtgggaagctgctcgggaggcggaacagtggagggcttatctagagggaacttgcgtcgagtggctgcgcaggtatctggaaaatggtaaggagaccttacagcgcgcagaacatccaaagacacacgtaacgcaccacccggtgagcgatcatgaagctaccctacgctgttgggcactgggcttctatcctgcagagatcaccttaacatggcaacgggatggagaagatcaaacacaagacaccgagctcgtggaaacgagacctgcaggcgacggaacttttcagaagtgggcagctgtcgtggtcccttcgggcgaggagcaaaggtacacctgtcatgttcaacacgaaggtctgccggagcctttaacgcttaggtgggagccaagttctcagcctacgatcccaattgtaggaatcgtcgcaggccttgctgtgctagcagtactcgccgtgttgggggcagtgatggcagtggttatgtgtcgcaggaaaagcagcgccgcttgcgttggcctacggtgccgaatctcttcacacctctcttttgtgacttcccgcgcttctgggatatccttctgcaaggggatctag

SEQ ID NO: 85712 - DNA, 786 bp, Artificial Sequence
  derived and/or modified sequence
taaagggtgatggcccctcgagcccttctgcttctccttagcgggggactggcactgaccgagacgtgggcctgctcacacagcatgcggtattttgatactgctgtttctcgtcccggtcggggagaaccaaggttcattagcgtcggctatgtcgacgatactcaattcgtgcgtttcgactccgatgcggcttcgccccgtggagaacctcgcgctccctgggttgaacaggagggaccagaatattgggacagagagacccaaaactacaagagacaggcccaggccgatcgggtttcgcttcgaaacctgagaggatattacaaccagtctgaggatggtagccacaccttgcagcgcatgtacgggtgtgaccttggcccagatgggagactgttgcgtgggtatgaccagtccgcctacgacggtaaggactacattgctctcaatgaagacctacggagttggaccgccgcagataccgccgcacaaatcacacagagaaaactggaagcagcccgtgccgcagaacaattgagagcatacctggaggggacttgtgtggagtggcttaggcggtatttggagaatgggaaggaaaccctgcagcgggctgagccaccaaagacacacgtcactcaccacccccttagcgatcacgaagcatcccgaagatggaatcttcctgaagtgggctcttgcggaggggctttctggactcgcgcagaaatccatgtgccctacgccgcacgcggagccgcaagagcacctcaccccgaatag

SEQ ID NO: 85713 - DNA, 1101 bp, Artificial Sequence
  derived and/or modified sequence
atgagggtcatggctcccaggaccctgatactcctcctgagtggcgcactcgccttaactgagacatgggcgggaagccacagcatgcggtatttctatacagcagtgtcccgccctggcaggggtgagccccatttcatagccgtgggttacgtggacgacacacagtttgtgcggtttgatagcgatgctgccagtcccagaggagaaccacgtgctccatgggtcgaacaagaggggcctgagtattgggacagggaaacgcagaagtacaaaaggcaagcccagaccgacagggtgtcactgcgaaatctgaggggctactataaccagagtgaagcaggttcccatatcatccagcgcatgtacgggtgcgacgttggccctgatggtcgcttactgaggggctacgaccaatacgcctatgatggaaaggactacattgccttaaatgaagatcttcgctcatggaccgctgccgacacagccgcacaaatcacacagcgcaaatgggaggctgcgagggaggccgaacagttacgcgcatacctggaaggactctgtgtagaatggctgaggagatatctgaagaatggaaaggagactctgcagagggcagaacacccaaaaacccacgtgacccatcatccagtgagtgaccacgaagccactttaagatgttgggccttaggattctatccggcagagattacactcacctggcagtgggatggggaagatcaaacgcaggacacagagctcgttgagactcggcctgccggagacggaacctttcagaaatgggctgctgtagttgtgcctagcggtgaggagcagcggtacacgtgtcatgtacagcatgaagggttacccgaacccctgacgctcaggtgggaaccatcaagccagccaaccattcccatcgtcgggattgtggcgggactagctgtcctggccgtcctggctgtgctgggcgctgtggtcgctgtagtgatgtgccggcgaaaatcttcgggtggcaagggcggatcatgctcgcaggccgcatcttctaacagcgctcaagggagcgatgagtccctgatcgcctgcaaggcctag

SEQ ID NO: 85714 - DNA, 1119 bp, Artificial Sequence
  derived and/or modified sequence
atgcgagtcatggcccctagaacactgatattactgctctcgggagcactggcgctaaccgagacctgggcctgctcacatagcatgaggtattttgatacagctgtctctcgccctggtcgtggtgagccacggtttatcagtgttggatatgtagatgatacccagttcgttcggtttgactccgacgctgcatcccccaggggggagcctagggccccatgggtggaacaagaggggcctgagtactgggaccgcgagacccagaagtacaaaaggcaggcccaagccgatagagtgaaccttaggaagctccggggttactataaccagtcggaggatgggtctcatacactgcaatggatgtatgggtgtgacctcggccctgatgggaggctgttacgtggttacgatcagagcgcttacgacggcaaggactatatagcactgaatgaagatctccggagttggacagccgcagacactgcagcccagattactcaacggaagtgggaggcagcccgagaggccgaacaatggcgcgcatatcttgaaggcacatgtgtcgaatggctgcggagatatcttgagaatgggaaagagaccttgcagagggctgagcacccgaaaacccacgtgacccaccatcccgtgtcagaccatgaagctaccttacgatgctgggctctagggttttaccccgcagagataaccttgacctggcagcgggacggggaggaccagacccaagacaccgaactcgtggaaactcggccagcaggtgacggtacgtttcagaaatgggccgctgtagtagtcccttcaggcgaagaacagcgttacacatgccatgtccagcacgaagggctgcctgaaccacttactctgaggtgggaaccaagtagtcagccaacaataccaatcgttggaattgtagcaggcttagcagtgctcgccgtactggctgtgcttggggcagtaatggccgtcgtgatgtgccggagaaagagcagcggtcatttcttacccactggcggaaaggggggatcttgctctcaggcagcctccagcaactctgcccagggctctgatgaaagcttgatagcctgcaaggcctag

SEQ ID NO: 85715 - DNA, 1107 bp, Artificial Sequence
  derived and/or modified sequence
atgcgggtcatggctcctcgaaccttaattctgctcctgtccggcgctctggctttgaccgagacctgggcttgttcccactccatgcggtacttctatacggctgtctctagacccggaaggggagagcccaggttcattgctgtcggttacgttgatgatactcagtttgtgcagttcgactctgacgcagctagtccgaggggtgagcctcgagctccatgggtggagcaggagggtcctgagtattgggaccgagagacccagaaatataagagacaagctcagacggatagagtaaacctccggaaactgcggggatactataaccagtccgaagctggctcccataccctgcagagaatgtacgggtgtgacctaggtcccgacggacgcctactcagggggtacaaccagtttgcatatgatggaaaggattacatcgccttaaatgaggatctaaggagttggactgccgcagacaaggccgcacagataacacagagaaagtgggaagcagcccgagaagctgagcagcgtagagcctatctggaaggcacctgcgtagaatggcttaggagatacctggagaacggaaagaaaacactacagcgagctgaacatccaaaaacccacgtgacacaccatccggtgagcgatcatgaggcaacacttagatgttgggccctgggcttttacccagccgagataactttgacttggcagagagacggcgaagaccagacccaggatacagaactagtggaaacaagacctgcaggagatggcacgttccagaagtgggcagcggtcgttgtgccctctggtgaggagcagcggtacacctgtcacgtccagcatgaggggttgcccgagccactaaccctgcggtggggcccatcctctcagcccacaatccctattgtgggcatagtcgctggcctggccgtgctggccgttcttgctgtcctcggggctgtgatggccgtcgtaatgtgtagacggaaatcgagcgccgcttgcgtgggactgagatgtcgcatcagcagccatctttctttcgttactagcagggccagcggaatttctttttgtaaaggcatctag

SEQ ID NO: 85716 - DNA, 675 bp, Artificial Sequence
  derived and/or modified sequence
atgagggtcatggcccctaggactttgatcctgctgctttccggggcattagcgttaactgagacatgggcctgttcacattccatgcgctatttctataccgctgtgtcccgcccaggaagaggcgagccaagattcatcgccgtcggttacgtggacgatacccaattcgttcagttcgactccgatgccgcatcacctcgtggcgagccaagagctccatgggtggaacaggagggacctgaatactgggaccgggagacccagaagtacaaacgccaggctcagactgatagagtaaacctgcggaagttgagaggatactacaatcaatcagaggccggatcccacactttgcaacgcatgtacggatgcgatctggggcctgacggtagattactacgagggtataaccagttcgcatacgatggcaaggactatattgccctgaatgaggatttgcggtcatggacagcagccgacaaagcagcccagatcacacagcggaagtgggaggccgcacgagaggccgagcagcgcagggcttacttggagggaacttgtgtcgagtggttgaggcgctatctcgaaaatggcaaaaagaccctgcagagagccggtcaggatcaaaagagcttatttctgccacagagacttgagctgagcaatgagtag

SEQ ID NO: 85717 - DNA, 675 bp, Artificial Sequence
  derived and/or modified sequence
atgagagtgatggcccctcgtgctctcctactgctactgagcggcggtctcgctcttacagagacctgggcctgtagccactcaatgcggtactttgacacagccgtctctcggcctggtcgcggagagccgaggttcatctcagtcggctacgtggacgatacacagttcgtccgctttgattcagatgccgcatcacctaggggggagcccagggcgccttgggtggagcaggaaggaccggagtattgggatcgggaaacacaaaactataagcgccaggctcaggctgatcgagtatccctgaggaacttacgaggatactacaaccagtccgaagacggcagtcatacgctgcaaagaatgtatggctgcgatctcggacccgatggccgtctgctaagaggatatgatcagtcggcctacgatgggaaggactatatcgcgttgaacgaagacctgaggtcttggaccgcggctgacactgctgcccagattacgcaacggaaacttgaggcggctagagcagctgagcaactgcgggcttatctggaaggtacttgtgttgaatggctgagacgttacctcgagaacggcaaggaaaccctgcagcgcgctggccaggaccagaaaagtttgtttttaccccaaagactcgagctgtccaatgagtag

SEQ ID NO: 85718 - DNA, 396 bp, Artificial Sequence
  derived and/or modified sequence
atgcgtgtcatggctccacgggctcttttactcctgctctcaggtggactggctctgaccgaaacttgggcctgctctcacagcatgaggtatttcgacactgcagtgtcccggccagggagaggagagcccagattcattagtgtgggatatgtggacgacactcagttcgtaaggttcgatagtgatgctgccagccccagaggagagcctcgggcaccatgggtggaacaggagggacccgagtactgggatagagaaacacaaaattataaacgccaggcccaggcggatagggtcagccttagaaacctgcgtggctattacaaccagtccgaagacgaggatgtatggttaaggcctggagccagaagagctccccctccccgagtgtag

SEQ ID NO: 85719 - DNA, 1212 bp, Artificial Sequence
  derived and/or modified sequence
atgagggtcatggcacccagggcactactgctgctgctgagcggagggttagccttaacggagacatgggcttgcgaatgcggtgtgggtagggaagccgcatccgccgaacgcagcgagggtccccctggtgaaccgaggcgggaggttgggagagcaggcttgtcaccttcaagccccccagggtcccactctatgaggtattttgacactgccgttagtcgtcctggcaggggggaaccaagattcatcagtgtggggtacgtggatgatacccagtttgtcagatttgatagcgatgccgctagtcctcgaggagaaccccgtgccccatgggtggagcaggaggggcctgagtattgggatcgggaaacacaaaactataaaagacaggcgcaagccgatcgggtctcgctgcgtaacctacggggttattataatcagagcgaggatggaagccacaccctgcaaaggatgtacggctgtgacctgggaccagacggtaggctgctgagaggctacgaccagagtgcgtatgacggaaaggattacattgccctgaacgaagacctaagatcttggactgccgctgatactgcggctcagatcacccagaggaaactggaagcagctagagcggctgaacagctgagagcctacctcgaaggtacttgtgtggaatggctgaggcggtatttagagaatggaaaagagactctgcagagggcggaaccccctaaaacacacgtcacacaccaccctctctctgatcatgaggccacactgcgatgttgggccctaggtttttaccccgctgaaatcacgctgacctggcagcgtgatggggaggatcaaacccaggacacggaactcgtcgagacccgccctgctggcgatgggacattccaaaagtgggccgcagtcgtggtaccctctggacaggagcagcggtatacatgccatatgcaacacgagggactgcaggagcccctgaccttgagctgggagccgtcaagccaaccaacgataccaatcatggggatcgtggccggtctcgccgtgctggttgtgctcgccgtcctgggcgcagtagtgaccgctatgatgtgccgccgtaagtcttctggaggtaagggaggatcttgtagccaggctgcttgctccaattctgctcagggatctgatgagtctctcatcacctgcaaagcttag

SEQ ID NO: 85720 - DNA, 981 bp, Artificial Sequence
  derived and/or modified sequence
atgcgcgtcatggctccacggacgctgattctgcttctctcgggagccctggcattgacagagacttgggcctgcagccactctatgcgttacttttacaccgccgtctctcgtcccggtcggggagaaccacgctttatcgccgtggggtatgtagatgacacgcaattcgtacggttcgatagcgacgccgctagtcctcgaggcgaaccgcgtgcaccctgggtggagcaggaagggcctgaatattgggatcgcgagacacagaagtataagcggcaggcacagactgaccgggtctctctgaggaatctgcggggttactacaaccaatctgaggcgggatctcatacattgcagtggatgtatggctgtgaccttgggcctgacggcaggcttctgagaggttacgaccagtcggcctatgatgggaaggattatatagccctgaatgaagaccttcgctcatggactgccgcagacactgccgctcaaatcactcagcggaagtgggaggcggcaagagccgcagagcagcagagagcttatttggagggaacatgcgtcgaatggctacggcgatatcttgagaacggcaaagaaactctgcagcgcgctgagcatcccaaaacgcacgtgacccaccacctggtcagtgaccatgaggccactttaagatgttgggcactgggcttttaccccgctgaaattacactgacgtggcagcgtgacggggaggatcaaacccaagacacagaacttgtggaaactaggcccgctggagatgggactttccagaagtgggccgctgtcgtggtgccgtctggagaagagcaaagatacacctgtcacgtgcagcatgagggactgcctgagccactgacactacgatggggtggaaagggaggttcctgcagccaggctgccagctcgaattctgcccagggctctgacgaatcactgatcgcctgtaaggcctag

SEQ ID NO: 85721 - DNA, 1552 bp, Artificial Sequence
  derived and/or modified sequence
tccccagacgccgagatgcgggtcatggcgccccgaaccctcatcctgctgctctcgggagccctggccctgaccgagacctgggcctgctcccactccatgaggtatttctacaccgccgtgtcccggcccggccgcggagagccccgcttcatcgcagtgggctacgtggacgacacgcagttcgtgcagttcgacagcgacgccgcgagtccaagaggggagccgcgggcgccgtgggtggagcaggaggggccggagtattgggaccgggagacacagaagtacaagcgccaggcacagactgaccgagtgaacctgcggaaactgcgcggctactacaaccagagcgaggccgggtctcacaccctccagaggatgtatggctgcgacctggggcccgacgggcgcctcctccgcgggtataaccagttcgcctacgacggcaaggattacatcgccctgaatgaggacctgcgctcctggaccgccgcggacaaggcggctcagatcacccagcgcaagtgggaggcggcccgtgaggcggagcagcggagagcctacctggagggcacgtgcgtggagtggctccgcagatacctggagaacgggaagaagacgctgcagcgcgcggaacacccaaagacacacgtgacccaccatcccgtctctgaccatgaggccaccctgaggtgctgggccctgggcttctaccctgcggagatcacactgacctggcagcgggatggcgaggaccaaactcaggacaccgagcttgtggagaccaggccagcaggagatggaaccttccagaagtgggcagctgtggtggtgccttctggagaagagcagagatacacgtgccatgtgcagcacgaggggctgccagagcccctcaccctgagatgggggccatcttcccagcccaccatccccatcgtgggcatcgttgctggcctggctgtcctggctgtcctagctgtcctaggagctgtgatggctgttgtgatgtgtaggaggaagagctcagggcattttcttcccacaggtggaaaaggagggagctgctctcaggctgcgtccagcaacagtgcccagggctctgatgagtctctcatcgcttgtaaagcctgagacagctgcctgtgtgggactgagatgcaggatttcttcacacctttcctttgtgacttcaagagcctctggcatctctttctgcaaaggcatctgaatgtgtctgcgttcctgttagcataatgtgaggaggtggagagacagcccacccccgtgtccaccgtgacccctgtccccacactgacctgtgttccctccccgatcatctttcctgttccagagaagtgggctggatgtctccatctctgtctcaactttacgtgtactgagctgcaacttcttacttccctactgaaaataagaatctgaatataaatttgttttctcaaatatttgctatgagaggttgatggattaattaaataagtcaattcctggaagttgagagagcaaataaagacctgagaaccttccagaa

SEQ ID NO: 85722 - DNA, 1530 bp, Artificial Sequence
  derived and/or modified sequence
tccccagacgccgagatgcgggtcatggcgccccgaaccctcatcctgctgctctcgggagccctggccctgaccgagacctgggcctgctcccactccatgaggtatttctacaccgccgtgtcccggcccggccgcggagagccccgcttcatcgcagtgggctacgtggacgacacgcagttcgtgcagttcgacagcgacgccgcgagtccaagaggggagccgcgggcgccgtgggtggagcaggaggggccggagtattgggaccgggagacacagaagtacaagcgccaggcacagactgaccgagtgaacctgcggaaactgcgcggctactacaaccagagcgaggccgggtctcacaccctccagaggatgtatggctgcgacctggggcccgacgggcgcctcctccgcgggtataaccagttcgcctacgacggcaaggattacatcgccctgaatgaggacctgcgctcctggaccgccgcggacaaggcggctcagatcacccagcgcaagtgggaggcggcccgtgaggcggagcagcggagagcctacctggagggcacgtgcgtggagtggctccgcagatacctggagaacgggaagaagacgctgcagcgcgcggaacacccaaagacacacgtgacccaccatcccgtctctgaccatgaggccaccctgaggtgctgggccctgggcttctaccctgcggagatcacactgacctggcagcgggatggcgaggaccaaactcaggacaccgagcttgtggagaccaggccagcaggagatggaaccttccagaagtgggcagctgtggtggtgccttctggagaagagcagagatacacgtgccatgtgcagcacgaggggctgccagagcccctcaccctgagatgggggccatcttcccagcccaccatccccatcgtgggcatcgttgctggcctggctgtcctggctgtcctagctgtcctaggagctgtgatggctgttgtgatgtgtaggaggaagagctcaggtagggaaggggtgaggagtggggtctggccagcaacagtgcccagggctctgatgagtctctcatcgcttgtaaagcctgagacagctgcctgtgtgggactgagatgcaggatttcttcacacctttcctttgtgacttcaagagcctctggcatctctttctgcaaaggcatctgaatgtgtctgcgttcctgttagcataatgtgaggaggtggagagacagcccacccccgtgtccaccgtgacccctgtccccacactgacctgtgttccctccccgatcatctttcctgttccagagaagtgggctggatgtctccatctctgtctcaactttacgtgtactgagctgcaacttcttacttccctactgaaaataagaatctgaatataaatttgttttctcaaatatttgctatgagaggttgatggattaattaaataagtcaattcctggaagttgagagagcaaataaagacctgagaaccttccagaa

SEQ ID NO: 85723 - DNA, 1599 bp, Artificial Sequence
  derived and/or modified sequence
aagccaatcagcgtctccgcagtcccggttctaaagtccccagtcacccacccggactcggattctccccagacgccgagatgcgggtcatggcgccccgaaccctcatcctgctgctctcgggagccctggccctgaccgagacctgggcctgctcccactccatgaggtatttctacaccgccgtgtcccggcccggccgcggagagccccgcttcatcgcagtgggctacgtggacgacacgcagttcgtgcagttcgacagcgacgccgcgagtccaagaggggagccgcgggcgccgtgggtggagcaggaggggccggagtattgggaccgggagacacagaagtacaagcgccaggcacagactgaccgagtgaacctgcggaaactgcgcggctactacaaccagagcgaggccgggtctcacaccctccagaggatgtatggctgcgacctggggcccgacgggcgcctcctccgcgggtataaccagttcgcctacgacggcaaggattacatcgccctgaatgaggacctgcgctcctggaccgccgcggacaaggcggctcagatcacccagcgcaagtgggaggcggcccgtgaggcggagcagcggagagcctacctggagggcacgtgcgtggagtggctccgcagatacctggagaacgggaagaagacgctgcagcgcgcggaacacccaaagacacacgtgacccaccatcccgtctctgaccatgaggccaccctgaggtgctgggccctgggcttctaccctgcggagatcacactgacctggcagcgggatggcgaggaccaaactcaggacaccgagcttgtggagaccaggccagcaggagatggaaccttccagaagtgggcagctgtggtggtgccttctggagaagagcagagatacacgtgccatgtgcagcacgaggggctgccagagcccctcaccctgagatgggggccatcttcccagcccaccatccccatcgtgggcatcgttgctggcctggctgtcctggctgtcctagctgtcctaggagctgtgatggctgttgtgatgtgtaggaggaagagctcaggtggaaaaggagggagctgctctcaggctgcgtccagcaacagtgcccagggctctgatgagtctctcatcgcttgtaaagcctgagacagctgcctgtgtgggactgagatgcaggatttcttcacacctttcctttgtgacttcaagagcctctggcatctctttctgcaaaggcatctgaatgtgtctgcgttcctgttagcataatgtgaggaggtggagagacagcccacccccgtgtccaccgtgacccctgtccccacactgacctgtgttccctccccgatcatctttcctgttccagagaagtgggctggatgtctccatctctgtctcaactttacgtgtactgagctgcaacttcttacttccctactgaaaataagaatctgaatataaatttgttttctcaaatatttgctatgagaggttgatggattaattaaataagtcaattcctggaagttgagagagcaaataaagacctgagaaccttccagaa

SEQ ID NO: 85724 - DNA, 1578 bp, Artificial Sequence
  derived and/or modified sequence
gtcccggttctaaagtccccagtcacccacccggactcggattctccccagacgccgagatgcgggtcatggcgccccgaaccctcatcctgctgctctcgggagccctggccctgaccgagacctgggcctgctcccactccatgaggtatttctacaccgccgtgtcccggcccggccgcggagagccccgcttcatcgcagtgggctacgtggacgacacgcagttcgtgcagttcgacagcgacgccgcgagtccaagaggggagccgcgggcgccgtgggtggagcaggaggggccggagtattgggaccgggagacacagaagtacaagcgccaggcacagactgaccgagtgaacctgcggaaactgcgcggctactacaaccagagcgaggccgggtctcacaccctccagaggatgtatggctgcgacctggggcccgacgggcgcctcctccgcgggtataaccagttcgcctacgacggcaaggattacatcgccctgaatgaggacctgcgctcctggaccgccgcggacaaggcggctcagatcacccagcgcaagtgggaggcggcccgtgaggcggagcagcggagagcctacctggagggcacgtgcgtggagtggctccgcagatacctggagaacgggaagaagacgctgcagcgcgcggaacacccaaagacacacgtgacccaccatcccgtctctgaccatgaggccaccctgaggtgctgggccctgggcttctaccctgcggagatcacactgacctggcagcgggatggcgaggaccaaactcaggacaccgagcttgtggagaccaggccagcaggagatggaaccttccagaagtgggcagctgtggtggtgccttctggagaagagcagagatacacgtgccatgtgcagcacgaggggctgccagagcccctcaccctgagatgggggccatcttcccagcccaccatccccatcgtgggcatcgttgctggcctggctgtcctggctgtcctagctgtcctaggagctgtgatggctgttgtgatgtgtaggaggaagagctcaggtggaaaaggagggagctgctctcaggctgcgtccagcaacagtgcccagggctctgatgagtctctcatcgcttgtaaagcctgagacagctgcctgtgtgggactgagatgcaggatttcttcacacctttcctttgtgacttcaagagcctctggcatctctttctgcaaaggcatctgaatgtgtctgcgttcctgttagcataatgtgaggaggtggagagacagcccacccccgtgtccaccgtgacccctgtccccacactgacctgtgttccctccccgatcatctttcctgttccagagaagtgggctggatgtctccatctctgtctcaactttacgtgtactgagctgcaacttcttacttccctactgaaaataagaatctgaatataaatttgttttctcaaatatttgctatgagaggttgatggattaattaaataagtcaattcctggaagttgagagagcaaataaagacctgagaaccttccagaa

SEQ ID NO: 85725 - DNA, 1530 bp, Artificial Sequence
  derived and/or modified sequence
tccccagacgccgagatgcgggtcatggcgccccgaaccctcatcctgctgctctcgggagccctggccctgaccgagacctgggcctgctcccactccatgaggtatttctacaccgccgtgtcccggcccggccgcggagagccccgcttcatcgcagtgggctacgtggacgacacgcagttcgtgcggttcgacagcgacgccgcgagtccaagaggggagccgcgggcgccgtgggtggagcaggaggggccggagtattgggaccgggagacacagaagtacaagcgccaggcacagactgaccgagtgagcctgcggaacctgcgcggctactacaaccagagcgaggccgggtctcacaccctccagtggatgtatggctgcgacctggggcccgacgggcgcctcctccgcgggtatgaccagtccgcctacgacggcaaggattacatcgccctgaacgaggacctgcgctcctggaccgccgcggacacggcggctcagatcacccagcgcaagtgggaggcggcccgtgcggcggagcagcagagagcctacctggagggcacgtgcgtggagtggctccgcagatacctggagaacgggaaggagacgctgcagcgcgcggaacacccaaagacacacgtgacccaccatctcgtctctgaccatgaggccaccctgaggtgctgggccctgggcttctaccctgcggagatcacactgacctggcagcgggatggcgaggaccaaactcaggacaccgagcttgtggagaccaggccagcaggagatggaaccttccagaagtgggcagctgtggtggtgccttctggagaagagcagagatacacgtgccatgtgcagcacgaggggctgccggagcccctcaccctgagatgggagccatcttcccagcccaccatccccatcgtgggcatcgttgctggcctggctgtcctggctgtcctagctgtcctaggagctgtggtggctgttgttatgtgtaggaggaagagctcaggtagggaaggggtgaggagtggggtctggccagcaacagtgcccagggctctgatgagtctctcatcgcttgtaaagcctgagacagctgcctgtgtgggactgagatgcaggatttcttcacacctctcctttgtgacttcaagagcctctggcatctctttctgcaaaggcatctgaatgcgtctgcgttcctgttagcataatgtgaggaggtggagagacagcccacccccgtgtccaccgtgacccctgtccccacactgacctgtgttccctccccgatcatctttcctgttccagagaagtgggctggatgtctccatctctgtctcaactttacgtgtactgagctgcaacttcttacttccctactgaaaataagaatctgaatataaatttgttttctcaaatatttgctatgagaggttgatggattaattaaataagtcaatccctggaagttgagagagcaaataaagacctgagaaccttccagaa

SEQ ID NO: 85726 - DNA, 1553 bp, Artificial Sequence
  derived and/or modified sequence
tccccagacgccgagatgcgggtcatggcgccccgaaccctcatcctgctgctctcgggagccctggccctgaccgagacctgggccggctcccactccatgaggtatttctacaccgctgtgtcccggcccggccgcggggagccccacttcatcgcagtgggctacgtggacgacacgcagttcgtgcggttcgacagcgacgccgcgagtccgagaggggagccgcgggcgccgtgggtggagcaggaggggccggagtattgggaccgggagacacagaagtacaagcgccaggcacagactgaccgagtgagcctgcggaacctgcgcggctactacaaccagagcgaggccgggtctcacatcatccagaggatgtatggctgcgacgtggggcccgacgggcgcctcctccgcgggtatgaccagtacgcctacgacggcaaggattacatcgccctgaacgaggatctgcgctcctggaccgccgcggacacggcggctcagatcacccagcgcaagtgggaggcggcccgtgaggcggagcagctgagagcctacctggagggcctgtgcgtggagtggctccgcagatacctgaagaatgggaaggagacgctgcagcgcgcggaacacccaaagacacacgtgacccaccatcccgtctctgaccatgaggccaccctgaggtgctgggccctgggcttctaccctgcggagatcacactgacctggcagtgggatggggaggaccaaactcaggacactgagcttgtggagaccaggccagcaggagatggaaccttccagaagtgggcagctgtggtggtgccttctggagaagagcagagatacacgtgccatgtgcagcacgaggggctgccggagcccctcaccctgagatgggagccgtcttcccagcccaccatccccatcgtgggcatcgttgctggcctggctgtcctggctgtcctagctgtcctaggagctgtggtggctgttgtgatgtgtaggaggaagagctcagggcattttcttcccacaggtggaaaaggagggagctgctctcaggctgcgtccagcaacagtgcccagggctctgatgagtctctcatcgcttgtaaagcctgagacagctgcctgtgtgggactgagatgcaggatttcttcacacctctcctttgtgacttcaagagcctctggcatctctttctgcaaaggcatctgaatgtgtctgcgttcctgttagcataatgtgaggaggtggagagacagcccacccccgtgtccaccgtgacccctgtccccacactgacctgtgttccctccccgatcatctttcctgttccagagaagtgggctggatgtctccatctctgtctcaacttcatggtgcgctgagctgcaacttcttacttccctaatgaagttaggaacctgaatataaatttgttttctcaaatatttgctatgaagggttgatggattaattaaataagtcaattcctggaagttgagagagcaaataaagacctgagaactttccagaa

SEQ ID NO: 85727 - DNA, 1460 bp, Artificial Sequence
  derived and/or modified sequence
cggattctccccagacgccgagatgcgggtcatggcgccccgaaccctcatcctgctgctctcgggagccctggccctgaccgagacctgggcctgctcccactccatgaggtatttctacaccgccgtgtcccggcccggccgcggagagccccgcttcatcgcagtgggctacgtggacgacacgcagttcgtgcggttcgacagcgacgccgcgagtccaagaggggagccgcgggcgccgtgggtggagcaggaggggccggagtattgggaccgggagacacagaagtacaagcgccaggcacagactgaccgagtgagcctgcggaacctgcgcggctactacaaccagagcgaggccgggtctcacaccctccagtggatgtatggctgcgacctggggcccgacgggcgcctcctccgcgggtatgaccagtccgcctacgacggcaaggattacatcgccctgaacgaggacctgcgctcctggaccgccgcggacacggcggctcagatcacccagcgcaagtgggaggcggcccgtgcggcggagcagcagagagcctacctggagggcacgtgcgtggagtggctccgcagatacctggagaacgggaaggagacgctgcagcgcgcggaacacccaaagacacacgtgacccaccatctcgtctctgaccatgaggccaccctgaggtgctgggccctgggcttctaccctgcggagatcacactgacctggcagcgggatggcgaggaccaaactcaggacaccgagcttgtggagaccaggccagcaggagatggaaccttccagaagtgggcagctgtggtggtgccttctggagaagagcagagatacacgtgccatgtgcagcacgaggggctgccggagcccctcaccctgagatgggagccatcttcccagcccaccatccccatcgtgggcatcgttgctggcctggctgtcctggctgtcctagctgtcctaggagctgtggtggctgttgttatgtgtaggaggaagagctcagcctgagacagctgcctgtgtgggactgagatgcaggatttcttcacacctctcctttgtgacttcaagagcctctggcatctctttctgcaaaggcatctgaatgcgtctgcgttcctgttagcataatgtgaggaggtggagagacagcccacccccgtgtccaccgtgacccctgtccccacactgacctgtgttccctccccgatcatctttcctgttccagagaagtgggctggatgtctccatctctgtctcaactttacgtgtactgagctgcaacttcttacttccctactgaaaataagaatctgaatataaatttgttttctcaaatatttgctatgagaggttgatggattaattaaataagtcaatccctggaagttgagagagcaaataaagacctgagaaccttccagaa

SEQ ID NO: 85728 - DNA, 1578 bp, Artificial Sequence
  derived and/or modified sequence
gtcccggttctaaagtccccagtcacccacccggactcggattctccccagacgccgagatgcgggtcatggcgccccgaaccctcatcctgctgctctcgggagccctggccctgaccgagacctgggcctgctcccactccatgaggtatttcgacaccgccgtgtcccggcccggccgcggagagccccgcttcatctcagtgggctacgtggacgacacgcagttcgtgcggttcgacagcgacgccgcgagtccgagaggggagccccgggcgccgtgggtggagcaggaggggccggagtattgggaccgggagacacagaagtacaagcgccaggcacaggctgaccgagtgaacctgcggaaactgcgcggctactacaaccagagcgaggacgggtctcacaccctccagtggatgtatggctgcgacctggggcccgacgggcgcctcctccgcgggtatgaccagtccgcctacgacggcaaggattacatcgccctgaacgaggacctgcgctcctggaccgccgcggacacggcggctcagatcacccagcgcaagtgggaggcggcccgtgaggcggagcagtggagagcctacctggagggcacgtgcgtggagtggctccgcagatacctggagaacgggaaggagacgctgcagcgcgcggaacacccaaagacacacgtgacccaccatcccgtctctgaccatgaggccaccctgaggtgctgggccctgggcttctaccctgcggagatcacactgacctggcagcgggatggcgaggaccaaactcaggacaccgagcttgtggagaccaggccagcaggagatggaaccttccagaagtgggcagctgtggtggtgccttctggagaagagcagagatacacgtgccatgtgcagcacgaggggctgccagagcccctcaccctgagatgggagccatcttcccagcccaccatccccatcgtgggcatcgttgctggcctggctgtcctggctgtcctagctgtcctaggagctgtgatggctgttgtgatgtgtaggaggaagagctcaggtggaaaaggagggagctgctctcaggctgcgtccagcaacagtgcccagggctctgatgagtctctcatcgcttgtaaagcctgagacagctgcctgtgtgggactgagatgcaggatttcttcacacctctcctttgtgacttcaagagcctctggcatctctttctgcaaaggcatctgaatgtgtctgcgttcctgttagcataatgtgaggaggtggagagacagcccacccccgtgtccaccgtgacccctgtccccacactgacctgtgttccctccccgatcatctttcctgttccagagaagtgggctggatgtctccatctctgtctcaactttacgtgtactgagctgcaacttcttacttccctactgaaaataagaatctgaatataaatttgttttctcaaatatttgctatgagaggttgatggattaattaaataagtcaattcctggaagttgagagagcaaataaagacctgagaaccttccagaa

SEQ ID NO: 85729 - DNA, 1452 bp, Artificial Sequence
  derived and/or modified sequence
cacattctccccagaggccgagatgcgggtcatggcgccccgagccctcctcctgctgctctcgggaggcctggccctgaccgagacctgggcctgctcccactccatgaggtatttcgacaccgccgtgtcccggcccggccgcggagagccccgcttcatctcagtgggctacgtggacgacacgcagttcgtgcggttcgacagcgacgccgcgagtccgagaggggagccgcgggcgccgtgggtggagcaggaggggccggagtattgggaccgggagacacagaactacaagcgccaggcacaggctgaccgagtgagcctgcggaacctgcgcggctactacaaccagagcgaggacgggtctcacaccctccagaggatgtatggctgcgacctggggcccgacgggcgcctcctccgcgggtatgaccagtccgcctacgacggcaaggattacatcgccctgaacgaggacctgcgctcctggaccgccgcggacaccgcggctcagatcacccagcgcaagttggaggcggcccgtgcggcggagcagctgagagcctacctggagggcacgtgcgtggagtggctccgcagatacctggagaacgggaaggagacgctgcagcgcgcagaacccccaaagacacacgtgacccaccaccccctctctgaccatgaggccaccctgaggtgctgggccctgggcttctaccctgcggagatcacactgacctggcagcgggatggggaggaccagacccaggacaccgagcttgtggagaccaggccagcaggagatggaaccttccagaagtgggcagctgtggtggtgccttctggacaagagcagagatacacgtgccatatgcagcacgaggggctgcaagagcccctcaccctgagctgggagccatcttcccagcccaccatccccatcatgggcatcgttgctggcctggctgtcctggttgtcctagctgtccttggagctgtggtcaccgctatgatgtgtaggaggaagagctcagctgcctgtgtgggactgagatgcaggatttcttcacacctctcctttgtgacttcaagagcctctggcatctctttctgcaaaggcgtctgaatgtgtctgcgttcctgttagcataatgtgaggaggtggagagacagcccacccccgtgtccaccgtgacccctgtccccacactgacctgtgttccctccccgatcatctttcctgttccagagaggtggggctggatgtctccatctctgtctcaaattcatggtgcactgagctgcaacttcttacttccctaatgaagttaagaacctgaatataaatttgtgttctcaaatatttgctatgaagcgttgatggattaattaaataagtcaattcctagaagttgagagagcaaataaagacctgagaaccttccagaa

SEQ ID NO: 85730 - DNA, 1530 bp, Artificial Sequence
  derived and/or modified sequence
tccccagacgccgagatgcgggtcatggcgccccgaaccctcatcctgctgctctcgggagccctggccctgaccgagacctgggcctgctcccactccatgaggtatttcgacaccgccgtgtcccggcccggccgcggagagccccgcttcatctcagtgggctacgtggacgacacgcagttcgtgcggttcgacagcgacgccgcgagtccgagaggggagccccgggcgccgtgggtggagcaggaggggccggagtattgggaccgggagacacagaagtacaagcgccaggcacaggctgaccgagtgaacctgcggaaactgcgcggctactacaaccagagcgaggacgggtctcacaccctccagtggatgtatggctgcgacctggggcccgacgggcgcctcctccgcgggtatgaccagtccgcctacgacggcaaggattacatcgccctgaacgaggacctgcgctcctggaccgccgcggacacggcggctcagatcacccagcgcaagtgggaggcggcccgtgaggcggagcagtggagagcctacctggagggcacgtgcgtggagtggctccgcagatacctggagaacgggaaggagacgctgcagcgcgcggaacacccaaagacacacgtgacccaccatcccgtctctgaccatgaggccaccctgaggtgctgggccctgggcttctaccctgcggagatcacactgacctggcagcgggatggcgaggaccaaactcaggacaccgagcttgtggagaccaggccagcaggagatggaaccttccagaagtgggcagctgtggtggtgccttctggagaagagcagagatacacgtgccatgtgcagcacgaggggctgccagagcccctcaccctgagatgggagccatcttcccagcccaccatccccatcgtgggcatcgttgctggcctggctgtcctggctgtcctagctgtcctaggagctgtgatggctgttgtgatgtgtaggaggaagagctcaggtagggaaggggtgaggagtggggtctggccagcaacagtgcccagggctctgatgagtctctcatcgcttgtaaagcctgagacagctgcctgtgtgggactgagatgcaggatttcttcacacctctcctttgtgacttcaagagcctctggcatctctttctgcaaaggcatctgaatgtgtctgcgttcctgttagcataatgtgaggaggtggagagacagcccacccccgtgtccaccgtgacccctgtccccacactgacctgtgttccctccccgatcatctttcctgttccagagaagtgggctggatgtctccatctctgtctcaactttacgtgtactgagctgcaacttcttacttccctactgaaaataagaatctgaatataaatttgttttctcaaatatttgctatgagaggttgatggattaattaaataagtcaattcctggaagttgagagagcaaataaagacctgagaaccttccagaa

SEQ ID NO: 85731 - DNA, 1554 bp, Artificial Sequence
  derived and/or modified sequence
tccccagaggccgagatgcgggtcatggcgccccgagccctcctcctgctgctctcgggaggcctggccctgaccgagacctgggcctgctcccactccatgaggtatttcgacaccgccgtgtcccggcccggccgcggagagccccgcttcatctcagtgggctacgtggacgacacgcagttcgtgcggttcgacagcgacgccgcgagtccgagaggggagccgcgggcgccgtgggtggagcaggaggggccggagtattgggaccgggagacacagaactacaagcgccaggcacaggctgaccgagtgagcctgcggaacctgcgcggctactacaaccagagcgaggacgggtctcacaccctccagaggatgtatggctgcgacctggggcccgacgggcgcctcctccgcgggtatgaccagtccgcctacgacggcaaggattacatcgccctgaacgaggacctgcgctcctggaccgccgcggacaccgcggctcagatcacccagcgcaagttggaggcggcccgtgcggcggagcagctgagagcctacctggagggcacgtgcgtggagtggctccgcagatacctggagaacgggaaggagacgctgcagcgcgcagaacccccaaagacacacgtgacccaccaccccctctctgaccatgaggccaccctgaggtgctgggccctgggcttctaccctgcggagatcacactgacctggcagcgggatggggaggaccagacccaggacaccgagcttgtggagaccaggccagcaggagatggaaccttccagaagtgggcagctgtggtggtgccttctggacaagagcagagatacacgtgccatatgcagcacgaggggctgcaagagcccctcaccctgagctgggagccatcttcccagcccaccatccccatcatgggcatcgttgctggcctggctgtcctggttgtcctagctgtccttggagctgtggtcaccgctatgatgtgtaggaggaagagctcagggcattttcttcccacaggtggaaaaggagggagctgctctcaggctgcgtgcagcaacagtgcccagggctctgatgagtctctcatcacttgtaaagcctgagacagctgcctgtgtgggactgagatgcaggatttcttcacacctctcctttgtgacttcaagagcctctggcatctctttctgcaaaggcgtctgaatgtgtctgcgttcctgttagcataatgtgaggaggtggagagacagcccacccccgtgtccaccgtgacccctgtccccacactgacctgtgttccctccccgatcatctttcctgttccagagaggtggggctggatgtctccatctctgtctcaaattcatggtgcactgagctgcaacttcttacttccctaatgaagttaagaacctgaatataaatttgtgttctcaaatatttgctatgaagcgttgatggattaattaaataagtcaattcctagaagttgagagagcaaataaagacctgagaaccttccagaa

SEQ ID NO: 85732 - DNA, 1580 bp, Artificial Sequence
  derived and/or modified sequence
gtcccggttctaaagtccccagtcacccacccggactcacattctccccagaggccgagatgcgggtcatggcgccccgagccctcctcctgctgctctcgggaggcctggccctgaccgagacctgggcctgctcccactccatgaggtatttcgacaccgccgtgtcccggcccggccgcggagagccccgcttcatctcagtgggctacgtggacgacacgcagttcgtgcggttcgacagcgacgccgcgagtccgagaggggagccgcgggcgccgtgggtggagcaggaggggccggagtattgggaccgggagacacagaactacaagcgccaggcacaggctgaccgagtgagcctgcggaacctgcgcggctactacaaccagagcgaggacgggtctcacaccctccagaggatgtatggctgcgacctggggcccgacgggcgcctcctccgcgggtatgaccagtccgcctacgacggcaaggattacatcgccctgaacgaggacctgcgctcctggaccgccgcggacaccgcggctcagatcacccagcgcaagttggaggcggcccgtgcggcggagcagctgagagcctacctggagggcacgtgcgtggagtggctccgcagatacctggagaacgggaaggagacgctgcagcgcgcagaacccccaaagacacacgtgacccaccaccccctctctgaccatgaggccaccctgaggtgctgggccctgggcttctaccctgcggagatcacactgacctggcagcgggatggggaggaccagacccaggacaccgagcttgtggagaccaggccagcaggagatggaaccttccagaagtgggcagctgtggtggtgccttctggacaagagcagagatacacgtgccatatgcagcacgaggggctgcaagagcccctcaccctgagctgggagccatcttcccagcccaccatccccatcatgggcatcgttgctggcctggctgtcctggttgtcctagctgtccttggagctgtggtcaccgctatgatgtgtaggaggaagagctcaggtggaaaaggagggagctgctctcaggctgcgtgcagcaacagtgcccagggctctgatgagtctctcatcacttgtaaagcctgagacagctgcctgtgtgggactgagatgcaggatttcttcacacctctcctttgtgacttcaagagcctctggcatctctttctgcaaaggcgtctgaatgtgtctgcgttcctgttagcataatgtgaggaggtggagagacagcccacccccgtgtccaccgtgacccctgtccccacactgacctgtgttccctccccgatcatctttcctgttccagagaggtggggctggatgtctccatctctgtctcaaattcatggtgcactgagctgcaacttcttacttccctaatgaagttaagaacctgaatataaatttgtgttctcaaatatttgctatgaagcgttgatggattaattaaataagtcaattcctagaagttgagagagcaaataaagacctgagaaccttccagaa

SEQ ID NO: 85733 - DNA, 1451 bp, Artificial Sequence
  derived and/or modified sequence
cagattctccccagacgccgagatgcgggtcatggcgccccgaaccctcatcctgctgctctcgggagccctggccctgaccgagacctgggccggctcccactccatgaggtatttctacaccgctgtgtcccggcccggccgcggggagccccacttcatcgcagtgggctacgtggacgacacgcagttcgtgcggttcgacagcgacgccgcgagtccgagaggggagccgcgggcgccgtgggtggagcaggaggggccggagtattgggaccgggagacacagaagtacaagcgccaggcacagactgaccgagtgagcctgcggaacctgcgcggctactacaaccagagcgaggccgggtctcacatcatccagaggatgtatggctgcgacgtggggcccgacgggcgcctcctccgcgggtatgaccagtacgcctacgacggcaaggattacatcgccctgaacgaggatctgcgctcctggaccgccgcggacacggcggctcagatcacccagcgcaagtgggaggcggcccgtgaggcggagcagctgagagcctacctggagggcctgtgcgtggagtggctccgcagatacctgaagaatgggaaggagacgctgcagcgcgcggaacacccaaagacacacgtgacccaccatcccgtctctgaccatgaggccaccctgaggtgctgggccctgggcttctaccctgcggagatcacactgacctggcagtgggatggggaggaccaaactcaggacactgagcttgtggagaccaggccagcaggagatggaaccttccagaagtgggcagctgtggtggtgccttctggagaagagcagagatacacgtgccatgtgcagcacgaggggctgccggagcccctcaccctgagatgggagccgtcttcccagcccaccatccccatcgtgggcatcgttgctggcctggctgtcctggctgtcctagctgtcctaggagctgtggtggctgttgtgatgtgtaggaggaagagctcagctgcctgtgtgggactgagatgcaggatttcttcacacctctcctttgtgacttcaagagcctctggcatctctttctgcaaaggcatctgaatgtgtctgcgttcctgttagcataatgtgaggaggtggagagacagcccacccccgtgtccaccgtgacccctgtccccacactgacctgtgttccctccccgatcatctttcctgttccagagaagtgggctggatgtctccatctctgtctcaacttcatggtgcgctgagctgcaacttcttacttccctaatgaagttaggaacctgaatataaatttgttttctcaaatatttgctatgaagggttgatggattaattaaataagtcaattcctggaagttgagagagcaaataaagacctgagaactttccagaa

SEQ ID NO: 85734 - DNA, 1532 bp, Artificial Sequence
  derived and/or modified sequence
tccccagaggccgagatgcgggtcatggcgccccgagccctcctcctgctgctctcgggaggcctggccctgaccgagacctgggcctgctcccactccatgaggtatttcgacaccgccgtgtcccggcccggccgcggagagccccgcttcatctcagtgggctacgtggacgacacgcagttcgtgcggttcgacagcgacgccgcgagtccgagaggggagccgcgggcgccgtgggtggagcaggaggggccggagtattgggaccgggagacacagaactacaagcgccaggcacaggctgaccgagtgagcctgcggaacctgcgcggctactacaaccagagcgaggacgggtctcacaccctccagaggatgtatggctgcgacctggggcccgacgggcgcctcctccgcgggtatgaccagtccgcctacgacggcaaggattacatcgccctgaacgaggacctgcgctcctggaccgccgcggacaccgcggctcagatcacccagcgcaagttggaggcggcccgtgcggcggagcagctgagagcctacctggagggcacgtgcgtggagtggctccgcagatacctggagaacgggaaggagacgctgcagcgcgcagaacccccaaagacacacgtgacccaccaccccctctctgaccatgaggccaccctgaggtgctgggccctgggcttctaccctgcggagatcacactgacctggcagcgggatggggaggaccagacccaggacaccgagcttgtggagaccaggccagcaggagatggaaccttccagaagtgggcagctgtggtggtgccttctggacaagagcagagatacacgtgccatatgcagcacgaggggctgcaagagcccctcaccctgagctgggagccatcttcccagcccaccatccccatcatgggcatcgttgctggcctggctgtcctggttgtcctagctgtccttggagctgtggtcaccgctatgatgtgtaggaggaagagctcaggtagggaaggggtgaagagcggggtctgggcagcaacagtgcccagggctctgatgagtctctcatcacttgtaaagcctgagacagctgcctgtgtgggactgagatgcaggatttcttcacacctctcctttgtgacttcaagagcctctggcatctctttctgcaaaggcgtctgaatgtgtctgcgttcctgttagcataatgtgaggaggtggagagacagcccacccccgtgtccaccgtgacccctgtccccacactgacctgtgttccctccccgatcatctttcctgttccagagaggtggggctggatgtctccatctctgtctcaaattcatggtgcactgagctgcaacttcttacttccctaatgaagttaagaacctgaatataaatttgtgttctcaaatatttgctatgaagcgttgatggattaattaaataagtcaattcctagaagttgagagagcaaataaagacctgagaaccttccagaa

SEQ ID NO: 85735 - DNA, 1502 bp, Artificial Sequence
  derived and/or modified sequence
tccccagacgccgagatgcgggtcatggcgccccgaaccctcatcctgctgctctcgggagccctggccctgaccgagacctgggccggctcccactccatgaggtatttctacaccgctgtgtcccggcccggccgcggggagccccacttcatcgcagtgggctacgtggacgacacgcagttcgtgcggttcgacagcgacgccgcgagtccgagaggggagccgcgggcgccgtgggtggagcaggaggggccggagtattgggaccgggagacacagaagtacaagcgccaggcacagactgaccgagtgagcctgcggaacctgcgcggctactacaaccagagcgaggccgggtctcacatcatccagaggatgtatggctgcgacgtggggcccgacgggcgcctcctccgcgggtatgaccagtacgcctacgacggcaaggattacatcgccctgaacgaggatctgcgctcctggaccgccgcggacacggcggctcagatcacccagcgcaagtgggaggcggcccgtgaggcggagcagctgagagcctacctggagggcctgtgcgtggagtggctccgcagatacctgaagaatgggaaggagacgctgcagcgcgcggaacacccaaagacacacgtgacccaccatcccgtctctgaccatgaggccaccctgaggtgctgggccctgggcttctaccctgcggagatcacactgacctggcagtgggatggggaggaccaaactcaggacactgagcttgtggagaccaggccagcaggagatggaaccttccagaagtgggcagctgtggtggtgccttctggagaagagcagagatacacgtgccatgtgcagcacgaggggctgccggagcccctcaccctgagatgggagccgtcttcccagcccaccatccccatcgtgggcatcgttgctggcctggctgtcctggctgtcctagctgtcctaggagctgtggtggctgttgtgatgtgtaggaggaagagctcagccagcaacagtgcccagggctctgatgagtctctcatcgcttgtaaagcctgagacagctgcctgtgtgggactgagatgcaggatttcttcacacctctcctttgtgacttcaagagcctctggcatctctttctgcaaaggcatctgaatgtgtctgcgttcctgttagcataatgtgaggaggtggagagacagcccacccccgtgtccaccgtgacccctgtccccacactgacctgtgttccctccccgatcatctttcctgttccagagaagtgggctggatgtctccatctctgtctcaacttcatggtgcgctgagctgcaacttcttacttccctaatgaagttaggaacctgaatataaatttgttttctcaaatatttgctatgaagggttgatggattaattaaataagtcaattcctggaagttgagagagcaaataaagacctgagaactttccagaa

SEQ ID NO: 85736 - DNA, 1450 bp, Artificial Sequence
  derived and/or modified sequence
cggattctccccagacgccgagatgcgggtcatggcgccccgaaccctcatcctgctgctctcgggagccctggccctgaccgagacctgggcctgctcccactccatgaggtatttctacaccgccgtgtcccggcccggccgcggagagccccgcttcatcgcagtgggctacgtggacgacacgcagttcgtgcagttcgacagcgacgccgcgagtccaagaggggagccgcgggcgccgtgggtggagcaggaggggccggagtattgggaccgggagacacagaagtacaagcgccaggcacagactgaccgagtgaacctgcggaaactgcgcggctactacaaccagagcgaggccgggtctcacaccctccagaggatgtatggctgcgacctggggcccgacgggcgcctcctccgcgggtataaccagttcgcctacgacggcaaggattacatcgccctgaatgaggacctgcgctcctggaccgccgcggacaaggcggctcagatcacccagcgcaagtgggaggcggcccgtgaggcggagcagcggagagcctacctggagggcacgtgcgtggagtggctccgcagatacctggagaacgggaagaagacgctgcagcgcgcggaacacccaaagacacacgtgacccaccatcccgtctctgaccatgaggccaccctgaggtgctgggccctgggcttctaccctgcggagatcacactgacctggcagcgggatggcgaggaccaaactcaggacaccgagcttgtggagaccaggccagcaggagatggaaccttccagaagtgggcagctgtggtggtgccttctggagaagagcagagatacacgtgccatgtgcagcacgaggggctgccagagcccctcaccctgagatgggggccatcttcccagcccaccatccccatcgtgggcatcgttgctggcctggctgtcctggctgtcctagctgtcctaggagctgtgatggctgttgtgatgtgtaggaggaagagctcagctgcctgtgtgggactgagatgcaggatttcttcacacctttcctttgtgacttcaagagcctctggcatctctttctgcaaaggcatctgaatgtgtctgcgttcctgttagcataatgtgaggaggtggagagacagcccacccccgtgtccaccgtgacccctgtccccacactgacctgtgttccctccccgatcatctttcctgttccagagaagtgggctggatgtctccatctctgtctcaactttacgtgtactgagctgcaacttcttacttccctactgaaaataagaatctgaatataaatttgttttctcaaatatttgctatgagaggttgatggattaattaaataagtcaattcctggaagttgagagagcaaataaagacctgagaaccttccagaa

SEQ ID NO: 85737 - DNA, 782 bp, Artificial Sequence
  derived and/or modified sequence
gcgggtcatggcgccccgaaccctcatcctgctgctctcgggagccctggccctgaccgagacctgggcctgctcccactccatgaggtatttctacaccgccgtgtcccggcccggccgcggagagccccgcttcatcgcagtgggctacgtggacgacacgcagttcgtgcggttcgacagcgacgccgcgagtccaagaggggagccgcgggcgccgtgggtggagcaggaggggccggagtattgggaccgggagacacagaagtacaagcgccaggcacagactgaccgagtgagcctgcggaacctgcgcggctactacaaccagagcgaggccgggtctcacaccctccagtggatgtatggctgcgacctggggcccgacgggcgcctcctccgcgggtatgaccagtccgcctacgacggcaaggattacatcgccctgaacgaggacctgcgctcctggaccgccgcggacacggcggctcagatcacccagcgcaagtgggaggcggcccgtgcggcggagcagcagagagcctacctggagggcacgtgcgtggagtggctccgcagatacctggagaacgggaaggagacgctgcagcgcgcggaacacccaaagacacacgtgacccaccatctcgtctctgaccatgaggccagcaggagatggaaccttccagaagtgggcagctgtggtggtgccttctggagaagagcagagatacacgtgccatgtgcagcacgaggggctgccggagcccctcaccctgaga

SEQ ID NO: 85738 - DNA, 1578 bp, Artificial Sequence
  derived and/or modified sequence
gtcccggttctaaagtccccagtcacccacccggactcggattctccccagacgccgagatgcgggtcatggcgccccgaaccctcatcctgctgctctcgggagccctggccctgaccgagacctgggcctgctcccactccatgaggtatttctacaccgccgtgtcccggcccggccgcggagagccccgcttcatcgcagtgggctacgtggacgacacgcagttcgtgcggttcgacagcgacgccgcgagtccaagaggggagccgcgggcgccgtgggtggagcaggaggggccggagtattgggaccgggagacacagaagtacaagcgccaggcacagactgaccgagtgagcctgcggaacctgcgcggctactacaaccagagcgaggccgggtctcacaccctccagtggatgtatggctgcgacctggggcccgacgggcgcctcctccgcgggtatgaccagtccgcctacgacggcaaggattacatcgccctgaacgaggacctgcgctcctggaccgccgcggacacggcggctcagatcacccagcgcaagtgggaggcggcccgtgcggcggagcagcagagagcctacctggagggcacgtgcgtggagtggctccgcagatacctggagaacgggaaggagacgctgcagcgcgcggaacacccaaagacacacgtgacccaccatctcgtctctgaccatgaggccaccctgaggtgctgggccctgggcttctaccctgcggagatcacactgacctggcagcgggatggcgaggaccaaactcaggacaccgagcttgtggagaccaggccagcaggagatggaaccttccagaagtgggcagctgtggtggtgccttctggagaagagcagagatacacgtgccatgtgcagcacgaggggctgccggagcccctcaccctgagatgggagccatcttcccagcccaccatccccatcgtgggcatcgttgctggcctggctgtcctggctgtcctagctgtcctaggagctgtggtggctgttgttatgtgtaggaggaagagctcaggtggaaaaggagggagctgctctcaggctgcgtccagcaacagtgcccagggctctgatgagtctctcatcgcttgtaaagcctgagacagctgcctgtgtgggactgagatgcaggatttcttcacacctctcctttgtgacttcaagagcctctggcatctctttctgcaaaggcatctgaatgcgtctgcgttcctgttagcataatgtgaggaggtggagagacagcccacccccgtgtccaccgtgacccctgtccccacactgacctgtgttccctccccgatcatctttcctgttccagagaagtgggctggatgtctccatctctgtctcaactttacgtgtactgagctgcaacttcttacttccctactgaaaataagaatctgaatataaatttgttttctcaaatatttgctatgagaggttgatggattaattaaataagtcaatccctggaagttgagagagcaaataaagacctgagaaccttccagaa

SEQ ID NO: 85739 - DNA, 782 bp, Artificial Sequence
  derived and/or modified sequence
gcgggtcatggcgccccgaaccctcatcctgctgctctcgggagccctggccctgaccgagacctgggcctgctcccactccatgaggtatttctacaccgccgtgtcccggcccggccgcggagagccccgcttcatcgcagtgggctacgtggacgacacgcagttcgtgcagttcgacagcgacgccgcgagtccaagaggggagccgcgggcgccgtgggtggagcaggaggggccggagtattgggaccgggagacacagaagtacaagcgccaggcacagactgaccgagtgaacctgcggaaactgcgcggctactacaaccagagcgaggccgggtctcacaccctccagaggatgtatggctgcgacctggggcccgacgggcgcctcctccgcgggtataaccagttcgcctacgacggcaaggattacatcgccctgaatgaggacctgcgctcctggaccgccgcggacaaggcggctcagatcacccagcgcaagtgggaggcggcccgtgaggcggagcagcggagagcctacctggagggcacgtgcgtggagtggctccgcagatacctggagaacgggaagaagacgctgcagcgcgcggaacacccaaagacacacgtgacccaccatcccgtctctgaccatgaggccagcaggagatggaaccttccagaagtgggcagctgtggtggtgccttctggagaagagcagagatacacgtgccatgtgcagcacgaggggctgccagagcccctcaccctgaga

SEQ ID NO: 85740 - DNA, 1552 bp, Artificial Sequence
  derived and/or modified sequence
tccccagacgccgagatgcgggtcatggcgccccgaaccctcatcctgctgctctcgggagccctggccctgaccgagacctgggcctgctcccactccatgaggtatttctacaccgccgtgtcccggcccggccgcggagagccccgcttcatcgcagtgggctacgtggacgacacgcagttcgtgcggttcgacagcgacgccgcgagtccaagaggggagccgcgggcgccgtgggtggagcaggaggggccggagtattgggaccgggagacacagaagtacaagcgccaggcacagactgaccgagtgagcctgcggaacctgcgcggctactacaaccagagcgaggccgggtctcacaccctccagtggatgtatggctgcgacctggggcccgacgggcgcctcctccgcgggtatgaccagtccgcctacgacggcaaggattacatcgccctgaacgaggacctgcgctcctggaccgccgcggacacggcggctcagatcacccagcgcaagtgggaggcggcccgtgcggcggagcagcagagagcctacctggagggcacgtgcgtggagtggctccgcagatacctggagaacgggaaggagacgctgcagcgcgcggaacacccaaagacacacgtgacccaccatctcgtctctgaccatgaggccaccctgaggtgctgggccctgggcttctaccctgcggagatcacactgacctggcagcgggatggcgaggaccaaactcaggacaccgagcttgtggagaccaggccagcaggagatggaaccttccagaagtgggcagctgtggtggtgccttctggagaagagcagagatacacgtgccatgtgcagcacgaggggctgccggagcccctcaccctgagatgggagccatcttcccagcccaccatccccatcgtgggcatcgttgctggcctggctgtcctggctgtcctagctgtcctaggagctgtggtggctgttgttatgtgtaggaggaagagctcagggcattttcttcccacaggtggaaaaggagggagctgctctcaggctgcgtccagcaacagtgcccagggctctgatgagtctctcatcgcttgtaaagcctgagacagctgcctgtgtgggactgagatgcaggatttcttcacacctctcctttgtgacttcaagagcctctggcatctctttctgcaaaggcatctgaatgcgtctgcgttcctgttagcataatgtgaggaggtggagagacagcccacccccgtgtccaccgtgacccctgtccccacactgacctgtgttccctccccgatcatctttcctgttccagagaagtgggctggatgtctccatctctgtctcaactttacgtgtactgagctgcaacttcttacttccctactgaaaataagaatctgaatataaatttgttttctcaaatatttgctatgagaggttgatggattaattaaataagtcaatccctggaagttgagagagcaaataaagacctgagaaccttccagaa

SEQ ID NO: 85741 - DNA, 782 bp, Artificial Sequence
  derived and/or modified sequence
gcgggtcatggcgccccgaaccctcatcctgctgctctcgggagccctggccctgaccgagacctgggcctgctcccactccatgaggtatttcgacaccgccgtgtcccggcccggccgcggagagccccgcttcatctcagtgggctacgtggacgacacgcagttcgtgcggttcgacagcgacgccgcgagtccgagaggggagccccgggcgccgtgggtggagcaggaggggccggagtattgggaccgggagacacagaagtacaagcgccaggcacaggctgaccgagtgaacctgcggaaactgcgcggctactacaaccagagcgaggacgggtctcacaccctccagtggatgtatggctgcgacctggggcccgacgggcgcctcctccgcgggtatgaccagtccgcctacgacggcaaggattacatcgccctgaacgaggacctgcgctcctggaccgccgcggacacggcggctcagatcacccagcgcaagtgggaggcggcccgtgaggcggagcagtggagagcctacctggagggcacgtgcgtggagtggctccgcagatacctggagaacgggaaggagacgctgcagcgcgcggaacacccaaagacacacgtgacccaccatcccgtctctgaccatgaggccagcaggagatggaaccttccagaagtgggcagctgtggtggtgccttctggagaagagcagagatacacgtgccatgtgcagcacgaggggctgccagagcccctcaccctgaga

SEQ ID NO: 85742 - DNA, 1450 bp, Artificial Sequence
  derived and/or modified sequence
cggattctccccagacgccgagatgcgggtcatggcgccccgaaccctcatcctgctgctctcgggagccctggccctgaccgagacctgggcctgctcccactccatgaggtatttcgacaccgccgtgtcccggcccggccgcggagagccccgcttcatctcagtgggctacgtggacgacacgcagttcgtgcggttcgacagcgacgccgcgagtccgagaggggagccccgggcgccgtgggtggagcaggaggggccggagtattgggaccgggagacacagaagtacaagcgccaggcacaggctgaccgagtgaacctgcggaaactgcgcggctactacaaccagagcgaggacgggtctcacaccctccagtggatgtatggctgcgacctggggcccgacgggcgcctcctccgcgggtatgaccagtccgcctacgacggcaaggattacatcgccctgaacgaggacctgcgctcctggaccgccgcggacacggcggctcagatcacccagcgcaagtgggaggcggcccgtgaggcggagcagtggagagcctacctggagggcacgtgcgtggagtggctccgcagatacctggagaacgggaaggagacgctgcagcgcgcggaacacccaaagacacacgtgacccaccatcccgtctctgaccatgaggccaccctgaggtgctgggccctgggcttctaccctgcggagatcacactgacctggcagcgggatggcgaggaccaaactcaggacaccgagcttgtggagaccaggccagcaggagatggaaccttccagaagtgggcagctgtggtggtgccttctggagaagagcagagatacacgtgccatgtgcagcacgaggggctgccagagcccctcaccctgagatgggagccatcttcccagcccaccatccccatcgtgggcatcgttgctggcctggctgtcctggctgtcctagctgtcctaggagctgtgatggctgttgtgatgtgtaggaggaagagctcagctgcctgtgtgggactgagatgcaggatttcttcacacctctcctttgtgacttcaagagcctctggcatctctttctgcaaaggcatctgaatgtgtctgcgttcctgttagcataatgtgaggaggtggagagacagcccacccccgtgtccaccgtgacccctgtccccacactgacctgtgttccctccccgatcatctttcctgttccagagaagtgggctggatgtctccatctctgtctcaactttacgtgtactgagctgcaacttcttacttccctactgaaaataagaatctgaatataaatttgttttctcaaatatttgctatgagaggttgatggattaattaaataagtcaattcctggaagttgagagagcaaataaagacctgagaaccttccagaa

SEQ ID NO: 85743 - DNA, 782 bp, Artificial Sequence
  derived and/or modified sequence
gcgggtcatggcgccccgagccctcctcctgctgctctcgggaggcctggccctgaccgagacctgggcctgctcccactccatgaggtatttcgacaccgccgtgtcccggcccggccgcggagagccccgcttcatctcagtgggctacgtggacgacacgcagttcgtgcggttcgacagcgacgccgcgagtccgagaggggagccgcgggcgccgtgggtggagcaggaggggccggagtattgggaccgggagacacagaactacaagcgccaggcacaggctgaccgagtgagcctgcggaacctgcgcggctactacaaccagagcgaggacgggtctcacaccctccagaggatgtatggctgcgacctggggcccgacgggcgcctcctccgcgggtatgaccagtccgcctacgacggcaaggattacatcgccctgaacgaggacctgcgctcctggaccgccgcggacaccgcggctcagatcacccagcgcaagttggaggcggcccgtgcggcggagcagctgagagcctacctggagggcacgtgcgtggagtggctccgcagatacctggagaacgggaaggagacgctgcagcgcgcagaacccccaaagacacacgtgacccaccaccccctctctgaccatgaggccagcaggagatggaaccttccagaagtgggcagctgtggtggtgccttctggacaagagcagagatacacgtgccatatgcagcacgaggggctgcaagagcccctcaccctgagc

SEQ ID NO: 85744 - DNA, 1579 bp, Artificial Sequence
  derived and/or modified sequence
gtcccggttctgaagtccccagtcacccacccggactcagattctccccagacgccgagatgcgggtcatggcgccccgaaccctcatcctgctgctctcgggagccctggccctgaccgagacctgggccggctcccactccatgaggtatttctacaccgctgtgtcccggcccggccgcggggagccccacttcatcgcagtgggctacgtggacgacacgcagttcgtgcggttcgacagcgacgccgcgagtccgagaggggagccgcgggcgccgtgggtggagcaggaggggccggagtattgggaccgggagacacagaagtacaagcgccaggcacagactgaccgagtgagcctgcggaacctgcgcggctactacaaccagagcgaggccgggtctcacatcatccagaggatgtatggctgcgacgtggggcccgacgggcgcctcctccgcgggtatgaccagtacgcctacgacggcaaggattacatcgccctgaacgaggatctgcgctcctggaccgccgcggacacggcggctcagatcacccagcgcaagtgggaggcggcccgtgaggcggagcagctgagagcctacctggagggcctgtgcgtggagtggctccgcagatacctgaagaatgggaaggagacgctgcagcgcgcggaacacccaaagacacacgtgacccaccatcccgtctctgaccatgaggccaccctgaggtgctgggccctgggcttctaccctgcggagatcacactgacctggcagtgggatggggaggaccaaactcaggacactgagcttgtggagaccaggccagcaggagatggaaccttccagaagtgggcagctgtggtggtgccttctggagaagagcagagatacacgtgccatgtgcagcacgaggggctgccggagcccctcaccctgagatgggagccgtcttcccagcccaccatccccatcgtgggcatcgttgctggcctggctgtcctggctgtcctagctgtcctaggagctgtggtggctgttgtgatgtgtaggaggaagagctcaggtggaaaaggagggagctgctctcaggctgcgtccagcaacagtgcccagggctctgatgagtctctcatcgcttgtaaagcctgagacagctgcctgtgtgggactgagatgcaggatttcttcacacctctcctttgtgacttcaagagcctctggcatctctttctgcaaaggcatctgaatgtgtctgcgttcctgttagcataatgtgaggaggtggagagacagcccacccccgtgtccaccgtgacccctgtccccacactgacctgtgttccctccccgatcatctttcctgttccagagaagtgggctggatgtctccatctctgtctcaacttcatggtgcgctgagctgcaacttcttacttccctaatgaagttaggaacctgaatataaatttgttttctcaaatatttgctatgaagggttgatggattaattaaataagtcaattcctggaagttgagagagcaaataaagacctgagaactttccagaa

SEQ ID NO: 85745 - DNA, 1552 bp, Artificial Sequence
  derived and/or modified sequence
tccccagacgccgagatgcgggtcatggcgccccgaaccctcatcctgctgctctcgggagccctggccctgaccgagacctgggcctgctcccactccatgaggtatttcgacaccgccgtgtcccggcccggccgcggagagccccgcttcatctcagtgggctacgtggacgacacgcagttcgtgcggttcgacagcgacgccgcgagtccgagaggggagccccgggcgccgtgggtggagcaggaggggccggagtattgggaccgggagacacagaagtacaagcgccaggcacaggctgaccgagtgaacctgcggaaactgcgcggctactacaaccagagcgaggacgggtctcacaccctccagtggatgtatggctgcgacctggggcccgacgggcgcctcctccgcgggtatgaccagtccgcctacgacggcaaggattacatcgccctgaacgaggacctgcgctcctggaccgccgcggacacggcggctcagatcacccagcgcaagtgggaggcggcccgtgaggcggagcagtggagagcctacctggagggcacgtgcgtggagtggctccgcagatacctggagaacgggaaggagacgctgcagcgcgcggaacacccaaagacacacgtgacccaccatcccgtctctgaccatgaggccaccctgaggtgctgggccctgggcttctaccctgcggagatcacactgacctggcagcgggatggcgaggaccaaactcaggacaccgagcttgtggagaccaggccagcaggagatggaaccttccagaagtgggcagctgtggtggtgccttctggagaagagcagagatacacgtgccatgtgcagcacgaggggctgccagagcccctcaccctgagatgggagccatcttcccagcccaccatccccatcgtgggcatcgttgctggcctggctgtcctggctgtcctagctgtcctaggagctgtgatggctgttgtgatgtgtaggaggaagagctcagggcattttcttcccacaggtggaaaaggagggagctgctctcaggctgcgtccagcaacagtgcccagggctctgatgagtctctcatcgcttgtaaagcctgagacagctgcctgtgtgggactgagatgcaggatttcttcacacctctcctttgtgacttcaagagcctctggcatctctttctgcaaaggcatctgaatgtgtctgcgttcctgttagcataatgtgaggaggtggagagacagcccacccccgtgtccaccgtgacccctgtccccacactgacctgtgttccctccccgatcatctttcctgttccagagaagtgggctggatgtctccatctctgtctcaactttacgtgtactgagctgcaacttcttacttccctactgaaaataagaatctgaatataaatttgttttctcaaatatttgctatgagaggttgatggattaattaaataagtcaattcctggaagttgagagagcaaataaagacctgagaaccttccagaa

SEQ ID NO: 85746 - DNA, 1447 bp, Artificial Sequence
  derived and/or modified sequence
attctccccagacgccgagatgcgggtcatggcgccccgaaccctcatcctgctgctctcgggagccctggccctgaccgagacctgggcctgctcccactccatgaggtatttctacaccgccgtgtcccggcccggccgcggagagccccgcttcatcgcagtgggctacgtggacgacacgcagttcgtgcagttcgacagcgacgccgcgagtccaagaggggagccgcgggcgccgtgggtggagcaggaggggccggagtattgggaccgggagacacagaagtacaagcgccaggcacagactgaccgagtgaacctgcggaaactgcgcggctactacaaccagagcgaggccgggtctcacaccctccagaggatgtatggctgcgacctggggcccgacgggcgcctcctccgcgggtataaccagttcgcctacgacggcaaggattacatcgccctgaatgaggacctgcgctcctggaccgccgcggacaaggcggctcagatcacccagcgcaagtgggaggcggcccgtgaggcggagcagcggagagcctacctggagggcacgtgcgtggagtggctccgcagatacctggagaacgggaagaagacgctgcagcgcgcggaacacccaaagacacacgtgacccaccatcccgtctctgaccatgaggccaccctgaggtgctgggccctgggcttctaccctgcggagatcacactgacctggcagcgggatggcgaggaccaaactcaggacaccgagcttgtggagaccaggccagcaggagatggaaccttccagaagtgggcagctgtggtggtgccttctggagaagagcagagatacacgtgccatgtgcagcacgaggggctgccagagcccctcaccctgagatgggggccatcttcccagcccaccatccccatcgtgggcatcgttgctggcctggctgtcctggctgtcctagctgtcctaggagctgtgatggctgttgtgatgtgtaggaggaagagctcagctgcctgtgtgggactgagatgcaggatttcttcacacctttcctttgtgacttcaagagcctctggcatctctttctgcaaaggcatctgaatgtgtctgcgttcctgttagcataatgtgaggaggtggagagacagcccacccccgtgtccaccgtgacccctgtccccacactgacctgtgttccctccccgatcatctttcctgttccagagaagtgggctggatgtctccatctctgtctcaactttacgtgtactgagctgcaacttcttacttccctactgaaaataagaatctgaatataaatttgttttctcaaatatttgctatgagaggttgatggattaattaaataagtcaattcctggaagttgagagagcaaataaagacctgagaaccttccagaa

SEQ ID NO: 85747 - DNA, 966 bp, Artificial Sequence
  derived and/or modified sequence
agatgcgggtcatggcgccccgaaccctcatcctgctgctctcgggagccctggccctgaccgagacctgggcctgctcccactccatgaggtatttctacaccgccgtgtcccggcccggccgcggagagccccgcttcatcgcagtgggctacgtggacgacacgcagttcgtgcagttcgacagcgacgccgcgagtccaagaggggagccgcgggcgccgtgggtggagcaggaggggccggagtattgggaccgggagacacagaagtacaagcgccaggcacagactgaccgagtgaacctgcggaaactgcgcggctactacaaccagagcgaggccgggtctcacaccctccagaggatgtatggctgcgacctggggcccgacgggcgcctcctccgcgggtataaccagttcgcctacgacggcaaggattacatcgccctgaatgaggacctgcgctcctggaccgccgcggacaaggcggctcagatcacccagcgcaagtgggaggcggcccgtgaggcggagcagcggagagcctacctggagggcacgtgcgtggagtggctccgcagatacctggagaacgggaagaagacgctgcagcgcgcgggtcaggaccagaagtcgctgttcctccctcagagactagaactttccaatgaataggagattatcccagaacacccaaagacacacgtgacccaccatcccgtctctgaccatgaggccaccctgaggtgctgggccctgggcttctaccctgcggagatcacactgacctggcagcgggatggcgaggaccaaactcaggacaccgagcttgtggagaccaggccagcaggagatggaaccttccagaagtgggcagctgtggtggtgccttctggagaagagcagagatacacgtgccatgtgcagcacgaggggctgccagagcccctcaccctgagatggg

SEQ ID NO: 85748 - DNA, 966 bp, Artificial Sequence
  derived and/or modified sequence
agatgcgggtcatggcgccccgagccctcctcctgctgctctcgggaggcctggccctgaccgagacctgggcctgctcccactccatgaggtatttcgacaccgccgtgtcccggcccggccgcggagagccccgcttcatctcagtgggctacgtggacgacacgcagttcgtgcggttcgacagcgacgccgcgagtccgagaggggagccgcgggcgccgtgggtggagcaggaggggccggagtattgggaccgggagacacagaactacaagcgccaggcacaggctgaccgagtgagcctgcggaacctgcgcggctactacaaccagagcgaggacgggtctcacaccctccagaggatgtatggctgcgacctggggcccgacgggcgcctcctccgcgggtatgaccagtccgcctacgacggcaaggattacatcgccctgaacgaggacctgcgctcctggaccgccgcggacaccgcggctcagatcacccagcgcaagttggaggcggcccgtgcggcggagcagctgagagcctacctggagggcacgtgcgtggagtggctccgcagatacctggagaacgggaaggagacgctgcagcgcgcaggtcaggaccagaagtcgctgttcctccctcagagactagaactttccaatgaataggagattatcccagaacccccaaagacacacgtgacccaccaccccctctctgaccatgaggccaccctgaggtgctgggccctgggcttctaccctgcggagatcacactgacctggcagcgggatggggaggaccagacccaggacaccgagcttgtggagaccaggccagcaggagatggaaccttccagaagtgggcagctgtggtggtgccttctggacaagagcagagatacacgtgccatatgcagcacgaggggctgcaagagcccctcaccctgagctggg

SEQ ID NO: 85749 - DNA, 1536 bp, Artificial Sequence
  derived and/or modified sequence
cccacccggactcggattctccccagacgccgagatgcgggtcatggcgccccgaaccctcatcctgctgctctcgggagccctggccctgaccgagacctgggcctgctcccactccatgaggtatttctacaccgccgtgtcccggcccggccgcggagagccccgcttcatcgcagtgggctacgtggacgacacgcagttcgtgcagttcgacagcgacgccgcgagtccaagaggggagccgcgggcgccgtgggtggagcaggaggggccggagtattgggaccgggagacacagaagtacaagcgccaggcacagactgaccgagtgaacctgcggaaactgcgcggctactacaaccagagcgaggccgaggatgtatggctgcgacctggggcccgacgggcgcctcctccgcgggtataaccagttcgcctacgacggcaaggattacatcgccctgaatgaggacctgcgctcctggaccgccgcggacaaggcggctcagatcacccagcgcaagtgggaggcggcccgtgaggcggagcagcggagagcctacctggagggcacgtgcgtggagtggctccgcagatacctggagaacgggaagaagacgctgcagcgcgcggaacacccaaagacacacgtgacccaccatcccgtctctgaccatgaggccaccctgaggtgctgggccctgggcttctaccctgcggagatcacactgacctggcagcgggatggcgaggaccaaactcaggacaccgagcttgtggagaccaggccagcaggagatggaaccttccagaagtgggcagctgtggtggtgccttctggagaagagcagagatacacgtgccatgtgcagcacgaggggctgccagagcccctcaccctgagatgggggccatcttcccagcccaccatccccatcgtgggcatcgttgctggcctggctgtcctggctgtcctagctgtcctaggagctgtgatggctgttgtgatgtgtaggaggaagagctcaggtggaaaaggagggagctgctctcaggctgcgtccagcaacagtgcccagggctctgatgagtctctcatcgcttgtaaagcctgagacagctgcctgtgtgggactgagatgcaggatttcttcacacctttcctttgtgacttcaagagcctctggcatctctttctgcaaaggcatctgaatgtgtctgcgttcctgttagcataatgtgaggaggtggagagacagcccacccccgtgtccaccgtgacccctgtccccacactgacctgtgttccctccccgatcatctttcctgttccagagaagtgggctggatgtctccatctctgtctcaactttacgtgtactgagctgcaacttcttacttccctactgaaaataagaatctgaatataaatttgttttctcaaatatttgctatgagaggttgatggattaattaaataagtcaattcctggaagttgagagagcaaataaagacctgagaaccttccagaa

SEQ ID NO: 85750 - DNA, 1538 bp, Artificial Sequence
  derived and/or modified sequence
cccacccggactcacattctccccagaggccgagatgcgggtcatggcgccccgagccctcctcctgctgctctcgggaggcctggccctgaccgagacctgggcctgctcccactccatgaggtatttcgacaccgccgtgtcccggcccggccgcggagagccccgcttcatctcagtgggctacgtggacgacacgcagttcgtgcggttcgacagcgacgccgcgagtccgagaggggagccgcgggcgccgtgggtggagcaggaggggccggagtattgggaccgggagacacagaactacaagcgccaggcacaggctgaccgagtgagcctgcggaacctgcgcggctactacaaccagagcgaggacgaggatgtatggctgcgacctggggcccgacgggcgcctcctccgcgggtatgaccagtccgcctacgacggcaaggattacatcgccctgaacgaggacctgcgctcctggaccgccgcggacaccgcggctcagatcacccagcgcaagttggaggcggcccgtgcggcggagcagctgagagcctacctggagggcacgtgcgtggagtggctccgcagatacctggagaacgggaaggagacgctgcagcgcgcagaacccccaaagacacacgtgacccaccaccccctctctgaccatgaggccaccctgaggtgctgggccctgggcttctaccctgcggagatcacactgacctggcagcgggatggggaggaccagacccaggacaccgagcttgtggagaccaggccagcaggagatggaaccttccagaagtgggcagctgtggtggtgccttctggacaagagcagagatacacgtgccatatgcagcacgaggggctgcaagagcccctcaccctgagctgggagccatcttcccagcccaccatccccatcatgggcatcgttgctggcctggctgtcctggttgtcctagctgtccttggagctgtggtcaccgctatgatgtgtaggaggaagagctcaggtggaaaaggagggagctgctctcaggctgcgtgcagcaacagtgcccagggctctgatgagtctctcatcacttgtaaagcctgagacagctgcctgtgtgggactgagatgcaggatttcttcacacctctcctttgtgacttcaagagcctctggcatctctttctgcaaaggcgtctgaatgtgtctgcgttcctgttagcataatgtgaggaggtggagagacagcccacccccgtgtccaccgtgacccctgtccccacactgacctgtgttccctccccgatcatctttcctgttccagagaggtggggctggatgtctccatctctgtctcaaattcatggtgcactgagctgcaacttcttacttccctaatgaagttaagaacctgaatataaatttgtgttctcaaatatttgctatgaagcgttgatggattaattaaataagtcaattcctagaagttgagagagcaaataaagacctgagaaccttccagaa

SEQ ID NO: 85751 - DNA, 1536 bp, Artificial Sequence
  derived and/or modified sequence
cccacccggactcggattctccccagacgccgagatgcgggtcatggcgccccgaaccctcatcctgctgctctcgggagccctggccctgaccgagacctgggcctgctcccactccatgaggtatttcgacaccgccgtgtcccggcccggccgcggagagccccgcttcatctcagtgggctacgtggacgacacgcagttcgtgcggttcgacagcgacgccgcgagtccgagaggggagccccgggcgccgtgggtggagcaggaggggccggagtattgggaccgggagacacagaagtacaagcgccaggcacaggctgaccgagtgaacctgcggaaactgcgcggctactacaaccagagcgaggacgtggatgtatggctgcgacctggggcccgacgggcgcctcctccgcgggtatgaccagtccgcctacgacggcaaggattacatcgccctgaacgaggacctgcgctcctggaccgccgcggacacggcggctcagatcacccagcgcaagtgggaggcggcccgtgaggcggagcagtggagagcctacctggagggcacgtgcgtggagtggctccgcagatacctggagaacgggaaggagacgctgcagcgcgcggaacacccaaagacacacgtgacccaccatcccgtctctgaccatgaggccaccctgaggtgctgggccctgggcttctaccctgcggagatcacactgacctggcagcgggatggcgaggaccaaactcaggacaccgagcttgtggagaccaggccagcaggagatggaaccttccagaagtgggcagctgtggtggtgccttctggagaagagcagagatacacgtgccatgtgcagcacgaggggctgccagagcccctcaccctgagatgggagccatcttcccagcccaccatccccatcgtgggcatcgttgctggcctggctgtcctggctgtcctagctgtcctaggagctgtgatggctgttgtgatgtgtaggaggaagagctcaggtggaaaaggagggagctgctctcaggctgcgtccagcaacagtgcccagggctctgatgagtctctcatcgcttgtaaagcctgagacagctgcctgtgtgggactgagatgcaggatttcttcacacctctcctttgtgacttcaagagcctctggcatctctttctgcaaaggcatctgaatgtgtctgcgttcctgttagcataatgtgaggaggtggagagacagcccacccccgtgtccaccgtgacccctgtccccacactgacctgtgttccctccccgatcatctttcctgttccagagaagtgggctggatgtctccatctctgtctcaactttacgtgtactgagctgcaacttcttacttccctactgaaaataagaatctgaatataaatttgttttctcaaatatttgctatgagaggttgatggattaattaaataagtcaattcctggaagttgagagagcaaataaagacctgagaaccttccagaa

SEQ ID NO: 85752 - DNA, 1536 bp, Artificial Sequence
  derived and/or modified sequence
cccacccggactcggattctccccagacgccgagatgcgggtcatggcgccccgaaccctcatcctgctgctctcgggagccctggccctgaccgagacctgggcctgctcccactccatgaggtatttctacaccgccgtgtcccggcccggccgcggagagccccgcttcatcgcagtgggctacgtggacgacacgcagttcgtgcggttcgacagcgacgccgcgagtccaagaggggagccgcgggcgccgtgggtggagcaggaggggccggagtattgggaccgggagacacagaagtacaagcgccaggcacagactgaccgagtgagcctgcggaacctgcgcggctactacaaccagagcgaggccgtggatgtatggctgcgacctggggcccgacgggcgcctcctccgcgggtatgaccagtccgcctacgacggcaaggattacatcgccctgaacgaggacctgcgctcctggaccgccgcggacacggcggctcagatcacccagcgcaagtgggaggcggcccgtgcggcggagcagcagagagcctacctggagggcacgtgcgtggagtggctccgcagatacctggagaacgggaaggagacgctgcagcgcgcggaacacccaaagacacacgtgacccaccatctcgtctctgaccatgaggccaccctgaggtgctgggccctgggcttctaccctgcggagatcacactgacctggcagcgggatggcgaggaccaaactcaggacaccgagcttgtggagaccaggccagcaggagatggaaccttccagaagtgggcagctgtggtggtgccttctggagaagagcagagatacacgtgccatgtgcagcacgaggggctgccggagcccctcaccctgagatgggagccatcttcccagcccaccatccccatcgtgggcatcgttgctggcctggctgtcctggctgtcctagctgtcctaggagctgtggtggctgttgttatgtgtaggaggaagagctcaggtggaaaaggagggagctgctctcaggctgcgtccagcaacagtgcccagggctctgatgagtctctcatcgcttgtaaagcctgagacagctgcctgtgtgggactgagatgcaggatttcttcacacctctcctttgtgacttcaagagcctctggcatctctttctgcaaaggcatctgaatgcgtctgcgttcctgttagcataatgtgaggaggtggagagacagcccacccccgtgtccaccgtgacccctgtccccacactgacctgtgttccctccccgatcatctttcctgttccagagaagtgggctggatgtctccatctctgtctcaactttacgtgtactgagctgcaacttcttacttccctactgaaaataagaatctgaatataaatttgttttctcaaatatttgctatgagaggttgatggattaattaaataagtcaatccctggaagttgagagagcaaataaagacctgagaaccttccagaa

SEQ ID NO: 85753 - DNA, 1630 bp, Artificial Sequence
  derived and/or modified sequence
atgcgggtcatggcgccccgagccctcctcctgctgctctcgggaggcctggccctgaccgagacctgggcctgtgagtgcggggttgggagggaagcggcctctgcggagaggagcgaggggccccccggggagccgcgcagggaggtgggtcgggcgggtctcagcccctcctcgcccccaggctcccactccatgaggtatttcgacaccgccgtgtcccggcccggccgcggagagccccgcttcatctcagtgggctacgtggacgacacgcagttcgtgcggttcgacagcgacgccgcgagtccgagaggggagccgcgggcgccgtgggtggagcaggaggggccggagtattgggaccgggagacacagaactacaagcgccaggcacaggctgaccgagtgagcctgcggaacctgcgcggctactacaaccagagcgaggacgggtctcacaccctccagaggatgtatggctgcgacctggggcccgacgggcgcctcctccgcgggtatgaccagtccgcctacgacggcaaggattacatcgccctgaacgaggacctgcgctcctggaccgccgcggacaccgcggctcagatcacccagcgcaagttggaggcggcccgtgcggcggagcagctgagagcctacctggagggcacgtgcgtggagtggctccgcagatacctggagaacgggaaggagacgctgcagcgcgcagaacccccaaagacacacgtgacccaccaccccctctctgaccatgaggccaccctgaggtgctgggccctgggcttctaccctgcggagatcacactgacctggcagcgggatggggaggaccagacccaggacaccgagcttgtggagaccaggccagcaggagatggaaccttccagaagtgggcagctgtggtggtgccttctggacaagagcagagatacacgtgccatatgcagcacgaggggctgcaagagcccctcaccctgagctgggagccatcttcccagcccaccatccccatcatgggcatcgttgctggcctggctgtcctggttgtcctagctgtccttggagctgtggtcaccgctatgatgtgtaggaggaagagctcaggtggaaaaggagggagctgctctcaggctgcgtgcagcaacagtgcccagggctctgatgagtctctcatcacttgtaaagcctgagacagctgcctgtgtgggactgagatgcaggatttcttcacacctctcctttgtgacttcaagagcctctggcatctctttctgcaaaggcgtctgaatgtgtctgcgttcctgttagcataatgtgaggaggtggagagacagcccacccccgtgtccaccgtgacccctgtccccacactgacctgtgttccctccccgatcatctttcctgttccagagaggtggggctggatgtctccatctctgtctcaaattcatggtgcactgagctgcaacttcttacttccctaatgaagttaagaacctgaatataaatttgtgttctcaaatatttgctatgaagcgttgatggattaattaaataagtcaattcctagaagttgagagagcaaataaagacctgagaaccttccag

SEQ ID NO: 85754 - DNA, 1400 bp, Artificial Sequence
  derived and/or modified sequence
ccgagatgcgggtcatggcgccccgaaccctcatcctgctgctctcgggagccctggccctgaccgagacctgggcctgctcccactccatgaggtatttctacaccgccgtgtcccggcccggccgcggagagccccgcttcatcgcagtgggctacgtggacgacacgcagttcgtgcggttcgacagcgacgccgcgagtccaagaggggagccgcgggcgccgtgggtggagcaggaggggccggagtattgggaccgggagacacagaagtacaagcgccaggcacagactgaccgagtgagcctgcggaacctgcgcggctactacaaccagagcgaggccgggtctcacaccctccagtggatgtatggctgcgacctggggcccgacgggcgcctcctccgcgggtatgaccagtccgcctacgacggcaaggattacatcgccctgaacgaggacctgcgctcctggaccgccgcggacacggcggctcagatcacccagcgcaagtgggaggcggcccgtgcggcggagcagcagagagcctacctggagggcacgtgcgtggagtggctccgcagatacctggagaacgggaaggagacgctgcagcgcgcggaacacccaaagacacacgtgacccaccatctcgtctctgaccatgaggccaccctgaggtgctgggccctgggcttctaccctgcggagatcacactgacctggcagcgggatggcgaggaccaaactcaggacaccgagcttgtggagaccaggccagcaggagatggaaccttccagaagtgggcagctgtggtggtgccttctggagaagagcagagatacacgtgccatgtgcagcacgaggggctgccggagcccctcaccctgagatggggtggaaaaggagggagctgctctcaggctgcgtccagcaacagtgcccagggctctgatgagtctctcatcgcttgtaaagcctgagacagctgcctgtgtgggactgagatgcaggatttcttcacacctctcctttgtgacttcaagagcctctggcatctctttctgcaaaggcatctgaatgcgtctgcgttcctgttagcataatgtgaggaggtggagagacagcccacccccgtgtccaccgtgacccctgtccccacactgacctgtgttccctccccgatcatctttcctgttccagagaagtgggctggatgtctccatctctgtctcaactttacgtgtactgagctgcaacttcttacttccctactgaaaataagaatctgaatataaatttgttttctcaaatatttgctatgagaggttgatggattaattaaataagtcaatccctggaagttgagagagcaaataaagacctgagaaccttcc

SEQ ID NO: 85755 - DNA, 1586 bp, Artificial Sequence
  derived and/or modified sequence
tccgcagtcccggttctaaagtccccagtcacccacccggactcacattctccccagaggccgagatgcgggtcatggcgccccgagccctcctcctgctgctctcgggaggcctggccctgaccgagacctgggcctgctcccactccatgaggtatttcgacaccgccgtgtcccggcccggccgcggagagccccgcttcatctcagtgggctacgtggacgacacgcagttcgtgcggttcgacagcgacgccgcgagtccgagaggggagccgcgggcgccgtgggtggagcaggaggggccggagtattgggaccgggagacacagaactacaagcgccaggcacaggctgaccgagtgagcctgcggaacctgcgcggctactacaaccagagcgaggacgggtctcacaccctccagaggatgtatggctgcgacctggggcccgacgggcgcctcctccgcgggtatgaccagtccgcctacgacggcaaggattacatcgccctgaacgaggacctgcgctcctggaccgccgcggacaccgcggctcagatcacccagcgcaagttggaggcggcccgtgcggcggagcagctgagagcctacctggagggcacgtgcgtggagtggctccgcagatacctggagaacgggaaggagacgctgcagcgcgcagaacccccaaagacacacgtgacccaccaccccctctctgaccatgaggccaccctgaggtgctgggccctgggcttctaccctgcggagatcacactgacctggcagcgggatggggaggaccagacccaggacaccgagcttgtggagaccaggccagcaggagatggaaccttccagaagtgggcagctgtggtggtgccttctggacaagagcagagatacacgtgccatatgcagcacgaggggctgcaagagcccctcaccctgagctgggagccatcttcccagcccaccatccccatcatgggcatcgttgctggcctggctgtcctggttgtcctagctgtccttggagctgtggtcaccgctatgatgtgtaggaggaagagctcaggtggaaaaggagggagctgctctcaggctgcgtgcagcaacagtgcccagggctctgatgagtctctcatcacttgtaaagcctgagacagctgcctgtgtgggactgagatgcaggatttcttcacacctctcctttgtgacttcaagagcctctggcatctctttctgcaaaggcgtctgaatgtgtctgcgttcctgttagcataatgtgaggaggtggagagacagcccacccccgtgtccaccgtgacccctgtccccacactgacctgtgttccctccccgatcatctttcctgttccagagaggtggggctggatgtctccatctctgtctcaaattcatggtgcactgagctgcaacttcttacttccctaatgaagttaagaacctgaatataaatttgtgttctcaaatatttgctatgaagcgttgatggattaattaaataagtcaattcctagaagttgagagagcaaataaagacctgagaaccttccagaa

SEQ ID NO: 85756 - protein, 410 aa, Artificial Sequence
  derived and/or modified sequence
MPRERRERDAKERDTMKEDGGAEFSARSRKRKANVTVFLQDPDEEMAKIDRTARDQCGSQPWDNNAVCADPCSLIPTPDKEDDDRVYPNSTCKPRIIAPSRGSPLPVLSWANREEVWKIMLNKEKTYLRDQHFLEQHPLLQPKMRAILLDWLMEVCEVYKLHRETFYLAQDFFDRYMATQENVVKTLLQLIGISSLFIAAKLEEIYPPKLHQFAYVTDGACSGDEILTMELMIMKALKWRLSPLTIVSWLNVYMQVAYLNDLHEVLLPQYPQQIFIQIAELLDLCVLDVDCLEFPYGILAASALYHFSSSELMQKVSGYQWCDIENCVKWMVPFAMVIRETGSSKLKHFRGVADEDAHNIQTHRDSLDLLDKARAKKAMLSEQNRASPLPSGLLTPPQSGKKQSSGPEMA

SEQ ID NO: 85757 - protein, 367 aa, Artificial Sequence
  derived and/or modified sequence
MPRERRERDAKERDTMKEDGGAEFSARSRKRKANVTVFLQDPDEEMAKIDRTARDQCGSQPWDNNAVCADPCSLIPTPDKEDDDRVYPNSTCKPRIIAPSRGSPLPVLSWANREEVWKIMLNKEKTYLRDQHFLEQHPLLQPKMRAILLDWLMEVSLSLPEIYPPKLHQFAYVTDGACSGDEILTMELMIMKALKWRLSPLTIVSWLNVYMQVAYLNDLHEVLLPQYPQQIFIQIAELLDLCVLDVDCLEFPYGILAASALYHFSSSELMQKVSGYQWCDIENCVKWMVPFAMVIRETGSSKLKHFRGVADEDAHNIQTHRDSLDLLDKARAKKAMLSEQNRASPLPSGLLTPPQSGKKQSSGPEMA

SEQ ID NO: 85758 - protein, 395 aa, Artificial Sequence
  derived and/or modified sequence
MKEDGGAEFSARSRKRKANVTVFLQDPDEEMAKIDRTARDQCGSQPWDNNAVCADPCSLIPTPDKEDDDRVYPNSTCKPRIIAPSRGSPLPVLSWANREEVWKIMLNKEKTYLRDQHFLEQHPLLQPKMRAILLDWLMEVCEVYKLHRETFYLAQDFFDRYMATQENVVKTLLQLIGISSLFIAAKLEEIYPPKLHQFAYVTDGACSGDEILTMELMIMKALKWRLSPLTIVSWLNVYMQVAYLNDLHEVLLPQYPQQIFIQIAELLDLCVLDVDCLEFPYGILAASALYHFSSSELMQKVSGYQWCDIENCVKWMVPFAMVIRETGSSKLKHFRGVADEDAHNIQTHRDSLDLLDKARAKKAMLSEQNRASPLPSGLLTPPQSGKKQSSGPEMA

SEQ ID NO: 85759 - protein, 334 aa, Artificial Sequence
  derived and/or modified sequence
MPLQQQAKRRLELGESGHQYLSDGLKTPKGKGRAALRSPDSPKKKTRYDTSLGLLTKKFIQLLSQSPDGVLDLNKAAEVLKVQKRRIYDITNVLEGIHLIKKKSKNNVQWMGCSLSEDGGMLAQCQGLSKEVTELSQEEKKLDELIQSCTLDLKLLTEDSENQRLAYVTYQDIRKISGLKDQTVIVVKAPPETRLEVPDSIESLQIHLASTQGPIEVYLCPEETETHSPMKTNNQDHNGNIPKPASKDLASTNSGHSDCSVSMGNLSPLASPANLLQQTEDQIPSNLEGPFVNLLPPLLQEDYLLSLGEEEGISDLFDAYDLEKLPLVEDFMCS

SEQ ID NO: 85760 - DNA, 1005 bp, Artificial Sequence
  derived and/or modified sequence
atgccactacagcagcaggctaaacgccgccttgagctgggagagtcaggtcaccaatatctgtccgacgggctaaagacgccaaaagggaagggccgcgccgccctgaggtccccggatagccctaaaaagaaaacaaggtacgatacttccctgggcttactcaccaagaagttcattcagctgctgtcccagagtcctgatggtgtcctggacttaaacaaagccgccgaagttctcaaggtacaaaaacggagaatctatgacattacaaatgtcctggagggtatccacctaatcaagaagaagtcaaagaacaacgtgcagtggatgggctgtagtctgtcagaagacggaggaatgcttgctcagtgtcaggggttgagtaaggaagtaacagaactgtcacaggaggaaaaaaaactggacgaactcatccaatcctgcactcttgatctaaagctgctgaccgaggattctgagaaccagcggctggcttatgtgacataccaggacatacgcaagatttccggattaaaggatcagaccgttatagtcgtgaaggcccctccggagacccgactggaggttccagactccatcgagtccctccaaatccatctggcttctacacaggggcccatcgaggtttatttatgtccagaagagacggagacacattcaccaatgaagaccaataaccaggaccataacggcaatattcctaagcccgcaagcaaagatctggccagcaccaacagtggacattccgactgcagtgtcagcatgggaaacctgtcgcctttggcatctcccgcgaacttgttgcagcagacagaagaccagataccctcaaatttggagggccctttcgtgaaccttctaccacctcttctccaagaggactacctcttgagtttaggagaggaagagggcatctccgacctgttcgatgcgtatgaccttgagaagctccccttggtagaagattttatgtgctcttag

SEQ ID NO: 85761 - DNA, 1005 bp, Artificial Sequence
  derived and/or modified sequence
atgcccctgcagcagcaggccaagaggcggctggagctgggggagagcggccaccagtacctgagtgatggcctgaagacccccaagggcaagggccgggccgccctgcggagcccagacagccccaagaagaagaccaggtatgacaccagcctgggcctgctgaccaagaagttcatccagctgctgagccagagcccagatggagtgctggacctgaacaaggctgctgaggtgctgaaggtgcagaagaggcgcatctatgacatcaccaacgtgctggagggcatccacctgatcaagaagaagagcaagaacaacgtgcagtggatgggctgcagcctgtctgaagatggcggcatgctggcccagtgccagggcctgagcaaggaggtgacagagctgagccaggaggagaagaagctggatgagctgatccagagctgcaccctggacctgaagctgctgacagaggacagcgagaaccagaggctggcctacgtgacctaccaggacatcaggaagatcagcggcctgaaggaccagacagtgattgtggtgaaggcccctcctgagacccggctggaggtgcctgacagcattgagagcctgcagatccacctggccagcacccagggccccatcgaggtgtacctgtgcccagaggagacagagacccacagccccatgaagaccaacaaccaggaccacaacggcaacatccccaagccagccagcaaggacctggccagcaccaacagcggccacagcgactgcagcgtgtccatgggcaacctgagccccctggccagccctgccaacctgctgcagcagacagaggaccagatccccagcaacctggagggcccctttgtgaacctgctgccccccctgctgcaggaggactacctgctgagcctgggggaggaggagggcatcagtgacctgtttgatgcctatgacctggagaagctgcccctggtggaggacttcatgtgcagctag

SEQ ID NO: 85762 - DNA, 1005 bp, Artificial Sequence
  derived and/or modified sequence
atgcccctgcagcagcaggccaagcggcggctggagctgggcgagagtggacaccaatacttgtcagatggcttgaagacacccaagggcaagggaagggcagcactgcgttcacctgactccccgaaaaagaagacacgatatgatacttccctaggcttactaacgaagaagtttattcagctactttcccagtcacccgatggcgtgctcgacctgaacaaagctgctgaggtgctgaaagtccagaaaagacggatctatgacattaccaatgtcctggagggcattcatctgatcaagaaaaagtccaagaataacgtgcaatggatgggatgttccttaagtgaagacggagggatgcttgctcagtgccaaggcctaagcaaggaggtcaccgaactctctcaggaagagaaaaaactggacgaactgattcagagttgtaccctggacctgaaactcctgaccgaagacagcgagaaccagcggctggcgtatgtgacctaccaggacattcgcaagattagcggcctgaaggaccagaccgtgatagtggtgaaggcgccacctgagacgagactggaggtgccagatagcatcgagagcctccaaattcacctagctagcacccagggacccatcgaagtctatctgtgccctgaagagaccgaaacacattctcccatgaagactaacaaccaagaccacaacggaaacattcctaaacctgcgtcaaaagacttagcgtccacaaattccggccattcagactgcagcgtttctatgggtaatctttcaccgctggcctcccctgccaacttgttgcagcaaaccgaggatcagataccttctaacctagagggtccatttgtcaacctcttgccgcctctccttcaagaagattacctgctcagcctaggcgaagaggaagggatcagtgacctgttcgacgcctacgatctggagaaattacctctggtggaggacttcatgtgcagctag

SEQ ID NO: 85763 - DNA, 1005 bp, Artificial Sequence
  derived and/or modified sequence
atgccactgcagcagcaggctaaaaggcggctagagttaggggagagcggccaccagtatttgtcagatgggctcaagacccctaaaggtaaggggagggccgcactgcgctcccctgatagccctaagaagaaaacccgctacgataccagcctcgggctgctgactaaaaaatttatccagctgctgtcccagagcccagacggggtactcgatttaaacaaggctgccgaggtgcttaaggtacagaaaaggcggatctacgacattaccaatgtactggagggaatccacctgataaagaaaaaatctaagaataatgtccagtggatggggtgttcgctgagcgaagacggaggcatgctggcccagtgccaagggctgagcaaggaggtaaccgagctcagtcaagaggagaaaaagctggatgagctaatccagagttgcactttagacctcaaactgctgactgaggattcagagaaccagagactggcctacgtcacatatcaggacattcggaaaatctcaggactcaaggaccaaaccgttatcgtggtcaaggcccctcccgaaacccgattggaagttcccgattcaatcgagagcctgcaaattcacctggcatcaactcaggggcctattgaggtttacttgtgccctgaggagactgagactcattctcccatgaagaccaacaatcaagaccataatgggaacatacctaagcctgcttctaaggatcttgcttctacaaattcaggccacagtgactgttcagtctctatgggcaacctgagccctctggccagtcccgcaaatcttctccagcagaccgaagaccaaatcccgagcaatttggaaggacctttcgtgaacctcctgcctcctttacttcaagaggactatctcttgtccctgggcgaggaagaaggtatctccgatctttttgacgcgtatgatctggagaagctacctctggtggaagactttatgtgctcctag

SEQ ID NO: 85764 - DNA, 1005 bp, Artificial Sequence
  derived and/or modified sequence
atgcccctgcagcagcaggccaagagaagactggagctgggcgagagcggccaccagtacctgagcgacggcctgaagacccccaagggcaagggcagagccgccctgagaagccccgacagccccaagaagaagaccagatacgacaccagcctgggcctgctgaccaagaagttcatccagctgctgagccagagccccgacggcgtgctggacctgaacaaggccgccgaggtgctgaaggtgcagaagagaagaatctacgacatcaccaacgtgctggagggcatccacctgatcaagaagaagagcaagaacaacgtgcagtggatgggctgcagcctgagcgaggacggcggcatgctggcccagtgccagggcctgagcaaggaggtgaccgagctgagccaggaggagaagaagctggacgagctgatccagagctgcaccctggacctgaagctgctgaccgaggacagcgagaaccagagactggcctacgtgacctaccaggacatcagaaagatcagcggcctgaaggaccagaccgtgatcgtggtgaaggccccccccgagaccagactggaggtgcccgacagcatcgagagcctgcagatccacctggccagcacccagggccccatcgaggtgtacctgtgccccgaggagaccgagacccacagccccatgaagaccaacaaccaggaccacaacggcaacatccccaagcccgccagcaaggacctggccagcaccaacagcggccacagcgactgcagcgtgagcatgggcaacctgagccccctggccagccccgccaacctgctgcagcagaccgaggaccagatccccagcaacctggagggccccttcgtgaacctgctgccccccctgctgcaggaggactacctgctgagcctgggcgaggaggagggcatcagcgacctgttcgacgcctacgacctggagaagctgcccctggtggaggacttcatgtgcagctag

SEQ ID NO: 85765 - DNA, 4145 bp, Artificial Sequence
  derived and/or modified sequence
ctggtttcggaaatgcccttacagcagcaggcaaagcgaaggctggagctaggagaaagcggtcatcagtacctctcagatggtttaaaaacccccaagggcaaaggaagagctgcactacgaagtccagatagtccaaaaaaaaaaacgcggtatgatacgtctcttggtctgctcaccaagaagttcattcagctcctgagccagtcacccgatggggtattggatttgaacaaggcagcagaagtgctaaaagtgcaaaagagaaggatttatgatatcaccaacgttctggaaggcatccacctcattaagaagaagtctaaaaacaacgtccaatggatgggctgcagtctgtctgaggatgggggcatgctggcccagtgtcaaggcctgtcaaaagaagtgaccgagctcagtcaggaagagaagaaattagatgaactgatccaaagctgcaccctggacctcaaactgttaaccgaggattcagagaatcaaaggttagcttatgttacatatcaagatattcgaaaaattagtggccttaaagaccaaactgttatagttgtgaaagcccctccagaaacaagacttgaagtgcctgactcaatagagagcctacaaatacatttggcaagtacccaagggcccattgaggtttacttatgtccagaagagactgaaacacacagtccaatgaaaacaaacaaccaagaccacaatgggaatatccctaaacccgcttccaaagacttggcttcaaccaactcaggacatagcgattgctcagtttctatgggaaacctttctcctctggcctccccagccaacctcttacagcagactgaggaccaaattccttccaacctagaaggaccgtttgtgaacttactgcctcccctgctgcaagaggactatctcctgagcctcggggaggaggaaggcatcagcgatctcttcgatgcttacgatttggaaaagctcccactggtggaagacttcatgtgtagttgattatgcttcgtgtgaactctccttaaaaaccgatatttttttatcatggaaccagaacatctgtcatgcagtgttgtcccttcctaccttcttcctccaagagagtatcatgaagtaaactacaaacttcagaagaaagctgacattttaatgaattttttaaaaaattaataaacaaattgtctaaacgcacagttgcaggctcccttgggaaagccctgctttgctccaggctccaagatctcctggctaagtcagcaagtgagaaaatgtgcaatcaggtgtctctcaccccgaattgtccttcctccttcctccccggattggcttgctgtgcctgacggatgggctgtagaatggggtctggccacctggcctgctgggaaacagcaatcttccttaatagcatttcaagccgtgccttctccgcagaatgcatgtctttgaggtctgctaatatggaatggaactgcagcaaatgcaaacttgaagtcatgcaaaagtatgaaatggatttcttcagctcttcttaggaatatttaaattactgtcataattcagtttaagctatgaactgtgtgtcccagtaggaggtcaagaaaacctccacagccttctggatgaagaacctgttttcaaatatacttgttgcagatacagaagactagtagagttctgccactctaagctgttgtggattttcctgtctccatgaaccactcccattcccccgtccccaatgtgtttgtgagtttccagttgatttgtagcaaatgcctacttagttctttgtggattgttctagacttttaatttttttagctgccatttaagcattcctgtggcacccatcaccatttcaatttaattgtttactttgaagcggtttttgcaaattcatattacttaagcagagggagagaacctctactgatcagagcatctaaacctgtgtgatctaaggtttatcagcctctgcaaggagctttgtcccatcgtgcttccattcccaggagggggagcttggagcgagtcagtcctggggcttgctgacatgggtggcccattggaaaggagaaccaggtcagatgatgtaacagccccaaggagcagcaggcatgggtccctccatccttgggcttcccgggcccctgtgacaggggaaagggctctcttacaccgcactcagggagaccacttctcaggatggggtcagatggagagacctctagggagaaagacatccccattgtgtgagtggcatttccttaagctggcaggaacagggagcagccctgtgtcgggggctggaatagttctggccagaccccgttccccttcctctatgaaggaataagttggaccaagggaagtcggggacgtaaaaaatgaagcaaaacaatgccagggtgtctcccgctttactcttcaggaatggtgtcccaagttggaggctttgtgtcagctgcaaatcctaccagttatgtccaagaatggctttccctcgggcaggtggcagcggccatctcccactgggaatatggcgtagtatctccggtccattccttggatgctaaggactgcgggaatgagggagtcagataaagaacaaacctcgaaacgaacagttaaattgaaatgctatgtgcctgacccaatggtaggcacatagtaggcactcaactcatatgtttaattgaattgaaaatatcccttaggaaaaaaaaaaaacacacaaaaaaccacaagagccccagccagtttactccaggtagatttccacaatatgcaaagtggtggtggggtcaagacagatgacaccagcactttaaactctttgtgtgggtatgcgtgggtgtatgtttgggaagaaaaacaaaggtgcagactatcttcctttttttcttcttcagcctccatccctggcctcctcccctcacacacactggacttggtacaaaatgtcggtgtggtcctagatgaagcattggggtgggggagggagagggagctttgtgttaagtgcctactggaaatgcactgtggggttttttcctgtatgggaaaccatttatgccaagcttttccccatttcccatatttatctcatctggttagctgcctctgcttccagctttgtgtaattctctttgccagctgcacaaagctgattttttccaaagtctaaagactgagctcacctggctagattgttgtgtgttttgttgaattttttcataatgtaatgccgtatttattgtttttaaaatgaaaggaatactaataagtcttaaaagttccttcatgcataagatttttttccagttactgggtttaactggtgtacattaattagatgtccatactgtattttgtttgcattaagtaattttctttttgacttagtatccggcacacaaagtgggttagtactacagtatttgcgttactttaagtactaagtatgcaggtttcctggtaccattgagttgctgctattaaagctcacacacgaaatggctaaaagttacaagtgtgcaaattatgactgcgtgagccttagaaaataaaatgtataaagggcaacacatgagctgtcaaacagtgttaggagtgtgtttatatgtacagagttgtgcatagcaatcgttttatttaagttgatatgtagtctactcacattttcattatttagcaattttgtacaaaaatagcaattaatttgtaaacactgccagaatactttctagctgctttgtaattttttaagagtgttattttgtttttgtttttctgttctttgttgtggctcttgttttcatttttgttgtacgtgtagatctgtaaataaaattgcagtatttaaagcttaagctttcaggaaaaagaaaataagaattcagtgtgtgcatgacaactcgtgtgtatgagaaggagggatatgaaggaagatggcttgcagagtaagtcgggtggcaattgtcagggtgtgggaatttcttttcctacggggtacgtgattttgtaaaaaggaagtatttctcccaaaattgggagtaggcaaactactaatcagtttagctttgtgttgtatgctagtttaaaaaagaaaatatgtaatataatgt

SEQ ID NO: 85766 - protein, 101 aa, Artificial Sequence
  derived and/or modified sequence
MLRLLLALNLFPSIQVTGKHLCPSPLFPGPSKPFWVLVVVGGVLACYSLLVTVAFIIFWVRSKRSRLLHSDYMNMTPRRPGPTRKHYQPYAPPRDFAAYRS

SEQ ID NO: 85767 - DNA, 306 bp, Artificial Sequence
  derived and/or modified sequence
atgctgcggctcctccttgcgctcaatttgttccctagtattcaggttaccggtaagcacctatgcccgagtcccctgttccccggaccgtctaagccattctgggtcctggtcgtggtcggtggagtgctggcctgttatagcctgttggtcactgtagcctttattattttttgggtcagatctaaaagatcccgtcttctccacagtgattatatgaacatgaccccaaggaggcccgggcctacccgcaagcactaccagccttacgccccacctagggattttgccgcttacaggtcctag

SEQ ID NO: 85768 - DNA, 306 bp, Artificial Sequence
  derived and/or modified sequence
atgctgcggctgctgctggccctgaacctcttccccagcatccaggtgacaggcaagcacctgtgccccagccccctcttccctggccccagcaagcccttctgggtgctggtggtggtgggcggcgtgctggcctgctacagcctgctggtgacagtggccttcatcatcttctgggtgcgcagcaagaggagccggctgctgcacagcgactacatgaacatgaccccccggcggcccggccccaccaggaagcactaccagccctatgccccaccccgggactttgctgcctaccgctcctag

SEQ ID NO: 85769 - DNA, 306 bp, Artificial Sequence
  derived and/or modified sequence
atgctgcggctgctgctggccctgaacctgttccccagcatccaggtgaccggaaaacatttatgtccctcccccttgtttccgggaccatccaaacctttctgggttttagttgtggtagggggggtgctggcatgttacagcctgcttgtcaccgtggcttttatcatcttctgggtgcggtcgaagcggtcgagactcttgcacagcgattacatgaatatgactcctagaagaccggggcccacgcgcaagcattatcaaccctacgctccgcctagagatttcgcggcctaccgcagttag

SEQ ID NO: 85770 - DNA, 306 bp, Artificial Sequence
  derived and/or modified sequence
atgctgaggttgctgctggctctgaacttattcccatcgatccaagttacaggaaaacacctctgccccagcccactgttccccggaccatcgaagccgttttgggttttggtggtggtgggtggtgtgctcgcatgctacagtttgctggtgacggtggcatttatcatattttgggtccggtctaagaggtcacgattgttgcattctgattacatgaatatgaccccacgcaggccgggtccaaccagaaagcattatcagccctacgctccgcctcgcgattttgccgcttatagatcatag

SEQ ID NO: 85771 - DNA, 653 bp, Artificial Sequence
  derived and/or modified sequence
aaagatgctcaggctgctcttggctctcaacttattcccttcaattcaagtaacagggaaacacctttgtccaagtcccctatttcccggaccttctaagcccttttgggtgctggtggtggttggtggagtcctggcttgctatagcttgctagtaacagtggcctttattattttctgggtgaggagtaagaggagcaggctcctgcacagtgactacatgaacatgactccccgccgccccgggcccacccgcaagcattaccagccctatgccccaccacgcgacttcgcagcctatcgctcctgacacggacgcctatccagaagccagccggctggcagcccccatctgctcaatatcactgctctggataggaaatgaccgccatctccagccggccacctcaggcccctgttgggccaccaatgccaatttttctcgagtgactagaccaaatatcaagatcattttgagactctgaaatgaagtaaaagagatttcctgtgacaggccaagtcttacagtgccatggcccacattccaacttaccatgtacttagtgacttgactgagaagttagggtagaaaacaaaaagggagtggattctgggagcctcttccctttctcactcacctgcacatctcagtc

SEQ ID NO: 85772 - DNA, 306 bp, Artificial Sequence
  derived and/or modified sequence
atgctgagactgctgctggccctgaacctgttccccagcatccaggtgaccggcaagcacctgtgccccagccccctgttccccggccccagcaagcccttctgggtgctggtggtggtgggcggcgtgctggcctgctacagcctgctggtgaccgtggccttcatcatcttctgggtgagaagcaagagaagcagactgctgcacagcgactacatgaacatgacccccagaagacccggccccaccagaaagcactaccagccctacgccccccccagagacttcgccgcctacagaagctag

SEQ ID NO: 85773 - protein, 336 aa, Artificial Sequence
  derived and/or modified sequence
MYTVLTGTPPFMASPLSEMYQNIREGHYPEPAHLSANARRLIVHLLAPNPAERPSLDHLLQDDFFTQGFTPDRLPAHSCHSPPIFAIPPPLGRIFRKVGQRLLTQCRPPCPFTPKEASGPGEGGPDPDSMEWDGESSLSAKEVPCLEGPIHLVAQGTLQSDLAGPEGSRRPEVEAALRHLQLCLDVGPPATQDPLGEQQPILWAPKWVDYSSKYGFGYQLLDGGRTGRHPHGPATPRREGTLPTPVPPAGPGLCLLRFLASEHALLLLFSNGMVQVSFSGVPAQLVLSGEGEGLQLTLWEQGSPGTSYSLDVPRSHGCAPTTGQHLHHALRMLQSI

SEQ ID NO: 85774 - DNA, 1011 bp, Artificial Sequence
  derived and/or modified sequence
atgtacaccgtgctgaccggcaccccccccttcatggccagccccctgagcgagatgtaccagaacatcagagagggccactaccccgagcccgcccacctgagcgccaacgccagaagactgatcgtgcacctgctggcccccaaccccgccgagagacccagcctggaccacctgctgcaggacgacttcttcacccagggcttcacccccgacagactgcccgcccacagctgccacagcccccccatcttcgccatccccccccccctgggcagaatcttcagaaaggtgggccagagactgctgacccagtgcagacccccctgccccttcacccccaaggaggccagcggccccggcgagggcggccccgaccccgacagcatggagtgggacggcgagagcagcctgagcgccaaggaggtgccctgcctggagggccccatccacctggtggcccagggcaccctgcagagcgacctggccggccccgagggcagcagaagacccgaggtggaggccgccctgagacacctgcagctgtgcctggacgtgggcccccccgccacccaggaccccctgggcgagcagcagcccatcctgtgggcccccaagtgggtggactacagcagcaagtacggcttcggctaccagctgctggacggcggcagaaccggcagacacccccacggccccgccacccccagaagagagggcaccctgcccacccccgtgccccccgccggccccggcctgtgcctgctgagattcctggccagcgagcacgccctgctgctgctgttcagcaacggcatggtgcaggtgagcttcagcggcgtgcccgcccagctggtgctgagcggcgagggcgagggcctgcagctgaccctgtgggagcagggcagccccggcaccagctacagcctggacgtgcccagaagccacggctgcgcccccaccaccggccagcacctgcaccacgccctgagaatgctgcagagcatctag

SEQ ID NO: 85775 - DNA, 1011 bp, Artificial Sequence
  derived and/or modified sequence
atgtataccgtcctcactggaacacctccattcatggcctcgcctctgtccgagatgtatcagaatatacgtgagggccactaccctgagccagcacacttatccgcaaacgcccgacgcctgatcgttcaccttctcgcccccaatccagccgagagacctagcttagatcatctgcttcaggatgacttcttcacacagggattcaccccagacagattgcccgctcattcttgccattcccctcccatctttgccatccctcccccccttggacgaatcttccggaaagtcgggcaaaggttactgacgcagtgccgtcccccctgcccctttaccccaaaggaagctagtgggcctggtgaaggaggacccgaccctgactctatggaatgggatggggagtccagcctctccgcaaaggaggtgccatgtttagaggggccaattcaccttgttgctcaggggaccttgcagagcgacctggccggcccagagggtagccgcagacctgaagtggaagcggctttgcgccatttgcagttgtgcctcgatgtgggtccccccgctacacaagatccgcttggagagcagcaaccaattctgtgggcacctaagtgggtggattattcttctaagtacgggtttgggtatcagctgcttgacggtgggcgcaccgggagacatccacatggtcctgcaacccctaggagggagggaacactgcccactcccgtccctcctgcaggccctggcttgtgtctgttgcgcttcctagccagcgagcacgctttgctgctgctcttctctaatggtatggttcaggtctccttttccggcgtgccagcgcagttggtgctatctggggagggcgaaggcctgcaactgaccctgtgggagcagggctcacccggtacatcttactccctcgatgtgcctaggtcccatggttgtgcaccaacaacggggcagcacttgcaccacgctctcagaatgctccagagtatctag

SEQ ID NO: 85776 - DNA, 1011 bp, Artificial Sequence
  derived and/or modified sequence
atgtacacagtgctgaccggcaccccacccttcatggccagccccctgtctgagatgtaccagaacatccgggagggccactacccagagcccgcccacctgagcgccaatgcccggcggctcatcgtgcacctgctggcccccaacccagctgagcggcccagcctggaccacctgctgcaggatgacttcttcacccagggcttcaccccagaccggctgcctgcccacagctgccacagcccccccatctttgccatccccccacccctgggccgcatcttcaggaaggtgggccagaggctgctgacccagtgccggcccccctgccccttcacccccaaggaggccagcggccctggagagggcggccctgaccctgacagcatggagtgggatggagagagcagcctgagcgccaaggaggtgccctgcctggagggccccatccacctggtggcccagggcaccctgcagagcgacctggccggccctgagggcagcagaagacctgaggtggaggccgccctgcggcacctgcagctgtgcctggatgtgggccccccagccacccaggaccccctgggggagcagcagcccatcctgtgggcccccaagtgggtggactacagcagcaaatatggcttcggctaccagctgctggatggcggccgcacaggccgccacccccacggccctgccaccccaagaagagagggcaccctgcccacccctgtgcccccagctggccctggcctgtgcctgctgcgcttcctggccagcgagcacgccctgctgctgctcttcagcaatggcatggtgcaggtgtccttctctggagtgcctgcccagctggtgctgagcggggagggggagggcctgcagctgaccctgtgggagcagggcagccctggcaccagctacagcctggatgtgcccaggagccacggctgtgcccccaccaccggccagcacctgcaccacgccctgaggatgctgcagagcatctag

SEQ ID NO: 85777 - DNA, 1011 bp, Artificial Sequence
  derived and/or modified sequence
atgtacaccgtgctgaccggcaccccccccttcatggccagccccctatccgagatgtaccagaacattagggagggtcattacccagaacctgctcatctatcagccaacgctcggcgccttatcgtgcacctgctggcaccgaaccccgccgaaagaccgtccctagaccacttactccaagacgacttcttcacccaagggtttaccccagatcggctcccagcccacagttgccattccccgcccatcttcgccattccacctccactcggtcgtatttttaggaaggtgggccagagactgcttacgcagtgtcggcccccttgcccattcacccctaaagaagcttccggaccgggtgaaggaggcccagatccagactccatggaatgggacggtgaatctagcctaagtgcgaaggaagtaccttgtctggaaggtcctatacatctcgtcgcacagggcactcttcaatccgatctcgccggaccagagggcagtagaaggccagaggtggaggccgcactgcgtcatctccagctctgtctggatgtaggccccccggcaacacaggatcctctgggcgaacagcaacctatcctttgggcccccaagtgggtggactatagctccaaatacggcttcggctaccagttattagatggcgggaggacagggcggcatccccacgggcctgcgaccccgagacgtgaaggtactctgccaacccccgtccctcctgccggccctggtttgtgcttactccgtttcttggcttcagaacacgctttactcctgttattctcaaatggcatggtgcaggtctccttctccggggtgcctgctcagcttgtgctctccggcgagggagaaggactacagctgactctctgggaacagggtagtccaggaacctcctacagccttgacgtgccccgctctcacggctgcgccccaaccactggacagcatctccatcacgctctgcggatgttgcaatctatttag

SEQ ID NO: 85778 - DNA, 1933 bp, Artificial Sequence
  derived and/or modified sequence
ctcagagcggccccggagcggccgcagcgcggtggtctcggcccggctgcgccagagtccgcgcgatggagccccggccgcggcggcggcgcaggagtcgccccctggtcgccgccttcctgcgagacccgggctcgggccgcgtgtacaggcgcgggaagctgatcggcaagggcgccttcagccgctgctacaagctgacagacatgtccaccagcgccgtgttcgccctcaaggtggtgccgtgtggcggggctggggccgggtggcttcgcccgcagggaaaggtggagcgtgagattgccctgcatagccgcctgcgaccccgcaacatcgtggctttccacggacactttgctgaccgcgaccacgtgtacatggtgctggagtactgcagccgccagtctttggcccacgtgctgagggcgcggcagatcctgacggagccagaagtgcgcgactacctgcggggcctggtcagcggcctgcgctacctgcaccagcggtgcatcctgcaccgcgacctgaagctcagtaacttcttccttaacaagaacatggaggtgaagattggagacctgggactggcggccaaggtggggccagggggccgctgccacagagtactctgtgggacccctaacttcctggaccctgaggttgtctccagaaacggtcactcctgccagtaggacatctgggctctgggctgcatcatgtacacggtgctgactggcaccccacccttcatggcctcacccctgtcggagatgtaccaaaacatccgtgagggccactaccccgaacccgctcacctgtctgccaatgcgcgccgcctcatcgtgcacctcctagcacccaacccggccgagcggcccagcctggaccacctgctgcaggacgacttcttcacacagggtttcactccagaccggctgccggcccactcctgccacagtccccccatcttcgccatacccccgcctctgggcaggatcttccggaaggtgggccagcggctgctcacccagtgccggccaccctgccccttcacgcctaaagaggcctcgggtccaggagaaggtgggccagaccctgactccatggagtgggacggcgagagctccctgtctgcgaaagaggttccctgcctggaaggccccatccacctggtcgcacaagggaccctgcagagtgacctggccgggcccgaggggagccggcggccagaggtggaggcggccctcagacacctgcagctgtgcctggatgtaggccccccggccacacaggaccccctgggagagcagcagcccatcctctgggcccccaaatgggtggattattccagcaaatacggctttggctaccagctcttggacggggggcgcacgggacggcacccacatggccctgcgaccccccggagggaggggaccctccccacacctgtgccacctgctggacccggcctctgcctcctgcgcttcctggcctctgagcacgccctgctgctgctgttcagcaatgggatggtgcaggtgagcttcagtggagtcccggcccaactggtgctgagtggcgagggtgagggtttgcagctcaccctctgggagcaggggtcccctggcacctcctactccctggacgtcccgcggagccacggctgcgcccccaccaccggacagcaccttcaccacgccctccgcatgctgcagagtatctagtgcccctgagggtcagagtggacccctgcatggtagtgccagggacccaggctccatttccattcctgtggctcccccagaggggctgtcctgggggagggctggggggcacacgggaggtgggttcttgccttgtggcatgactgttcaacccagactttgctgggatctcttcctttttcattaaagacaatttgaaatgctgt

SEQ ID NO: 85779 - DNA, 1011 bp, Artificial Sequence
  derived and/or modified sequence
atgtacaccgtattgacgggcacgccaccgttcatggcctctccgctctctgaaatgtaccagaacatcagggagggtcattacccggagccggcacatctcagtgctaatgcaaggcggctgattgtgcatcttctggcgcctaatcccgctgaaagacctagtttagatcatctgctccaggatgatttcttcacgcaaggtttcacgccagaccggctacctgcccacagctgtcacagtcccccaatattcgcaattcctccgcctcttgggaggatcttcaggaaggtcggccagcggttgttgactcaatgccgacctccgtgtccttttacccctaaagaagcttcaggcccaggggagggaggtcccgaccccgacagcatggagtgggatggggagtcctcactttccgcaaaggaggtgccctgcctggagggtccaatccacctcgtggcccagggtactctccagagcgatctcgctggtccagaaggttctagaagacccgaggtggaggccgctttgaggcatctgcaactttgtttggatgtaggccctccggctacacaggatcctctgggtgagcagcagccgatactgtgggccccaaagtgggtggactattcctctaaatacgggtttgggtaccagcttctggatggcggtcggacagggcgacacccacacgggccagcaacaccccgacgcgagggcaccctgccgacgcccgtacccccagccggtccaggactctgcctgctaaggtttctggctagcgagcacgcactgttattactttttagcaatgggatggtgcaagtgtcctttagcggcgtccctgcacaactggtgctgtccggagaaggtgaggggttacaattgactctttgggaacagggctcacccggtacttcctatagcctagacgtgcctcgatcacacggctgtgcaccaaccaccggccagcatctccaccacgccctgcgtatgcttcagagcatatag

SEQ ID NO: 85780 - protein, 160 aa, Artificial Sequence
  derived and/or modified sequence
MLDSVTHSTFLPNASFCDPLMSWTDLFSNEEYYPAFEHQTDADSNCLKTSGIKSQDCHSHSRTSLQSSHLWEFVRDLLLSPEENCGILEWEDREQGIFRVVKSEALAKMWGQRKKNDRMTYEKLSRALRYYYKTGILERVDRRLVYKFGKNAHGWQEDKL

SEQ ID NO: 85781 - DNA, 483 bp, Artificial Sequence
  derived and/or modified sequence
atgctggattcggttacccatagcacattcctgcccaatgccagcttttgtgaccccctgatgagctggaccgacctgttctctaacgaggagtactaccccgcgttcgaacatcagacagacgcggatagtaattgcctgaagacttcagggataaagagccaagactgccattcgcatagtagaaccagccttcagagttcccacttatgggaattcgtacgcgatctgctactcagtccggaggagaactgtggtattttggaatgggaagatagagaacaggggatcttcagggtggtgaagtccgaagcacttgctaagatgtggggccagaggaagaagaacgatagaatgacatatgagaagctttctcgagctcttaggtattactataaaactgggattttggagcgcgttgaccgtcggttggtttataagtttgggaaaaacgcccatggctggcaggaggacaagctgtag

SEQ ID NO: 85782 - DNA, 483 bp, Artificial Sequence
  derived and/or modified sequence
atgctggacagcgtgacccacagcaccttcctgcccaatgccagcttctgtgaccccctgatgtcctggacagacctcttcagcaatgaggagtactacccagcctttgagcaccagacagatgctgacagcaactgcctgaagaccagcggcatcaagagccaggactgccacagccacagcaggaccagcctgcagagcagccacctgtgggagtttgtgcgggacctgctgctgagccctgaggagaactgtggcatcctggagtgggaggaccgggagcagggcatcttccgggtggtgaagtctgaggccctggccaagatgtggggccagaggaagaagaatgacaggatgacctatgagaagctgagccgggccctgcgctactactacaagacaggcatcctggagcgggtggaccggcggctggtgtacaagtttgggaagaatgcccacggctggcaggaggacaagctgtag

SEQ ID NO: 85783 - DNA, 483 bp, Artificial Sequence
  derived and/or modified sequence
atgctggacagcgtgacccacagcaccttcctgcccaacgccagcttctgtgatcccctcatgtcatggacagacctcttctccaacgaagagtattaccccgcttttgaacatcagactgacgctgacagcaactgtctgaaaacatctggtatcaaatctcaagactgccacagccacagccgtacgtcgctgcagagcagccacctgtgggaatttgtgagagatcttttgctgagtccagaagaaaactgcgggatattggaatgggaggatcgggagcaaggaatttttcgagtagttaagagtgaggctctggctaaaatgtggggacagcgaaagaagaatgatcgaatgacttacgaaaagctgtctcgagcccttcgctattactataagactgggatcttggagcgtgtcgaccgtcggctggtgtacaaattcggtaagaacgctcacgggtggcaggaggacaagctatag

SEQ ID NO: 85784 - DNA, 483 bp, Artificial Sequence
  derived and/or modified sequence
atgttagacagcgtcacccactctaccttcctgcctaacgcgtcattctgcgatcctttgatgtcatggaccgatttgttctccaacgaagaatattatcctgcattcgagcaccagacagacgcagattcaaattgcttgaagacgtctggcatcaaatctcaggactgccatagtcacagccgaaccagtctccaaagctcgcatctgtgggagtttgtgcgagacttgcttctaagcccagaggaaaactgcgggatcctggagtgggaagatcgggaacaaggaattttccgggtagtcaaatctgaagctctggcgaagatgtggggccagcgcaaaaagaacgacagaatgacttatgaaaaacttagcagagcattgcgctactactataaaactggcattttggaaagggtggatcggcgactcgtttataagttcgggaaaaatgctcacggctggcaggaagacaaactgtag

SEQ ID NO: 85785 - DNA, 483 bp, Artificial Sequence
  derived and/or modified sequence
atgctggacagcgtgacccacagcaccttcctgcccaacgccagcttctgcgaccccctgatgagctggaccgacctgttcagcaacgaggagtactaccccgccttcgagcaccagaccgacgccgacagcaactgcctgaagaccagcggcatcaagagccaggactgccacagccacagcagaaccagcctgcagagcagccacctgtgggagttcgtgagagacctgctgctgagccccgaggagaactgcggcatcctggagtgggaggacagagagcagggcatcttcagagtggtgaagagcgaggccctggccaagatgtggggccagagaaagaagaacgacagaatgacctacgagaagctgagcagagccctgagatactactacaagaccggcatcctggagagagtggacagaagactggtgtacaagttcggcaagaacgcccacggctggcaggaggacaagctgtag

SEQ ID NO: 85786 - DNA, 637 bp, Artificial Sequence
  derived and/or modified sequence
tgtctgtaggtgtcacttatatcacaaggctacaggtgtctttatttccactgcacgctggtgctgggagcgcctgccttctcttgccttgaaagcctcctctttggacctagccaccgctgccctcacggtaatgttggactcggtgacacacagcaccttcctgcctaatgcatccttctgcgatcccctgatgtcgtggactgatctgttcagcaatgaagagtactaccctgcctttgagcatcagacagatgctgattccaactgcttgaaaacaagtggcatcaaaagtcaagactgtcacagtcatagtagaacaagcctccaaagttctcatctatgggaatttgtacgagacctgcttctatctcctgaagaaaactgtggcattctggaatgggaagatagggaacaaggaatttttcgggtggttaaatcggaagccctggcaaagatgtggggacaaaggaagaaaaatgacagaatgacatatgaaaagttgagcagagccctgagatactactataaaacaggaattttggagcgggttgaccgaaggttagtgtacaaatttggaaaaaatgcacacgggtggcaggaagacaagctatgatctgctccaggcatcaagctc

SEQ ID NO: 85787 - protein, 767 aa, Artificial Sequence [sequence omitted]

SEQ ID NO: 85788 - protein, 827 aa, Artificial Sequence
  derived and/or modified sequence
MEGAGGANDKKNRISSERRKEKSRDAARSRRSKESEVFYELAHQLPLPHNVSSHLDKASVMRLTISYLRVRKLLDAGDLDIEDDMKAQMNCFYLKALDGFVMVLTDDGDMIYISDNVNKYMGLTQFELTGHSVFDFTHPCDHEEMREMLTHRNGLVKKGKEQNTQRSFFLRMKCTLTSRGRTMNIKSATWKVLHCTGHIHVYDTNSNQPQCGYKKPPMTCLVLICEPIPHPSNIEIPLDSKTFLSRHSLDMKFSYCDERITELMGYEPEELLGRSIYEYYHALDSDHLTKTHHDMFTKGQVTTGQYRMLAKRGGYVWVETQATVIYNTKNSQPQCIVCVNYVVSGIIQHDLIFSLQQTECVLKPVESSDMKMTQLFTKVESEDTSSLFDKLKKEPDALTLLAPAAGDTIISLDFGSNDTETDDQQLEEVPLYNDVMLPSPNEKLQNINLAMSPLPTAETPKPLRSSADPALNQEVALKLEPNPESLELSFTMPQIQDQTPSPSDGSTRQSSPEPNSPSEYCFYVDSDMVNEFKLELVEKLFAEDTEAKNPFSTQDTDLDLEMLAPYIPMDDDFQLRSFDQLSPLESSSASPESASPQSTVTVFQQTQIQEPTANATTTTATTDELKTVTKDRMEDIKILIASPSPTHIHKETTSATSSPYRDTQSRTASPNRAGKGVIEQTEKSHPRSPNVLSVALSQRTTVPEEELNPKILALQNAQRKRKMEHDGSLFQAVGIGTLLQQPDDHAATTSLSWKRVKGCKSSEQNGMEQKTIILIPSDLACRLLGQSMDESGLPQLTSYDCEVNAPIQGSRNLLQGEELLRALDQVN

SEQ ID NO: 85789 - protein, 850 aa, Artificial Sequence
  derived and/or modified sequence
MSSQCRSLENKFVFLKEGLGNSKPEELEEIRIENGRISSERRKEKSRDAARSRRSKESEVFYELAHQLPLPHNVSSHLDKASVMRLTISYLRVRKLLDAGDLDIEDDMKAQMNCFYLKALDGFVMVLTDDGDMIYISDNVNKYMGLTQFELTGHSVFDFTHPCDHEEMREMLTHRNGLVKKGKEQNTQRSFFLRMKCTLTSRGRTMNIKSATWKVLHCTGHIHVYDTNSNQPQCGYKKPPMTCLVLICEPIPHPSNIEIPLDSKTFLSRHSLDMKFSYCDERITELMGYEPEELLGRSIYEYYHALDSDHLTKTHHDMFTKGQVTTGQYRMLAKRGGYVWVETQATVIYNTKNSQPQCIVCVNYVVSGIIQHDLIFSLQQTECVLKPVESSDMKMTQLFTKVESEDTSSLFDKLKKEPDALTLLAPAAGDTIISLDFGSNDTETDDQQLEEVPLYNDVMLPSPNEKLQNINLAMSPLPTAETPKPLRSSADPALNQEVALKLEPNPESLELSFTMPQIQDQTPSPSDGSTRQSSPEPNSPSEYCFYVDSDMVNEFKLELVEKLFAEDTEAKNPFSTQDTDLDLEMLAPYIPMDDDFQLRSFDQLSPLESSSASPESASPQSTVTVFQQTQIQEPTANATTTTATTDELKTVTKDRMEDIKILIASPSPTHIHKETTSATSSPYRDTQSRTASPNRAGKGVIEQTEKSHPRSPNVLSVALSQRTTVPEEELNPKILALQNAQRKRKMEHDGSLFQAVGIGTLLQQPDDHAATTSLSWKRVKGCKSSEQNGMEQKTIILIPSDLACRLLGQSMDESGLPQLTSYDCEVNAPIQGSRNLLQGEELLRALDQVN

SEQ ID NO: 85790 - DNA, 2553 bp, Artificial Sequence
  derived and/or modified sequence
atgagcagccagtgcagaagcctggagaacaagttcgtgttcctgaaggagggcctgggcaacagcaagcccgaggagctggaggagatcagaatcgagaacggcagaatcagcagcgagagaagaaaggagaagagcagagacgccgccagaagcagaagaagcaaggagagcgaggtgttctacgagctggcccaccagctgcccctgccccacaacgtgagcagccacctggacaaggccagcgtgatgagactgaccatcagctacctgagagtgagaaagctgctggacgccggcgacctggacatcgaggacgacatgaaggcccagatgaactgcttctacctgaaggccctggacggcttcgtgatggtgctgaccgacgacggcgacatgatctacatcagcgacaacgtgaacaagtacatgggcctgacccagttcgagctgaccggccacagcgtgttcgacttcacccacccctgcgaccacgaggagatgagagagatgctgacccacagaaacggcctggtgaagaagggcaaggagcagaacacccagagaagcttcttcctgagaatgaagtgcaccctgaccagcagaggcagaaccatgaacatcaagagcgccacctggaaggtgctgcactgcaccggccacatccacgtgtacgacaccaacagcaaccagccccagtgcggctacaagaagccccccatgacctgcctggtgctgatctgcgagcccatcccccaccccagcaacatcgagatccccctggacagcaagaccttcctgagcagacacagcctggacatgaagttcagctactgcgacgagagaatcaccgagctgatgggctacgagcccgaggagctgctgggcagaagcatctacgagtactaccacgccctggacagcgaccacctgaccaagacccaccacgacatgttcaccaagggccaggtgaccaccggccagtacagaatgctggccaagagaggcggctacgtgtgggtggagacccaggccaccgtgatctacaacaccaagaacagccagccccagtgcatcgtgtgcgtgaactacgtggtgagcggcatcatccagcacgacctgatcttcagcctgcagcagaccgagtgcgtgctgaagcccgtggagagcagcgacatgaagatgacccagctgttcaccaaggtggagagcgaggacaccagcagcctgttcgacaagctgaagaaggagcccgacgccctgaccctgctggcccccgccgccggcgacaccatcatcagcctggacttcggcagcaacgacaccgagaccgacgaccagcagctggaggaggtgcccctgtacaacgacgtgatgctgcccagccccaacgagaagctgcagaacatcaacctggccatgagccccctgcccaccgccgagacccccaagcccctgagaagcagcgccgaccccgccctgaaccaggaggtggccctgaagctggagcccaaccccgagagcctggagctgagcttcaccatgccccagatccaggaccagacccccagccccagcgacggcagcaccagacagagcagccccgagcccaacagccccagcgagtactgcttctacgtggacagcgacatggtgaacgagttcaagctggagctggtggagaagctgttcgccgaggacaccgaggccaagaaccccttcagcacccaggacaccgacctggacctggagatgctggccccctacatccccatggacgacgacttccagctgagaagcttcgaccagctgagccccctggagagcagcagcgccagccccgagagcgccagcccccagagcaccgtgaccgtgttccagcagacccagatccaggagcccaccgccaacgccaccaccaccaccgccaccaccgacgagctgaagaccgtgaccaaggacagaatggaggacatcaagatcctgatcgccagccccagccccacccacatccacaaggagaccaccagcgccaccagcagcccctacagagacacccagagcagaaccgccagccccaacagagccggcaagggcgtgatcgagcagaccgagaagagccaccccagaagccccaacgtgctgagcgtggccctgagccagagaaccaccgtgcccgaggaggagctgaaccccaagatcctggccctgcagaacgcccagagaaagagaaagatggagcacgacggcagcctgttccaggccgtgggcatcggcaccctgctgcagcagcccgacgaccacgccgccaccaccagcctgagctggaagagagtgaagggctgcaagagcagcgagcagaacggcatggagcagaagaccatcatcctgatccccagcgacctggcctgcagactgctgggccagagcatggacgagagcggcctgccccagctgaccagctacgactgcgaggtgaacgcccccatccagggcagcagaaacctgctgcagggcgaggagctgctgagagccctggaccaggtgaactag

SEQ ID NO: 85791 - DNA, 2553 bp, Artificial Sequence
  derived and/or modified sequence
atgtccagtcagtgcaggtctctggagaacaagtttgtgttcttaaaggagggtctcggcaattctaagcctgaagagctggaggaaatacgtatcgagaacgggagaatctcatcagaacgccggaaggaaaaatcaagggatgctgctaggtccaggcgatccaaagaatcagaggttttttacgaactggcgcaccaactgcctctcccacacaacgtgtccagccatttggacaaggctagtgtaatgcgactgacgatttcataccttcgcgtgcgaaaacttttggacgcgggagacctggacattgaggacgatatgaaggcacagatgaattgcttttacctgaaggctctcgatgggttcgtcatggtcctcactgatgatggagatatgatttacatctcggataatgtgaacaaatatatgggcctcactcaatttgaactcaccggccattctgttttcgacttcactcatccatgtgaccacgaagaaatgcgggagatgttgactcaccgaaatggtcttgtgaaaaaggggaaggagcaaaacacacagcgaagcttttttctcagaatgaaatgcacgctgacgagtagaggcagaacgatgaacatcaaatcggccacctggaaggtactgcactgcacaggccacattcatgtttatgacacgaattctaatcaacctcagtgcggctataaaaaaccccctatgacttgcctggtgctaatctgtgaacctattccgcaccctagtaacattgagatccccctggatagcaaaacttttttgtcaaggcacagcctggacatgaagttcagctactgtgatgagcgcatcaccgagctcatggggtatgagcccgaagagctcctcggccgtagtatctacgagtattatcacgccctagattctgaccatttaacaaagacacaccacgacatgtttacaaaaggccaggtgacaaccggacagtatcggatgcttgctaagagaggtggctatgtttgggtggagactcaggccactgtgatatacaatactaaaaatagtcagccgcagtgcatcgtctgtgtgaactacgtggtatctggtattatacagcatgatctaatcttttccctgcagcaaactgagtgtgtcctgaagccagtggaatccagcgatatgaagatgacgcagctgtttacaaaagtagagagtgaggatacgagctcgctgtttgacaagctcaagaaagaacccgatgccctgacgttgctggcccctgcagccggagacaccattatcagcctggactttggatctaacgacacagagactgatgatcaacagttagaggaggtaccactgtacaatgatgttatgctgcccagccctaacgagaagctacagaacatcaatctggcgatgtcccccctgcctacagcagagacccctaagccactgcgtagcagcgccgatccagccctgaatcaggaagttgctttaaagcttgaaccaaaccctgaaagcctggaactctctttcactatgccccagattcaggatcagacaccatcaccgtctgatgggagcacccggcagagcagtccagaacccaactccccatccgaatactgtttctacgtggactctgatatggtaaatgaatttaagctcgaactcgtggaaaaacttttcgcagaagataccgaggccaagaatccttttagcacacaggacacagatctggatctggagatgttggctccgtatattccaatggacgatgactttcagctccgctcttttgaccagcttagccctttagaatcgtccagtgccagtccagagtcggcatctccccaatccactgtgaccgtgttccagcagacccagatacaagaaccaactgctaacgccaccacaaccactgccactacggatgaactgaaaacagtgacaaaagatcgtatggaagacattaagattctgatcgcgtcaccatcccctacgcacattcataaggagaccaccagtgccaccagcagtccctacagagacacccaatctcggaccgctagcccgaatagagctgggaaaggagtgatcgagcaaactgaaaagagtcatccccgatctcctaacgtgctctccgtggcgttgagccagcgcaccaccgtccccgaagaggagctgaatccgaagatcttggccctccagaatgcccagcggaagcgtaagatggaacatgatggctctctgttccaggccgtcggaatcggcaccttgctgcagcaacccgacgatcacgccgccaccacatccctatcttggaagagagtgaagggctgtaaaagttcagagcagaacggaatggagcagaaaacgatcatactgattccctctgatctcgcctgcagactgcttggacagagcatggacgagtcagggctcccccagctgacaagctacgattgtgaagtgaacgctcccattcagggctcccggaacctgttgcagggcgaggaacttctgagagcgctggaccaggtaaattag

SEQ ID NO: 85792 - DNA, 3468 bp, Artificial Sequence
  derived and/or modified sequence
atttgaaaacttggcaaccttggattggatggattcatatttcttagtatagaagttcttgatataactgaaaaattaagttaaacacttaataagtggtggttactcagcacttttagatgctgtttataatagatgaccttttctaactaatttacagttttttgaaagataactgagaggttgagggacggagattttcttcaagcaattttttttttcattttaaatgagctcccaatgtcggagtttggaaaacaaatttgtctttttaaaagaaggtctaggaaactcaaaacctgaagaattggaagaaatcagaatagaaaatggtaggataagttctgaacgtcgaaaagaaaagtctcgagatgcagccagatctcggcgaagtaaagaatctgaagttttttatgagcttgctcatcagttgccacttccacataatgtgagttcgcatcttgataaggcctctgtgatgaggcttaccatcagctatttgcgtgtgaggaaacttctggatgctggtgatttggatattgaagatgacatgaaagcacagatgaattgcttttatttgaaagccttggatggttttgttatggttctcacagatgatggtgacatgatttacatttctgataatgtgaacaaatacatgggattaactcagtttgaactaactggacacagtgtgtttgattttactcatccatgtgaccatgaggaaatgagagaaatgcttacacacagaaatggccttgtgaaaaagggtaaagaacaaaacacacagcgaagcttttttctcagaatgaagtgtaccctaactagccgaggaagaactatgaacataaagtctgcaacatggaaggtattgcactgcacaggccacattcacgtatatgataccaacagtaaccaacctcagtgtgggtataagaaaccacctatgacctgcttggtgctgatttgtgaacccattcctcacccatcaaatattgaaattcctttagatagcaagactttcctcagtcgacacagcctggatatgaaattttcttattgtgatgaaagaattaccgaattgatgggatatgagccagaagaacttttaggccgctcaatttatgaatattatcatgctttggactctgatcatctgaccaaaactcatcatgatatgtttactaaaggacaagtcaccacaggacagtacaggatgcttgccaaaagaggtggatatgtctgggttgaaactcaagcaactgtcatatataacaccaagaattctcaaccacagtgcattgtatgtgtgaattacgttgtgagtggtattattcagcacgacttgattttctcccttcaacaaacagaatgtgtccttaaaccggttgaatcttcagatatgaaaatgactcagctattcaccaaagttgaatcagaagatacaagtagcctctttgacaaacttaagaaggaacctgatgctttaactttgctggccccagccgctggagacacaatcatatctttagattttggcagcaacgacacagaaactgatgaccagcaacttgaggaagtaccattatataatgatgtaatgctcccctcacccaacgaaaaattacagaatataaatttggcaatgtctccattacccaccgctgaaacgccaaagccacttcgaagtagtgctgaccctgcactcaatcaagaagttgcattaaaattagaaccaaatccagagtcactggaactttcttttaccatgccccagattcaggatcagacacctagtccttccgatggaagcactagacaaagttcacctgagcctaatagtcccagtgaatattgtttttatgtggatagtgatatggtcaatgaattcaagttggaattggtagaaaaactttttgctgaagacacagaagcaaagaacccattttctactcaggacacagatttagacttggagatgttagctccctatatcccaatggatgatgacttccagttacgttccttcgatcagttgtcaccattagaaagcagttccgcaagccctgaaagcgcaagtcctcaaagcacagttacagtattccagcagactcaaatacaagaacctactgctaatgccaccactaccactgccaccactgatgaattaaaaacagtgacaaaagaccgtatggaagacattaaaatattgattgcatctccatctcctacccacatacataaagaaactactagtgccacatcatcaccatatagagatactcaaagtcggacagcctcaccaaacagagcaggaaaaggagtcatagaacagacagaaaaatctcatccaagaagccctaacgtgttatctgtcgctttgagtcaaagaactacagttcctgaggaagaactaaatccaaagatactagctttgcagaatgctcagagaaagcgaaaaatggaacatgatggttcactttttcaagcagtaggaattggaacattattacagcagccagacgatcatgcagctactacatcactttcttggaaacgtgtaaaaggatgcaaatctagtgaacagaatggaatggagcaaaagacaattattttaataccctctgatttagcatgtagactgctggggcaatcaatggatgaaagtggattaccacagctgaccagttatgattgtgaagttaatgctcctatacaaggcagcagaaacctactgcagggtgaagaattactcagagctttggatcaagttaactgagctttttcttaatttcattcctttttttggacactggtggctcattacctaaagcagtctatttatattttctacatctaattttagaagcctggctacaatactgcacaaacttggttagttcaattttgatcccctttctacttaatttacattaatgctcttttttagtatgttctttaatgctggatcacagacagctcattttctcagttttttggtatttaaaccattgcattgcagtagcatcattttaaaaaatgcacctttttatttatttatttttggctagggagtttatccctttttcgaattatttttaagaagatgccaatataatttttgtaagaaggcagtaacctttcatcatgatcataggcagttgaaaaatttttacaccttttttttcacattttacataaataataatgctttgccagcagtacgtggtagccacaattgcacaatatattttcttaaaaaataccagcagttactcatggaatatattctgcgtttataaaactagtttttaagaagaaattttttttggcctatgaaattgttaaacctggaacatgacattgttaatcatataataatgattcttaaatgctgtatggtttattatttaaatgggtaaagccatttacataatatagaaagatatgcatatatctagaagg

SEQ ID NO: 85793 - DNA, 2553 bp, Artificial Sequence
  derived and/or modified sequence
atgagcagccagtgccgcagcctggagaacaagtttgtgttcctgaaggagggcctgggcaacagcaagccagaggagctggaggagatcagaattgaaaatggccgcatcagcagcgagaggaggaaggagaagagcagagatgctgcccggagcagaagaagcaaggagagcgaggtgttctatgagctggcccaccagctgcccctgccccacaacgtgagcagccacctggacaaggcctctgtgatgaggctgaccatctcctacctgcgggtgaggaagctgctggatgctggggacctggacattgaagatgacatgaaggcccagatgaactgcttctacctgaaggccctggatggctttgtgatggtgctgacagatgatggagacatgatctacatcagtgacaacgtgaacaagtacatgggcctgacccagtttgagctgaccggccacagcgtgtttgacttcacccacccctgtgaccacgaggagatgagggagatgctgacccacagaaatggcctggtgaagaagggcaaggagcagaacacccagaggagcttcttcctgaggatgaagtgcaccctgaccagccggggccgcaccatgaacatcaagagcgccacctggaaggtgctgcactgcaccggccacatccacgtgtatgacaccaacagcaaccagccccagtgtggctacaagaagccacccatgacctgcctggtgctgatctgtgagcccatcccccaccccagcaacatcgagatccccctggacagcaagaccttcctgagccgccacagcctggacatgaagttctcctactgtgatgagcgcatcacagagctgatgggctatgagcctgaggagctgctgggccgcagcatctatgagtactaccacgccctggacagcgaccacctgaccaagacccaccacgacatgttcaccaagggccaggtgaccaccggccagtacaggatgctggccaagaggggcggctacgtgtgggtggagacccaggccaccgtcatctacaacaccaagaacagccagccccagtgcatcgtgtgtgtgaactacgtggtgtctggcatcatccagcacgacctgatcttcagcctgcagcagacagaatgtgtgctgaagcctgtggagagcagtgacatgaagatgacccagctgttcaccaaggtggagagcgaggacaccagcagcctgtttgacaagctgaagaaggagccagatgccctgaccctgctggccccagctgctggggacaccatcatcagcctggactttggcagcaatgacacagaaacagatgaccagcagctggaggaggtgcccctgtacaatgatgtgatgctgcccagccccaatgagaagctgcagaacatcaacctggccatgagccccctgcccacagctgagacccccaagcccctgcggagcagcgctgaccctgccctgaaccaggaggtggccctgaagctggagcccaaccctgagagcctggagctgtccttcaccatgccccagatccaggaccagacccccagccccagtgatggcagcacccggcagagcagccctgagcccaacagccccagcgagtactgcttctacgtggacagcgacatggtgaatgagttcaagctggagctggtggagaagctgtttgctgaggacacagaggccaagaaccccttcagcacccaggacacagacctggacctggagatgctggccccctacatccccatggatgatgacttccagctgcggagctttgaccagctgagccccctggagagcagcagcgccagccctgagagcgccagcccccagagcacagtgaccgtcttccagcagacccagatccaggagcccacagccaatgccaccaccaccacagccaccacagatgagctgaagacagtgaccaaggacaggatggaggacatcaagatcctgattgccagccccagccccacccacatccacaaggagaccaccagcgccaccagcagcccctacagagacacccagagcaggacagccagccccaacagagctgggaagggcgtgattgagcagacagagaagagccaccccaggagccccaacgtgctgtctgtggccctgagccagaggaccaccgtgcctgaggaggagctgaaccccaagatcctggccctgcagaatgcccagaggaagaggaagatggagcatgatggcagcctcttccaggccgtgggcatcggcaccctgctgcagcagccagatgaccatgctgccaccaccagcctgtcctggaagagggtgaagggctgcaagagcagcgagcagaatggcatggagcagaagaccatcatcctgatccccagcgacctggcctgccgcctgctgggccagagcatggatgagagcggcctgccccagctgaccagctatgactgtgaggtgaatgcccccatccagggcagcaggaacctgctgcagggcgaggagctgctgcgggccctggaccaggtgaactag

SEQ ID NO: 85794 - DNA, 2553 bp, Artificial Sequence
  derived and/or modified sequence
atgagcagccagtgccggagcctggagaacaagttcgtgttcctgaaggaagggctaggaaacagcaagcccgaggaactcgaggaaatcaggatcgagaacggacggatttcttccgagcgtagaaaagaaaaaagcagagacgcggccagatctaggcggtccaaggagtccgaggtgttttacgagttggcacaccagctgccactgcctcacaatgtatccagccacctggataaagcgagcgtgatgcgcctgacaatcagttatctgagggtacgcaaactgcttgacgccggcgacctcgatatagaagacgatatgaaggcacagatgaactgcttttacctcaaggcgctcgatgggtttgtgatggtcctgaccgatgatggggacatgatctatatctccgacaacgtcaataagtacatggggttgacccaatttgagctgaccggccactctgttttcgactttacacacccatgcgaccacgaagagatgagggaaatgctgacgcaccggaatgggctggtaaaaaagggtaaggagcagaacacgcagcgatctttctttttgcgtatgaagtgcacactcacctctcggggcagaaccatgaacatcaagtcggccacttggaaagtcctgcattgcacagggcatatacacgtgtacgacacaaatagcaaccagccccagtgtgggtacaagaaacctccaatgacctgtttggtgctgatatgcgagcccataccccatccttccaacattgagattcccctagactccaaaaccttcttaagccgacatagtctggacatgaagttctcttactgcgatgaacggattactgagttgatgggctacgagccagaggaacttttgggcagaagcatttacgaatactatcacgccctggattcagaccacttaacaaaaacgcaccacgacatgtttaccaaggggcaggtgaccacaggccagtatagaatgctggctaagagagggggctacgtgtgggtcgagacacaggccaccgttatctacaatacgaaaaatagccagcctcagtgtatagtttgcgttaactatgtagtttcagggatcattcagcacgacttgatcttttccctgcagcagaccgagtgtgtgttaaaacctgtagaatcgagcgacatgaagatgacacaattatttaccaaggtggaatcggaagatactagttcactttttgataaattgaaaaaagagccagacgcactcaccctgctggctcctgctgccggcgacaccataatctctttggacttcggtagcaacgacacagagacagatgatcagcagctcgaagaggttccactgtacaatgatgtgatgctgccatcaccgaacgagaaattacagaacattaaccttgccatgagcccgctgcccaccgcagaaacccctaaacctcttaggtctagtgccgatccggccctgaaccaggaagttgcgcttaagttggagcccaacccagagagtttagaactgagttttaccatgccgcagatacaagaccagacccccagcccatctgatggctcaacacggcagagctcacccgaacccaatagcccttctgagtactgcttctatgttgattcagatatggtcaatgagtttaaactcgagctagtcgagaagctcttcgctgaggatacagaagcaaagaatcccttctcaactcaagacactgacctggacctggagatgttggctccgtacatccccatggacgatgatttccagctgcgaagtttcgatcagctgtccccacttgagtccagcagtgcctctcctgagagcgctagcccacagagtaccgtcactgtgtttcagcagacacagattcaggaacctaccgccaatgctaccaccaccactgcaacaacagacgaactgaaaacagttactaaggataggatggaggatatcaaaatccttattgctagtccgtctcctacacatatccacaaggagaccactagtgcaactagcagtccttatagagatacacagagtaggactgcatccccaaatagagcagggaagggcgtgattgagcagacagagaaatcccaccctaggagtcccaacgttctatcagtggctctcagtcaacgtaccaccgtcccggaggaagagctcaacccaaagattctggctctacagaatgcacaaaggaagcgaaagatggaacatgatgggagcctgttccaggctgttggaatcggaactctgctccaacaaccagacgaccatgctgccactaccagtctctcctggaaaagggtcaagggatgcaagagctccgagcaaaacgggatggagcagaaaaccatcattctgattccgagtgatctggcatgcagacttctgggtcaaagcatggacgaaagcggtctaccacagctaaccagctacgattgcgaagtcaatgcccccatacaggggagtcgcaatctgctacagggtgaggagcttctgcgagcccttgatcaagtgaattag

SEQ ID NO: 85795 - DNA, 2553 bp, Artificial Sequence
  derived and/or modified sequence
atgagctcacaatgtaggtccctggagaataagtttgtgtttctcaaggaaggccttgggaactctaaacctgaagagctcgaagaaattagaattgagaacggccgtatatcctcggaaaggcgaaaggaaaagagcagagacgctgctcgaagtagaagaagcaaagaatcagaagtgttctatgagcttgcccatcagttaccgttgccccacaatgtctctagccaccttgataaggctagcgtgatgaggctaacaatttcttatttacgcgtgcgcaagctgctggatgcaggagacctggacattgaagacgacatgaaggcccaaatgaactgcttctacctgaaagccctcgacgggttcgtaatggtcctaacagacgacggagacatgatctatatctccgataacgtgaataagtacatggggttaacccagttcgagctcaccgggcattccgtctttgattttacccacccatgcgatcacgaagagatgcgtgaaatgcttacccatcggaacggcctcgtgaagaagggcaaggaacaaaatactcagcgaagcttctttctgcgcatgaaatgcaccctgacatcgaggggacgcacgatgaatatcaaatcggctacctggaaggtcctgcattgtacaggccacatccacgtctacgataccaactctaatcagcctcagtgtgggtacaagaagccccctatgacttgtctcgtcctgatttgcgaacccattcctcaccccagtaacatcgagatccccctagactccaaaaccttcctttcacgccactcgttggacatgaagtttagctactgtgacgaacggatcaccgaattgatggggtatgaaccagaggagctgctcgggcgatccatctacgagtactatcacgcactggattctgatcacctcactaaaacacatcatgacatgttcactaaggggcaggtaaccacaggccagtacagaatgcttgctaaaagaggagggtacgtgtgggttgaaacacaagcaacagtgatttataacaccaaaaacagccagccacagtgcatagtctgcgtcaactacgtggtgagcggtatcatacagcacgatctgatttttagcttgcagcagaccgaatgcgttctgaaacccgtggagtctagcgacatgaagatgacccagctgtttaccaaagtggaatccgaggatacctccagtcttttcgacaaactcaagaaggagcctgatgccctaacattactggcgcctgcagccggtgataccattattagtttggactttggcagtaatgataccgaaacggatgatcaacagctggaagaagtaccactgtataacgacgtgatgctgccatctcctaatgagaagctccagaacattaacctcgccatgtcgcctctgccaactgctgagacacctaagcctctgcgaagttcggcggatccggctctcaatcaggaagtggcactgaaactcgagcctaatccagaatccctggaattgtcattcactatgcctcaaatccaagatcagacaccttcaccctcggacgggtcaaccagacagagctcacctgagcccaactcgccatccgagtattgcttctatgttgacagcgacatggttaatgagttcaaactggaactggttgaaaaactgttcgctgaagacaccgaggccaagaaccctttctcaacgcaagacactgacctcgatctcgagatgttggcgccatacattcccatggacgacgattttcagctcaggagttttgaccaactgagccccctggagtccagtagcgcctcgccagaaagtgccagtccccagtctaccgtcacagtgttccagcagacacaaatccaggagccaactgccaatgccacaacaaccactgctacaaccgacgagctaaaaaccgtcacaaaggatcggatggaagatattaagatacttattgcatcccccagtccaactcacattcacaaggaaacaactagcgccacttcgagcccatacagagatacccagtctcggacagcaagccccaaccgcgcagggaagggcgtgatcgaacagaccgaaaaaagccaccctcggtctcctaacgtcctgtcagttgctttgtcgcagcgtacgactgtgcccgaagaagagttaaatcccaagatattggccctgcagaatgcccagcgcaagagaaagatggaacatgacggaagtctcttccaggcagtgggcattggcaccctcctccagcagccagatgatcacgccgcaacaacatcccttagctggaaacgggttaaaggttgtaaaagtagcgagcagaatggcatggaacagaagacaataattcttatcccaagcgaccttgcttgccggttacttggccagtcgatggacgagagcgggcttccccagttaacatcctacgactgcgaggtgaatgctccgattcagggttcccggaatctgctgcagggcgaagaactcctccgcgcattggatcaagtgaattag

SEQ ID NO: 85796 - DNA, 2550 bp, Artificial Sequence
  derived and/or modified sequence
atgagcagccagtgccgcagcctggagaacaagttcgtgttcctgaaggagggcctgggcaacagcaagcccgaggagctggaggagatccgcatcgagaacggccgcatcagcagcgagcgccgcaaggagaagagccgcgacgccgcccgcagccgccgcagcaaggagagcgaggtgttctacgagctggcccaccagctgcccctgccccacaacgtgagcagccacctggacaaggccagcgtgatgcgcctgaccatcagctacctgcgcgtgcgcaagctgctggacgccggcgacctggacatcgaggacgacatgaaggcccagatgaactgcttctacctgaaggccctggacggcttcgtgatggtgctgaccgacgacggcgacatgatctacatcagcgacaacgtgaacaagtacatgggcctgacccagttcgagctgaccggccacagcgtgttcgacttcacccacccctgcgaccacgaggagatgcgcgagatgctgacccaccgcaacggcctggtgaagaagggcaaggagcagaacacccagcgcagcttcttcctgcgcatgaagtgcaccctgaccagccgcggccgcaccatgaacatcaagagcgccacctggaaggtgctgcactgcaccggccacatccacgtgtacgacaccaacagcaaccagccccagtgcggctacaagaagccccccatgacctgcctggtgctgatctgcgagcccatcccccaccccagcaacatcgagatccccctggacagcaagaccttcctgagccgccacagcctggacatgaagttcagctactgcgacgagcgcatcaccgagctgatgggctacgagcccgaggagctgctgggccgcagcatctacgagtactaccacgccctggacagcgaccacctgaccaagacccaccacgacatgttcaccaagggccaggtgaccaccggccagtaccgcatgctggccaagcgcggcggctacgtgtgggtggagacccaggccaccgtgatctacaacaccaagaacagccagccccagtgcatcgtgtgcgtgaactacgtggtgagcggcatcatccagcacgacctgatcttcagcctgcagcagaccgagtgcgtgctgaagcccgtggagagcagcgacatgaagatgacccagctgttcaccaaggtggagagcgaggacaccagcagcctgttcgacaagctgaagaaggagcccgacgccctgaccctgctggcccccgccgccggcgacaccatcatcagcctggacttcggcagcaacgacaccgagaccgacgaccagcagctggaggaggtgcccctgtacaacgacgtgatgctgcccagccccaacgagaagctgcagaacatcaacctggccatgagccccctgcccaccgccgagacccccaagcccctgcgcagcagcgccgaccccgccctgaaccaggaggtggccctgaagctggagcccaaccccgagagcctggagctgagcttcaccatgccccagatccaggaccagacccccagccccagcgacggcagcacccgccagagcagccccgagcccaacagccccagcgagtactgcttctacgtggacagcgacatggtgaacgagttcaagctggagctggtggagaagctgttcgccgaggacaccgaggccaagaaccccttcagcacccaggacaccgacctggacctggagatgctggccccctacatccccatggacgacgacttccagctgcgcagcttcgaccagctgagccccctggagagcagcagcgccagccccgagagcgccagcccccagagcaccgtgaccgtgttccagcagacccagatccaggagcccaccgccaacgccaccaccaccaccgccaccaccgacgagctgaagaccgtgaccaaggaccgcatggaggacatcaagatcctgatcgccagccccagccccacccacatccacaaggagaccaccagcgccaccagcagcccctaccgcgacacccagagccgcaccgccagccccaaccgcgccggcaagggcgtgatcgagcagaccgagaagagccacccccgcagccccaacgtgctgagcgtggccctgagccagcgcaccaccgtgcccgaggaggagctgaaccccaagatcctggccctgcagaacgcccagcgcaagcgcaagatggagcacgacggcagcctgttccaggccgtgggcatcggcaccctgctgcagcagcccgacgaccacgccgccaccaccagcctgagctggaagcgcgtgaagggctgcaagagcagcgagcagaacggcatggagcagaagaccatcatcctgatccccagcgacctggcctgccgcctgctgggccagagcatggacgagagcggcctgccccagctgaccagctacgactgcgaggtgaacgcccccatccagggcagccgcaacctgctgcagggcgaggagctgctgcgcgccctggaccaggtgaac

SEQ ID NO: 85797 - protein, 829 aa, Artificial Sequence
  derived and/or modified sequence
MAKYNTGGNPTEDVSVNSRPFRVTGPNSSSGIQARKNLFNNQGNASPPAGPSNVPKFGSPKPPVAVKPSSEEKPDKEPKPPFLKPTGAGQRFGTPASLTTRDPEAKVGFLKPVGPKPINLPKEDSKPTFPWPPGNKPSLHSVNQDHDLKPLGPKSGPTPPTSENEQKQAFPKLTGVKGKFMSASQDLEPKPLFPKPAFGQKPPLSTENSHEDESPMKNVSSSKGSPAPLGVRSKSGPLKPAREDSENKDHAGEISSLPFPGVVLKPAASRGGPGLSKNGEEKKEDRKIDAAKNTFQSKINQEELASGTPPARFPKAPSKLTVGGPWGQSQEKEKGDKNSATPKQKPLPPLFTLGPPPPKPNRPPNVDLTKFHKTSSGNSTSKGQTSYSTTSLPPPPPSHPASQPPLPASHPSQPPVPSLPPRNIKPPFDLKSPVNEDNQDGVTHSDGAGNLDEEQDSEGETYEDIEASKEREKKREKEEKKRLELEKKEQKEKEKKEQEIKKKFKLTGPIQVIHLAKACCDVKGGKNELSFKQGEQIEIIRITDNPEGKWLGRTARGSYGYIKTTAVEIDYDSLKLKKDSLGAPSRPIEDDQEVYDDVAEQDDISSHSQSGSGGIFPPPPDDDIYDGIEEEDADDGSTLQVQEKSNTWSWGILKMLKGKDDRKKSIREKPKVSDSDNNEGSSFPAPPKQLDMGDEVYDDVDTSDFPVSSAEMSQGTNVGKAKTEEKDLKKLKKQEKEEKDFRKKFKYDGEIRVLYSTKVTTSITSKKWGTRDLQVKPGESLEVIQTTDDTKVLCRNEEGKYGYVLRSYLADNDGEIYDDIADGCIYDND

SEQ ID NO: 85798 - protein, 174 aa, Artificial Sequence
  derived and/or modified sequence
MAKYNTGGNPTEDVSVNSRPFRVTGPNSSSGIQARKNLFNNQGNASPPAGPSNVPKFGSPKPPVAVKPSSEEKPDKEPKPPFLKPTGAGQRFGTPASLTTRDPEAKVGFLKPVGPKPINLPKEDSKPTFPWPPGNKPSLHSVNQDHDLKPLGPKSGPTPPTSENEQKQAFPKLT

SEQ ID NO: 85799 - protein, 115 aa, Artificial Sequence
  derived and/or modified sequence
MAKYNTGGNPTEDVSVNSRPFRVTGPNSSSGIQARKNLFNNQGNASPPAGPSNVPKFGSPKPPVAVKPSSEEKPDKEPKPPFLKPTGAGQRFGTPASLTTRDPEAKVGFLKPVGP

SEQ ID NO: 85800 - protein, 839 aa, Artificial Sequence
  derived and/or modified sequence
MDGKADVKSLMAKYNTGGNPTEDVSVNSRPFRVTGPNSSSGIQARKNLFNNQGNASPPAGPSNVPKFGSPKPPVAVKPSSEEKPDKEPKPPFLKPTGAGQRFGTPASLTTRDPEAKVGFLKPVGPKPINLPKEDSKPTFPWPPGNKPSLHSVNQDHDLKPLGPKSGPTPPTSENEQKQAFPKLTGVKGKFMSASQDLEPKPLFPKPAFGQKPPLSTENSHEDESPMKNVSSSKGSPAPLGVRSKSGPLKPAREDSENKDHAGEISSLPFPGVVLKPAASRGGPGLSKNGEEKKEDRKIDAAKNTFQSKINQEELASGTPPARFPKAPSKLTVGGPWGQSQEKEKGDKNSATPKQKPLPPLFTLGPPPPKPNRPPNVDLTKFHKTSSGNSTSKGQTSYSTTSLPPPPPSHPASQPPLPASHPSQPPVPSLPPRNIKPPFDLKSPVNEDNQDGVTHSDGAGNLDEEQDSEGETYEDIEASKEREKKREKEEKKRLELEKKEQKEKEKKEQEIKKKFKLTGPIQVIHLAKACCDVKGGKNELSFKQGEQIEIIRITDNPEGKWLGRTARGSYGYIKTTAVEIDYDSLKLKKDSLGAPSRPIEDDQEVYDDVAEQDDISSHSQSGSGGIFPPPPDDDIYDGIEEEDADDGSTLQVQEKSNTWSWGILKMLKGKDDRKKSIREKPKVSDSDNNEGSSFPAPPKQLDMGDEVYDDVDTSDFPVSSAEMSQGTNVGKAKTEEKDLKKLKKQEKEEKDFRKKFKYDGEIRVLYSTKVTTSITSKKWGTRDLQVKPGESLEVIQTTDDTKVLCRNEEGKYGYVLRSYLADNDGEIYDDIADGCIYDND

SEQ ID NO: 85801 - DNA, 2490 bp, Artificial Sequence
  derived and/or modified sequence
atggccaagtacaacaccggcggcaaccccaccgaggacgtgagcgtgaacagcagacccttcagagtgaccggccccaacagcagcagcggcatccaggccagaaagaacctgttcaacaaccagggcaacgccagcccccccgccggccccagcaacgtgcccaagttcggcagccccaagccccccgtggccgtgaagcccagcagcgaggagaagcccgacaaggagcccaagccccccttcctgaagcccaccggcgccggccagagattcggcacccccgccagcctgaccaccagagaccccgaggccaaggtgggcttcctgaagcccgtgggccccaagcccatcaacctgcccaaggaggacagcaagcccaccttcccctggccccccggcaacaagcccagcctgcacagcgtgaaccaggaccacgacctgaagcccctgggccccaagagcggccccaccccccccaccagcgagaacgagcagaagcaggccttccccaagctgaccggcgtgaagggcaagttcatgagcgccagccaggacctggagcccaagcccctgttccccaagcccgccttcggccagaagccccccctgagcaccgagaacagccacgaggacgagagccccatgaagaacgtgagcagcagcaagggcagccccgcccccctgggcgtgagaagcaagagcggccccctgaagcccgccagagaggacagcgagaacaaggaccacgccggcgagatcagcagcctgcccttccccggcgtggtgctgaagcccgccgccagcagaggcggccccggcctgagcaagaacggcgaggagaagaaggaggacagaaagatcgacgccgccaagaacaccttccagagcaagatcaaccaggaggagctggccagcggcaccccccccgccagattccccaaggcccccagcaagctgaccgtgggcggcccctggggccagagccaggagaaggagaagggcgacaagaacagcgccacccccaagcagaagcccctgccccccctgttcaccctgggcccccccccccccaagcccaacagaccccccaacgtggacctgaccaagttccacaagaccagcagcggcaacagcaccagcaagggccagaccagctacagcaccaccagcctgcccccccccccccccagccaccccgccagccagccccccctgcccgccagccaccccagccagccccccgtgcccagcctgccccccagaaacatcaagccccccttcgacctgaagagccccgtgaacgaggacaaccaggacggcgtgacccacagcgacggcgccggcaacctggacgaggagcaggacagcgagggcgagacctacgaggacatcgaggccagcaaggagagagagaagaagagagagaaggaggagaagaagagactggagctggagaagaaggagcagaaggagaaggagaagaaggagcaggagatcaagaagaagttcaagctgaccggccccatccaggtgatccacctggccaaggcctgctgcgacgtgaagggcggcaagaacgagctgagcttcaagcagggcgagcagatcgagatcatcagaatcaccgacaaccccgagggcaagtggctgggcagaaccgccagaggcagctacggctacatcaagaccaccgccgtggagatcgactacgacagcctgaagctgaagaaggacagcctgggcgcccccagcagacccatcgaggacgaccaggaggtgtacgacgacgtggccgagcaggacgacatcagcagccacagccagagcggcagcggcggcatcttcccccccccccccgacgacgacatctacgacggcatcgaggaggaggacgccgacgacggcagcaccctgcaggtgcaggagaagagcaacacctggagctggggcatcctgaagatgctgaagggcaaggacgacagaaagaagagcatcagagagaagcccaaggtgagcgacagcgacaacaacgagggcagcagcttccccgccccccccaagcagctggacatgggcgacgaggtgtacgacgacgtggacaccagcgacttccccgtgagcagcgccgagatgagccagggcaccaacgtgggcaaggccaagaccgaggagaaggacctgaagaagctgaagaagcaggagaaggaggagaaggacttcagaaagaagttcaagtacgacggcgagatcagagtgctgtacagcaccaaggtgaccaccagcatcaccagcaagaagtggggcaccagagacctgcaggtgaagcccggcgagagcctggaggtgatccagaccaccgacgacaccaaggtgctgtgcagaaacgaggagggcaagtacggctacgtgctgagaagctacctggccgacaacgacggcgagatctacgacgacatcgccgacggctgcatctacgacaacgactag

SEQ ID NO: 85802 - DNA, 66 bp, Artificial Sequence
  derived and/or modified sequence
atggccaagtacaacaccggcggcaaccccaccgaggacgtgagcgtgaacagcagacccttctag

SEQ ID NO: 85803 - DNA, 69 bp, Artificial Sequence
  derived and/or modified sequence
atggccaagtacaacaccggcggcaaccccaccgaggacgtgagcgtgaacagcagacccttcagatag

SEQ ID NO: 85804 - DNA, 2520 bp, Artificial Sequence
  derived and/or modified sequence
atggacggcaaggccgacgtgaagagcctgatggccaagtacaacaccggcggcaaccccaccgaggacgtgagcgtgaacagcagacccttcagagtgaccggccccaacagcagcagcggcatccaggccagaaagaacctgttcaacaaccagggcaacgccagcccccccgccggccccagcaacgtgcccaagttcggcagccccaagccccccgtggccgtgaagcccagcagcgaggagaagcccgacaaggagcccaagccccccttcctgaagcccaccggcgccggccagagattcggcacccccgccagcctgaccaccagagaccccgaggccaaggtgggcttcctgaagcccgtgggccccaagcccatcaacctgcccaaggaggacagcaagcccaccttcccctggccccccggcaacaagcccagcctgcacagcgtgaaccaggaccacgacctgaagcccctgggccccaagagcggccccaccccccccaccagcgagaacgagcagaagcaggccttccccaagctgaccggcgtgaagggcaagttcatgagcgccagccaggacctggagcccaagcccctgttccccaagcccgccttcggccagaagccccccctgagcaccgagaacagccacgaggacgagagccccatgaagaacgtgagcagcagcaagggcagccccgcccccctgggcgtgagaagcaagagcggccccctgaagcccgccagagaggacagcgagaacaaggaccacgccggcgagatcagcagcctgcccttccccggcgtggtgctgaagcccgccgccagcagaggcggccccggcctgagcaagaacggcgaggagaagaaggaggacagaaagatcgacgccgccaagaacaccttccagagcaagatcaaccaggaggagctggccagcggcaccccccccgccagattccccaaggcccccagcaagctgaccgtgggcggcccctggggccagagccaggagaaggagaagggcgacaagaacagcgccacccccaagcagaagcccctgccccccctgttcaccctgggcccccccccccccaagcccaacagaccccccaacgtggacctgaccaagttccacaagaccagcagcggcaacagcaccagcaagggccagaccagctacagcaccaccagcctgcccccccccccccccagccaccccgccagccagccccccctgcccgccagccaccccagccagccccccgtgcccagcctgccccccagaaacatcaagccccccttcgacctgaagagccccgtgaacgaggacaaccaggacggcgtgacccacagcgacggcgccggcaacctggacgaggagcaggacagcgagggcgagacctacgaggacatcgaggccagcaaggagagagagaagaagagagagaaggaggagaagaagagactggagctggagaagaaggagcagaaggagaaggagaagaaggagcaggagatcaagaagaagttcaagctgaccggccccatccaggtgatccacctggccaaggcctgctgcgacgtgaagggcggcaagaacgagctgagcttcaagcagggcgagcagatcgagatcatcagaatcaccgacaaccccgagggcaagtggctgggcagaaccgccagaggcagctacggctacatcaagaccaccgccgtggagatcgactacgacagcctgaagctgaagaaggacagcctgggcgcccccagcagacccatcgaggacgaccaggaggtgtacgacgacgtggccgagcaggacgacatcagcagccacagccagagcggcagcggcggcatcttcccccccccccccgacgacgacatctacgacggcatcgaggaggaggacgccgacgacggcagcaccctgcaggtgcaggagaagagcaacacctggagctggggcatcctgaagatgctgaagggcaaggacgacagaaagaagagcatcagagagaagcccaaggtgagcgacagcgacaacaacgagggcagcagcttccccgccccccccaagcagctggacatgggcgacgaggtgtacgacgacgtggacaccagcgacttccccgtgagcagcgccgagatgagccagggcaccaacgtgggcaaggccaagaccgaggagaaggacctgaagaagctgaagaagcaggagaaggaggagaaggacttcagaaagaagttcaagtacgacggcgagatcagagtgctgtacagcaccaaggtgaccaccagcatcaccagcaagaagtggggcaccagagacctgcaggtgaagcccggcgagagcctggaggtgatccagaccaccgacgacaccaaggtgctgtgcagaaacgaggagggcaagtacggctacgtgctgagaagctacctggccgacaacgacggcgagatctacgacgacatcgccgacggctgcatctacgacaacgactag

SEQ ID NO: 85805 - DNA, 2244 bp, Artificial Sequence
  derived and/or modified sequence
atggccaagtacaacaccggcggcaaccccaccgaggacgtgagcgtgaacagcagacccttcagagtgaccggccccaacagcagcagcggcatccaggccagaaagaacctgttcaacaaccagggcaacgccagcccccccgccggccccagcaacgtgcccaagttcggcagccccaagccccccgtggccgtgaagcccagcagcgaggagaagcccgacaaggagcccaagccccccttcctgaagcccaccggcgccggccagagattcggcacccccgccagcctgaccaccagagaccccgaggccaaggtgggcttcctgaagcccgtgggccccaagcccatcaacctgcccaaggaggacagcaagcccaccttcccctggccccccggcaacaagcccagcctgcacagcgtgaaccaggaccacgacctgaagcccctgggccccaagagcggccccaccccccccaccagcgagaacgagcagaagcaggccttccccaagctgaccggcgtgaagggcaagttcatgagcgccagccaggacctggagcccaagcccctgttccccaagcccgccttcggccagaagccccccctgagcaccgagaacagccacgaggacgagagccccatgaagaacgtgagcagcagcaagggcagccccgcccccctgggcgtgagaagcaagagcggccccctgaagcccgccagagaggacagcgagaacaaggaccacgccggcgagatcagcagcctgcccttccccggcgtggtgctgaagcccgccgccagcagaggcggccccggcctgagcaagaacggcgaggagaagaaggaggacagaaagatcgacgccgccaagaacaccttccagagcaagatcaaccaggaggagctggccagcggcaccccccccgccagattccccaaggcccccagcaagctgaccgtgggcggcccctggggccagagccaggagaaggagaagggcgacaagaacagcgccacccccaagcagaagcccctgccccccctgttcaccctgggcccccccccccccaagcccaacagaccccccaacgtggacctgaccaagttccacaagaccagcagcggcaacagcaccagcaagggccagaccagctacagcaccaccagcctgcccccccccccccccagccaccccgccagccagccccccctgcccgccagccaccccagccagccccccgtgcccagcctgccccccagaaacatcaagccccccttcgacctgaagagccccgtgaacgaggacaaccaggacggcgtgacccacagcgacgtggtgatccccctggaccacgagcaggacagcgagggcgagacctacgaggacatcgaggccagcaaggagagagagaagaagagagagaaggaggagaagaagagactggagctggagaagaaggagcagaaggagaaggagaagaaggagcaggagatcaagaagaagttcaagctgaccggccccatccaggtgatccacctggccaaggcctgctgcgacgtgaagggcggcaagaacgagctgagcttcaagcagggcgagcagatcgagatcatcagaatcaccgacaaccccgagggcaagtggctgggcagaaccgccagaggcagctacggctacatcaagaccaccgccgtggagatcgactacgacagcctgaagctgaagaaggacagcctgggcgcccccagcagacccatcgaggacgaccaggaggtgtacgacgacgtggccgagcaggacgacatcagcagccacagccagagcggcagcggcggcatcttcccccccccccccgacgacgacatctacgacggcatcgaggaggaggacgccgacgacggcagcaccctgcaggtgcaggagaagagcaacacctggagctggggcatcctgaagatgctgaagggcaaggacgacagaaagaagagcatcagagagaagcccaaggtgagcgacagcgacaacaacgagggcagcagcttccccgccccccccaagcagctggacatgggcgacgaggtgtacgacgacgtggacaccagcgacttccccgtgagcagcgccgagatgagccagggcaccaacgtgggcaaggccaagaccgaggagaaggacctgaagaagctgaagaagcaggagaaggaggagaaggacttcagaaagaagttcaagaagtag

SEQ ID NO: 85806 - DNA, 2490 bp, Artificial Sequence
  derived and/or modified sequence
atggcgaaatataacacgggaggcaaccccaccgaagacgtcagcgtaaactcacgtccattcagggtcacagggcctaactcatcaagtggaattcaggctaggaaaaacttatttaacaatcaaggaaatgcaagcccccccgctggcccctcaaatgtgccgaaatttggttcacccaaacccccagttgccgtgaagccctccagtgaagagaagcctgacaaggagcccaagccaccttttcttaaacctactggcgccggacagcgattcggaaccccggcaagcctgaccacacgcgatccggaggcgaaagttggattcttaaaaccggtcggccccaagcccataaatttgcctaaggaggattctaagccgaccttcccctggccccccggaaataaaccaagcctgcactcagtgaatcaggaccacgaccttaagcctctgggaccaaagtctggaccaacacccccaaccagcgagaatgaacagaagcaggcctttcctaagttgacaggggtgaaagggaaattcatgtccgcgtcacaagacctcgaaccaaaaccactcttcccaaaaccagcctttggccaaaagccccctctgagtactgagaatagtcacgaagacgagtccccaatgaagaatgtatcatcctccaagggcagtccagcccctctgggggtgaggagcaaaagcggtcccttgaagcccgcccgcgaggactcagagaataaggatcatgccggagaaatttcctcactgccttttccaggggtggtcctgaaacccgcggcctcgcgaggtgggccaggattgtcgaagaacggcgaagaaaaaaaggaggaccggaagatcgacgcagccaagaatacctttcagagtaagattaaccaggaggagctggcatcaggaacccccccagcacggttcccgaaagctcccagcaaattgactgtaggaggcccatgggggcaatcccaggaaaaggaaaagggcgataaaaattctgccacccccaaacagaaaccactcccccccctcttcactctcgggcccccaccccccaagcctaaccgcccccctaatgtggatctgacaaaatttcacaaaacttcatcaggcaacagcacttcaaagggccagacgagctatagcaccacttccctgcctcctcccccgccctcacatcccgctagccagcccccattgccagccagccatccctctcagccccctgtacccagcctaccaccacgcaacataaaaccacccttcgatctgaagagcccagtgaacgaggataatcaagatggagtgacacactccgacggagctggaaatctagatgaagagcaggattcagagggcgaaacttacgaagacatcgaggcctctaaggaaagagaaaagaaacgggaaaaggaggagaaaaaaaggttggagctggagaagaaagagcagaaggaaaaagaaaagaaagagcaagaaattaaaaagaagttcaaactgactggtcccatccaggtgatccatcttgcaaaggcctgctgcgatgtgaaaggcggcaagaatgagttatccttcaaacaaggagagcagatcgagataatccggattaccgacaaccccgagggaaaatggctcggcaggaccgctcgtggttcctacggatatataaagaccacagctgtggaaatcgactatgatagccttaagctgaagaaggactccctaggtgctccctcccggccaatagaagatgaccaggaggtgtacgatgacgtggctgaacaagacgacatctcaagtcatagccagagcggctctggggggattttcccacccccccccgatgacgacatctatgatggcattgaagaggaagatgcggacgatggaagcacactgcaggtgcaggagaagtccaacacttggtcttggggtatcttaaagatgttgaagggaaaggacgaccgaaaaaagagcatccgcgagaagcccaaagtgtctgacagcgataacaatgagggatcgtctttcccagctcctcctaagcagctggatatgggagacgaggtgtacgacgacgtggatacaagtgacttcccagtcagcagcgctgaaatgtcccagggaactaacgtgggtaaagctaaaaccgaggagaaagacctcaaaaaactgaagaagcaggagaaagaggaaaaggacttccgcaaaaaattcaagtacgatggagagattcgcgtgctgtattctactaaagtgactacctccatcactagcaagaagtggggtactagggacctccaggtgaagccgggggagagtctcgaggtgatccaaaccacagatgatacgaaggtgctgtgcagaaatgaagaaggaaagtacggctacgtcttacgttcatacctggccgataacgatggcgagatctacgacgacatcgccgacggctgtatctatgataatgactag

SEQ ID NO: 85807 - DNA, 66 bp, Artificial Sequence
  derived and/or modified sequence
atggccaagtataacacaggaggaaacccaactgaggatgtcagtgtgaactctagacccttttag

SEQ ID NO: 85808 - DNA, 69 bp, Artificial Sequence
  derived and/or modified sequence
atggctaaatataatactggcggcaaccctacggaagatgtgagcgtgaactctcggcccttccgctag

SEQ ID NO: 85809 - DNA, 2490 bp, Artificial Sequence
  derived and/or modified sequence
atggccaaatacaacaccggaggtaacccaaccgaggatgtctcggtgaactcgcggcctttcagagtgacaggaccaaactcaagcagcggtatccaggcccggaagaatctgttcaacaatcaaggaaatgccagccctcctgccgggccaagtaatgtgccaaagtttgggagccccaaacctcctgtagctgtgaaacccagtagtgaagaaaagcccgataaggaaccaaagcctccatttcttaaaccaaccggcgcagggcagcggttcgggactccggctagcctcacaactagagacccagaggccaaagtaggattcctgaaacctgtggggcctaaaccaataaacctgcccaaagaggattcaaaacctaccttcccttggccccccggtaacaagccctctctgcattctgtcaaccaggaccacgatttgaagcccctggggccgaagtccggccctactccacctacgtcggagaatgagcagaagcaagctttcccaaagctgactggagtgaaggggaaattcatgtccgcgtcccaggatttggagccgaaaccgctattcccaaagcctgctttcggccagaaaccacctctgagtactgaaaatagtcacgaggacgagagtccaatgaagaacgtgtcgtcctcaaaaggttcacccgctcctctgggggtgcggagcaagagcggaccactgaaaccggcgagggaagattcagagaacaaggatcatgcaggcgaaatttctagtctgcccttcccgggagtggtgctgaaaccagccgccagcagaggcggcccaggattatccaagaatggggaagaaaagaaagaggatcggaagatcgacgctgccaagaacacattccagagtaaaattaatcaggaggaacttgcatcaggcacacctcccgcaagatttcctaaagctccctctaagcttaccgtcggcggtccatgggggcagtcgcaggaaaaggagaagggagataaaaatagcgccaccccaaagcagaaacccctccctccattatttacactcggacccccaccaccgaagcccaacaggccgcccaacgtggacctgaccaagtttcacaagacttcatccgggaactccacttccaagggccagaccagctactccaccacttccttacctccaccgccaccttctcatcctgcatcccaacctccgttgccagcctcccatccttctcagccacccgttccatctctccccccaagaaacattaagcccccttttgatctgaagtcccccgtcaacgaggacaaccaggacggagtgactcattcagacggggctgggaacttagatgaagagcaggacagtgaaggagagacctacgaggatatcgaagcctcaaaggagcgggaaaagaagagagagaaggaagagaagaagcggctggagttggagaagaaggaacagaaggaaaaggaaaagaaagaacaggagatcaaaaaaaagttcaaattgaccggaccaatccaggttatccatctagcaaaagcctgttgtgatgttaagggagggaagaacgagctctcctttaagcagggagaacaaattgagattattaggatcaccgacaatcctgaggggaagtggctgggccgcactgcccgcggatcatatggctatatcaagactactgccgttgaaattgactacgatagtcttaaacttaaaaaagatagcctgggggctccatcacgacccattgaggacgaccaggaagtgtacgacgacgttgcggagcaggatgatattagttcccacagtcagtccggctctggcggcatatttcctccaccacctgacgacgatatttatgacgggattgaagaagaggatgccgatgatggtagcacacttcaggtccaggagaaatcaaacacttggtcatgggggattctgaagatgctgaagggcaaagatgacagaaagaagagcattcgggagaagcctaaggtatccgactctgacaacaacgagggaagtagtttccccgcccctcccaaacagttagacatgggagacgaagtgtacgatgacgtggatacctcagatttcccagtgagctcagccgagatgtctcagggcacgaacgtgggaaaagctaaaacagaggaaaaggacctcaaaaagctgaaaaagcaagagaaagaagaaaaggactttcgtaagaaattcaaatatgacggggagatccgcgtgctctactcgacaaaggtgactacttcaataactagcaagaagtggggcacccgggaccttcaggtgaaacctggtgaatcgctcgaggtgatccagacaacggatgatactaaggtgttgtgcagaaatgaggaaggaaaatacggctatgtgctgagatcatacttggcggataatgatggcgagatttacgacgatatcgccgatggttgcatttatgacaatgactag

SEQ ID NO: 85810 - DNA, 2520 bp, Artificial Sequence
  derived and/or modified sequence
atggacggtaaggctgacgttaagagcctgatggccaaatataacactggagggaatcccacagaggatgtgagcgtgaatagtagaccctttagggtgacgggtccaaatagcagcagcggaatccaggcccggaagaatctgttcaataaccagggcaatgcctcacctccagccgggccatcaaacgtgccgaagttcggctccccaaagccccctgttgcagtgaaaccgagctctgaagagaaaccggataaggagcccaaaccccctttcctgaagccgaccggagcaggccagcgatttggaactccagctagtctaacaaccagagatccagaagccaaagtggggttcttaaagccagtcggccccaagcccataaacttgcctaaagaggatagtaagcctacatttccctggcctcccggcaacaaaccctctctgcatagcgtgaaccaggaccacgatctgaagcctctcggacctaaatctggacctactcctcctacatccgagaacgagcaaaagcaggcatttcccaagcttactggagtcaagggaaagttcatgtcggcatctcaagatctggaaccgaagcctctgtttccaaagcctgcctttgggcagaagccaccgctgagtaccgagaactcacacgaagatgagtccccaatgaagaacgtgtcctcatctaaaggttctccggcacctctgggagtccggagcaaaagcggaccgttaaagccggccagagaagacagcgaaaacaaggatcacgccggagagatctcaagtctacccttccccggggtggtattgaaacctgcagccagccgcggcggacccggcctctcaaagaacggcgaggagaagaaggaggacagaaagatcgatgccgcaaagaacacctttcagagcaaaatcaaccaggaggaattagcgtcgggcactccaccagccagatttcccaaggccccgtccaaattaacggtgggaggaccttggggacaatcacaagaaaaggaaaagggggacaagaacagtgccacaccaaagcaaaaaccactgccacccctgttcactctcggtccgcccccacccaagcccaatagacccccaaacgtcgacctcactaagttccataagacttcaagtggaaatagtaccagcaaaggccagactagttatagcaccactagtttacctccaccccccccatcacaccccgcgtcacagccacccctgccagcatctcatccgtcccaaccaccagtccccagccttccgccccggaacattaaacctccatttgatctgaaatcgcccgtcaacgaggataaccaggacggagtcacgcactccgacggtgcaggtaacctggacgaagagcaagactctgaaggagagacgtatgaggacattgaggcctcaaaggaaagggagaagaaaagggagaaggaagagaaaaaacgtctagagcttgagaaaaaagaacaaaaggagaaggaaaagaaggagcaggagatcaaaaagaagtttaaacttacgggaccaatccaggtcattcacctcgcaaaagcatgttgcgatgtgaagggcggcaagaacgaactttctttcaaacagggcgaacagatcgagatcattcggattacagacaaccccgaaggtaagtggctagggcggactgcccggggtagttatggttacatcaaaacgaccgcagtggaaattgattacgactccttaaaattgaagaaggattctctcggcgccccaagtagacctatagaggacgaccaggaagtgtacgacgatgttgcagagcaggacgatatcagtagccactcgcagagtggctccggaggcattttcccaccaccccctgatgatgacatttatgacggtattgaagaggaggacgccgacgatgggtcaacattgcaagtgcaggagaaaagtaatacttggtcatggggcatcctgaagatgctaaaaggcaaagatgatcggaagaaatctatccgcgagaaaccaaaagtgagtgacagcgacaataatgaagggtcctcttttcccgccccgccaaagcagctcgacatgggcgacgaagtgtacgacgacgtggacacttccgatttccctgtctctagtgccgagatgagtcagggaacaaacgttgggaaagcaaagacggaggagaaggatctaaagaaactgaagaagcaggaaaaagaagaaaaagactttcgaaagaagttcaaatatgatggggagattagggtcctctatagcacgaaagtgacaacaagcatcacctctaagaaatggggaactcgcgatttgcaggtaaaacctggggagtctttggaagttattcagacaacggacgataccaaagtgctatgtcgcaacgaagagggcaagtacggctacgtcctgcggtcttacctggccgataacgatggcgagatttacgacgatatagccgacgggtgcatttatgacaacgactag

SEQ ID NO: 85811 - DNA, 2244 bp, Artificial Sequence
  derived and/or modified sequence
atggccaagtataacacgggtggtaaccctactgaagatgtatccgtcaattctagaccattccgcgtgactggacctaactcaagttctggtatccaggctaggaagaacctctttaataaccagggtaacgcctcgcctccagctgggccatccaacgtcccaaaatttggttctccgaagccgcccgtggcggtcaagccatcttcagaggagaagccagataaggagcccaagccccccttcttgaagcccaccggagccggccaaagattcgggacacctgcgtctctgacaactagagaccccgaagctaaggtgggtttcctgaagcctgtaggacctaagccgatcaacctgccaaaggaggactcaaaacctacatttccatggccccccgggaacaagccctctttacactccgtaaaccaggatcatgacttgaaacccttaggcccaaagagtggaccaactcctccgacaagcgagaatgaacagaagcaagcctttccaaaactgaccggcgttaaagggaagtttatgtctgcatctcaggacctggaaccgaaacctttattccctaaaccagcctttggccaaaagccacctcttagtaccgagaacagtcatgaggatgagtcccctatgaagaatgtgagctcctccaagggaagcccagccccactgggtgtccgctcaaagtctggcccgctcaagcccgccagagaggactcagaaaacaaagaccacgctggcgaaatctcatcacttcccttccctggtgtagtcctcaaacctgccgcgagccggggaggtcctggtctctccaaaaacggcgaagagaagaaagaggaccgcaagatagatgctgccaagaacaccttccagtccaagataaatcaagaagaactggcctcaggaaccccccccgctcgcttcccaaaggctccttctaaactgaccgttggggggccctggggccaatcacaggagaaggagaaaggcgacaaaaattctgccaccccaaaacagaagcctctgcccccactgttcaccttagggccccctcctcctaagccaaatcgccctcctaacgtggatctgaccaaatttcacaaaaccagctccgggaacagcacgtccaagggacagacaagttacagtacgacttcactgccaccgcctccaccttctcacccagcaagccagcctccgctaccagcatcacatcctagtcagccccccgtaccctccttaccccctagaaatatcaagcctcctttcgatcttaagagccccgtgaatgaggacaaccaggacggcgtgacacactccgatgtagtgattccactggaccatgagcaggatagcgagggcgagacttatgaagacatcgaggcttccaaggaaagggagaaaaaacgagagaaagaggagaagaagcggttggagctcgaaaaaaaggagcaaaaggagaaggaaaaaaaagaacaagagataaaaaagaaatttaagttgacgggacctatacaggtaatccacctcgcaaaagcttgctgcgacgtaaaaggcggaaaaaatgaactgtccttcaaacagggcgaacagatcgagataattagaatcaccgacaatcctgagggcaagtggctcggccggaccgctagaggctcgtatggctatatcaagaccaccgccgtcgaaattgattacgattcactgaaactgaagaaagacagtcttggagccccaagccgtccaatagaggatgaccaggaagtatatgatgatgtcgctgagcaggacgacataagcagccattctcagtccggctcgggggggattttccccccccctcccgacgatgatatctacgacggcatcgaggaggaggatgccgatgatggcagcacactgcaggtccaggagaaatccaacacctggtcatggggtatccttaagatgttaaaaggcaaggacgataggaaaaaaagcatcagggagaagcccaaagtttcagattcagataataatgaagggagctccttccccgctcccccgaagcagctcgatatgggcgatgaggtttatgatgacgtcgacacgtctgactttcccgtctcttccgctgagatgtcacaagggacaaacgtgggtaaagctaagacggaagaaaaggacctgaagaagctcaaaaaacaggagaaagaggaaaaggacttcagaaagaagttcaaaaagtag

SEQ ID NO: 85812 - DNA, 2490 bp, Artificial Sequence
  derived and/or modified sequence
atggccaagtacaacacaggaggcaaccccacagaagatgtgtctgtgaacagccggcccttccgggtgacaggccccaacagcagcagcggcatccaggccaggaagaacctcttcaacaaccagggcaatgccagccccccagctggccccagcaatgtgcccaagtttggcagccccaagccccctgtggccgtgaagcccagcagcgaggagaagccagacaaggagcccaagccacccttcctgaagcccaccggggccggccagcgcttcggcaccccagccagcctgaccacccgggaccctgaggccaaggtgggcttcctgaagcctgtgggccccaagcccatcaacctgcccaaggaggacagcaagcccaccttcccctggcccccaggcaacaagcccagcctgcacagcgtgaaccaggaccatgacctgaagcccctgggccccaagagcggccccaccccacccaccagtgaaaatgagcagaagcaggccttccccaagctgactggagtgaagggcaagttcatgtctgccagccaggacctggagcccaagcccctcttccccaagccagccttcggccagaagccacccctgagcacagagaacagccatgaagatgagagccccatgaagaatgtgagcagcagcaagggcagccctgcccccctgggcgtgcgcagcaagagcggccccctgaagccagccagagaagattctgagaacaaggaccatgctggggagatcagcagcctgcccttccctggggtggtgctgaagccagctgccagcagaggaggccctggcctgagcaagaatggagaggagaagaaggaggacaggaagattgatgctgccaagaacaccttccagagcaagatcaaccaggaggagctggccagcggcaccccaccagcccgcttccccaaggcccccagcaagctgactgtgggcggcccctggggccagagccaggagaaggagaagggggacaagaacagcgccacccccaagcagaagcccctgcccccactcttcaccctgggccccccaccacccaagcccaacagacctccaaatgtggacctgaccaagttccacaagaccagcagcggcaacagcaccagcaagggccagaccagctacagcaccaccagcctgcccccacctccacccagccacccagccagccagccccccctgcctgccagccaccccagccagccccctgtgcccagcctgccccccaggaacatcaagcccccatttgacctgaagagccctgtgaatgaagacaaccaggatggagtgacccacagtgatggagctggcaacctggatgaggagcaggacagcgagggggagacctatgaagatattgaggccagcaaggagcgggagaagaagcgggagaaggaggagaagaagaggctggagctggagaagaaggagcagaaggagaaggagaagaaggagcaggagatcaagaagaagttcaagctgaccggccccatccaggtgatccacctggccaaggcctgctgtgatgtgaagggcggcaagaatgagctgtccttcaagcagggcgagcagatcgagatcatccgcatcacagacaaccctgagggcaagtggctgggccgcacagcccggggcagctatggctacatcaagaccacagctgtggagattgattatgacagcctgaagctgaagaaggacagcctgggcgcccccagccggcccattgaagatgaccaggaggtgtatgatgatgtggccgagcaggatgacatcagcagccacagccagagcggcagcggcggcatcttccccccacctccagatgatgacatctatgatggcatcgaggaggaggatgctgatgatggcagcaccctgcaggtgcaggagaagagcaacacctggagctggggcatcctgaagatgctgaagggcaaggatgacaggaagaagagcatccgggagaagcccaaggtgtctgacagcgacaacaatgaaggcagcagcttccctgccccacccaagcagctggacatgggagatgaggtgtatgatgatgtggacaccagtgacttccctgtgtcctctgctgagatgagccagggcaccaacgtgggcaaggccaagacagaggagaaggacctgaagaagctgaagaagcaggagaaggaggagaaggacttcaggaagaagttcaagtatgatggagagatccgggtgctgtacagcaccaaggtgaccaccagcatcaccagcaagaagtggggcacccgggacctgcaggtgaagccaggagagagcctggaggtgatccagaccacagatgacaccaaggtgctgtgcagaaatgaggagggcaagtatggctacgtgctgcggagctacctggccgacaatgatggagagatctatgatgacattgctgatggctgcatctatgacaatgactag

SEQ ID NO: 85813 - DNA, 66 bp, Artificial Sequence
  derived and/or modified sequence
atggccaagtacaacacaggaggcaaccccacagaagatgtgtctgtgaacagccggcccttctag

SEQ ID NO: 85814 - DNA, 69 bp, Artificial Sequence
  derived and/or modified sequence
atggccaagtacaacacaggaggcaaccccacagaagatgtgtctgtgaacagccggcccttcagatag

SEQ ID NO: 85815 - DNA, 2520 bp, Artificial Sequence
  derived and/or modified sequence
atggatggcaaggcagatgtgaagagcctgatggccaagtacaacacaggaggcaaccccacagaagatgtgtctgtgaacagccggcccttccgggtgacaggccccaacagcagcagcggcatccaggccaggaagaacctcttcaacaaccagggcaatgccagccccccagctggccccagcaatgtgcccaagtttggcagccccaagccccctgtggccgtgaagcccagcagcgaggagaagccagacaaggagcccaagccacccttcctgaagcccaccggggccggccagcgcttcggcaccccagccagcctgaccacccgggaccctgaggccaaggtgggcttcctgaagcctgtgggccccaagcccatcaacctgcccaaggaggacagcaagcccaccttcccctggcccccaggcaacaagcccagcctgcacagcgtgaaccaggaccatgacctgaagcccctgggccccaagagcggccccaccccacccaccagtgaaaatgagcagaagcaggccttccccaagctgactggagtgaagggcaagttcatgtctgccagccaggacctggagcccaagcccctcttccccaagccagccttcggccagaagccacccctgagcacagagaacagccatgaagatgagagccccatgaagaatgtgagcagcagcaagggcagccctgcccccctgggcgtgcgcagcaagagcggccccctgaagccagccagagaagattctgagaacaaggaccatgctggggagatcagcagcctgcccttccctggggtggtgctgaagccagctgccagcagaggaggccctggcctgagcaagaatggagaggagaagaaggaggacaggaagattgatgctgccaagaacaccttccagagcaagatcaaccaggaggagctggccagcggcaccccaccagcccgcttccccaaggcccccagcaagctgactgtgggcggcccctggggccagagccaggagaaggagaagggggacaagaacagcgccacccccaagcagaagcccctgcccccactcttcaccctgggccccccaccacccaagcccaacagacctccaaatgtggacctgaccaagttccacaagaccagcagcggcaacagcaccagcaagggccagaccagctacagcaccaccagcctgcccccacctccacccagccacccagccagccagccccccctgcctgccagccaccccagccagccccctgtgcccagcctgccccccaggaacatcaagcccccatttgacctgaagagccctgtgaatgaagacaaccaggatggagtgacccacagtgatggagctggcaacctggatgaggagcaggacagcgagggggagacctatgaagatattgaggccagcaaggagcgggagaagaagcgggagaaggaggagaagaagaggctggagctggagaagaaggagcagaaggagaaggagaagaaggagcaggagatcaagaagaagttcaagctgaccggccccatccaggtgatccacctggccaaggcctgctgtgatgtgaagggcggcaagaatgagctgtccttcaagcagggcgagcagatcgagatcatccgcatcacagacaaccctgagggcaagtggctgggccgcacagcccggggcagctatggctacatcaagaccacagctgtggagattgattatgacagcctgaagctgaagaaggacagcctgggcgcccccagccggcccattgaagatgaccaggaggtgtatgatgatgtggccgagcaggatgacatcagcagccacagccagagcggcagcggcggcatcttccccccacctccagatgatgacatctatgatggcatcgaggaggaggatgctgatgatggcagcaccctgcaggtgcaggagaagagcaacacctggagctggggcatcctgaagatgctgaagggcaaggatgacaggaagaagagcatccgggagaagcccaaggtgtctgacagcgacaacaatgaaggcagcagcttccctgccccacccaagcagctggacatgggagatgaggtgtatgatgatgtggacaccagtgacttccctgtgtcctctgctgagatgagccagggcaccaacgtgggcaaggccaagacagaggagaaggacctgaagaagctgaagaagcaggagaaggaggagaaggacttcaggaagaagttcaagtatgatggagagatccgggtgctgtacagcaccaaggtgaccaccagcatcaccagcaagaagtggggcacccgggacctgcaggtgaagccaggagagagcctggaggtgatccagaccacagatgacaccaaggtgctgtgcagaaatgaggagggcaagtatggctacgtgctgcggagctacctggccgacaatgatggagagatctatgatgacattgctgatggctgcatctatgacaatgactag

SEQ ID NO: 85816 - DNA, 2244 bp, Artificial Sequence
  derived and/or modified sequence
atggccaagtacaacacaggaggcaaccccacagaagatgtgtctgtgaacagccggcccttccgggtgacaggccccaacagcagcagcggcatccaggccaggaagaacctcttcaacaaccagggcaatgccagccccccagctggccccagcaatgtgcccaagtttggcagccccaagccccctgtggccgtgaagcccagcagcgaggagaagccagacaaggagcccaagccacccttcctgaagcccaccggggccggccagcgcttcggcaccccagccagcctgaccacccgggaccctgaggccaaggtgggcttcctgaagcctgtgggccccaagcccatcaacctgcccaaggaggacagcaagcccaccttcccctggcccccaggcaacaagcccagcctgcacagcgtgaaccaggaccatgacctgaagcccctgggccccaagagcggccccaccccacccaccagtgaaaatgagcagaagcaggccttccccaagctgactggagtgaagggcaagttcatgtctgccagccaggacctggagcccaagcccctcttccccaagccagccttcggccagaagccacccctgagcacagagaacagccatgaagatgagagccccatgaagaatgtgagcagcagcaagggcagccctgcccccctgggcgtgcgcagcaagagcggccccctgaagccagccagagaagattctgagaacaaggaccatgctggggagatcagcagcctgcccttccctggggtggtgctgaagccagctgccagcagaggaggccctggcctgagcaagaatggagaggagaagaaggaggacaggaagattgatgctgccaagaacaccttccagagcaagatcaaccaggaggagctggccagcggcaccccaccagcccgcttccccaaggcccccagcaagctgactgtgggcggcccctggggccagagccaggagaaggagaagggggacaagaacagcgccacccccaagcagaagcccctgcccccactcttcaccctgggccccccaccacccaagcccaacagacctccaaatgtggacctgaccaagttccacaagaccagcagcggcaacagcaccagcaagggccagaccagctacagcaccaccagcctgcccccacctccacccagccacccagccagccagccccccctgcctgccagccaccccagccagccccctgtgcccagcctgccccccaggaacatcaagcccccatttgacctgaagagccctgtgaatgaagacaaccaggatggagtgacccacagtgatgtggtgatccccctggaccacgagcaggacagcgagggggagacctatgaagatattgaggccagcaaggagcgggagaagaagcgggagaaggaggagaagaagaggctggagctggagaagaaggagcagaaggagaaggagaagaaggagcaggagatcaagaagaagttcaagctgaccggccccatccaggtgatccacctggccaaggcctgctgtgatgtgaagggcggcaagaatgagctgtccttcaagcagggcgagcagatcgagatcatccgcatcacagacaaccctgagggcaagtggctgggccgcacagcccggggcagctatggctacatcaagaccacagctgtggagattgattatgacagcctgaagctgaagaaggacagcctgggcgcccccagccggcccattgaagatgaccaggaggtgtatgatgatgtggccgagcaggatgacatcagcagccacagccagagcggcagcggcggcatcttccccccacctccagatgatgacatctatgatggcatcgaggaggaggatgctgatgatggcagcaccctgcaggtgcaggagaagagcaacacctggagctggggcatcctgaagatgctgaagggcaaggatgacaggaagaagagcatccgggagaagcccaaggtgtctgacagcgacaacaatgaaggcagcagcttccctgccccacccaagcagctggacatgggagatgaggtgtatgatgatgtggacaccagtgacttccctgtgtcctctgctgagatgagccagggcaccaacgtgggcaaggccaagacagaggagaaggacctgaagaagctgaagaagcaggagaaggaggagaaggacttcaggaagaagttcaagaagtag

SEQ ID NO: 85817 - DNA, 2490 bp, Artificial Sequence
  derived and/or modified sequence
atggccaagtacaacaccggcggcaaccccaccgaggacgtgagcgtaaactcccgcccatttcgcgtcacaggcccgaattccagctcgggaatccaggcacgaaagaacctgtttaacaatcagggcaatgcatccccgccggctggccccagcaacgtgccaaagttcggatccccaaaaccaccagttgccgtaaagccttctagtgaagagaagcccgataaagaaccaaaaccccccttcctcaagccaaccggcgctggccaacgatttgggactcctgcttctctgaccacccgagaccctgaggctaaggtgggattcttgaaaccagttgggcctaagcctatcaacctgccaaaggaagactcaaaacctacgttcccctggcccccagggaataaaccctcgttacactctgtaaaccaagatcatgatctaaagccgctggggccaaagtccggcccgactccacccacatccgaaaacgagcagaagcaggccttccccaaattgacgggagtgaagggcaagtttatgtcagccagtcaggacctcgagcccaagccactcttcccgaagcctgccttcgggcaaaagccacctctttctacagaaaatagtcacgaggatgagtctcccatgaaaaatgtgagctcctccaaaggtagcccagcacctttgggtgttaggagcaagagcggcccacttaaaccggcaagggaggactctgagaataaggaccatgcgggggaaatttcttccctccctttccccggggtggtgctgaagccagctgcgagcaggggtggcccgggattatctaaaaatggagaagagaaaaaggaagatcggaaaatcgacgccgctaagaacacttttcaatccaaaatcaatcaggaggaactggctagtgggacgccccctgctcgtttcccgaaagcaccttcaaagttgacagtcggtggaccctggggtcagtcccaggaaaaagagaagggggataagaattcggccacacccaagcaaaagccattaccgccactatttacgcttggcccacccccacccaaaccaaataggcctcctaacgttgatctgaccaagtttcacaagacgagctccggtaattcaacatctaaaggtcaaactagttacagcactacctctttgcctccgcccccgccctcccatccagcctcccagcccccccttcctgcgtcccatccatctcagccacccgttccttccctcccaccacggaacataaagccgccatttgatctgaagagtcccgtgaatgaggacaatcaggacggagttacacattcagacggagctggcaacttggacgaagagcaggatagcgaaggggaaacttacgaagatattgaggcttcgaaggaacgcgaaaaaaaaagggaaaaggaggaaaagaagagactggaacttgagaaaaaggagcagaaagagaaggagaagaaggagcaggaaatcaagaagaagttcaaattgaccgggcccatccaagtcatacacctggcaaaggcttgctgtgatgtgaaaggtggaaaaaatgagctcagttttaagcagggagaacagatagaaatcattaggatcactgataacccagagggtaagtggctgggacgtaccgctcgcggttcatacggttatataaagaccactgccgtcgaaatagattatgatagcctgaagctcaaaaaagatagtcttggggccccaagtcgacctatcgaggacgaccaggaggtctacgacgatgttgcagaacaagacgatatctcttctcacagtcagagcggatctgggggaatatttccccctcctcccgacgatgacatctatgacggaattgaggaggaggatgccgatgacggaagtacactgcaggtgcaggagaaatctaatacatggtcatggggaatcttgaagatgctgaaagggaaggacgaccgaaagaaatcaatccgggagaaacccaaggtcagtgatagtgacaataatgagggcagttctttccctgctcctccaaagcagctcgatatgggggatgaggtgtacgatgacgttgacaccagtgacttccctgtctcctcagccgaaatgagccaggggaccaatgttggtaaagccaaaactgaagaaaaggacctgaagaaactaaagaagcaagaaaaagaggagaaagactttcgaaaaaaattcaagtacgacggggagatccgcgtactttactccacaaaagttactacctccatcaccagcaagaagtggggcaccagagatcttcaggtaaaaccaggagaatcactcgaagtgatccagaccaccgacgacactaaggtcttgtgcagaaatgaagagggcaaatacggatacgttctgagatcctaccttgcggataacgacggcgaaatctacgatgacattgccgatgggtgtatctacgataacgattag

SEQ ID NO: 85818 - DNA, 66 bp, Artificial Sequence
  derived and/or modified sequence
atggccaagtacaacaccggcggcaaccccaccgaggacgtgagcgtcaacagtaggccattttag

SEQ ID NO: 85819 - DNA, 69 bp, Artificial Sequence
  derived and/or modified sequence
atggccaagtacaacaccggcggcaaccccaccgaggacgtgagcgtcaactcaagaccattcaggtag

SEQ ID NO: 85820 - DNA, 2490 bp, Artificial Sequence
  derived and/or modified sequence
atggccaagtacaacaccggcggcaaccccaccgaggacgtgagcgtcaattcaagaccttttcgtgtgacaggccctaacagttcctccggcatccaggcaaggaaaaatttgttcaacaatcagggcaacgcgagccctccagctggaccttccaacgttccaaaattcggctcccccaagccacccgtggcggtcaaaccctctagcgaggaaaaacctgacaaagagcccaagcctccattccttaaacctactggagcaggacaacgttttggaacccctgcatccctgaccaccagggaccctgaagcgaaggttggcttccttaagcccgtgggccccaaacccatcaacctgcctaaagaggatagcaagcccacatttccctggcctcctggaaataagccatcattgcacagcgtgaatcaggaccatgacttaaagccacttgggcccaagagtgggcccaccccccccacctcagaaaatgagcagaagcaggcctttcccaaactcaccggagtgaaggggaagtttatgtcagcaagccaggatctggaacctaaacctctgttcccgaagccggcatttgggcagaaacccccactcagcacagaaaactcacacgaagacgaatccccaatgaaaaacgtttcatcttccaaaggctctcccgctccactgggcgtccgcagcaagagtggtcctctgaagccagcacgagaagactctgaaaataaagatcatgctggagagatttcatctctccccttccctggagtcgttctgaaacccgccgcaagccgcgggggaccaggactcagcaagaacggagaggagaagaaagaagaccggaagatcgacgctgccaagaatacttttcaaagcaaaataaaccaggaggagctggcgagtggaacccctcccgcccgttttccaaaggcccccagcaagctcaccgttggaggtccgtggggccagtcccaggaaaaggagaagggggataagaactccgcaacccccaagcaaaaaccccttcctcccctgttcacgctgggcccacctccgccaaaaccaaaccgcccgcccaatgtggacctcaccaaattccataaaacgtctagcgggaatagcactagtaaaggacagacatcctatagcaccaccagtttacctcctccgcctcctagccatcctgcttcccaacccccattaccagcgtcgcacccctcacagcccccagttccctctctacctccgagaaacatcaaaccccccttcgatctgaagagtccagtcaatgaggacaaccaggacggagtcacccactcagacggggcgggcaacttagacgaggagcaggacagtgagggtgagacctacgaggacattgaagcttcaaaggaacgagagaagaagcgggaaaaagaggagaaaaagagactggaattagaaaagaaggagcaaaaagaaaaagagaagaaagagcaggaaatcaagaagaagttcaaactcactgggccgatccaagtcattcatcttgctaaggcttgctgcgacgtcaagggcgggaaaaatgaactgtccttcaaacagggggagcaaattgagattatacgaatcaccgacaatcctgaaggcaagtggctggggcgtaccgctcgcgggtcttacggctatattaagaccaccgctgtggagatcgactacgactcactgaaactcaagaaagattctcttggagcaccttcaagacccatcgaggatgatcaagaagtgtatgatgacgtcgccgagcaggatgacattagctcccactcacaatctggcagcggaggcatattccccccaccccctgatgacgacatctacgatggtatcgaggaggaggacgcggacgacggaagcaccctccaggtgcaagaaaagtccaacacttggagctggggcatcttgaaaatgctgaagggcaaggatgatagaaagaagtctatcagagagaaaccgaaggtcagcgatagcgacaacaacgagggaagtagtttcccagccccccccaaacaattggacatgggtgatgaagtgtacgatgatgtggacaccagtgactttcccgtaagttccgcggagatgagccaaggaacaaacgttggaaaggccaaaacagaggagaaggaccttaagaaactcaagaaacaagaaaaagaagagaaagactttcgcaaaaagtttaagtacgacggagagatcagagttttgtacagcaccaaagttactacatctataacatcaaagaaatggggtacgcgcgatctgcaagtgaaacctggcgaatccctagaggtcattcagacaacagatgacactaaagttctttgccggaacgaagaaggaaaatacggctacgtgctgaggtcgtatttggcggataacgatggcgagatatatgatgacattgccgacggctgcatctatgacaacgactag

SEQ ID NO: 85821 - DNA, 2520 bp, Artificial Sequence
  derived and/or modified sequence
atggacggcaaggccgacgtgaagagcctgatggccaagtacaacacaggggggaaccctactgaggacgtgagtgtgaactcccggcccttccgggtaactggaccgaactcctcgagtggtatacaagcccgcaagaatctcttcaacaaccagggcaacgcctcaccgcccgcaggcccaagcaatgtgcccaagttcgggtcacctaaaccccctgtggccgtgaagcctagctcagaggaaaaaccggacaaagagccaaagcctccattcctgaagccgactggtgcaggccagagattcggcacccccgcgtctctgacgacaagggaccccgaggccaaggttggatttctgaaacccgtgggccccaagcccataaaccttccaaaggaggacagcaagccaaccttcccatggccacccggcaataagccctcactgcactctgtgaaccaggaccacgacctgaaacctttagggcccaaaagcggacctactccacccactagtgagaatgaacaaaagcaggccttcccgaagctcaccggggtcaagggtaagtttatgtcagcctcccaggacctcgagcccaagccacttttcccaaaacctgccttcggccagaaacctcccttgtctactgaaaactcgcacgaggatgagagcccgatgaagaacgtcagttcgtcaaaaggttcccctgcccccttgggcgtgaggagcaagtctggaccgctgaagcctgcacgtgaggacagcgagaacaaggaccacgccggcgagatatctagcctgccgtttcctggagtggtgcttaagccggctgcatctcgtggcggtcccggcctatcaaaaaacggcgaagaaaaaaaggaggatcggaaaatagatgcagcaaaaaatacctttcagagtaagattaaccaggaagaactggcgagtggaacgccgcccgcacggttcccgaaggcccctagcaaactcacagtgggaggcccttggggacagtcgcaggagaaggagaagggagataaaaattccgcaacacccaaacagaagccactgcctcccctgtttacactgggaccaccacccccaaaacctaatcgcccacccaatgtggacctcacgaaatttcataagaccagttccggcaactcaacctccaagggccaaactagctatagtacgacctccctgcctccccctccccctagtcaccctgcctcacaaccccctctcccggcgagtcacccatcacagcccccagtgccttcccttccgccaagaaacattaaaccaccgtttgatttaaaatctccagtgaacgaagacaatcaggacggtgtcactcatagtgacggcgcgggcaacttggatgaagagcaggactcagaaggggaaacctacgaggacattgaagcatctaaggaaagagaaaagaagcgggagaaagaagagaagaaacgtttggagctagagaagaaggaacagaaggaaaaggagaagaaggagcaagaaatcaaaaagaagtttaagttgaccggcccgatacaggttatacatcttgccaaagcatgctgcgatgtcaaggggggaaaaaatgagctcagcttcaaacagggcgagcagattgagatcatcagaatcaccgataaccccgaaggaaagtggctaggaaggactgctagagggagctatggatatattaagacaaccgcggtcgaaatcgattatgattccctgaagctgaaaaaggattctctgggcgccccctccaggcccatcgaggacgaccaggaagtgtacgatgacgtcgctgagcaagatgatatttcctctcactcccagagcggaagtggcggaatttttcctcctccacctgacgacgatatatacgatggcatagaggaggaggacgcagatgatggttcaacactgcaggtccaggagaagtccaacacctggagctggggcatcttaaaaatgctcaaggggaaagatgaccggaagaaatccatcagagaaaagcccaaggtgtccgactccgacaataacgagggctcctcttttcctgcccctcctaagcagctggacatgggtgacgaggtgtacgacgacgtggacacgagtgatttcccagtcagcagtgccgagatgtctcaagggacgaatgtcgggaaggcaaagaccgaggaaaaggatctcaaaaaattaaagaagcaggaaaaagaggagaaggactttcggaaaaagttcaaatacgacggcgagatccgggtgctttacagcacaaaggtaaccacttccataacatccaagaagtggggcacccgagacctacaggttaagccgggggaatcactggaagtcattcaaacgacagatgataccaaagtgctttgcaggaacgaggagggaaagtacggctacgtgctgaggagctacctggcagacaatgatggggaaatttatgacgacattgccgacggttgtatatacgacaacgattag

SEQ ID NO: 85822 - DNA, 2244 bp, Artificial Sequence
  derived and/or modified sequence
atggccaagtacaacaccggcggcaaccccaccgaggacgtgagcgtcaacagccgaccttttagggtgaccgggccaaactcctccagcggaatccaggctcggaaaaacttgttcaataaccaggggaacgcctccccacctgccggcccaagcaatgttccaaagttcggctcccccaaaccccctgtggccgtgaaaccctcgtctgaggagaagcctgacaaggaacccaagcctccattcttgaagcctacaggcgcaggccagaggtttgggaccccagcaagcctgactactagagatcccgaggcaaaagtcggcttcctgaagccagtgggacctaagcccatcaacctcccaaaggaggatagcaaacctacttttccatggcctcctggcaataagccttctttacactcagtgaaccaggatcatgatttgaaacctttggggcctaagtcaggccccaccccccctacgtcagaaaatgagcagaaacaagccttcccaaaacttacaggggtgaagggtaagtttatgtcagcgtctcaggacctggaaccaaagcctctgttccccaagccagcctttggtcagaagccaccgcttagcactgaaaactcccatgaggatgagagtccaatgaaaaacgtgtctagctcgaaaggatctcctgctcctctcggcgttcgctccaagagtgggcccctaaagccagctagggaagattcggagaacaaagatcacgcaggagagatttctagtttaccctttcccggcgtagtcctcaagccagccgcaagccggggtggaccaggcttgagcaagaatggcgaggaaaaaaaagaggaccgcaagatcgatgcagctaagaacacattccaatctaaaattaaccaggaagagctggcaagtggaacaccccccgcacgatttccaaaggccccatcaaagctcactgtaggcgggccatgggggcaatcccaggagaaagagaagggagacaaaaactccgcaacaccaaagcagaagcctctgcctcccctatttaccttaggtccaccaccgccaaaacccaatcgtcccccaaacgtcgacctgaccaaattccataaaaccagctcaggcaatagcacaagcaaaggccaaacctcctactccacaaccagcctgcccccacccccaccaagtcatcctgcatcccagcctcccctgccagcttcccatccaagccagccacccgtgccaagcctcccaccccgcaacatcaagcctcctttcgacctgaaatcccctgtgaacgaagataaccaggacggcgtgactcactcagacgtggtgattcctttagaccacgagcaggactctgaaggtgagacctacgaggacattgaggcttccaaggagcgagagaagaaaagggagaaggaagaaaagaagagactggagctggaaaaaaaagaacagaaagaaaaggaaaagaaggaacaggaaatcaagaagaagttcaaactgactggtcctatccaggtgattcatttggctaaagcttgctgcgatgtgaagggcggtaagaacgagttgtccttcaaacaaggcgaacagatagaaatcatcagaatcacggataatccagaagggaaatggctcggccggacagctcggggatcatatggctatatcaaaacaaccgctgtggagattgattacgacagtctgaagctcaagaaggatagtctgggagcccccagcagacccatagaagatgatcaagaagtttatgacgacgtggctgagcaggacgatataagttctcactcacaaagtggtagtggaggcatctttccccccccccccgacgatgacatttacgatggcatcgaggaggaagacgcagatgacggctctacacttcaggtgcaggaaaagtccaacacctggagttggggcattctcaagatgctcaagggcaaggatgatagaaagaagtccattcgtgagaagcctaaggtctctgattctgacaacaatgaggggtcttccttccccgccccaccaaaacagttggatatgggggacgaagtatacgatgacgtcgacacatcagattttccagtgtcatctgccgagatgagtcagggaacaaatgtaggtaaggccaagaccgaggagaaggatttgaagaagttaaaaaagcaggaaaaggaggagaaggattttcggaagaagtttaaaaagtag

SEQ ID NO: 85823 - DNA, 2490 bp, Artificial Sequence
  derived and/or modified sequence
atggcgaaatacaataccggcggaaatcctaccgaggatgtctctgtaaactcacggcctttccgcgtgacagggcctaactctagctccggcatccaagccaggaaaaacttgttcaataaccaggggaacgcttcccctccggctggcccttccaacgtcccaaagttcggcagcccgaagcctcccgtcgccgtcaagccgtcttctgaagagaagcccgacaaagagcccaagccgcctttcctgaagcccactggagctggccagaggtttggaacgcccgcatcactgacaacaagggatccagaggccaaagttggcttcctgaaaccagtggggcctaaaccgatcaatttgccaaaagaagacagcaagcctactttcccatggcctccaggcaacaaaccgtctctgcattcagtgaaccaggaccatgatctgaagcctttaggccctaaatctgggcctactccaccgacctctgaaaacgagcagaagcaggcttttcccaagctgaccggagttaaaggaaagttcatgtccgcctcacaggacctggaacccaaaccgctgtttcccaaaccagcatttggacagaagcccccattatccacagaaaacagtcatgaagacgaatcccctatgaagaatgtgtcctcaagtaagggaagccctgcaccactgggggtgagaagcaagagtggtccattgaagcccgcacgtgaggactccgagaataaggaccacgcgggtgagatcagttccctgccctttccgggagtagtgttgaaacctgcagcaagtaggggcggtcctggcctctcgaagaatggagaggaaaaaaaggaggatcgcaaaatcgacgctgctaagaacaccttccagtctaagatcaaccaggaggaactggcctctggaacgccacccgctaggttccctaaggcaccttccaagctgacggtcggaggcccatgggggcagagtcaggaaaaagagaagggcgataagaactcagcaacccctaagcagaagcccttaccacctctgttcacactgggccctccaccgcctaaacctaatcgcccaccaaacgtggacctgactaagttccataagacttcctctggcaacagtacctcaaagggacagacatcttattcaaccacctcgctaccacctcctcccccttcgcaccctgctagccagcctcccctaccggctagccacccatcccagccgcctgttccatctctgcctccacggaacatcaaaccgccttttgacctgaagtcccctgttaacgaagacaatcaggacggggtgactcacagcgatggtgccggtaacttggatgaggagcaggactctgagggggagacctacgaggacattgaggcttctaaggagcgggaaaagaaacgcgagaaagaggaaaaaaaacgtttggagttggaaaagaaagagcagaaggagaaggaaaagaaagaacaggagattaagaaaaagtttaagctgacaggacccatccaagtgatacatctcgccaaagcctgctgtgacgtgaagggagggaagaatgaattatcttttaagcaaggcgaacagatcgagatcatacggatcacagataatcccgaaggcaagtggcttgggaggaccgccaggggctcctatggttatattaagaccaccgccgtggagatcgattatgactcattgaagttgaagaaagacagtcttggagctccaagtcgccctatcgaggatgatcaggaggtgtatgacgacgtggcagagcaggacgatatttcgtcccatagccagtccggctctggaggaattttccctccaccgccagacgacgatatatacgacggcattgaggaagaggatgccgacgacgggagtaccctccaggttcaagagaaatcaaatacatggagttggggaatcctgaagatgctgaagggaaaggacgatcggaagaaaagtatccgggaaaagccaaaagtgtctgactcggataacaatgaaggatcttcatttcctgctccacccaagcagttggatatgggcgacgaggtgtacgatgacgtagatacgtcggatttccccgtgtcttctgccgagatgtcccagggcactaacgtggggaaagcaaaaacagaagagaaagatctcaagaagctgaagaaacaggagaaagaagaaaaggactttcgtaagaagtttaagtacgacggcgagattcgagtcctgtactcaactaaagtcacaacgtcaatcacaagcaaaaagtgggggacaagggacctccaggttaagccaggagagtcactagaggttattcagacgactgacgatacgaaagttttgtgccgtaacgaggagggaaagtacggttatgtcctgagatcttatcttgctgacaatgatggggagatttacgacgacattgctgacggatgtatctatgataacgactag

SEQ ID NO: 85824 - DNA, 66 bp, Artificial Sequence
  derived and/or modified sequence
atggcgaaatacaatactggcggaaaccccaccgaggatgtctccgtcaactctaggcccttttag

SEQ ID NO: 85825 - DNA, 69 bp, Artificial Sequence
  derived and/or modified sequence
atggccaagtataacacagggggaaaccctactgaggacgtgtctgtgaactctagaccatttagatag

SEQ ID NO: 85826 - DNA, 2490 bp, Artificial Sequence
  derived and/or modified sequence
atggcgaagtataacaccggcggaaacccaaccgaggacgtctctgtcaacagccgacccttcagagtcacaggcccaaatagctctagcggaatccaggcccgtaaaaacttgttcaataaccagggtaatgccagtcccccagccggtccaagcaacgtccctaaattcggaagtcccaaacccccagttgctgtgaagccttccagcgaagagaaaccagacaaggagcctaagcctccattcttaaagccaacgggagcgggtcaacggttcggcaccccagcttcccttactaccagagatccagaagctaaagtgggattcctcaagcccgttggcccaaagcccattaatctcccaaaagaagactctaaacccaccttcccttggcctccaggcaacaaaccttccctgcattccgttaaccaggatcacgacctcaaacccttaggcccaaagtcagggcctaccccacccactagcgaaaacgagcagaaacaggcttttcccaagctaacgggggttaaaggtaaattcatgtctgccagccaggacctggaacctaagcctctattccctaagcctgctttcggtcaaaagcctcctctctctaccgaaaattcacatgaggatgagagtcccatgaaaaatgtcagtagttcaaagggcagtcccgctcctttaggggtgaggtccaaatccggaccattaaaacccgctagggaagattctgaaaacaaggatcatgcaggagagatctcctccctccctttccccggagttgtcctcaagcccgctgcatcaaggggcggtccagggctgtcgaagaatggggaggagaaaaaggaagacagaaagatcgacgccgcaaagaatacctttcagtcaaagatcaatcaggaggagctggcatctggcacaccgccagctcgcttcccaaaggccccttcaaaacttacggtggggggaccatggggacagagtcaggaaaaagagaaaggggacaagaattccgccactccaaaacagaagcctttacctcccctgtttacactcggtcctccacctccaaaaccaaatcggccacctaatgtcgatctcactaagttccataaaacatctagcgggaactcaacgtctaaagggcagacgagctacagtactacctctctgccccctccgccaccgagccaccccgcttctcagcctccccttccagcttctcatccttctcagccccctgttcccagtctgccccctcgcaacatcaaacctccttttgacctcaagagtccagtgaatgaggataaccaggatggcgtgacacactctgacggggcagggaatcttgatgaagaacaggattccgagggggaaacgtatgaagatatcgaagcaagcaaggagcgggaaaagaagagggagaaagaagagaaaaagagacttgaactggagaaaaaagagcagaaggagaaggaaaagaaagaacaggagataaaaaagaagtttaagcttacaggaccgatccaggttatccatctcgccaaggcgtgttgtgatgtgaaaggcggtaaaaatgaactgtcattcaaacagggggaacagattgagataatccgaatcaccgacaatcccgagggcaaatggctaggacggactgctcgcggatcgtatgggtacataaaaaccacagcggtggaaattgactacgatagcttgaaactgaagaaagactccctcggcgcaccgtcccgacccatagaagatgatcaggaagtgtacgacgatgtcgccgaacaagatgacatatccagtcactctcaatcaggctcagggggaatttttccacctcctcccgatgacgacatttacgatgggatagaagaagaggatgctgatgatggcagcacgctgcaggtgcaggagaaaagcaacacgtggagttggggtatccttaaaatgttgaaaggcaaggacgataggaagaagtcgatcagagagaaaccaaaggtctctgactctgacaataatgaggggtcctcatttccggcaccaccaaaacagctggatatgggggatgaggtatacgacgacgtggacacctccgacttcccagtaagcagcgccgaaatgtctcaggggacgaatgtggggaaagcaaagaccgaggaaaaggatctgaaaaagctgaaaaaacaggaaaaggaagagaaggatttcagaaaaaagtttaaatacgacggggaaatccgcgtcctctactctacaaaagtaaccaccagtattacctccaaaaagtgggggacccgagacctgcaagttaaacccggtgaatcattggaagtgatacagacaactgacgataccaaggtactatgcagaaacgaagagggtaagtacggatacgttttgcgtagctacctggcagataacgacggcgaaatctatgatgacatcgcagatggatgcatttacgataatgactag

SEQ ID NO: 85827 - DNA, 2520 bp, Artificial Sequence
  derived and/or modified sequence
atggacggaaaggccgatgtcaagtccctgatggccaagtacaacacaggtggcaaccccaccgaagacgtatccgtcaattcacgcccatttagagtcaccggtcctaacagcagtagtggaattcaagctagaaaaaatctatttaataatcagggcaatgcatcaccgccagctggcccatccaacgtgcctaagttcgggtctcctaagccaccagtcgccgtcaaaccatcttcagaggagaagccagacaaagaacctaagcctccctttctcaagccaaccggtgccggacagaggttcggcacacccgctagcttgactacacgggatcctgaggccaaggtaggcttcctgaagccggtgggccctaaacctattaacctaccgaaggaagacagtaaacccacattcccctggcccccagggaataagccctcacttcacagcgtgaatcaggaccacgatctgaaacccttgggacctaagagtggcccaactcccccaacctcagagaacgagcagaaacaggcatttccgaagctgaccggtgtgaagggcaagttcatgagcgcctctcaggacctcgagcccaagcctctgttccctaaacccgctttcggccagaagccccctctgagcacggaaaatagccatgaggatgagtctcctatgaaaaatgtctcctccagcaagggcagtccagcgcctctcggagttcgctccaagtctgggcctctaaaacctgctcgcgaagattcagaaaataaagatcacgccggagaaatttcatcactgccttttcctggggtggtgctgaaaccggctgctagtcggggaggcccaggattgtcaaagaatggcgaagaaaagaaagaagaccgcaagatcgacgcggcaaagaacacatttcagtctaaaattaaccaggaagaattagcctccggcactcccccagccagatttcctaaggccccatccaagctgactgtggggggtccctgggggcaatcacaggaaaaggagaagggagacaagaacagcgcaaccccaaagcagaagccgctaccgcctctattcacattggggccacctccccctaagccaaatcggccacccaatgtggatctgacgaagttccataagacaagttctggcaacagcacttcaaaaggccagaccagttactccaccacttcgctccctcccccaccaccgagccaccccgcatctcagcctccgctgcccgcttcccatcccagtcagccgccagtgcctagtctgccaccaagaaacatcaagccccctttcgatcttaaatctccggtcaacgaagacaatcaagacggggtaacacactcggatggtgctgggaacctggacgaagaacaggactccgagggagaaacttatgaggacatagaggcttccaaggaaagggaaaaaaagcgcgaaaaggaggagaagaaaagattggagcttgaaaaaaaggagcagaaagagaaggagaaaaaggagcaagagattaaaaaaaagttcaaactaaccggtcctatacaggtgatccacctggctaaagcctgttgtgatgtgaaggggggtaagaacgagcttagcttcaaacaaggcgaacaaattgagatcatccgtatcacagataacccagaaggaaagtggttaggaagaaccgccaggggctcttatggctatataaagacgaccgcagtggagatcgattatgattccctgaaactgaagaaggattcactgggcgcaccgtctcgcccaatcgaggacgaccaggaggtctacgacgacgtagccgagcaggacgatatttcttcccacagccaatccgggtccggaggcatctttcctccgcctcccgatgacgatatctacgacggaatcgaggaagaagatgccgacgacgggagcacgttacaagtccaggaaaaatcaaacacctggtcctggggaatcctgaagatgttaaagggcaaggatgacaggaagaagtctattcgtgaaaagccaaaagtcagcgactctgacaataacgagggctcgtctttccccgcaccgcctaaacagctcgacatgggcgatgaggtctacgacgacgtggatacgagcgactttccagtgagctccgccgagatgtcacaggggacaaacgtggggaaagcgaaaactgaggaaaaggaccttaaaaagctgaaaaaacaggaaaaggaggagaaggactttcggaagaaatttaaatatgatggcgagataagagtgctctatagcacaaaggtgactacgtctatcacctcgaagaagtggggcacgcgcgatctccaagtgaagccaggtgagtcattagaggtcatccagactacggatgacaccaaagtgctctgtaggaacgaagagggcaaatacgggtacgtgctgagatcttacctggctgacaacgacggcgagatctatgacgacattgccgacggatgtatttatgacaatgactag

SEQ ID NO: 85828 - DNA, 2244 bp, Artificial Sequence
  derived and/or modified sequence
atggctaagtataacactgggggaaaccctacggaggacgttagcgtcaacagtcgtccctttcgggtaaccggccctaattcttcctctgggattcaggcacgaaaaaatctattcaacaaccagggaaacgcctctcctccagccggacctagcaatgtgcctaagttcggaagtccgaaacctccagtagcagtcaagcccagcagcgaggagaagccagataaagagcctaagcccccattcctgaagcccacaggtgccggtcagcgttttggtactccagcaagcttgaccacccgtgatcctgaagccaaagttgggttcctgaagcctgtgggtccaaaaccaatcaaccttcctaaggaggactctaaacccacgttcccttggcccccaggtaataaaccatcgctccatagcgtaaatcaggaccacgatctcaagccgcttgggcctaaaagcggaccaacccctcccacaagcgaaaacgagcagaaacaggccttccctaaactcaccggcgtgaagggcaagttcatgtccgctagccaagaccttgaaccaaaacccctgttccctaaacctgcctttgggcagaaaccaccgctatcaactgagaatagccacgaggatgagtctcctatgaaaaatgtaagtagctctaagggaagcccagctccgcttggagtgcggagcaaatctgggcctctcaagcccgctagggaagattccgagaataaggaccatgctggagagatatcctccctgccttttcctggggtggttcttaagcccgcagcttccagaggcggacccggacttagcaagaatggagaagagaaaaaggaggatcggaaaatcgacgccgcaaaaaatactttccagtccaagatcaatcaagaagagcttgcctcgggaacgcctccagctcggtttcccaaggcccctagtaaactgactgtcggaggaccgtggggacagtcccaggaaaaagagaaaggagacaaaaatagcgctaccccgaagcagaagccattgccccctctgtttacgctcggcccacccccacctaagccaaaccgcccacccaacgtggatctcactaagtttcacaaaacctcttccgggaatagcaccagtaagggccagacaagttactcaacgacttctcttcctccccctcccccatcccaccccgcatcccagcccccactgcccgcaagtcatccatcgcaacctcctgtgccttccttgccccctcggaatataaaacctccgttcgatctaaagtccccggtgaacgaggacaatcaggacggcgtcactcactctgacgttgtgattccattagaccacgagcaagattccgaaggagagacgtacgaagatattgaggcctcaaaggaacgcgagaaaaaaagagagaaagaggagaagaaaagattggaactggagaaaaaagagcagaaggagaaggaaaaaaaggagcaagagataaagaagaaatttaaattaaccggccctattcaggtgatacacctggctaaggcctgttgcgacgtgaagggagggaaaaatgagctgagtttcaagcagggggagcagatcgaaatcatccgcattaccgataacccggaaggcaagtggctgggtaggacggctcgagggtcctacggctacatcaaaaccaccgctgtcgagatagattatgactccttgaagcttaagaaggatagcctgggtgcaccatcacgccctatcgaggacgaccaagaggtgtatgacgatgtcgctgagcaagatgacatttccagtcacagccagagcgggagcgggggtatcttcccccctcccccagatgacgatatttacgacggcatcgaagaggaagatgccgacgacgggagcacactgcaggtgcaggaaaaaagcaatacgtggagctggggtatccttaaaatgctgaaggggaaagacgatcgcaagaaaagcatcagagaaaagcccaaggtgagcgacagcgacaacaacgaggggtcatccttccccgcaccacctaaacaactcgacatgggcgacgaggtatacgacgatgtagatacctccgatttccctgtgtcctcagctgaaatgtcacagggcaccaacgtcgggaaggcaaaaactgaggaaaaagacctcaaaaaattgaagaaacaggaaaaagaggagaaggactttcgcaagaagtttaaaaagtag

SEQ ID NO: 85829 - DNA, 2789 bp, Artificial Sequence
  derived and/or modified sequence
agaaagctccgcagttcttgagttccacatgcagagcagatgcgacagctagaagtgagtagggcccagaccctggcccaggaagatccactaaaggaggccatccttccgccttcttctgcaggagtcaggatggaaaggcagatgtaaagtccctcatggcgaaatataacacggggggcaacccgacagaggatgtctcagtcaatagccgacccttcagagtcacagggccaaactcatcttcaggaatacaagcaagaaagaacttattcaacaaccaaggaaatgccagccctcctgcaggacccagcaatgtacctaagtttgggtccccaaagccacctgtggcagtcaaaccttcttctgaggaaaagcctgacaaggaacccaagcccccgtttctaaagcccactggagcaggccaaagattcggaacaccagccagcttgaccaccagagaccccgaggcgaaagtgggatttctgaaacctgtaggccccaagcccatcaacttgcccaaagaagattccaaacctacatttccctggcctcctggaaacaagccatctcttcacagtgtaaaccaagaccatgacttaaagccactaggcccgaaatctgggcctactcctccaacctcagaaaatgaacagaagcaagcgtttcccaaattgactggggttaaagggaaatttatgtcagcatcacaagatcttgaacccaagcccctcttccccaaacccgcctttggccagaagccgcccctaagtaccgagaactcccatgaagacgaaagccccatgaagaatgtgtcttcatcaaaagggtccccagctcccctgggagtcaggtccaaaagcggccctttaaaaccagcaagggaagactcagaaaataaagaccatgcaggggagatttcaagtttgccctttcctggagtggttttgaaacctgctgcgagcaggggaggcccaggtctctccaaaaatggtgaagaaaaaaaggaagataggaagatagatgctgctaagaacaccttccagagcaaaataaatcaggaagagttggcctcagggactcctcctgccaggttccctaaggccccttctaagctgacagtgggggggccatggggccaaagtcaggaaaaggaaaagggagacaagaattcagccaccccgaaacagaagccattgcctcccttgtttaccttgggtccacctccaccaaaacccaacagaccaccaaatgttgacctgacgaaattccacaaaacctcttctggaaacagtactagcaaaggccagacgtcttactcaacaacttccctgccaccacctccaccatcccatccggccagccaaccaccattgccagcatctcacccatcacaaccaccagtcccaagcctacctcccagaaacattaaacctccgtttgacctaaaaagccctgtcaatgaagacaatcaagatggtgtcacgcactctgatggtgctggaaatctagatgaggaacaagacagtgaaggagaaacatatgaagacatagaagcatccaaagaaagagagaagaaaagggaaaaggaagaaaagaagaggttagagctggagaaaaaggaacagaaagagaaagaaaagaaagaacaagaaataaagaagaaatttaaactaacaggccctattcaagtcatccatcttgcaaaagcttgttgtgatgtcaaaggaggaaagaatgaactgagcttcaagcaaggagagcaaattgaaatcatccgcatcacagacaacccagaaggaaaatggttgggcagaacagcaaggggttcatatggctatattaaaacaactgctgtagagattgactatgattctttgaaactgaaaaaagactctcttggtgccccttcaagacctattgaagatgaccaagaagtatatgatgatgttgcagagcaggatgatattagcagccacagtcagagtggaagtggagggatattccctccaccaccagatgatgacatttatgatgggattgaagaggaagatgctgatgatggctccacactacaggttcaagagaagagtaatacgtggtcctgggggattttgaagatgttaaagggaaaagatgacagaaagaaaagtatacgagagaaacctaaagtctctgactcagacaataatgaaggttcatctttccctgctcctcctaaacaattggacatgggagatgaagtttacgatgatgtggatacctctgatttccctgtttcatcagcagagatgagtcaaggaactaatgttggaaaagctaagacagaagaaaaggaccttaagaagctaaaaaagcaggaaaaagaagaaaaagacttcaggaaaaaatttaaatatgatggtgaaattagagtcctatattcaactaaagttacaacttccataacttctaaaaagtggggaaccagagatctacaggtaaaacctggtgaatctctagaagttatacaaaccacagatgacacaaaagttctctgcagaaatgaagaagggaaatatggttatgtccttcggagttacctagcggacaatgatggagagatctatgatgatattgctgatggctgcatctatgacaatgactagcactcaactttggtcattctgctgtgttcattaggtgccaatgtgaagtctggattttaattggcatgttattgggtatcaagaaaattaatgcacaaaaccacttattatcatttgttatgaaatcccaattatctttac

SEQ ID NO: 85830 - DNA, 2747 bp, Artificial Sequence
  derived and/or modified sequence
gcatagctaacttgcacattcactatccaagctgcaccatcttcggggtcattgtgtgccaggcatatcaactcttttcaataaaaatggatggaaaggcagatgtaaagtccctcatggcgaaatataacacggggggcaacccgacagaggatgtctcagtcaatagccgacccttcagagtcacagggccaaactcatcttcaggaatacaagcaagaaagaacttattcaacaaccaaggaaatgccagccctcctgcaggacccagcaatgtacctaagtttgggtccccaaagccacctgtggcagtcaaaccttcttctgaggaaaagcctgacaaggaacccaagcccccgtttctaaagcccactggagcaggccaaagattcggaacaccagccagcttgaccaccagagaccccgaggcgaaagtgggatttctgaaacctgtaggccccaagcccatcaacttgcccaaagaagattccaaacctacatttccctggcctcctggaaacaagccatctcttcacagtgtaaaccaagaccatgacttaaagccactaggcccgaaatctgggcctactcctccaacctcagaaaatgaacagaagcaagcgtttcccaaattgactggggttaaagggaaatttatgtcagcatcacaagatcttgaacccaagcccctcttccccaaacccgcctttggccagaagccgcccctaagtaccgagaactcccatgaagacgaaagccccatgaagaatgtgtcttcatcaaaagggtccccagctcccctgggagtcaggtccaaaagcggccctttaaaaccagcaagggaagactcagaaaataaagaccatgcaggggagatttcaagtttgccctttcctggagtggttttgaaacctgctgcgagcaggggaggcccaggtctctccaaaaatggtgaagaaaaaaaggaagataggaagatagatgctgctaagaacaccttccagagcaaaataaatcaggaagagttggcctcagggactcctcctgccaggttccctaaggccccttctaagctgacagtgggggggccatggggccaaagtcaggaaaaggaaaagggagacaagaattcagccaccccgaaacagaagccattgcctcccttgtttaccttgggtccacctccaccaaaacccaacagaccaccaaatgttgacctgacgaaattccacaaaacctcttctggaaacagtactagcaaaggccagacgtcttactcaacaacttccctgccaccacctccaccatcccatccggccagccaaccaccattgccagcatctcacccatcacaaccaccagtcccaagcctacctcccagaaacattaaacctccgtttgacctaaaaagccctgtcaatgaagacaatcaagatggtgtcacgcactctgatggtgctggaaatctagatgaggaacaagacagtgaaggagaaacatatgaagacatagaagcatccaaagaaagagagaagaaaagggaaaaggaagaaaagaagaggttagagctggagaaaaaggaacagaaagagaaagaaaagaaagaacaagaaataaagaagaaatttaaactaacaggccctattcaagtcatccatcttgcaaaagcttgttgtgatgtcaaaggaggaaagaatgaactgagcttcaagcaaggagagcaaattgaaatcatccgcatcacagacaacccagaaggaaaatggttgggcagaacagcaaggggttcatatggctatattaaaacaactgctgtagagattgactatgattctttgaaactgaaaaaagactctcttggtgccccttcaagacctattgaagatgaccaagaagtatatgatgatgttgcagagcaggatgatattagcagccacagtcagagtggaagtggagggatattccctccaccaccagatgatgacatttatgatgggattgaagaggaagatgctgatgatggctccacactacaggttcaagagaagagtaatacgtggtcctgggggattttgaagatgttaaagggaaaagatgacagaaagaaaagtatacgagagaaacctaaagtctctgactcagacaataatgaaggttcatctttccctgctcctcctaaacaattggacatgggagatgaagtttacgatgatgtggatacctctgatttccctgtttcatcagcagagatgagtcaaggaactaatgttggaaaagctaagacagaagaaaaggaccttaagaagctaaaaaagcaggaaaaagaagaaaaagacttcaggaaaaaatttaaatatgatggtgaaattagagtcctatattcaactaaagttacaacttccataacttctaaaaagtggggaaccagagatctacaggtaaaacctggtgaatctctagaagttatacaaaccacagatgacacaaaagttctctgcagaaatgaagaagggaaatatggttatgtccttcggagttacctagcggacaatgatggagagatctatgatgatattgctgatggctgcatctatgacaatgactagcactcaactttggtcattctgctgtgttcattaggtgccaatgtgaagtctggattttaattggcatgttattgggtatcaagaaaattaatgcacaaaaccacttattatcatttgttatgaaatcccaattatctttac

SEQ ID NO: 85831 - DNA, 2391 bp, Artificial Sequence
  derived and/or modified sequence
ccgcagttcttgagttccacatgcagagcagatgcgacagctagaagtgagtagggcccagaccctggcccaggaagatccactaaaggaggccatccttccgccttcttctgcaggagtcaggatggaaaggcagatgtaaagtccctcatggcgaaatataacacggggggcaacccgacagaggatgtctcagtcaatagccgacccttcagagtcacagggccaaactcatcttcaggaatacaagcaagaaagaacttattcaacaaccaaggaaatgccagccctcctgcaggacccagcaatgtacctaagtttgggtccccaaagccacctgtggcagtcaaaccttcttctgaggaaaagcctgacaaggaacccaagcccccgtttctaaagcccactggagcaggccaaagattcggaacaccagccagcttgaccaccagagaccccgaggcgaaagtgggatttctgaaacctgtaggccccaagcccatcaacttgcccaaagaagattccaaacctacatttccctggcctcctggaaacaagccatctcttcacagtgtaaaccaagaccatgacttaaagccactaggcccgaaatctgggcctactcctccaacctcagaaaatgaacagaagcaagcgtttcccaaattgactggggttaaagggaaatttatgtcagcatcacaagatcttgaacccaagcccctcttccccaaacccgcctttggccagaagccgcccctaagtaccgagaactcccatgaagacgaaagccccatgaagaatgtgtcttcatcaaaagggtccccagctcccctgggagtcaggtccaaaagcggccctttaaaaccagcaagggaagactcagaaaataaagaccatgcaggggagatttcaagtttgccctttcctggagtggttttgaaacctgctgcgagcaggggaggcccaggtctctccaaaaatggtgaagaaaaaaaggaagataggaagatagatgctgctaagaacaccttccagagcaaaataaatcaggaagagttggcctcagggactcctcctgccaggttccctaaggccccttctaagctgacagtgggggggccatggggccaaagtcaggaaaaggaaaagggagacaagaattcagccaccccgaaacagaagccattgcctcccttgtttaccttgggtccacctccaccaaaacccaacagaccaccaaatgttgacctgacgaaattccacaaaacctcttctggaaacagtactagcaaaggccagacgtcttactcaacaacttccctgccaccacctccaccatcccatccggccagccaaccaccattgccagcatctcacccatcacaaccaccagtcccaagcctacctcccagaaacattaaacctccgtttgacctaaaaagccctgtcaatgaagacaatcaagatggtgtcacgcactctgatgtagttattcctctggaccatgaacaagacagtgaaggagaaacatatgaagacatagaagcatccaaagaaagagagaagaaaagggaaaaggaagaaaagaagaggttagagctggagaaaaaggaacagaaagagaaagaaaagaaagaacaagaaataaagaagaaatttaaactaacaggccctattcaagtcatccatcttgcaaaagcttgttgtgatgtcaaaggaggaaagaatgaactgagcttcaagcaaggagagcaaattgaaatcatccgcatcacagacaacccagaaggaaaatggttgggcagaacagcaaggggttcatatggctatattaaaacaactgctgtagagattgactatgattctttgaaactgaaaaaagactctcttggtgccccttcaagacctattgaagatgaccaagaagtatatgatgatgttgcagagcaggatgatattagcagccacagtcagagtggaagtggagggatattccctccaccaccagatgatgacatttatgatgggattgaagaggaagatgctgatgatggctccacactacaggttcaagagaagagtaatacgtggtcctgggggattttgaagatgttaaagggaaaagatgacagaaagaaaagtatacgagagaaacctaaagtctctgactcagacaataatgaaggttcatctttccctgctcctcctaaacaattggacatgggagatgaagtttacgatgatgtggatacctctgatttccctgtttcatcagcagagatgagtcaaggaactaatgttggaaaagctaagacagaagaaaaggaccttaagaagctaaaaaagcaggaaaaagaagaaaaagacttcaggaaaaaatttaaaaaa

SEQ ID NO: 85832 - protein, 378 aa, Artificial Sequence
  derived and/or modified sequence
MIIVAHVLLILLGATEILQADLLPDEKISLLPPVNFTIKVTGLAQVLLQWKPNPDQEQRNVNLEYQVKINAPKEDDYETRITESKCVTILHKGFSASVRTILQNDHSLLASSWASAELHAPPGSPGTSIVNLTCTTNTTEDNYSRLRSYQVSLHCTWLVGTDAPEDTQYFLYYRYGSWTEECQEYSKDTLGRNIACWFPRTFILSKGRDWLAVLVNGSSKHSAIRPFDQLFALHAIDQINPPLNVTAEIEGTRLSIQWEKPVSAFPIHCFDYEVKIHNTRNGYLQIEKLMTNAFISIIDDLSKYDVQVRAAVSSMCREAGLWSEWSQPIYVGNDEHKPLREWFVIVIMATICFILLILSLICKIKLGPVRRKLKSSVI

SEQ ID NO: 85833 - DNA, 1137 bp, Artificial Sequence
  derived and/or modified sequence
atgatcatagtcgcccacgtgctgctgatcctgcttggtgcaaccgaaatactacaggcggatctgcttcctgacgagaagatcagcctgctgcctcctgtaaactttacaatcaaagtaacaggattggcacaagtgctgctgcagtggaagcccaatcccgaccaggaacagagaaatgtcaatctcgagtaccaagtgaagatcaacgcccccaaggaggatgactacgagaccagaataaccgaatcaaagtgcgtcacgatccttcataaagggttctcggccagtgttaggacaatcctccagaacgatcacagtctcttggcttcctcttgggccagcgctgagctccatgcgccaccaggttccccaggaacaagcattgtcaacttgacctgtaccacaaataccactgaagataattacagtcgattgcgctcctaccaggtgtccttacactgtacgtggctcgttggcaccgatgcgcctgaagatactcagtacttcttgtactacagatatggttcctggacagaggagtgccaggagtattctaaggatactttggggcggaacatcgcctgctggtttcctaggacattcattctgtctaaaggtcgagactggttggccgttctagttaatgggtcatcaaagcacagtgccatacgtccttttgaccagctttttgcccttcatgcgattgaccagattaatccaccccttaacgttactgctgaaatcgaggggacacggctgtcaatacagtgggagaaacctgtgagtgctttccccattcactgtttcgactatgaggtcaaaatacataacacacgtaatggctacctgcagatcgagaaactcatgaccaacgcctttataagcattatcgacgatctctctaaatatgatgtgcaagttcgggccgcagtgtccagcatgtgcagagaggccgggctgtggtcagaatggtcgcagcctatctacgtgggcaacgacgaacataagcccttaagagagtggttcgtaattgttatcatggcaactatatgcttcatcctactgattctgagtctgatatgcaagatcaaactcggccccgtccgacgtaagctcaagtcgtccgttatctag

SEQ ID NO: 85834 - DNA, 2252 bp, Artificial Sequence
  derived and/or modified sequence
aaacaaaacagaaatgcaacgctttagagtacccacggaaaacttgtttaccttgtcaccatgagtaaaagttaattcccactcctgaagagagcaaaccaactctgaaagagagtgaaaatgcagacaagacagttatcagataatggctatctggacgagagattctttcgtttgacagcagtttggttgttgggagttccagttcagctcctgcacagttgctctgtacaaatcctcctccatatttgcttagagaaaacgtgttgccatcccatcatgaaggaagctgcctgagagtttttaaccattacagccgtgatgatgaaagagtgaagaaccgcctctaagttaaaaagtgcacccagagataaggttcgttctcaatgccctgccgctgcttctcatcgcatggccaccgcatttctcaggccaggcacattgagcattggtcctgtgcctgacgctatgctagatgctggggttgcagccacgagcatagacacgacagacacggtcctcgccatcttctgttgagtactggtcggaacaagaggatcgtctgtagacaggatatgatcatcgtggcgcatgtattactcatccttttgggggccactgagatactgcaagctgacttacttcctgatgaaaagatttcacttctcccacctgtcaatttcaccattaaagttactggtttggctcaagttcttttacaatggaaaccaaatcctgatcaagagcaaaggaatgttaatctagaatatcaagtgaaaataaacgctccaaaagaagatgactatgaaaccagaatcactgaaagcaaatgtgtaaccatcctccacaaaggcttttcagcaagtgtgcggaccatcctgcagaacgaccactcactactggccagcagctgggcttctgctgaacttcatgccccaccagggtctcctggaacctcaattgtgaatttaacttgcaccacaaacactacagaagacaattattcacgtttaaggtcataccaagtttcccttcactgcacctggcttgttggcacagatgcccctgaggacacgcagtattttctctactataggtatggctcttggactgaagaatgccaagaatacagcaaagacacactggggagaaatatcgcatgctggtttcccaggacttttatcctcagcaaagggcgtgactggcttgcggtgcttgttaacggctccagcaagcactctgctatcaggccctttgatcagctgtttgcccttcacgccattgatcaaataaatcctccactgaatgtcacagcagagattgaaggaactcgtctctctatccaatgggagaaaccagtgtctgcttttccaatccattgctttgattatgaagtaaaaatacacaatacaaggaatggatatttgcagatagaaaaattgatgaccaatgcattcatctcaataattgatgatctttctaagtacgatgttcaagtgagagcagcagtgagctccatgtgcagagaggcagggctctggagtgagtggagccaacctatttatgtgggaaatgatgaacacaagcccttgagagagtggtttgtcattgtgattatggcaaccatctgcttcatcttgttaattctctcgcttatctgtaaaataaagctgggtccagtgagacggaaattgaagtcatctgttatatagagaagcctggagttgagaccctggaggattctgtgttttgactgtcactttggcatcctctgatgaactcacacatgcctcagtgcctcagtgaaaagaacagggatgctggctcttggctaagaggtgttcagaatttaggcaacactcaatttacctgcgaagcaatacacccagacacaccagtcttgtatctcttaaaagtatggatgcttcatccaaatcgcctcacctacagcagggaagttgactcatccaagcattttgccatgttttttctccccatgccgtacagggtagcacctcctcacctgccaatctttgcaatttgcttgactcacctcagacttttcattcacaacagacagcttttaaggctaacgtccagctgtatttacttctggctgtgcccgtttggctgtttaagctgccaattgtagcactcagctaccatctgaggaagaaagcattttgcatcagcctggagtgaaccatgaacttggattcaagactgtcttttctatagcaagtgagagccac

SEQ ID NO: 85835 - DNA, 1137 bp, Artificial Sequence
  derived and/or modified sequence
atgatcatcgtggcccacgtgctgctgatcctgctgggcgccacagagatcctgcaggccgacctgctgcctgatgagaagatcagcctgctgccccctgtgaacttcaccatcaaggtgacaggcctggcccaggtgctgctgcagtggaagcccaacccagaccaggagcagagaaatgtgaacctggagtaccaggtgaagatcaatgcccccaaggaggatgattatgagacccgcatcacagagagcaaatgtgtgaccatcctgcacaagggcttcagcgcctctgtgaggaccatcctgcagaatgaccacagcctgctggccagctcctgggccagcgctgagctgcacgcccctcctggcagccctggcaccagcatcgtgaacctgacctgcaccaccaacaccacagaggacaactacagccggctgcggagctaccaggtgtccctgcactgcacctggctggtgggcacagatgcccctgaggacacccagtacttcctgtactaccgctatggctcctggacagaggagtgccaggagtacagcaaggacaccctgggcaggaacatcgcctgctggttccccaggaccttcatcctgagcaagggccgggactggctggccgtgctggtgaatggcagcagcaagcacagcgccatccggccctttgaccagctgtttgccctgcacgccatcgaccagatcaacccccccctgaatgtgacagctgagattgagggcacccggctgagcatccagtgggagaagcctgtgtctgccttccccatccactgctttgattatgaggtgaagatccacaacaccagaaatggctacctgcagatcgagaagctgatgaccaatgccttcatcagcatcattgatgacctgagcaaatatgatgtgcaggtgcgggctgctgtgtcctccatgtgccgggaggccggcctgtggagcgagtggagccagcccatctacgtgggcaatgatgagcacaagcccctgcgggagtggtttgtgattgtcatcatggccaccatctgcttcatcctgctgatcctgagcctcatctgcaagatcaagctgggccctgtgcggaggaagctgaagagcagcgtcatctag

SEQ ID NO: 85836 - DNA, 1137 bp, Artificial Sequence
  derived and/or modified sequence
atgatcatcgtggcccacgtgctgctgatcctgctgggcgccaccgagatccttcaggcggacctgctgccagacgagaagatctccctattgccccccgtgaattttactatcaaggttaccggcttggctcaggtactgctgcaatggaaacctaaccctgatcaggagcagcggaatgttaaccttgaatatcaggtcaagattaatgcacccaaggaggatgactacgagactcgaatcaccgagagcaagtgtgtgaccatccttcacaaggggttttctgcctctgtgaggacgattctgcaaaatgatcattctctgctggcatcctcatgggccagtgctgagctccacgcccccccaggtagccccggcacctccatcgtgaacctcacttgcacaacaaacaccaccgaggataattactcaaggctacgaagttatcaggtgagtcttcactgcacgtggctggtggggacggatgcacctgaagacacacagtatttcctctattaccgctacggttcatggactgaggagtgccaggagtattccaaggataccctcggacggaatatcgcatgttggtttccgagaacgttcatcctgagcaaaggaagagattggttggctgtactggtcaatggttccagcaagcacagtgcgatcaggccgttcgaccagttgttcgctttacatgcaattgaccagattaatccccccctgaacgtgacggcagaaatcgagggcactaggcttagtatccaatgggaaaagcccgtctccgcctttcctatccactgctttgattacgaagtgaaaatccacaacacccgtaacggataccttcaaatcgaaaagctcatgactaacgccttcatcagcataatagacgacctgtccaaatacgacgtgcaagtgagagccgctgttagtagtatgtgccgtgaagctggcttgtggtctgagtggagccagccgatctatgtgggcaatgacgagcataagcctcttcgggagtggtttgtgatagtgattatggcaaccatttgttttatcctgctgatcttatccttgatttgcaaaatcaaattgggaccagtgagaaggaagctgaagagcagtgtcatctag

SEQ ID NO: 85837 - DNA, 1137 bp, Artificial Sequence
  derived and/or modified sequence
atgattatcgtcgcccatgtgttgctgattttgctgggcgctaccgaaatcctccaggccgaccttctgccggacgagaagatttctcttcttccacctgtgaatttcacaattaaggtgacaggactcgcccaggtcctgttgcagtggaaacctaaccccgatcaggagcagcgtaacgtgaatctggagtaccaagtcaagatcaatgcgcctaaagaggatgattacgagactcgcattactgaatcgaaatgcgtaacaattctgcataagggtttctccgcctccgtgcgcaccattctccaaaatgaccatagtctgctggcaagctcctgggcttccgccgagttacatgccccacctggaagcccgggaacctccatcgtgaatttgacttgcactactaataccaccgaagataattatagcaggctcagatcgtaccaagtgtcactgcattgtacttggcttgtgggcacggatgccccagaggatacacagtacttcctctattaccgttacgggtcctggaccgaggaatgtcaggagtactctaaagatacgttgggaagaaatatcgcttgctggtttcctcggaccttcatcctgtctaaaggccgagactggctcgcggtgctcgtaaatggctcaagcaaacacagcgcgatcagaccctttgaccagctgtttgcactgcacgctatcgaccagattaatcctccgctaaatgttaccgcagagatcgaaggaactaggttatctatccagtgggagaagcccgtatccgcattccccattcattgttttgattacgaggtcaagattcataatacgcggaacggatatcttcagatcgagaaactaatgacaaacgcttttatctccataatcgacgacttatctaagtatgatgtgcaggtgcgggcagccgtttcttccatgtgcagagaagctgggctttggagcgagtggtcacagcccatctacgtgggcaacgacgaacataaaccactgagggaatggtttgtcatcgtgatcatggcaactatctgcttcattctcctgatcctgtccttaatctgtaagatcaaactcggaccagttcgcagaaagcttaaaagctccgttatttag

SEQ ID NO: 85838 - DNA, 1137 bp, Artificial Sequence
  derived and/or modified sequence
atgatcatcgtggcccacgtgctgctgatcctgctgggcgccaccgagatcctgcaggccgacctgctgcccgacgagaagatcagcctgctgccccccgtgaacttcaccatcaaggtgaccggcctggcccaggtgctgctgcagtggaagcccaaccccgaccaggagcagagaaacgtgaacctggagtaccaggtgaagatcaacgcccccaaggaggacgactacgagaccagaatcaccgagagcaagtgcgtgaccatcctgcacaagggcttcagcgccagcgtgagaaccatcctgcagaacgaccacagcctgctggccagcagctgggccagcgccgagctgcacgccccccccggcagccccggcaccagcatcgtgaacctgacctgcaccaccaacaccaccgaggacaactacagcagactgagaagctaccaggtgagcctgcactgcacctggctggtgggcaccgacgcccccgaggacacccagtacttcctgtactacagatacggcagctggaccgaggagtgccaggagtacagcaaggacaccctgggcagaaacatcgcctgctggttccccagaaccttcatcctgagcaagggcagagactggctggccgtgctggtgaacggcagcagcaagcacagcgccatcagacccttcgaccagctgttcgccctgcacgccatcgaccagatcaacccccccctgaacgtgaccgccgagatcgagggcaccagactgagcatccagtgggagaagcccgtgagcgccttccccatccactgcttcgactacgaggtgaagatccacaacaccagaaacggctacctgcagatcgagaagctgatgaccaacgccttcatcagcatcatcgacgacctgagcaagtacgacgtgcaggtgagagccgccgtgagcagcatgtgcagagaggccggcctgtggagcgagtggagccagcccatctacgtgggcaacgacgagcacaagcccctgagagagtggttcgtgatcgtgatcatggccaccatctgcttcatcctgctgatcctgagcctgatctgcaagatcaagctgggccccgtgagaagaaagctgaagagcagcgtgatctag

SEQ ID NO: 85839 - protein, 922 aa, Artificial Sequence
  derived and/or modified sequence
MTATPESLFPTGDELDSSQLQMESDEVDTLKEGEDPADRMHPFLAIYELQSLKVHPLVFAPGVPVTAQVVGTERYTSGSKVGTCTLYSVRLTHGDFSWTTKKKYRHFQELHRDLLRHKVLMSLLPLARFAVAYSPARDAGNREMPSLPRAGPEGSTRHAASKQKYLENYLNRLLTMSFYRNYHAMTEFLEVSQLSFIPDLGRKGLEGMIRKRSGGHRVPGLTCCGRDQVCYRWSKRWLVVKDSFLLYMCLETGAISFVQLFDPGFEVQVGKRSTEARHGVRIDTSHRSLILKCSSYRQARWWAQEITELAQGPGRDFLQLHRHDSYAPPRPGTLARWFVNGAGYFAAVADAILRAQEEIFITDWWLSPEVYLKRPAHSDDWRLDIMLKRKAEEGVRVSILLFKEVELALGINSGYSKRALMLLHPNIKVMRHPDQVTLWAHHEKLLVVDQVVAFLGGLDLAYGRWDDLHYRLTDLGDSSESAASQPPTPRPDSPATPDLSHNQFFWLGKDYSNLITKDWVQLDRPFEDFIDRETTPRMPWRDVGVVVHGLPARDLARHFIQRWNFTKTTKAKYKTPTYPYLLPKSTSTANQLPFTLPGGQCTTVQVLRSVDRWSAGTLENSILNAYLHTIRESQHFLYIENQFFISCSDGRTVLNKVGDEIVDRILKAHKQGWCYRVYVLLPLLPGFEGDISTGGGNSIQAILHFTYRTLCRGEYSILHRLKAAMGTAWRDYISICGLRTHGELGGHPVSELIYIHSKVLIADDRTVIIGSANINDRSLLGKRDSELAVLIEDTETEPSLMNGAEYQAGSVILGANTRPDLDLRDPICDDFFQLWQDMAESNANIYEQIFRCLPSNATRSLRTLREYVAVEPLATVSPPLARSELTQVQGHLVHFPLKFLEDESLLPPLGSKEGMIPLEVWT

SEQ ID NO: 85840 - DNA, 2769 bp, Artificial Sequence
  derived and/or modified sequence
atgactgcaaccccagagtctttattcccaaccggtgacgagctggactctagtcaattgcagatggagagtgacgaggtcgataccctgaaggaaggagaagatccggccgatcgaatgcaccccttcctggcgatttatgaactgcagagcctcaaggtacaccctcttgtgtttgctcctggcgttcctgtgactgctcaggtggtgggaaccgaacggtacacatctgggtccaaagtgggaacctgcaccctttatagcgttcgactgacccacggggacttctcttggactaccaagaagaaataccgacacttccaggagctgcatcgcgacctattgaggcacaaggtgctgatgagcctcctgccacttgcgcgctttgccgtagcatactctccagcacgggacgcaggcaatcgcgagatgccttcgctgccacgagccggccctgagggctccaccagacatgccgccagcaagcagaagtacctggaaaattatttaaaccgcctgctgactatgtccttttatcgaaattatcatgctatgaccgagttcctggaagtgtctcagctgagtttcatacctgaccttggaaggaaggggctggagggaatgatcaggaaaagaagcgggggccaccgggtgccaggactgacctgttgcggcagggatcaggtgtgctatagatggtcgaagagatggctagtggtgaaggattccttccttctgtatatgtgtttggaaactggtgctatctctttcgtgcaactcttcgatccaggatttgaagtacaggtgggtaaaagatccaccgaggcgcgccacggtgtgcggattgacacgagtcataggtcactgattctcaagtgttctagctataggcaagcaagatggtgggctcaggaaatcaccgaactggcacagggccctggccgcgatttcttgcagctccacagacatgatagttatgccccccctcgtcctggaaccttggctaggtggtttgtcaatggcgccggatatttcgcagccgtggctgacgccattctacgggcccaggaagagattttcatcactgactggtggctgagccctgaggtctatcttaaacgcccagcccattcagacgactggcgcctggatattatgttaaaaaggaaggctgaagaaggtgtccgcgtctctatactcctgtttaaggaggttgagctcgccctagggataaactcaggttacagcaagagagccttaatgctcttgcatccaaacattaaagtcatgaggcaccccgaccaggttactctgtgggcccatcacgagaaattgctcgttgtggatcaggtcgtggcttttctcggagggcttgatttagcctacggccgctgggatgatctgcattacagactcactgatttgggagatagctctgaaagcgcagcgtctcagccacccaccccgcgtccggattcccctgccaccccagatctgtcccacaaccagtttttttggctcgggaaggattatagtaatttgataacaaaagattgggtgcagctagatagaccgttcgaggattttattgatcgggagactacgcctaggatgccatggagggacgttggggtagtggtccacggtcttccagcccgagaccttgcaaggcacttcatccaaaggtggaacttcaccaaaaccaccaaagctaagtacaaaacccccacctatccttacctcctgccaaagagcacatccaccgctaaccagttaccttttaccctccccggggggcagtgcaccactgtacaggttctgcggtctgtagaccgttggtcggcaggaactctcgagaactcaattctgaacgcctacctgcacaccatcagagagtcacagcatttcctttacattgagaaccaattttttattagctgctctgatggcagaacagtcctcaataaggtcggtgacgagatcgtggaccggatcctcaaagcccacaaacagggctggtgctaccgcgtttatgtactgctaccactactgcccggatttgagggtgatattagtacagggggaggaaattccatccaggctatcctgcactttacctaccgcactttgtgtaggggagagtactcgatcctgcataggcttaaggccgcaatgggaactgcttggcgggactacatttccatatgcggactccggacacacggcgagttgggcggacatcccgtttcggagctgatttacattcatagcaaagtactcatcgccgacgatagaacagtaattattggttcagccaatattaacgaccggagtttgctgggtaagcgggattccgagctcgctgtgttgatcgaggatactgaaactgagccaagtctgatgaatggggccgagtaccaggctgggagtgtaatactgggcgcaaatacccggcccgacttggatctgcgggatccaatttgcgatgatttctttcagctgtggcaggacatggccgaatccaacgctaacatctatgaacaaatctttcgctgtctgcccagcaatgctacgagatcgctgaggactctcagagaatatgtagccgttgagcctttggcgacagtgagcccgccgctggcccggtctgaactcactcaagtgcaaggccacctcgtccactttcccctgaaattcctcgaagatgagagcttgctccctcccctgggttccaaggagggcatgatcccgctggaggtttggacatag

SEQ ID NO: 85841 - DNA, 2769 bp, Artificial Sequence
  derived and/or modified sequence
atgacagccaccccagagagcctcttccccactggagatgagctggacagcagccagctgcagatggagagtgatgaggtggacaccctgaaggagggggaggaccctgctgacaggatgcaccccttcctggccatctatgagctgcagagcctgaaggtgcaccccctggtgtttgcccctggggtgcctgtgacagcccaggtggtgggcacagagcgctacaccagcggcagcaaggtgggcacctgcaccctgtacagcgtgcggctgacccatggagacttctcctggaccaccaagaagaagtaccgccacttccaggagctgcaccgggacctgctgcggcacaaggtgctgatgagcctgctgcccctggccaggtttgctgtggcctacagccctgccagagatgctggcaaccgggagatgcccagcctgccccgggccggccctgagggcagcaccaggcatgctgccagcaagcagaagtacctggagaactacctgaaccggctgctgaccatgtccttctacagaaactaccacgccatgacagagttcctggaggtgtcccagctgtccttcatcccagacctgggcaggaagggcctggagggcatgatcaggaagaggtctgggggccaccgggtgcccggcctgacctgctgcggccgggaccaggtgtgctaccgctggagcaagcgctggctggtggtgaaggacagcttcctgctgtacatgtgcctggagaccggggccatcagctttgtgcagctgtttgatcctggctttgaggtgcaggtgggcaagaggagcacagaggcccggcatggagtgagaattgacaccagccacaggagcctcatcctgaagtgcagcagctaccggcaggcccgctggtgggcccaggagatcacagagctggcccagggccctggccgggacttcctgcagctgcacagacatgacagctatgccccacccaggcctggcaccctggcccgctggtttgtgaatggagctggctactttgctgctgtggctgatgccatcctgcgggcccaggaggagatcttcatcacagactggtggctgagccctgaggtgtacctgaagaggcctgcccacagtgatgactggaggctggacatcatgctgaagaggaaggccgaggagggcgtgcgggtgtccatcctgctcttcaaggaggtggagctggccctgggcatcaacagcggctacagcaagagggccctgatgctgctgcaccccaacatcaaggtgatgaggcacccagaccaggtgaccctgtgggcccaccacgagaagctgctggtggtggaccaggtggtggccttcctgggcggcctggacctggcctacggccgctgggatgacctgcactaccgcctgacagacctgggggacagcagcgagagcgctgccagccagccccccacccccaggccagacagccctgccaccccagacctgagccacaaccagttcttctggctgggcaaggactacagcaacctgatcaccaaggactgggtgcagctggaccggccctttgaggacttcatcgaccgggagaccacccccaggatgccctggagagatgtgggcgtggtggtgcacggcctgcctgcccgggacctggcccggcacttcatccagcgctggaacttcaccaagaccaccaaggccaagtacaagacccccacctacccctacctgctgcccaagagcaccagcacagccaaccagctgcccttcaccctgcccggcggccagtgcaccaccgtgcaggtgctgcggtctgtggaccgctggagcgctggcaccctggagaacagcatcctgaatgcctacctgcacaccatccgggagagccagcacttcctgtacatcgagaaccagttcttcatcagctgcagtgatggccgcacagtgctgaacaaggtgggagatgaaattgtggaccgcatcctgaaggcccacaagcagggctggtgctacagagtgtatgtgctgctgcccctgctgcccggctttgaaggagacatcagcactggaggcggcaacagcatccaggccatcctgcacttcacctaccgcaccctgtgccgcggggagtacagcatcctgcaccggctgaaggccgccatgggcacagcctggagggactacatcagcatctgtggcctgcggacccatggagagctgggcggccaccctgtgtctgagctgatctacatccacagcaaggtgctgattgctgatgacagaactgtcatcatcggcagcgccaacatcaatgacaggagcctgctgggcaagagggacagcgagctggccgtgctgattgaggacacagaaacagagcccagcctgatgaatggagctgagtaccaggccggcagcgtcatcctgggcgccaacaccaggccagacctggacctgcgggaccccatctgtgatgacttcttccagctgtggcaggacatggccgagagcaatgccaacatctatgagcagatcttccgctgcctgcccagcaatgccaccaggagcctgcggaccctgcgggagtatgtggccgtggagcccctggccaccgtgagcccccccctggcccggtctgagctgacccaggtgcagggccacctggtgcacttccccctgaagttcctggaggatgagagcctgctgccccccctgggcagcaaggagggcatgatccccctggaggtgtggacctag

SEQ ID NO: 85842 - DNA, 2769 bp, Artificial Sequence
  derived and/or modified sequence
atgaccgccacccccgagagcctgttccccaccggcgacgagctggattcctctcagctgcaaatggagtctgacgaagtggataccctcaaagaaggggaagatcccgccgatcgcatgcacccgttcctcgcaatctatgagttgcagagcctgaaggtacatcccttagtattcgcgcccggcgtgccagtgacggctcaagtggttgggactgaacggtacacttctggctctaaggttggaacgtgtactctgtacagcgttcggcttacgcacggcgacttcagctggactaccaaaaagaagtaccgacattttcaggagctgcaccgggatctactgagacacaaggtgttaatgtcactcttgcctttggctaggttcgctgtcgcctatagcccagcacgggacgccgggaacagagagatgccctccctgccaagagctggaccagaaggcagtacgaggcacgctgccagcaaacaaaagtatctcgaaaattacctaaatcggctgctcacaatgtccttctatcgaaactaccacgctatgaccgaatttcttgaggtgagccagcttagcttcataccggacttgggtaggaagggcctggagggtatgattcggaagcggagtgggggacatcgcgtacccggcctaacctgttgtggcagggatcaggtctgctatcgctggtcaaagcgttggctggtggtgaaggattcatttttgctctacatgtgtcttgaaacaggagccatttcgtttgtgcagctgttcgatcccgggttcgaagtccaggtcggaaaacgatctactgaggctagacatggagtgcggattgatacttctcacaggagcctcatcctgaaatgctcttcctacagacaggcccggtggtgggctcaagagatcacggagctagctcagggcccgggaagggactttttgcagctgcatcgtcatgattcctatgcgcctccacgccccggtacactggctaggtggttcgtaaacggcgccggttattttgctgccgtcgctgatgccatactgagggctcaggaagagatttttattaccgactggtggctgagtcccgaggtatatctaaagcgaccagcccactcggatgattggcgcctggatattatgttaaagaggaaggcagaagaaggtgtgagggtgagcatactcttgtttaaagaagtggagctggccctgggtattaattcaggctattccaagcgggctctgatgctcttacaccctaatattaaagtgatgcgacaccctgaccaggtcactctttgggcgcaccatgaaaaattactcgttgtagaccaagttgttgctttcctgggaggtctggatctggcttacgggcgctgggatgatcttcactataggcttacagacctgggagattcttcggagtccgctgcgagccaacctcccacccctcgaccagattctccggctactccagatcttagtcacaatcagttcttttggctgggtaaagactacagcaatctgattacaaaagattgggtgcaactggacaggccttttgaagatttcatagacagggaaacaacccctcgcatgccatggcgcgatgtgggagttgtggtccacggactgccagctcgggacctagcccgccacttcattcagaggtggaacttcaccaagacaactaaggccaagtacaagactcccacgtatccatacctgctgcccaaaagcacgtccactgccaaccagctgccgtttaccttacctggcggccagtgtacaactgtccaggttctaaggtccgtcgatcgctggtccgccggcactctcgagaactctatcctcaacgcctacctgcatactatccgcgagagccagcactttctgtacattgaaaatcagttttttatctcatgctcagatggtaggaccgtgttgaacaaggtgggagacgagatcgtcgataggattctgaaagcccacaagcaggggtggtgctacagagtatatgtgctgctacctctgcttcccggatttgaaggcgatatcagtacgggggggggtaacagcattcaggctatcctccacttcacttacagaactctgtgtaggggagaatatagtattcttcacagactgaaggccgcaatgggtactgcatggcgcgactacattagcatctgtggtttacgaactcatggagagttgggaggacaccctgtcagcgaactgatctacattcacagcaaagtgttaatcgcagacgatcgaacagtcattataggcagcgccaacatcaacgatcggtccttgcttggcaaaagagattctgagttagcggtgttgatagaagacacagaaactgagcctagtctgatgaacggcgccgagtaccaggcggggtccgtcatccttggagccaacacacgccccgatctggacctccgggaccctatttgcgacgattttttccagctttggcaagatatggccgaaagtaacgccaatatttacgagcaaatcttccgctgtcttcctagtaacgccacccgatccctgaggaccctccgcgagtacgtagcagtcgagcccctcgccacagtgagccccccattagccaggtcggagcttacccaggtccaaggccaccttgtgcattttcctctgaagtttctggaggatgaatccctactgcctcccctgggtagcaaggaaggcatgatcccactcgaagtctggacatag

SEQ ID NO: 85843 - DNA, 3391 bp, Artificial Sequence
  derived and/or modified sequence
ctccggtctgctctcttggctccggaacccccgcgggcgctggctccgtctgccagggatgacggcgacccctgagagcctcttccccactggggacgaactggactccagccagctccagatggagtccgatgaggtggacaccctgaaggagggagaggacccagccgaccggatgcacccgtttctggccatctatgagcttcagtctctgaaagtgcaccccttggtgttcgcacctggggtccctgtcacagcccaggtggtgggcaccgaaagatataccagcggatccaaggtgggaacctgcactctgtattctgtccgcttgactcacggcgacttttcctggacaaccaagaagaaataccgtcattttcaggagctgcatcgggacctcctgagacacaaagtcttgatgagtctgctccctctggctcgatttgccgttgcctattctccagcccgagatgcaggcaacagagagatgccctctctaccccgggcaggtcctgagggctccaccagacatgcagccagcaaacagaaatacctggagaattacctcaaccgtctcttgaccatgtctttctatcgcaactaccatgccatgacagagttcctggaagtcagtcagctgtcctttatcccggacttgggccgcaaaggactggaggggatgatccggaagcgctcaggtggccaccgtgttcctggcctcacctgctgtggccgagaccaagtttgttatcgctggtccaagaggtggctggtggtgaaggactccttcctgctgtacatgtgcctcgagacaggtgccatctcatttgttcagctctttgaccctggctttgaggtgcaagtggggaaaaggagcacggaggcacggcacggcgtgcggatcgatacctcccacaggtccttgattctcaagtgcagcagctaccggcaggcacggtggtgggcccaagagatcactgagctggcacagggcccaggcagagacttcctacagctgcaccggcatgacagctacgccccaccccggcctgggaccttggcccggtggtttgtgaatggggcaggttactttgctgctgtggcagatgccatccttcgagctcaagaggagattttcatcacagactggtggttgagtcctgaggtttacctgaagcgtccggcccattcagatgactggagactggacattatgctcaagaggaaggcggaggagggtgtccgtgtgtctattctgctgtttaaagaagtggaattggccttgggcatcaacagtggctatagcaagagggcgctgatgctgctgcaccccaacataaaggtgatgcgtcacccagaccaagtgacgttgtgggcccatcatgagaagctcctggtggtggaccaagtggtagcattcctggggggactggaccttgcctatggccgctgggatgacctgcactaccgactgactgaccttggagactcctctgaatcagctgcctcccagcctcccaccccgcgcccagactcaccagccaccccagacctctctcacaaccaattcttctggctgggcaaggactacagcaatcttatcaccaaggactgggtgcagctggaccggcctttcgaagatttcattgacagggagacgacccctcggatgccatggcgggacgttggggtggtcgtccatggcctaccggcccgggaccttgcccggcacttcatccagcgctggaacttcaccaagaccaccaaggccaagtacaagactcccacatacccctacctgcttcccaagtctaccagcacggccaatcagctccccttcacacttccaggagggcagtgcaccaccgtacaggtcttgcgatcagtggaccgctggtcagcagggactctggagaactccatcctcaatgcctacctgcacaccatcagggagagccagcacttcctctacattgagaatcagttcttcattagctgctcagatgggcggacggttctgaacaaggtgggcgatgagattgtggacagaatcctgaaggcccacaaacaggggtggtgttaccgagtctacgtgcttttgcccttactccctggcttcgagggtgacatctccacgggcggtggcaactccatccaggccattctgcactttacttacaggaccctgtgtcgtggggagtattcaatcctgcatcgccttaaagcagccatggggacagcatggcgggactatatttccatctgcgggcttcgtacacacggagagctgggcgggcaccccgtctcggagctcatctacatccacagcaaggtgctcatcgcagatgaccggacagtcatcattggttctgcaaacatcaatgaccggagcttgctggggaagcgggacagtgagctggccgtgctgatcgaggacacagagacggaaccatccctcatgaatggggcagagtatcaggcgggcagtgtgattcttggagcaaatacccggccagacttggatctccgagaccccatctgtgatgacttcttccagttgtggcaagacatggctgagagcaacgccaatatctatgagcagatcttccgctgcctgccatccaatgccacgcgttccctgcggactctccgggagtacgtggccgtggagcccttggccacggtcagtccccccttggctcggtctgagctcacccaggtccagggccacctggtccacttccccctcaagttcctagaggatgagtctttgctgcccccgctgggtagcaaggagggcatgatccccctagaagtgtggacatagttgaggcccccgtcagggagaggtcaccagctgctgtgccccaccacgtctggctccctgccccttaaccccaaggactgagggcagtgccctttgagatctggggaggcaggcattcctgaagggaactagaggtgttacagaggacccttacgtgagaaatagctgaaaagggcactcccaaccctgggctggggaggaggagagagtcccagagctcatcccccctgctgcccagtgcaaaccacttctccatgctgcaaaggagaagcacagctcctgccagggtgagcagggtcaagcctcttattccaggagaagggggctctgccccaggccctactacccattgttcccttcctcttcctgcccttgaaccccctccctgtcccagggccctcccagcccattgctgccaaggtggagggaaggataaagccacttctggcttcagcccccaccaggggaaggaaggagggcacattaactccctccaccagcctgctgacagacactaactttgtatccgttcaataagcatttcataaataaaggtgtagaaaa

SEQ ID NO: 85844 - DNA, 2769 bp, Artificial Sequence
  derived and/or modified sequence
atgacggcaactcccgaatctctgttccctactggcgatgagttggatagctcccagctgcagatggaatcagatgaagtggataccctgaaggaaggggaggacccggcagatcggatgcatccttttctagcgatttatgagctacaatccttgaaggtgcaccctttagtcttcgcccctggcgttccagttacagcacaggtcgtgggaaccgaacggtatacgagcgggtctaaggtagggacctgtaccttgtactcggtccgcttgacgcatggagacttcagttggaccactaagaagaagtaccggcatttccaggagttacatcgagacctgctgagacataaggtccttatgtcacttctgccattggccagattcgcggtcgcttattcacccgcaagagatgctggcaatagagagatgccatccctgccgagagccggacccgaggggagtaccagacacgccgctagcaagcagaagtacctagagaattacctcaataggctgctaaccatgtccttttaccgcaactatcatgcaatgactgagtttctggaggtcagccagctcagttttatcccagacttaggcaggaagggactagaaggaatgattcggaagcgatcaggaggacatagagtgccaggtctaacatgttgcggcagggaccaagtgtgttataggtggagcaagaggtggctcgtggttaaggactctttcctcttatacatgtgcctggagactggggctatttcctttgtgcagctgttcgatccaggattcgaggtgcaggtgggcaagcgctccaccgaagccaggcacggagtccggattgatacctctcacaggagccttatcctgaaatgcagttcctacaggcaggcccgatggtgggctcaggagatcaccgagctggcgcagggccctggcagggactttctgcagttgcatagacacgattcgtatgcccctcctcgccctggaaccctggcccgatggtttgtaaatggggcaggatattttgccgcagtagcagacgcaatccttcgcgcacaggaggaaatctttataaccgactggtggttgagtccagaggtgtatctcaagagacccgctcattccgatgattggcggttagacatcatgctaaagagaaaagctgaggagggcgtacgggtgtccattctcttgtttaaggaggtggagttagccctgggcattaactccggatactctaaaagggcactcatgctgcttcatcctaacatcaaagttatgaggcaccctgatcaagttactctttgggcacatcacgaaaagttactagttgtggaccaggttgtagcgtttctcggtgggcttgatctggcgtacggtcggtgggatgacttacattacagactgacggacctgggagattctagcgagtctgcggcttcacagcccccaaccccccgacccgattccccagctacaccggatctttcgcacaaccagtttttctggctgggtaaggactactccaatctcattaccaaagattgggtccagttagataggcccttcgaagacttcatagacagagagacaaccccacgaatgccttggcgcgacgtgggcgtcgttgtccacgggctgccggctcgcgacctggccaggcattttatccagaggtggaactttacgaagaccactaaggctaagtacaaaacacccacttatccctatctgctgcctaaaagcaccagcaccgctaatcaattgccctttacattacctgggggtcaatgcacgacagttcaggtgctgcggtctgttgacaggtggtccgctggcaccctggagaatagtatcctgaacgcctacttgcatactatccgggaatcacagcatttcctgtatatcgagaatcaattttttatatcatgctcagacgggagaaccgtcctgaacaaggttggagatgaaatagtagatcgaatcctgaaagcgcataagcaaggctggtgctacagagtgtatgtgctgcttcctctcttgccaggattcgaaggagacatttcaacaggcggtggaaattctattcaagcaatcctgcatttcacttacagaactctgtgccgtggtgaatactccatcctccacaggctgaaggccgcaatgggaaccgcctggagggattatattagcatctgcggcctccgcacacatggagaactaggagggcatcccgtcagtgagcttatttatattcacagcaaagttctcatagccgatgaccgcaccgttatcatcggtagcgctaacattaacgaccggtctctccttggcaaacgcgattcagagttagcagtgctaatcgaggatactgaaacggaaccttcgcttatgaatggcgcagagtatcaggctggcagcgttatcctgggagcaaacacgcggcctgacctggacctgcgggatccaatttgtgacgattttttccagctctggcaagacatggccgagagcaatgccaacatttatgaacagatattccgctgtcttcctagtaacgctacccggtctctgagaactcttagggagtacgtggcagtggagccactcgccacggtaagtcctcctctggccaggtcggaactcactcaagtccagggccacctggtgcacttcccgttgaagtttctggaggatgagtccctcttgccacctctggggtctaaagagggtatgattcccctggaggtctggacatag

SEQ ID NO: 85845 - DNA, 2769 bp, Artificial Sequence
  derived and/or modified sequence
atgaccgccacccccgagagcctgttccccaccggcgacgagctggacagcagccagctgcagatggagagcgacgaggtggacaccctgaaggagggcgaggaccccgccgacagaatgcaccccttcctggccatctacgagctgcagagcctgaaggtgcaccccctggtgttcgcccccggcgtgcccgtgaccgcccaggtggtgggcaccgagagatacaccagcggcagcaaggtgggcacctgcaccctgtacagcgtgagactgacccacggcgacttcagctggaccaccaagaagaagtacagacacttccaggagctgcacagagacctgctgagacacaaggtgctgatgagcctgctgcccctggccagattcgccgtggcctacagccccgccagagacgccggcaacagagagatgcccagcctgcccagagccggccccgagggcagcaccagacacgccgccagcaagcagaagtacctggagaactacctgaacagactgctgaccatgagcttctacagaaactaccacgccatgaccgagttcctggaggtgagccagctgagcttcatccccgacctgggcagaaagggcctggagggcatgatcagaaagagaagcggcggccacagagtgcccggcctgacctgctgcggcagagaccaggtgtgctacagatggagcaagagatggctggtggtgaaggacagcttcctgctgtacatgtgcctggagaccggcgccatcagcttcgtgcagctgttcgaccccggcttcgaggtgcaggtgggcaagagaagcaccgaggccagacacggcgtgagaatcgacaccagccacagaagcctgatcctgaagtgcagcagctacagacaggccagatggtgggcccaggagatcaccgagctggcccagggccccggcagagacttcctgcagctgcacagacacgacagctacgccccccccagacccggcaccctggccagatggttcgtgaacggcgccggctacttcgccgccgtggccgacgccatcctgagagcccaggaggagatcttcatcaccgactggtggctgagccccgaggtgtacctgaagagacccgcccacagcgacgactggagactggacatcatgctgaagagaaaggccgaggagggcgtgagagtgagcatcctgctgttcaaggaggtggagctggccctgggcatcaacagcggctacagcaagagagccctgatgctgctgcaccccaacatcaaggtgatgagacaccccgaccaggtgaccctgtgggcccaccacgagaagctgctggtggtggaccaggtggtggccttcctgggcggcctggacctggcctacggcagatgggacgacctgcactacagactgaccgacctgggcgacagcagcgagagcgccgccagccagccccccacccccagacccgacagccccgccacccccgacctgagccacaaccagttcttctggctgggcaaggactacagcaacctgatcaccaaggactgggtgcagctggacagacccttcgaggacttcatcgacagagagaccacccccagaatgccctggagagacgtgggcgtggtggtgcacggcctgcccgccagagacctggccagacacttcatccagagatggaacttcaccaagaccaccaaggccaagtacaagacccccacctacccctacctgctgcccaagagcaccagcaccgccaaccagctgcccttcaccctgcccggcggccagtgcaccaccgtgcaggtgctgagaagcgtggacagatggagcgccggcaccctggagaacagcatcctgaacgcctacctgcacaccatcagagagagccagcacttcctgtacatcgagaaccagttcttcatcagctgcagcgacggcagaaccgtgctgaacaaggtgggcgacgagatcgtggacagaatcctgaaggcccacaagcagggctggtgctacagagtgtacgtgctgctgcccctgctgcccggcttcgagggcgacatcagcaccggcggcggcaacagcatccaggccatcctgcacttcacctacagaaccctgtgcagaggcgagtacagcatcctgcacagactgaaggccgccatgggcaccgcctggagagactacatcagcatctgcggcctgagaacccacggcgagctgggcggccaccccgtgagcgagctgatctacatccacagcaaggtgctgatcgccgacgacagaaccgtgatcatcggcagcgccaacatcaacgacagaagcctgctgggcaagagagacagcgagctggccgtgctgatcgaggacaccgagaccgagcccagcctgatgaacggcgccgagtaccaggccggcagcgtgatcctgggcgccaacaccagacccgacctggacctgagagaccccatctgcgacgacttcttccagctgtggcaggacatggccgagagcaacgccaacatctacgagcagatcttcagatgcctgcccagcaacgccaccagaagcctgagaaccctgagagagtacgtggccgtggagcccctggccaccgtgagcccccccctggccagaagcgagctgacccaggtgcagggccacctggtgcacttccccctgaagttcctggaggacgagagcctgctgccccccctgggcagcaaggagggcatgatccccctggaggtgtggacctag

SEQ ID NO: 85846 - protein, 210 aa, Artificial Sequence
  derived and/or modified sequence
MDQPLAEHFSTLAKNSNLVRLNLSGCSGFSEFALQTLLSSCSRLDELNLSWCFDFTEKHVQVAVAHVSETITQLNLSGYRKNLQKSDLSTLVRRCPNLVHLDLSDSVMLKNDCFQEFFQLNYLQHLSLSRCYDIIPETLLELGEIPTLKTLQVFGIVPDGTLQLLKEALPHLQINCSHFTTIARPTIGNKKNQEIWGIKCRLTLQKPSCL

SEQ ID NO: 85847 - DNA, 633 bp, Artificial Sequence
  derived and/or modified sequence
atggaccagcccctggccgagcacttcagcaccctggccaagaacagcaacctggtgagactgaacctgagcggctgcagcggcttcagcgagttcgccctgcagaccctgctgagcagctgcagcagactggacgagctgaacctgagctggtgcttcgacttcaccgagaagcacgtgcaggtggccgtggcccacgtgagcgagaccatcacccagctgaacctgagcggctacagaaagaacctgcagaagagcgacctgagcaccctggtgagaagatgccccaacctggtgcacctggacctgagcgacagcgtgatgctgaagaacgactgcttccaggagttcttccagctgaactacctgcagcacctgagcctgagcagatgctacgacatcatccccgagaccctgctggagctgggcgagatccccaccctgaagaccctgcaggtgttcggcatcgtgcccgacggcaccctgcagctgctgaaggaggccctgccccacctgcagatcaactgcagccacttcaccaccatcgccagacccaccatcggcaacaagaagaaccaggagatctggggcatcaagtgcagactgaccctgcagaagcccagctgcctgtag

SEQ ID NO: 85848 - DNA, 633 bp, Artificial Sequence
  derived and/or modified sequence
atggaccagcccctcgcggaacatttctctaccctggccaaaaactccaatttggtgcgccttaacctgagtggctgctccggattctctgagttcgccctgcagacacttcttagttcatgcagccgactggacgaattaaacttgtcttggtgttttgacttcaccgaaaagcacgtgcaggtagccgtcgcgcatgtgtccgagactatcacacagttgaatctctctggataccgcaaaaatttacaaaaaagtgatttgtccaccctggtgcggagatgtcctaacctcgttcacctcgacttgtctgacagcgtcatgttgaaaaacgactgctttcaggagttcttccagctcaattaccttcagcacctgtccctgagcagatgctacgatatcatccctgaaacactgctggaacttggcgaaatcccaaccctgaaaaccctgcaggttttcgggattgttccagacggaaccctgcaacttctaaaggaagctttaccgcacctgcagatcaactgctctcacttcaccaccatagccagaccgaccattggtaacaaaaagaaccaggagatctggggaattaagtgccggctgactttacagaaaccctcctgtctttag

SEQ ID NO: 85849 - DNA, 633 bp, Artificial Sequence
  derived and/or modified sequence
atggaccagcccctggccgagcacttcagcaccctggccaagaacagcaacctggtgcggctgaacctgagcggctgcagcggcttcagcgagtttgccctgcagaccctgctgagcagctgcagccggctggatgagctgaacctgtcctggtgctttgacttcacagagaagcacgtgcaggtggccgtggcccacgtgtctgagaccatcacccagctgaacctgagcggctacaggaagaacctgcagaagagtgacctgagcaccctggtgcggcgctgccccaacctggtgcacctggacctgagtgacagcgtgatgctgaagaatgactgcttccaggagttcttccagctgaactacctgcagcacctgagcctgagccgctgctatgacatcatccctgagaccctgctggagctgggggagatccccaccctgaagaccctgcaggtgtttggcatcgtgcctgatggcaccctgcagctgctgaaggaggccctgccccacctgcagatcaactgcagccacttcaccaccatcgcccggcccaccatcggcaacaagaagaaccaggagatctggggcatcaagtgccgcctgaccctgcagaagcccagctgcctgtag

SEQ ID NO: 85850 - DNA, 633 bp, Artificial Sequence
  derived and/or modified sequence
atggaccagcccctggccgagcacttcagcaccctggccaagaacagcaacctggttcggcttaacctgagcggctgtagtggcttttcagaattcgcgctgcagacattactgagttcttgcagccggctggacgaactgaaccttagctggtgtttcgatttcacagaaaaacacgtacaggtggcggtagcacatgtttccgagacaatcacccagttgaacttgtctggctatcgaaaaaacctgcaaaaatcagaccttagcacactcgtaaggcggtgtcccaacctggtgcatctggatttgtcagattcggtgatgctgaaaaacgattgcttccaagaattctttcaactcaactacctgcagcacctctcactgagccggtgttatgacattattccagaaacactgttggagcttggggaaatccccacacttaaaaccctgcaagtgttcggcattgtgcccgatggaacactgcaacttctgaaagaagcactaccacacctccagattaactgttcccactttactacgatcgctaggcctacgatcgggaataagaaaaatcaagagatttggggcattaaatgcaggctgaccttacagaagcctagttgtctctag

SEQ ID NO: 85851 - DNA, 633 bp, Artificial Sequence
  derived and/or modified sequence
atggatcagcctctggccgaacacttctctaccctggcgaagaattcaaatctggtgaggttaaacctgtcgggctgctctggcttttcggaatttgctctgcagaccctcctttcttcgtgttctcgtctcgatgagctgaatctgtcctggtgcttcgactttacggagaaacatgtgcaagtggcagtagcacatgtttcggaaacgatcacacagctcaatttatcaggttaccgtaaaaatttgcagaaaagtgatctttctacccttgtgagacgatgcccaaaccttgtgcatctcgacctctccgatagcgtaatgctaaagaacgactgttttcaggaattcttccaactgaattacctccaacacttaagtctttctaggtgttatgatattatccccgagacacttctcgagctgggagagatcccgactttaaaaacactgcaggtgttcggaatcgtcccagacggaaccttgcaactgctcaaggaagccctgcctcacctgcagatcaactgttcccactttactaccatcgcaagacccaccatcggaaacaaaaagaaccaggaaatctgggggatcaaatgccggctaactttgcagaaacccagctgtttgtag

SEQ ID NO: 85852 - protein, 864 aa, Artificial Sequence
  derived and/or modified sequence
MKRSRSALSVAGTGDERSRETPESDRANMLGADLRRPRRRLSSGPGLGWAQPEPSDPGVPLPPRPTTLPLLIPPRISITRAENDSFEAENGPTPSPGRSPLDSQASPGLVLHAGAATSQRRESFLYRSDSDYDMSPKTMSRNSSVTSEAHAEDLIVTPFAQVLASLRSVRSNFSLLTNVPVPSNKRSPLGGPTPVCKATLSEETCQQLARETLEELDWCLEQLETMQTYRSVSEMASHKFKRMLNRELTHLSEMSRSGNQVSEYISTTFLDKQNEVEIPSPTMKEREKQQAPRPRPSQPPPPPVPHLQPMSQITGLKKLMHSNSLNNSNIPRFGVKTDQEELLAQELENLNKWGLNIFCVSDYAGGRSLTCIMYMIFQERDLLKKFRIPVDTMVTYMLTLEDHYHADVAYHNSLHAADVLQSTHVLLATPALDAVFTDLEILAALFAAAIHDVDHPGVSNQFLINTNSELALMYNDESVLENHHLAVGFKLLQEDNCDIFQNLSKRQRQSLRKMVIDMVLATDMSKHMTLLADLKTMVETKKVTSSGVLLLDNYSDRIQVLRNMVHCADLSNPTKPLELYRQWTDRIMAEFFQQGDRERERGMEISPMCDKHTASVEKSQVGFIDYIVHPLWETWADLVHPDAQEILDTLEDNRDWYYSAIRQSPSPPPEEESRGPGHPPLPDKFQFELTLEEEEEEEISMAQIPCTAQEALTAQGLSGVEEALDATIAWEASPAQESLEVMAQEASLEAELEAVYLTQQAQSTGSAPVAPDEFSSREEFVVAVSHSSPSALALQSPLLPAWRTLSVSEHAPGLPGLPSTAAEVEAQREHQAAKRACSACAGTFGEDTSALPAPGGGGSGGDPT

SEQ ID NO: 85853 - DNA, 2595 bp, Artificial Sequence
  derived and/or modified sequence
atgaaacggtccaggtcagccctgagcgtggccgggaccggtgacgaaaggtctcgggaaacccccgagagcgaccgggctaacatgctcggggcagacctgaggagacctcgtcgacggctaagtagcggacctgggctgggctgggctcaacctgagccctccgatcctggggtccctttaccacctagacctacgactttgccacttctgattcctcccagaatcagcatcacccgggctgagaacgactcttttgaggctgaaaacggacccaccccttcacccggaagatcccccctcgattcacaggcttccccaggcctggtgctgcatgccggagcagccacctcacagcggcgggagagcttcctctacagaagcgactccgactacgatatgagccctaaaaccatgagcagaaactcttcagtcacttccgaggcgcatgctgaggatttgatagtgacacccttcgcgcaagtactagcctctctccggagcgttcggagcaacttcagtttgttgactaatgtgcctgtaccaagcaataaacggagccccctgggcggacctactccggtgtgcaaagcgacacttagcgaggagacgtgtcagcaactggcaagggaaacactggaggaactggactggtgcctcgagcagcttgaaacaatgcaaacatatcgtagcgtctccgagatggcaagccataagtttaaaaggatgctcaatcgagaactcactcacctcagcgagatgtcccgctcagggaaccaggtctcagagtatatttctacgacatttctggataaacagaatgaggtcgaaatcccctcccctaccatgaaagagagagagaagcagcaagccccccggccaagacctagccaaccgcctccaccccctgtgccacaccttcagcctatgagccagatcacgggtctcaagaagttgatgcatagtaacagcctcaacaacagcaatattccacggtttggcgtgaaaacggatcaggaggagctcttggcgcaggagctcgagaacctgaataagtggggcttaaacatattctgtgtatcagactacgccgggggacgatccctgacttgtatcatgtacatgatattccaggagcgggatttgctgaaaaagttccgaatcccagtcgataccatggtcacttacatgctgacattagaggaccattatcacgccgacgtcgcctatcataactccctgcatgcagccgacgttctgcagtccacacacgtgctgttagccactcctgcgcttgatgcagtgtttaccgacttggaaatccttgccgcgctgttcgctgctgcaatccacgatgttgaccacccaggcgtaagcaaccagttcctcatcaataccaattccgagctggccttaatgtacaatgacgagagtgtgctggagaaccaccacctggccgttggatttaagctgcttcaggaggataattgtgacatatttcagaacctgagcaagcgccaacgtcaaagcctcaggaagatggtcattgatatggtgctcgccacggatatgtcgaaacacatgacactgctcgcagatctgaagacgatggttgagaccaaaaaggtgacttcctctggagtcctgctgttggacaactatagcgatcgcatccaggtgcttcggaatatggttcactgcgctgatctgtcaaaccccacaaagcctttggagctttataggcagtggactgacagaattatggccgagttttttcagcaaggtgatagagaaagagaaagggggatggagatttcccccatgtgcgacaagcacactgcgtctgtggagaagtcccaggttggttttatcgactacatcgtgcatcccttgtgggaaacctgggccgacctggtgcatcccgacgcccaggaaatccttgatacactagaggacaatagagactggtactatagcgccatccggcaatccccaagtcccccccccgaagaggagtcccgcggccccggccacccaccgttgcccgacaagttccagtttgagctgacattggaggaagaggaggaggaagagattagtatggcccaaataccatgcaccgcccaagaggctctgaccgcccagggtctcagcggagtggaggaagccttagatgcgaccattgcttgggaagcgagcccagcacaggagtcactcgaggtgatggctcaggaagcatcccttgaagccgagctcgaagccgtatatctcacgcagcaggcgcagtccactgggtcagcccctgttgcacccgacgagttcagctcccgcgaggagtttgtcgtggctgtcagtcattcaagcccgtcagctttagcgctgcaatcaccccttctccctgcctggaggactttaagcgtctcggagcacgcgcctggcttacccggcctccctagcaccgccgcagaagtggaggctcaaagagaacatcaggcagctaaaagggcctgctccgcatgtgcgggaaccttcggcgaggatacttcagctcttcctgctcccggaggcgggggcagtggtggagatcccacttag

SEQ ID NO: 85854 - DNA, 2595 bp, Artificial Sequence
  derived and/or modified sequence
atgaagaggagccgcagcgccctgtctgtggccggcactggagatgagaggagccgggagaccccagagagtgaccgggccaacatgctgggcgctgacctgcggcggccccggcggcggctgagcagcggccctggcctgggctgggcccagcctgagcccagcgaccccggggtgcccctgcccccccggcccaccaccctgcccctgctgatccccccacgcatcagcatcaccagggcagaaaatgacagctttgaagcagaaaatggccccacccccagccctggccgcagccccctggacagccaggccagccctggcctggtgctgcatgctggagctgccaccagccagaggcgggagagcttcctgtacagaagtgacagcgactatgacatgagccccaagaccatgagcaggaacagctctgtgaccagcgaggcccatgctgaggacctgattgtgaccccatttgcccaggtgctggccagcctgcggtctgtgcgcagcaacttcagcctgctgaccaacgtgcctgtgcccagcaacaagaggagccccctgggcggccccacccctgtgtgcaaggccaccctgtctgaggagacctgccagcagctggcccgggagaccctggaggagctggactggtgcctggagcagctggagaccatgcagacctacagatctgtgtctgagatggccagccacaagttcaagaggatgctgaaccgggagctgacccacctgtctgagatgagccgcagcggcaaccaggtgtctgagtacatcagcaccaccttcctggacaagcagaatgaggtggagatccccagccccaccatgaaggagcgggagaagcagcaggccccccggccccggcccagccagcccccacctcctcctgtgccccacctgcagcccatgagccagatcaccggcctgaagaagctgatgcacagcaacagcctgaacaacagcaacatccccaggtttggagtgaagacagaccaggaggagctgctggcccaggagctggagaacctgaacaagtggggcctgaacatcttctgtgtgtctgactatgctgggggccgcagcctgacctgcatcatgtacatgatcttccaggagcgggacctgctgaagaagttccgcatccctgtggacaccatggtgacctacatgctgaccctggaggaccactaccacgcagatgtggcctaccacaacagcctgcacgccgcagatgtgctgcagagcacccacgtgctgctggccaccccagccctggatgctgtgttcacagacctggagatcctggccgccctgtttgctgctgccatccatgatgtggaccaccctggggtgagcaaccagttcctgatcaacaccaacagcgagctggccctgatgtacaatgatgagagcgtgctggagaaccaccacctggccgtgggcttcaagctgctgcaggaggacaactgtgacatcttccagaacctgagcaagaggcagaggcagagcctgaggaagatggtgattgacatggtgctggccacagacatgagcaagcacatgaccctgctggccgacctgaagaccatggtggagaccaagaaggtgaccagcagcggcgtgctgctgctggacaactacagcgaccgcatccaggtgctgaggaacatggtgcactgtgccgacctgagcaaccccaccaagcccctggagctgtaccggcagtggacagaccgcatcatggccgagttcttccagcagggcgaccgggagcgggagcggggcatggagatcagccccatgtgtgacaagcacacagcctctgtggagaagagccaggtgggcttcatcgactacatcgtgcaccccctgtgggagacctgggccgacctggtgcacccagatgcccaggagatcctggacaccctggaggacaacagagactggtactacagcgccatccggcagagccccagccccccacctgaggaggagagccggggccctggccacccccccctgcctgacaagttccagtttgagctgaccctggaggaggaggaggaggaggagatctccatggcccagatcccctgcacagcccaggaggccctgacagcccagggcctgagcggcgtggaggaggccctggatgccaccatcgcctgggaggccagccctgcccaggagagcctggaggtgatggcccaggaggccagcctggaggccgagctggaggccgtgtacctgacccagcaggcccagagcacaggcagcgcccctgtggccccagatgagttcagcagccgggaggagtttgtggtggccgtgagccacagcagccccagcgccctggccctgcagagccccctgctgcctgcctggaggaccctgtctgtgtctgagcacgcccctggcctgcccggcctgcccagcacagctgctgaggtggaggcccagcgggagcaccaggccgccaagagggcctgcagcgcctgtgccggcaccttcggggaggacaccagcgccctgcctgcccctgggggcggcggcagcggcggggaccccacctag

SEQ ID NO: 85855 - DNA, 2595 bp, Artificial Sequence
  derived and/or modified sequence
atgaagcggagccggagcgccctgagcgtggccggcaccggcgacgagaggtcacgcgaaacaccggagagtgatcgagcaaacatgctcggcgccgatctcagaaggcctcggaggaggttatctagtggtcccggactgggttgggcccagccagaaccctcggatcctggcgtgcctctgccgccgagacccacaaccctccccctcttgattcctccacgcattagtattacgcgggccgagaatgactcattcgaagctgagaacggcccaacgccttctccgggcagatcccctctggactcccaggcgtctcctggtctagtgctccatgcaggagctgcaacttctcaacgaagagaaagcttcctgtatagatctgactccgactacgatatgtcccctaaaacgatgagcaggaatagctcggtgaccagcgaagcccatgccgaagacttgatcgttacaccgttcgcccaggtcctggcatccctcaggtcggttaggagcaatttttcccttctgaccaatgtgcccgtcccctcaaataagcggtctccattgggcggtcctacacctgtgtgtaaagctactttaagtgaggagacatgtcagcaattggcaagagaaactctggaggagctcgattggtgtctggaacaactcgagacaatgcagacataccggtccgtgtcagaaatggcttctcacaaatttaagagaatgctgaacagagagctgacacatctctcagagatgtcaaggtccgggaaccaggtcagtgagtacattagtacaacttttctggataagcaaaacgaggttgagatcccatccccgactatgaaggaacgagagaaacagcaggctccacgacccaggccttctcagcctccacctcctcccgtgccccatctccaacctatgtctcagattacaggcctgaagaagctcatgcattccaattctcttaacaattccaacatcccgcggttcggagtcaaaacggaccaagaggaactgctggcccaggagctggagaatcttaataaatgggggcttaatatcttttgcgtatctgattatgccggtggccggtcacttacctgcatcatgtacatgatattccaggaacgggacttgctcaaaaaattcaggattcccgttgacactatggttacatacatgcttacgttagaggaccattatcatgcagacgtggcctaccataactccctgcatgcagccgacgtgttgcaatctacccacgtgttacttgcaacccctgcactggatgctgtgttcactgatcttgagattctggccgcattgtttgccgcagccattcatgatgttgaccatcctggtgtgtccaatcagtttctcatcaacaccaattctgagcttgccttgatgtacaatgacgagtctgtgttagagaatcaccaccttgctgtgggattcaaattactccaagaggataactgtgacattttccaaaatctctcaaagaggcagagacagtccctgcggaaaatggtgatcgacatggtccttgctaccgacatgagtaagcacatgacactactagctgatcttaagaccatggtggagacgaaaaaggtgacttcttctggagtgctcttgctagataattactctgaccgaattcaagttctgcggaacatggtgcactgcgccgatttgtccaatcctaccaaacccctggagctttacaggcagtggacagatagaattatggccgaattctttcagcagggtgatcgggagcgggagcgggggatggaaatttcccccatgtgcgacaaacatactgcatctgtggagaaaagccaggtcggctttatcgattatatcgtacatcccttgtgggaaacctgggccgatctcgtccatccagacgcacaggaaatcctggataccctcgaagacaaccgcgactggtactattcagcaatcagacagtctccgtcacctcctcccgaggaggagtctcgcggccccggccacccacccctgcccgacaaattccagtttgaacttactttggaagaagaagaggaggaggaaatcagcatggcacagatcccctgtacagcacaagaagccctcacagcccagggtctaagcggcgtggaggaggccctggacgctacaatcgcctgggaggcttctccagcgcaagaaagcctcgaagtcatggcccaggaggccagccttgaggctgagctcgaggctgtgtatttgacccaacaggcccagtccaccggctcagcccccgtcgccccagatgagttttccagcagagaagaattcgtggtggccgtgtcacattctagcccctccgctttggctctgcagagtccactgctgcccgcttggcggaccctgagtgtgagcgagcacgcgcccggactgccaggccttccttctactgctgctgaagtggaggcacagagagaacaccaggccgccaagcgtgcctgcagtgcttgcgcaggaacgttcggcgaagacacctctgccctacccgcacccggcggcggggggagcgggggcgatcccacctag

SEQ ID NO: 85856 - DNA, 4603 bp, Artificial Sequence
  derived and/or modified sequence
atgaagaggagtcgcagtgccctgtccgtggcagggaccggggacgagaggtcgagggagacccccgaatccgaccgtgccaacatgctgggggccgacctgcgtcgccctcgccgccgcctctcgtccggtcctggcctgggctgggcccagcctgagccctcggaccctggggtccctctgccgccacggcccaccaccctgccgctgctgatcccaccgcggatttccatcaccagggccgagaacgacagcttcgaggcagagaatgggccgacaccatctcctggccgcagccccctggactcgcaggcgagcccaggactcgtgctgcacgccggggcggccaccagccagcgccgggagtccttcctgtaccgctcagacagcgactatgacatgtcacccaagaccatgtcccggaactcatcggtcaccagcgaggcgcacgctgaagacctcatcgtaacaccatttgctcaggtgctggccagcctccggagcgtccgtagcaacttctcactcctgaccaatgtgcccgttcccagtaacaagcggtccccgctgggcggccccacccctgtctgcaaggccacgctgtcagaagaaacgtgtcagcagttggcccgggagactctggaggagctggactggtgtctggagcagctggagaccatgcagacctatcgctctgtcagcgagatggcctcgcacaagttcaaaaggatgttgaaccgtgagctcacacacctgtcagaaatgagcaggtccggaaaccaggtctcagagtacatttccacaacattcctggacaaacagaatgaagtggagatcccatcacccacgatgaaggaacgagaaaaacagcaagcgccgcgaccaagaccctcccagccgcccccgccccctgtaccacacttacagcccatgtcccaaatcacagggttgaaaaagttgatgcatagtaacagcctgaacaactctaacattccccgatttggggtgaagaccgatcaagaagagctcctggcccaagaactggagaacctgaacaagtggggcctgaacatcttttgcgtgtcggattacgctggaggccgctcactcacctgcatcatgtacatgatattccaggagcgggacctgctgaagaaattccgcatccctgtggacacgatggtgacatacatgctgacgctggaggatcactaccacgctgacgtggcctaccataacagcctgcacgcagctgacgtgctgcagtccacccacgtactgctggccacgcctgcactagatgcagtgttcacggacctggagattctcgccgccctcttcgcggctgccatccacgatgtggatcaccctggggtctccaaccagttcctcatcaacaccaattcggagctggcgctcatgtacaacgatgagtcggtgctcgagaatcaccacctggccgtgggcttcaagctgctgcaggaggacaactgcgacatcttccagaacctcagcaagcgccagcggcagagcctacgcaagatggtcatcgacatggtgctggccacggacatgtccaagcacatgaccctcctggctgacctgaagaccatggtggagaccaagaaagtgaccagctcaggggtcctcctgctagataactactccgaccgcatccaggtcctccggaacatggtgcactgtgccgacctcagcaaccccaccaagccgctggagctgtaccgccagtggacagaccgcatcatggccgagttcttccagcagggtgaccgagagcgcgagcgtggcatggaaatcagccccatgtgtgacaagcacactgcctccgtggagaagtctcaggtgggttttattgactacattgtgcacccattgtgggagacctgggcggaccttgtccacccagatgcccaggagatcttggacactttggaggacaaccgggactggtactacagcgccatccggcagagcccatctccgccacccgaggaggagtcaagggggccaggccacccacccctgcctgacaagttccagtttgagctgacgctggaggaggaagaggaggaagaaatatcaatggcccagataccgtgcacagcccaagaggcattgactgcgcagggattgtcaggagtcgaggaagctctggatgcaaccatagcctgggaggcatccccggcccaggagtcgttggaagttatggcacaggaagcatccctggaggccgagctggaggcagtgtatttgacacagcaggcacagtccacaggcagtgcacctgtggctccggatgagttctcgtcccgggaggaattcgtggttgctgtaagccacagcagcccctctgccctggctcttcaaagcccccttctccctgcttggaggaccctgtctgtttcagagcatgccccgggcctcccgggcctcccctccacggcggccgaggtggaggcccaacgagagcaccaggctgccaagagggcttgcagtgcctgcgcagggacatttggggaggacacatccgcactcccagctcctggtggcggggggtcaggtggagaccctacctgatccccagacctctgtccctgttcccctccactcctcccctcactcccctgctcccccgaccacctcctcctctgcctcaaagactcttgtcctcttgtccctcctgagaaaaaagaaaacgaaaagtggggtttttttctgttttctttttttcccctttccccctgcccccacccacggggcctttttttggaggtgggggctggggaatgaggggctgaggtcccggaagggattttatttttttgaattttaattgtaacatttttagaaaaagaacaaaaaaagaaaaaaaaaagaaagaaacacagcaactgtagatgctcctgttcctggttcccgctttccacttccaaatccctcccctcaccttcccccactgccccccaagttccaggctcagtcttccagccgcctggggagtctctacctgggcccaagcaggtgtggggcctccttctgggcttttcttctgaatttagaggatttctagaacgtggtcaggaatagccattctaggcggggctggggccagggtggggggcagtcactgtgggaggtcccagctccagcccccctctggtttgctgcctcctctcccctctaaaaaagtcttccgcttgattttgcacaatcccggcgatactcctggcgatactgactagaaagtcagggagctgggggagctgttcactttaggatacgggggtggtatggaagggagcgttcacaccgccagcctcgggcctgggatttgaggagggccctagacctcctccactctccatcccctttcccttccactttgggttcactttgaattttctccgttttttggggcagtggctctgatccactcacccccccgccccccgccccacttctagctgcttctcctcttgtttctgccttaataattcccacggccacaggcaagggggttgcagtggccgcctgcaccttggatgaggcagggccaggcgcccagaacccccatcctggccgcacccccctttccagggtcctccggaccccaccttccacactctgatcacagcccccctaccttttgccctaggaggaagcaataatggtgtataccctcattctcattcctgggcagcccttccttccaccctggcaccaaaataatttctcctccatccgtaccttgcctagcctctccctctcccccagctagtccctgagcaatacggcagacagatgcaagaccatttttctccaagccatgggggactgtttggaaggaaagccccctctctccctcctcccctcgccctcggcctggttctgcagctggaccgacctcattcatcgcctgccccctacccaattctgagcacacggtactgtagcccccagttcctccctagccttccatccctctgtccaccccagggggaggtaaccccgcactcacactcccttgatgctgtctgtacagggttcatattttgtagcgaaagtcgtttttgtcccagccggcgatcggagtgggccttttctttctttttgttcattctttacctttttttcttttctttctttcttttttgtacatactgtaaggttggtttgtaaattattctacggaggcaaaaagggaaaataaaaacttgcccttccctggctgacccagtcgggaaggtagggaaggaggtctcccgttgggagagtctctgttcctgctgtattatacaaactgtaccatagtcctgggaaaagggtggactcaccgctgttgttttatgggaagtcgtgtcatcctaggggttggggctgggcagagcctgtcccctccccccttctccaggagccagggggtgactggagagacagacccacccccaagcagggctcctctccccagggtgagcacaggacctctgtaagctgcttgtgtattgtccactttgacgatcagtcattcggtccgttgatcaataatccttcgatcttgtctccaattaaaccgaggctttcaccg

SEQ ID NO: 85857 - DNA, 2707 bp, Artificial Sequence
  derived and/or modified sequence
cgtcacgccccaggagaggcaataggaggccctggccctgccgacatggccaccgcagtcccaacggcgcgctaggttggcgagatgaagaggagtcgcagtgccctgtccgtggcagggaccggggacgagaggtcgagggagacccccgaatccgaccgtgccaacatgctgggggccgacctgcgtcgccctcgccgccgcctctcgtccggtcctggcctgggctgggcccagcctgagccctcggaccctggggtccctctgccgccacggcccaccaccctgccgctgctgatcccaccgcggatttccatcaccagggccgagaacgacagcttcgaggcagagaatgggccgacaccatctcctggccgcagccccctggactcgcaggcgagcccaggactcgtgctgcacgccggggcggccaccagccagcgccgggagtccttcctgtaccgctcagacagcgactatgacatgtcacccaagaccatgtcccggaactcatcggtcaccagcgaggcgcacgctgaagacctcatcgtaacaccatttgctcaggtgctggccagcctccggagcgtccgtagcaacttctcactcctgaccaatgtgcccgttcccagtaacaagcggtccccgctgggcggccccacccctgtctgcaaggccacgctgtcagaagaaacgtgtcagcagttggcccgggagactctggaggagctggactggtgtctggagcagctggagaccatgcagacctatcgctctgtcagcgagatggcctcgcacaagttcaaaaggatgttgaaccgtgagctcacacacctgtcagaaatgagcaggtccggaaaccaggtctcagagtacatttccacaacattcctggacaaacagaatgaagtggagatcccatcacccacgatgaaggaacgagaaaaacagcaagcgccgcgaccaagaccctcccagccgcccccgccccctgtaccacacttacagcccatgtcccaaatcacagggttgaaaaagttgatgcatagtaacagcctgaacaactctaacattccccgatttggggtgaagaccgatcaagaagagctcctggcccaagaactggagaacctgaacaagtggggcctgaacatcttttgcgtgtcggattacgctggaggccgctcactcacctgcatcatgtacatgatattccaggagcgggacctgctgaagaaattccgcatccctgtggacacgatggtgacatacatgctgacgctggaggatcactaccacgctgacgtggcctaccataacagcctgcacgcagctgacgtgctgcagtccacccacgtactgctggccacgcctgcactagatgcagtgttcacggacctggagattctcgccgccctcttcgcggctgccatccacgatgtggatcaccctggggtctccaaccagttcctcatcaacaccaattcggagctggcgctcatgtacaacgatgagtcggtgctcgagaatcaccacctggccgtgggcttcaagctgctgcaggaggacaactgcgacatcttccagaacctcagcaagcgccagcggcagagcctacgcaagatggtcatcgacatggtgctggccacggacatgtccaagcacatgaccctcctggctgacctgaagaccatggtggagaccaagaaagtgaccagctcaggggtcctcctgctagataactactccgaccgcatccaggtcctccggaacatggtgcactgtgccgacctcagcaaccccaccaagccgctggagctgtaccgccagtggacagaccgcatcatggccgagttcttccagcagggtgaccgagagcgcgagcgtggcatggaaatcagccccatgtgtgacaagcacactgcctccgtggagaagtctcaggtgggttttattgactacattgtgcacccattgtgggagacctgggcggaccttgtccacccagatgcccaggagatcttggacactttggaggacaaccgggactggtactacagcgccatccggcagagcccatctccgccacccgaggaggagtcaagggggccaggccacccacccctgcctgacaagttccagtttgagctgacgctggaggaggaagaggaggaagaaatatcaatggcccagataccgtgcacagcccaagaggcattgactgcgcagggattgtcaggagtcgaggaagctctggatgcaaccatagcctgggaggcatccccggcccaggagtcgttggaagttatggcacaggaagcatccctggaggccgagctggaggcagtgtatttgacacagcaggcacagtccacaggcagtgcacctgtggctccggatgagttctcgtcccgggaggaattcgtggttgctgtaagccacagcagcccctctgccctggctcttcaaagcccccttctccctgcttggaggaccctgtctgtttcagagcatgccccgggcctcccgggcctcccctccacggcggccgaggtggaggcccaacgagagcaccaggctgccaagagggcttgcagtgcctgcgcagggacatttggggaggacacatccgcactcccagctcctggtggcggggggtcaggtggagaccctacctgatccccagacctctgtccctgttcccctc

SEQ ID NO: 85858 - DNA, 2595 bp, Artificial Sequence
  derived and/or modified sequence
atgaagcgtagccgatccgcactgagcgtcgccggaaccggcgatgagcggtctcgggaaactcccgaaagtgaccgtgcaaatatgttaggagcagacctccgacggccaaggaggagactgtcctcagggccaggactgggctgggcgcagcctgagccatccgatcccggagtcccgttgccgcctaggcctacgaccttacctttactgattccacccaggatttctatcacaagagcagaaaatgattcctttgaagccgagaacggccctacccccagtcctggacggtcccctctcgacagtcaggcgtccccaggcttggttctgcacgccggtgctgcgacctcccagcgcagagagagctttttgtataggtccgacagcgactatgacatgtctccaaaaaccatgagtaggaattcctccgtgacttcggaagcacacgctgaggatctgatagtgacaccctttgctcaggtactggcatccctcaggtcagtgcgtagcaacttctccctgctgactaacgtgcccgtgcccagcaacaagcgctctccccttggcggaccaactcccgtatgcaaagcaaccttatcagaggagacctgccagcagcttgccagagagacgctggaagagctagattggtgcctcgagcagcttgagacaatgcagacttaccggtcagtctcggaaatggcttcccataaatttaagagaatgcttaatagagagctgacacatttgtctgagatgagtaggtccggtaaccaggttagtgagtacatctccactactttcttagataaacagaacgaggtggagataccttctcctactatgaaggagcgtgagaagcagcaagctcctagaccccgtcctagtcagcctccaccccctcctgttcctcacctccagcccatgtcacagatcaccgggcttaagaagctcatgcactcgaactccctgaacaattctaatatccccaggtttggagtcaagaccgaccaggaggaattgctggcccaagaactggagaacctcaacaagtgggggcttaacattttctgcgttagcgactacgcaggcggaagaagcttgacatgcataatgtatatgatttttcaggagagagacttgcttaagaaattcagaatccctgtcgataccatggtgacatacatgttgacactggaggatcactatcacgccgacgtggcctaccacaactccttgcacgcggcagatgtactccagtctacacatgtgctcctggctacacctgccctagacgctgtcttcaccgatctggagatcctggctgctctcttcgccgctgccatccacgatgtggatcaccccggtgtgagcaaccaattcctgatcaacacaaattctgaactggcgctcatgtataatgacgagagcgtgttagagaatcatcacctggccgtcggctttaaactcctccaggaggataattgcgacattttccagaacctgagtaaacgccagcggcaaagtctccggaaaatggtcattgatatggtcctggcaacagacatgagcaagcacatgactcttcttgctgatctgaagactatggttgagaccaagaaggtgacctcctccggcgtcttgctgctggacaactacagcgatcggatacaagtccttaggaacatggtgcattgcgccgacctgtcaaatcccacaaaacccctggagttgtatagacagtggacggaccggataatggcagaatttttccagcagggtgaccgtgagcgcgagcggggaatggaaatttcccccatgtgtgacaaacatacggcctctgtggaaaagtcccaggtggggttcatcgactatatcgtgcatccactctgggagacatgggctgacttggtgcaccccgacgctcaggaaattctggacactctggaagataaccgggattggtactattctgcaatacggcaatcccctagccctccccctgaagaagaaagccgaggccctggacacccaccactgccagataaatttcaatttgagcttacactggaagaggaagaagaggaggaaattagcatggcacaaataccgtgcacagcccaggaggctctgaccgcccagggcctgagcggagtggaggaggccctggacgctaccatcgcctgggaagcttcaccagctcaagaaagtcttgaggtgatggctcaagaagcaagcctggaggccgagctagaagccgtatacttgacacaacaggctcagagcacaggctctgcgccagttgcccctgatgagtttagtagtcgcgaggagttcgtggtggccgtctcacattcctcaccgtccgcgctggcactgcagtctccactccttcctgcctggaggacattgtccgtctccgagcatgcccctggtctgccgggtttaccctccacagctgctgaggtagaggcccagcgggagcaccaggcagcgaaaagagcgtgcagcgcatgcgctggcactttcggcgaggacaccagcgctctgccagccccaggcggagggggaagcggcggagatccgacctag

SEQ ID NO: 85859 - DNA, 2595 bp, Artificial Sequence
  derived and/or modified sequence
atgaagagaagcagaagcgccctgagcgtggccggcaccggcgacgagagaagcagagagacccccgagagcgacagagccaacatgctgggcgccgacctgagaagacccagaagaagactgagcagcggccccggcctgggctgggcccagcccgagcccagcgaccccggcgtgcccctgccccccagacccaccaccctgcccctgctgatcccccccagaatcagcatcaccagagccgagaacgacagcttcgaggccgagaacggccccacccccagccccggcagaagccccctggacagccaggccagccccggcctggtgctgcacgccggcgccgccaccagccagagaagagagagcttcctgtacagaagcgacagcgactacgacatgagccccaagaccatgagcagaaacagcagcgtgaccagcgaggcccacgccgaggacctgatcgtgacccccttcgcccaggtgctggccagcctgagaagcgtgagaagcaacttcagcctgctgaccaacgtgcccgtgcccagcaacaagagaagccccctgggcggccccacccccgtgtgcaaggccaccctgagcgaggagacctgccagcagctggccagagagaccctggaggagctggactggtgcctggagcagctggagaccatgcagacctacagaagcgtgagcgagatggccagccacaagttcaagagaatgctgaacagagagctgacccacctgagcgagatgagcagaagcggcaaccaggtgagcgagtacatcagcaccaccttcctggacaagcagaacgaggtggagatccccagccccaccatgaaggagagagagaagcagcaggcccccagacccagacccagccagcccccccccccccccgtgccccacctgcagcccatgagccagatcaccggcctgaagaagctgatgcacagcaacagcctgaacaacagcaacatccccagattcggcgtgaagaccgaccaggaggagctgctggcccaggagctggagaacctgaacaagtggggcctgaacatcttctgcgtgagcgactacgccggcggcagaagcctgacctgcatcatgtacatgatcttccaggagagagacctgctgaagaagttcagaatccccgtggacaccatggtgacctacatgctgaccctggaggaccactaccacgccgacgtggcctaccacaacagcctgcacgccgccgacgtgctgcagagcacccacgtgctgctggccacccccgccctggacgccgtgttcaccgacctggagatcctggccgccctgttcgccgccgccatccacgacgtggaccaccccggcgtgagcaaccagttcctgatcaacaccaacagcgagctggccctgatgtacaacgacgagagcgtgctggagaaccaccacctggccgtgggcttcaagctgctgcaggaggacaactgcgacatcttccagaacctgagcaagagacagagacagagcctgagaaagatggtgatcgacatggtgctggccaccgacatgagcaagcacatgaccctgctggccgacctgaagaccatggtggagaccaagaaggtgaccagcagcggcgtgctgctgctggacaactacagcgacagaatccaggtgctgagaaacatggtgcactgcgccgacctgagcaaccccaccaagcccctggagctgtacagacagtggaccgacagaatcatggccgagttcttccagcagggcgacagagagagagagagaggcatggagatcagccccatgtgcgacaagcacaccgccagcgtggagaagagccaggtgggcttcatcgactacatcgtgcaccccctgtgggagacctgggccgacctggtgcaccccgacgcccaggagatcctggacaccctggaggacaacagagactggtactacagcgccatcagacagagccccagccccccccccgaggaggagagcagaggccccggccacccccccctgcccgacaagttccagttcgagctgaccctggaggaggaggaggaggaggagatcagcatggcccagatcccctgcaccgcccaggaggccctgaccgcccagggcctgagcggcgtggaggaggccctggacgccaccatcgcctgggaggccagccccgcccaggagagcctggaggtgatggcccaggaggccagcctggaggccgagctggaggccgtgtacctgacccagcaggcccagagcaccggcagcgcccccgtggcccccgacgagttcagcagcagagaggagttcgtggtggccgtgagccacagcagccccagcgccctggccctgcagagccccctgctgcccgcctggagaaccctgagcgtgagcgagcacgcccccggcctgcccggcctgcccagcaccgccgccgaggtggaggcccagagagagcaccaggccgccaagagagcctgcagcgcctgcgccggcaccttcggcgaggacaccagcgccctgcccgcccccggcggcggcggcagcggcggcgaccccacctag

SEQ ID NO: 85860 - DNA, 1339 bp, Artificial Sequence
  derived and/or modified sequence
aattgctctcgctgcgtcagggttccagataaccagaaccgcaaatgcaggcgggggtgtcccagagtcggctccgcctgcaccccagggcgctggggccgggcatggggcggggggtgatataagaggacggcccagcagagggatgaagattttggagcccagctgtgtgccagcccaagtcggaacttggatcacatcagatcctctcgagctccagcaggagaggcccttcctcgcctggcagcccctgagcggctcagcagggcaccatggcaagatcccttctcctgcccctgcagatcttactgctatccttagccttggaaactgcaggagaagaagtgagtacaccgtgcacctgggcagtgatacgctgggcgacaggagagctcagaggatcaaggcctcgaagtcattccgccaccccggctactccacacagacccatgttaatgacctcatgctcgtgaagctcaatagccaggccaggctgtcatccatggtgaagaaagtcaggctgccctcccgctgcgaaccccctggaaccacctgtactgtctccggctggggcactaccacgagcccagatgtgacctttccctctgacctcatgtgcgtggatgtcaagctcatctccccccaggactgcacgaaggtttacaaggacttactggaaaattccatgctgtgcgctggcatccccgactccaagaaaaacgcctgcaatggtgactcagggggaccgttggtgtgcagaggtaccctgcaaggtctggtgtcctggggaactttcccttgcggccaacccaatgacccaggagtctacactcaagtgtgcaagttcaccaagtggataaatgacaccatgaaaaagcatcgctaacgccacactgagttaattaactgtgtgcttccaacagaaaatgcacaggagtgaggacgccgatgacctatgaagtcaaatttgactttacctttcctcaaagatatatttaaaccaacctcatgccctgttgataaaccaatcaaattggtaaagacctaaaaccaaaacaaataaagaaacacaaaaccctcagtgctggagaagagtcagtgagaccagcactctcaaacactggaactggacgttcgtacagtctttacggaagacacttggtcaacgtacaccgagacccttattcaccacctttgacccagtaactctaatcttaggaagaacctactgaaacaaaaaaaatccaaaatgtagaacaagacttgaatttaccatgatattatttatcacagaaatgaagtgaaaccatcaaacatgttccaaaagtaccagatggct

SEQ ID NO: 85861 - protein, 164 aa, Artificial Sequence
  derived and/or modified sequence
MAPSRNGMVLKPHFHKDWQRRVATWFNQPARKIRRRKARQAKARRIAPRPASGPIRPIVRCPTVRYHTKVRAGRGFSLEELRVAGIHKKGDSSAEELKLATQLTGPVMPVRNVYKKEKARVITEEEKNFKAFASLRMARANARLFGIRAKRAKEAAEQDVEKKK

SEQ ID NO: 85862 - DNA, 495 bp, Artificial Sequence
  derived and/or modified sequence
atggcgcccagcagaaatggaatggtgttgaagcctcacttccataaggactggcaacggcgggtggccacctggtttaaccagccggcccgcaaaatccgccggcggaaagccaggcaagcgaaagcacgcaggattgcccctcggcccgcttccggccccattcgtcccatcgtccggtgtccaacagtgcggtatcacaccaaggtgcgtgctggaaggggtttctcactggaggaactcagagtagccggtattcataaaaagggcgattcatctgccgaggagctgaagttggccacacagctcactgggcccgtcatgcctgtgaggaacgtgtataaaaaggagaaggcgcgcgtgataacggaggaagagaagaatttcaaagcatttgccagccttcggatggcgagggccaatgccaggctctttgggatccgagcaaagagggccaaggaggccgctgaacaagacgtcgagaaaaagaagtag

SEQ ID NO: 85863 - DNA, 495 bp, Artificial Sequence
  derived and/or modified sequence
atggcccccagcagaaatggcatggtgctgaagccccacttccacaaggactggcagaggagagtggccacctggttcaaccagcctgccaggaagatcagaagaaggaaggcccggcaggccaaggcccggcgcatcgcccccaggcctgccagcggccccatccggcccatcgtgcgctgccccaccgtgcgctaccacaccaaggtgcgggccggccggggcttcagcctggaggagctgcgggtggccggcatccacaagaagggggacagcagcgctgaggagctgaagctggccacccagctgaccggccctgtgatgcctgtgagaaatgtgtacaagaaggagaaggcccgggtcatcacagaggaggagaagaacttcaaggcctttgccagcctgaggatggcccgggccaatgcccggctgtttggcatccgggccaagagggccaaggaggccgctgagcaggatgtggagaagaagaagtag

SEQ ID NO: 85864 - DNA, 495 bp, Artificial Sequence
  derived and/or modified sequence
atggcccccagccggaacggcatggtgctgaagccccacttccacaaagattggcagcgtagggttgccacgtggttcaatcagcctgcaaggaagattaggaggcgtaaagcgcgacaggccaaggcccgtcggatcgccccccggccagcctctggcccaatccgtcccattgttcgctgtcccaccgtccggtaccatactaaagtccgcgccggaagaggattctccttggaagagttaagggtggccggcattcacaagaagggtgattccagcgcggaagagttaaaattggcgacacagctcaccggccctgtgatgccagttcgtaatgtgtacaaaaaagagaaggcccgagtaatcactgaggaggaaaaaaattttaaggcattcgcatcactgcgcatggcacgagctaacgcgagactgtttgggattagggctaaaagggccaaagaggccgccgaacaggatgtcgagaagaagaagtag

SEQ ID NO: 85865 - DNA, 495 bp, Artificial Sequence
  derived and/or modified sequence
atggccccatctagaaatggcatggtgctgaaaccgcacttccataaagattggcagcgcagggtcgcaacctggttcaatcaacccgctaggaagatccgccgacggaaggctcgacaagcgaaggcccgtagaattgcccctagacctgctagtgggccaatacgccctattgttagatgtcccactgttaggtaccatactaaagtgcgggcaggacggggattctcgctggaagagcttcgtgttgctgggatccacaaaaagggcgattcctctgccgaggaattgaagctggcaacacagctgacggggccagtgatgcccgtacgaaacgtctataagaaagagaaagcccgagtaataaccgaagaagagaagaatttcaaggcttttgcttcactgcggatggcacgggctaatgccaggctttttggcatacgagccaagcgggcaaaggaagccgcagaacaggatgtggaaaagaaaaaatag

SEQ ID NO: 85866 - DNA, 1457 bp, Artificial Sequence
  derived and/or modified sequence
cctttccgctcggctgttttcctgcgcaggagccgcagggccgtaggcagccatggcgcccagccggaatggcatggtcttgaagccccacttccacaaggactggcagcggcgcgtggccacgtggttcaaccagccggcccgtaagatccgcagacgtaaggcccggcaagccaaggcgcgccgcatcgccccgcgccccgcgtcgggtcccatccggcccatcgtgcgctgccccacggttcggtaccacacgaaggtgcgcgccggccgcggcttcagcctggaggagctcagggtggccggcattcacaagaagggagacagttctgctgaagaactgaaactggccacccagctgaccggaccggtcatgcccgtccggaacgtctataagaaggagaaagctcgagtcatcactgaggaagagaagaatttcaaagccttcgctagtctccgtatggcccgtgccaacgcccggctcttcggcatacgggcaaaaagagccaaggaagccgcagaacaggatgttgaaaagaaaaaataaagccctcctggggacttggaatcagtcggcagtcatgctgggtctccacgtggtgtgtttcgtgggaacaactgggcctgggatggggcttcactgctgtgacttcctcctgccaggggatttggggctttcttgaaagacagtccaagccctggataatgctttactttctgtgttgaagcactgttggttgtttggttagtgactgatgtaaaacggttttcttgtggggaggttacagaggctgacttcagagtggacttgtgttttttctttttaaagaggcaaggttgggctggtgctcacagctgtaatcccagcactttgaggttggctgggagttcaagaccagcctggccaacatgtcagaactactaaaaataaagaaatcagccatgcttggtgctgcacacttgtagttgcagctcctgggaggcagaggtgagggatcacttaacccaggaggcagaggctgcactgagccaggatcacgccactgcactctagcctgggcaacagtgagactgtctcaaaaaaaaaaaaagagacagggtcttcggcacccaggctggagtacagtgccacaatcatggctcactgcagtcttgaactcatggcctcaagcagtcctccctcagcctcccaagtagaggggtttataggcacgagaccctgcacccaacctagagttgccttttttaagcaaagcagtttctagttaatgtagcatcttggactttggggcgtcattcttaagcttgttgtgcccggtaaccatggtcctcttgctctgattaacccttccttcaatgggcttcttcacccagacaccaaggtatgagatggccctgccaagtgtcggcctctcctgttaaacaaaaacattctaaagccattgttcttgcttcat

SEQ ID NO: 85867 - DNA, 495 bp, Artificial Sequence
  derived and/or modified sequence
atggcccccagcagaaacggcatggtgctgaagccccacttccacaaggactggcagagaagagtggccacctggttcaaccagcccgccagaaagatcagaagaagaaaggccagacaggccaaggccagaagaatcgcccccagacccgccagcggccccatcagacccatcgtgagatgccccaccgtgagataccacaccaaggtgagagccggcagaggcttcagcctggaggagctgagagtggccggcatccacaagaagggcgacagcagcgccgaggagctgaagctggccacccagctgaccggccccgtgatgcccgtgagaaacgtgtacaagaaggagaaggccagagtgatcaccgaggaggagaagaacttcaaggccttcgccagcctgagaatggccagagccaacgccagactgttcggcatcagagccaagagagccaaggaggccgccgagcaggacgtggagaagaagaagtag

SEQ ID NO: 85868 - protein, 439 aa, Artificial Sequence
  derived and/or modified sequence
MIIPSLEELDSLKYSDLQNLAKSLGLRANLRATKLLKALKGYIKHEARKGNENQDESQTSASSCDETEIQISNQEEAERQPLGHVTKTRRRCKTVRVDPDSQNHSEIKISNPTEFQNHEKQESQDLRATAKVPSPPDEHQEAENAVSSGNRDSKVPSEGKKSLYTDESSKPGKNKRTAITTPNFKKLHEAHFKEMESIDQYIERKKKHFEEHNSMNELKQPINKGGVRTPVPPRGRLSVASTPISQRRSQGRSCGPASQSTLGLKGSLKRSAISAAKTGVRFSAATKDNEHKRSLTKTPARKSAHVTVSGGTPKGEAVLGTHKLKTITGNSAAVITPFKLTTEATQTPVSNKKPVFDLKASLSRPLNYEPHKGKLKPWGQSKENNYLNQHVNRINFYKKTYKQPHLQTKEEQRKKREQERKEKKAKVLGMRRGLILAED

SEQ ID NO: 85869 - DNA, 1320 bp, Artificial Sequence
  derived and/or modified sequence
atgataatcccatcccttgaagaactggatagtttgaaatactccgacctccagaatttggccaagagcctggggttaagagccaaccttcgggctacaaaacttctgaaagctctgaagggttatatcaagcacgaagcgcgaaaagggaatgagaatcaagatgagtcacagacctcggcaagctcttgcgacgagacagagatccaaattagcaatcaggaggaggccgaaaggcaaccactcggacacgtcaccaagacacgccggaggtgcaaaactgtcagagtcgaccctgactctcagaatcattccgagatcaagataagcaatcccactgagtttcaaaatcatgaaaagcaggagtcacaggatctaagggctaccgccaaggtcccttcaccccccgatgagcaccaagaggctgagaacgctgtgtcatccggaaaccgcgactcgaaggttccttccgaggggaaaaaatcactttacaccgatgagagcagtaagccaggcaagaacaagcggacggccatcactactcctaatttcaaaaagttacacgaggcccatttcaaggagatggaaagtatcgatcagtatatagagagaaaaaagaaacacttcgaagagcacaacagcatgaatgagcttaaacaacccatcaacaaagggggggttaggacaccagtgcccccacgcgggaggctctccgtggcatctaccccaatctcccagcgccgcagccagggacgatcatgtggcccagctagtcagagtaccttgggcttaaaggggagcttgaagagatctgcaatctctgccgccaagactggagtgcgtttctcagccgcaactaaggacaatgagcataaacggtccctgacaaagacgcctgcgcggaagagcgcgcatgtaacagtgtctgggggcactcccaaaggagaagctgtcttgggcacgcataaactgaagacaattaccggcaattcggcagctgtcatcactcctttcaagcttacgaccgaagccacccaaacccctgtgtccaacaagaagcctgtgtttgacctaaaagcgagcctatcccgcccattaaactacgagcctcataaaggaaagctgaaaccatgggggcagtccaaagagaacaactacctgaaccaacacgtaaatcgcattaacttctacaagaagacatataaacagccacacctgcagacaaaggaagaacagagaaagaaacgggagcaggagcgcaaggaaaagaaggcaaaagtgctaggcatgcggaggggcctgatcctggcggaagactag

SEQ ID NO: 85870 - DNA, 1320 bp, Artificial Sequence
  derived and/or modified sequence
atgatcatccccagcctggaggagctggacagcctgaagtacagcgacctgcagaacctggccaagagcctgggcctgcgggccaacctgcgggccaccaagctgctgaaggccctgaagggctacatcaagcatgaggccaggaaaggaaatgaaaaccaggatgagagccagaccagcgccagcagctgtgatgaaacagagatccagatcagcaaccaggaggaggccgagcggcagcccctgggccacgtgaccaagacccggcggcgctgcaagacagtgcgggtggaccctgacagccagaaccacagcgagatcaagatcagcaaccccacagagttccagaaccacgagaagcaggagagccaggacctgcgggccacagccaaggtgcccagccccccagatgagcaccaggaggctgaaaatgctgtgagcagcggcaacagagacagcaaggtgcccagcgagggcaagaagagcctgtacacagatgagagcagcaagccaggcaagaacaagaggacagccatcaccacccccaacttcaagaagctgcacgaggcccacttcaaggagatggagagcattgaccagtacatcgagaggaagaagaagcactttgaggagcacaacagcatgaatgagctgaagcagcccatcaacaagggcggcgtgaggacccctgtgcccccccggggccgcctgtctgtggccagcacccccatcagccagaggaggagccagggccgcagctgtggccctgccagccagagcaccctgggcctgaagggcagcctgaagaggtctgccatctctgctgccaagacaggagtgcgcttctctgctgccaccaaggacaatgagcacaagaggagcctgaccaagaccccagccaggaagagcgcccacgtgacagtgtctgggggcacccccaagggggaggccgtgctgggcacccacaagctgaagaccatcaccggcaacagcgctgctgtgatcacccccttcaagctgaccacagaggccacccagacccctgtgagcaacaagaagcctgtgtttgacctgaaggccagcctgagccggcccctgaactatgagccccacaagggcaagctgaagccctggggccagagcaaagaaaacaactacctgaaccagcacgtgaaccgcatcaacttctacaagaagacctacaagcagccccacctgcagaccaaggaggagcagaggaagaagcgggagcaggagaggaaggagaagaaggccaaggtgctgggcatgagaagaggcctcatcctggccgaggactag

SEQ ID NO: 85871 - DNA, 1320 bp, Artificial Sequence
  derived and/or modified sequence
atgatcatccccagcctggaggagctggacagcctgaagtacagcgacctgcagaacctcgcaaagagtctgggtttgcgggccaatcttcgggcaactaaactcctgaaggccttgaagggctacataaaacacgaagctcgcaagggcaacgaaaatcaggatgagagccagacctctgcttcctcatgtgatgaaacggagatccagatatcaaaccaggaggaagccgaaaggcagcctctgggccacgtgactaaaacgagaaggcggtgcaagaccgtaagagtcgatccagattcccagaaccatagcgaaattaagatctccaatcctacagagtttcaaaatcatgagaagcaagaaagtcaagatctgcgcgccacagccaaagtcccaagtccacccgacgagcaccaggaggcagaaaacgcagtgtctagcggcaatcgcgactcgaaagtcccctcagaaggcaagaagtcactttatactgacgagagtagcaaaccaggaaaaaacaaacgaacggcaattacaaccccaaactttaaaaaactccacgaggcacattttaaagagatggagagtatcgatcagtatattgagcggaaaaagaaacatttcgaggagcacaacagcatgaacgaactgaagcagcctattaacaaaggcggagtaagaactccagtgcctcccaggggacgtctctcagtcgcctccaccccaatcagccaaagaaggtcacagggccgctcctgtggtccagcctcacagagtactctgggactgaagggtagtttaaagaggtccgctattagcgctgctaagacaggcgtgaggtttagcgctgctacaaaggacaacgagcataagcgctccctcaccaagacacccgctaggaagagtgctcatgtgactgtatccggcgggactcctaaaggggaagcggtgttaggcacacacaagctcaaaacgattaccgggaattcggcagcagtgatcaccccttttaagcttaccaccgaagccacacaaaccccggtgtcaaataagaagcctgtgtttgacctcaaggcttcattgtccaggcctctgaactatgagcctcacaagggaaagttgaagccatggggacagtcaaaagaaaataactatttaaaccaacatgtgaaccgcatcaatttctataaaaaaacgtacaagcaaccacatcttcagaccaaagaggaacaacggaagaaacgggagcaggaacgcaaagagaagaaagcaaaggtgctgggcatgagaaggggcctgatattagctgaggattag

SEQ ID NO: 85872 - DNA, 2256 bp, Artificial Sequence
  derived and/or modified sequence
gccagggatttgaaccgcgctgacgaagtttggtgatccatcttccgagtatcgccgggatttcgaatcgcgatgatcatcccctctctagaggagctggactccctcaagtacagtgacctgcagaacttagccaagagtctgggtctccgggccaacctgagggcaaccaagttgttaaaagccttgaaaggctacattaaacatgaggcaagaaaaggaaatgagaatcaggatgaaagtcaaacttctgcatcctcttgtgatgagactgagatacagatcagcaaccaggaagaagctgagagacagccacttggccatgtcaccaaaacaaggagaaggtgcaagactgtccgtgtggaccctgactcacagaatcattcagagataaaaataagtaatcccactgaattccagaatcatgaaaagcaggaaagccaggatctcagagctactgcaaaagttccttctccaccagacgagcaccaagaagctgagaatgctgtttcctcaggtaacagagattcaaaggtaccttcagaaggaaagaaatctctctacacagatgagtcatccaaacctggaaaaaataaaagaactgcaatcactactccaaactttaagaagcttcatgaagctcattttaaggaaatggagtccattgatcaatatattgagagaaaaaagaaacattttgaagaacacaattccatgaatgaactgaagcagcccatcaataagggaggggtcaggactccagtacctccaagaggaagactctctgtggcttctactcccatcagccaacgacgctcgcaaggccggtcttgtggccctgcaagtcagagtaccttgggtctgaaggggtcactcaagcgctctgctatctctgcagctaaaacgggtgtcaggttttcagctgctactaaagataatgagcataagcgttcactgaccaagactccagccagaaagtctgcacatgtgaccgtgtctgggggcaccccaaaaggcgaggctgtgcttgggacacacaaattaaagaccatcacggggaattctgctgctgttattaccccattcaagttgacaactgaggcaacgcagactccagtctccaataagaaaccagtgtttgatcttaaagcaagtttgtctcgtcccctcaactatgaaccacacaaaggaaagctaaaaccatgggggcaatctaaagaaaataattatctaaatcaacatgtcaacagaattaacttctacaagaaaacttacaaacaaccccatctccagacaaaggaagagcaacggaagaaacgcgagcaagaacgaaaggagaagaaagcaaaggttttgggaatgcgaaggggcctcattttggctgaagattaataattttttaacatcttgtaaatattcctgtattctcaacttttttccttttgtaaattttttttttttgctgtcatccccactttagtcacgagatctttttctgctaactgttcatagtctgtgtagtgtccatgggttcttcatgtgctatgatctctgaaaagacgttatcaccttaaagctcaaattctttgggatggtttttacttaagtccattaacaattcaggtttctaacgagacccatcctaaaattctgtttctagatttttaatgtcaagttcccaagttccccctgctggttctaatattaacagaactgcagtcttctgctagccaatagcatttacctgatggcagctagttatgcaagcttcaggagaatttgaacaataacaagaatagggtaagctgggatagaaaggccacctcttcactctctatagaatatagtaacctttatgaaacggggccatatagtttggttatgacatcaatattttacctaggtgaaattgtttaggcttatgtaccttcgttcaaatatcctcatgtaattgccatctgtcactcactatattcacaaaaataaaactctacaactcattctaacattgcttacttaaaagctacatagccctatcgaaatgcgaggattaatgctttaatgcttttagagacagggtctcactgtgttgcccaggctggtctcaaactccaccaaatgtacttcttattcattttatggaaaagactaggctttgcttagtatcatgtccatgtttccttcacctcagtggagcttctgagttttatactgctcaagatcgtcataaataaaattttttctcattgtcataga

SEQ ID NO: 85873 - DNA, 1320 bp, Artificial Sequence
  derived and/or modified sequence
atgatcatccctagcctcgaagaactcgattctcttaagtacagcgacctacagaatttagccaagtctctggggctccgcgctaacctgcgtgcgacaaagctactgaaggccctgaaagggtatattaagcatgaggctcgaaagggtaacgaaaatcaggatgaaagtcagaccagcgcttcctcctgcgacgagacagaaatccagatttccaaccaggaggaggccgaaagacaaccactgggccacgtgaccaaaacccgcaggaggtgtaaaactgtgagagtggatccagattctcagaatcactcagagatcaaaatctcaaatcccactgagttccagaaccatgagaaacaggaatcacaggacctcagggccaccgctaaggtcccctcacccccagacgagcatcaggaagctgagaatgctgtaagctctggtaatagagacagcaaggttcctagtgagggtaagaagtcactgtacaccgacgaaagcagcaagccaggcaaaaacaagcggactgccattacaacacctaactttaagaagctgcacgaagcccacttcaaggagatggagtccattgatcagtatattgagaggaagaaaaaacacttcgaggaacataactcgatgaacgaactgaagcagcctatcaataaggggggtgtgaggacgcctgtgccacctcgcggaagactgtcagttgcatccaccccaatctcacaaaggcgttcacaaggcaggagctgcggccctgcctcacagtctacgctgggattaaagggcagtcttaaacggtctgccattagtgccgcaaaaactggggtccggttctctgccgctacaaaagacaacgagcacaagcggagtttaacaaaaacacctgccagaaagagcgcccacgtgaccgtttccggcggaacaccaaaaggcgaagccgtcctagggacacataaactgaaaacaatcactggtaattccgcagcagtgatcactccattcaaactgaccaccgaggccacccagaccccagtcagcaacaagaaacctgtgtttgacttgaaagcgagtttatctagacctttgaactatgaaccccataaaggtaagttgaaaccctggggccagagcaaagagaataattacttgaatcagcatgtaaaccgaataaatttttacaagaaaacttataaacagccgcacctacaaactaaggaggaacaacggaaaaaacgcgaacaggagagaaaagagaaaaaggcgaaagtgctgggtatgcgtcgcggtctcattctggccgaggactag

SEQ ID NO: 85874 - DNA, 1320 bp, Artificial Sequence
  derived and/or modified sequence
atgatcatccccagcctggaggagctggacagcctgaagtacagcgacctgcagaacctggccaagagcctgggcctgagagccaacctgagagccaccaagctgctgaaggccctgaagggctacatcaagcacgaggccagaaagggcaacgagaaccaggacgagagccagaccagcgccagcagctgcgacgagaccgagatccagatcagcaaccaggaggaggccgagagacagcccctgggccacgtgaccaagaccagaagaagatgcaagaccgtgagagtggaccccgacagccagaaccacagcgagatcaagatcagcaaccccaccgagttccagaaccacgagaagcaggagagccaggacctgagagccaccgccaaggtgcccagcccccccgacgagcaccaggaggccgagaacgccgtgagcagcggcaacagagacagcaaggtgcccagcgagggcaagaagagcctgtacaccgacgagagcagcaagcccggcaagaacaagagaaccgccatcaccacccccaacttcaagaagctgcacgaggcccacttcaaggagatggagagcatcgaccagtacatcgagagaaagaagaagcacttcgaggagcacaacagcatgaacgagctgaagcagcccatcaacaagggcggcgtgagaacccccgtgccccccagaggcagactgagcgtggccagcacccccatcagccagagaagaagccagggcagaagctgcggccccgccagccagagcaccctgggcctgaagggcagcctgaagagaagcgccatcagcgccgccaagaccggcgtgagattcagcgccgccaccaaggacaacgagcacaagagaagcctgaccaagacccccgccagaaagagcgcccacgtgaccgtgagcggcggcacccccaagggcgaggccgtgctgggcacccacaagctgaagaccatcaccggcaacagcgccgccgtgatcacccccttcaagctgaccaccgaggccacccagacccccgtgagcaacaagaagcccgtgttcgacctgaaggccagcctgagcagacccctgaactacgagccccacaagggcaagctgaagccctggggccagagcaaggagaacaactacctgaaccagcacgtgaacagaatcaacttctacaagaagacctacaagcagccccacctgcagaccaaggaggagcagagaaagaagagagagcaggagagaaaggagaagaaggccaaggtgctgggcatgagaagaggcctgatcctggccgaggactag

SEQ ID NO: 85875 - protein, 426 aa, Artificial Sequence
  derived and/or modified sequence
MIIPSLEELDSLKYSDLQNLAKSLGLRANLRATKLLKALKGYIKHEARKGNENQDESQTSASSCDETEIQISNQEEAERQPLGHVTKTRRRCKTVRVDPDSQNHEKQESQDLRATAKVPSPPDEHQEAENAVSSGNRDSKVPSEGKKSLYTDESSKPGKNKRTAITTPNFKKLHEAHFKEMESIDQYIERKKKHFEEHNSMNELKQQPINKGGVRTPVPPRGRLSVASTPISQRRSQGRSCGPASQSTLGLKGSLKRSAISAAKTGVRFSAATKDNEHKRSLTKTPARKSAHVTVSGGTPKGEAVLGTHKLKTITGNSAAVITPFKLTTEATQTPVSNKKPVFDLKASLSRPLNYEPHKGKLKPWGQSKENNYLNQHVNRINFYKKTYKQPHLQTKEEQRKKREQERKEKKAKVLGMRRGLILAED

SEQ ID NO: 85876 - DNA, 1281 bp, Artificial Sequence
  derived and/or modified sequence
atgatcattccttccctggaggaactcgattctttaaagtacagtgacctccagaacttagcaaagagcctcggtttgcgagctaacctgcgagccacgaagctgcttaaggccctgaagggctacattaagcatgaagctcgaaagggtaatgaaaatcaagacgagagtcagactagtgcttcttcatgcgatgaaaccgagatccagatatccaatcaggaggaggcagagcgccagcctctgggccatgtgacaaagacgaggaggcggtgtaaaacagttcgggtggacccggactcccagaatcacgaaaaacaggagtctcaggatcttcgggcaaccgccaaagtgccttcccctccagacgagcaccaagaggctgagaacgccgtgtcatccggaaatcgcgactccaaagtgccttctgagggaaagaaatcactgtataccgatgaatcctcaaaacccggtaagaacaaacgtactgcaatcaccacacctaatttcaagaaactccatgaagcccatttcaaagaaatggagagcatcgatcagtatatagagaggaagaagaagcatttcgaagagcacaatagcatgaacgaactgaaacagcagccaattaacaaaggcggggtgcgcacgcccgtaccaccgcgaggccggttgtctgtggctagcacacccatcagtcaacggaggtcgcagggacggtcgtgcggtcctgcttcccagtcaactctcgggctgaaaggcagtctgaaaagaagcgcaataagtgccgctaaaaccggtgtgcgattttccgccgctacgaaggacaacgaacacaagcggtcactcactaagactccagctagaaagtccgctcacgtaacagtgtccggtggcacccctaagggtgaggcggttctcggcacacacaagttgaaaaccattactgggaactcggcggccgtgatcacccctttcaagctgaccactgaagccacacagacaccagtcagtaacaagaagcctgtctttgacctcaaagcctccctgtccagacccctgaactacgaaccccacaagggtaagctgaaaccctgggggcagtccaaagagaacaactatctgaaccagcacgtcaataggatcaatttctataaaaagacttacaagcagcctcaccttcagaccaaggaggagcagcgcaaaaaaagagaacaggagcggaaggagaagaaagccaaagtgctggggatgaggagagggctgatcctggccgaggattag

SEQ ID NO: 85877 - DNA, 1281 bp, Artificial Sequence
  derived and/or modified sequence
atgatcatccccagcctggaggagctggacagcctgaagtacagcgacctgcagaacctggccaagagcctgggcctgcgggccaacctgcgggccaccaagctgctgaaggccctgaagggctacatcaagcatgaggccaggaaaggaaatgaaaaccaggatgagagccagaccagcgccagcagctgtgatgaaacagagatccagatcagcaaccaggaggaggccgagcggcagcccctgggccacgtgaccaagacccggcggcgctgcaagacagtgcgggtggaccctgacagccagaaccacgagaagcaggagagccaggacctgcgggccacagccaaggtgcccagccccccagatgagcaccaggaggctgaaaatgctgtgagcagcggcaacagagacagcaaggtgcccagcgagggcaagaagagcctgtacacagatgagagcagcaagccaggcaagaacaagaggacagccatcaccacccccaacttcaagaagctgcacgaggcccacttcaaggagatggagagcattgaccagtacatcgagaggaagaagaagcactttgaggagcacaacagcatgaatgagctgaagcagcagcccatcaacaagggcggcgtgaggacccctgtgcccccccggggccgcctgtctgtggccagcacccccatcagccagaggaggagccagggccgcagctgtggccctgccagccagagcaccctgggcctgaagggcagcctgaagaggtctgccatctctgctgccaagacaggagtgcgcttctctgctgccaccaaggacaatgagcacaagaggagcctgaccaagaccccagccaggaagagcgcccacgtgacagtgtctgggggcacccccaagggggaggccgtgctgggcacccacaagctgaagaccatcactggaaacagcgctgctgtgatcacccccttcaagctgaccacagaggccacccagacccctgtgagcaacaagaagcctgtgtttgacctgaaggccagcctgagccggcccctgaactatgagccccacaagggcaagctgaagccctggggccagagcaaggagaacaactacctgaaccagcacgtgaaccgcatcaacttctacaagaagacctacaagcagccccacctgcagaccaaggaggagcagaggaagaagcgggagcaggagaggaaggagaagaaggccaaggtgctgggcatgaggcggggcctcatcctggctgaagattag

SEQ ID NO: 85878 - DNA, 1281 bp, Artificial Sequence
  derived and/or modified sequence
atgatcatccccagcctggaggagctggacagcctgaagtacagcgatttgcaaaatttggcgaaatctcttggcctgcgagcgaacttgcgggcaacgaagcttctcaaagcactgaagggatacatcaagcatgaggcccggaaaggaaatgaaaaccaagacgaaagccagacatctgcatccagctgcgacgagactgaaatacagatcagcaatcaggaggaagccgagcgacagccactagggcacgttacaaagacgaggcgccggtgcaagacagtgcgcgttgatccagacagtcagaatcacgaaaaacaagaaagtcaggatctgagagccaccgccaaggtcccttccccacccgatgagcaccaggaagccgagaatgcagtcagctccggtaacagggactcaaaagttccctcagagggcaaaaaatccctttatacagatgaatctagtaaacccggcaagaataagagaactgcaataacaacacccaacttcaaaaagctccacgaagcacatttcaaggagatggaaagtatcgatcagtacattgagcggaaaaagaaacattttgaagaacataactcaatgaatgaattaaagcagcagcccatcaataagggaggagtacgcactcctgttccacctagagggcgactgtctgtggccagcactccaatcagccagagacgttcccaggggagatcttgcggccctgcgagccaaagtacgcttggcctgaaaggatccctgaaaaggtcagccatttccgcagccaagaccggggtaagattttccgcagcaactaaggataatgaacataaacgaagtctcactaagactcccgccaggaagtccgctcatgtaactgtatccggggggacgcctaagggggaagctgtgctcggtacccataagctgaagaccattactggtaatagcgcagccgtaattactccctttaaactgaccaccgaagcaacgcagacacctgtgagcaataagaaacccgtctttgatcttaaagcctctctcagtagacccttgaattatgaaccacataagggaaagctcaagccctggggccaatctaaagaaaataattatctgaaccagcacgtgaataggattaatttttataagaaaacctacaaacaaccacaccttcaaacaaaggaagagcaacggaaaaagagggagcaagagcgaaaggagaaaaaggctaaggtactgggtatgcgtcgagggttaatactggcagaagattag

SEQ ID NO: 85879 - DNA, 2409 bp, Artificial Sequence
  derived and/or modified sequence
gcgttacaggccctttggcgcctgcgtattcgtgaagtgtgaaaaaagcgcgcctctgttgggacgggaaatcagcctttctattggtcagggttagaaaccccgcctttgaggcattttcaaccaatggaagcgcggcattcttcatttaaactgtctataaatttctgcctagtcaaagttaagagtggcgccagggatttgaaccgcgctgacgaagtttggtgatccatcttccgagtatcgccgggatttcgaatcgcgatgatcatcccctctctagaggagctggactccctcaagtacagtgacctgcagaacttagccaagagtctgggtctccgggccaacctgagggcaaccaagttgttaaaagccttgaaaggctacattaaacatgaggcaagaaaaggaaatgagaatcaggatgaaagtcaaacttctgcatcctcttgtgatgagactgagatacagatcagcaaccaggaagaagctgagagacagccacttggccatgtcaccaaaacaaggagaaggtgcaagactgtccgtgtggaccctgactcacagaatcatgaaaagcaggaaagccaggatctcagagctactgcaaaagttccttctccaccagacgagcaccaagaagctgagaatgctgtttcctcaggtaacagagattcaaaggtaccttcagaaggaaagaaatctctctacacagatgagtcatccaaacctggaaaaaataaaagaactgcaatcactactccaaactttaagaagcttcatgaagctcattttaaggaaatggagtccattgatcaatatattgagagaaaaaagaaacattttgaagaacacaattccatgaatgaactgaagcagcagcccatcaataagggaggggtcaggactccagtacctccaagaggaagactctctgtggcttctactcccatcagccaacgacgctcgcaaggccggtcttgtggccctgcaagtcagagtaccttgggtctgaaggggtcactcaagcgctctgctatctctgcagctaaaacgggtgtcaggttttcagctgctactaaagataatgagcataagcgttcactgaccaagactccagccagaaagtctgcacatgtgaccgtgtctgggggcaccccaaaaggcgaggctgtgcttgggacacacaaattaaagaccatcacggggaattctgctgctgttattaccccattcaagttgacaactgaggcaacgcagactccagtctccaataagaaaccagtgtttgatcttaaagcaagtttgtctcgtcccctcaactatgaaccacacaaaggaaagctaaaaccatgggggcaatctaaagaaaataattatctaaatcaacatgtcaacagaattaacttctacaagaaaacttacaaacaaccccatctccagacaaaggaagagcaacggaagaaacgcgagcaagaacgaaaggagaagaaagcaaaggttttgggaatgcgaaggggcctcattttggctgaagattaataattttttaacatcttgtaaatattcctgtattctcaacttttttccttttgtaaattttttttttttgctgtcatccccactttagtcacgagatctttttctgctaactgttcatagtctgtgtagtgtccatgggttcttcatgtgctatgatctctgaaaagacgttatcaccttaaagctcaaattctttgggatggtttttacttaagtccattaacaattcaggtttctaacgagacccatcctaaaattctgtttctagatttttaatgtcaagttcccaagttccccctgctggttctaatattaacagaactgcagtcttctgctagccaatagcatttacctgatggcagctagttatgcaagcttcaggagaatttgaacaataacaagaatagggtaagctgggatagaaaggccacctcttcactctctatagaatatagtaacctttatgaaacggggccatatagtttggttatgacatcaatattttacctaggtgaaattgtttaggcttatgtaccttcgttcaaatatcctcatgtaattgccatctgtcactcactatattcacaaaaataaaactctacaactcattctaacattgcttacttaaaagctacatagccctatcgaaatgcgaggattaatgctttaatgcttttagagacagggtctcactgtgttgcccaggctggtctcaaactccaccaaatgtacttcttattcattttatggaaaagactaggctttgcttagtatcatgtccatgtttccttcacctcagtggagcttctgagttttatactgctcaagatcgtcataaataaaattttttctcattgtcataga

SEQ ID NO: 85880 - DNA, 1281 bp, Artificial Sequence
  derived and/or modified sequence
atgataatccccagtcttgaagaactagacagcctgaaatactcggatttacagaacttagcaaagtctctggggctcagagccaacctacgggcaactaaacttcttaaggcactcaaaggttatatcaaacatgaagctagaaaggggaacgagaatcaagatgagagtcagactagcgcttcatcctgcgacgaaaccgaaatccagatatctaaccaagaggaagccgagagacagccactggggcatgtgaccaagactcgccgacgctgcaagactgtgcgtgtggatccagattctcagaatcacgaaaaacaagaaagccaggacctgagggcaactgcgaaggttccatcccccccagatgaacaccaggaagctgaaaacgccgtgtcatcaggcaaccgtgatagcaaggtcccctctgaaggaaaaaagtctctctacactgatgagtccagcaaacctggtaagaataagcgaaccgctattacaacccctaacttcaagaaactccacgaggcgcattttaaagaaatggaatcaattgatcaatatatcgaaagaaaaaagaagcattttgaggagcacaattccatgaatgaacttaagcaacagcctattaataaggggggtgtaagaacaccagtgccaccaagggggcgactcagtgttgcttcaaccccgatctcacagcgaaggagccagggtagatcttgtggaccggcttcacagtccacactgggtctcaaaggatcactaaagagaagcgccatctcggcagcaaaaacaggggtgcgtttctccgccgctactaaggacaacgagcacaaaagatctctgaccaagaccccagcacgcaagtccgcccacgtgacggtcagcggtgggactccgaaaggggaagcagtgctgggaacacataagttaaagacaatcacaggcaactctgccgcagtcatcaccccttttaagctcacaaccgaagctacccagacccctgtcagcaataagaagcccgttttcgatctgaaggccagcctgtcccggccactgaattacgaacctcataaagggaagttaaagccatggggacaatcaaaggagaacaactacctcaatcaacacgttaaccggattaatttctataaaaagacctacaaacagcctcatctgcagaccaaggaggagcaacggaagaaaagggagcaggaaaggaaagaaaagaaggcaaaagtgctgggtatgaggcgaggacttatcttggcagaggattag

SEQ ID NO: 85881 - DNA, 1281 bp, Artificial Sequence
  derived and/or modified sequence
atgatcatccccagcctggaggagctggacagcctgaagtacagcgacctgcagaacctggccaagagcctgggcctgagagccaacctgagagccaccaagctgctgaaggccctgaagggctacatcaagcacgaggccagaaagggcaacgagaaccaggacgagagccagaccagcgccagcagctgcgacgagaccgagatccagatcagcaaccaggaggaggccgagagacagcccctgggccacgtgaccaagaccagaagaagatgcaagaccgtgagagtggaccccgacagccagaaccacgagaagcaggagagccaggacctgagagccaccgccaaggtgcccagcccccccgacgagcaccaggaggccgagaacgccgtgagcagcggcaacagagacagcaaggtgcccagcgagggcaagaagagcctgtacaccgacgagagcagcaagcccggcaagaacaagagaaccgccatcaccacccccaacttcaagaagctgcacgaggcccacttcaaggagatggagagcatcgaccagtacatcgagagaaagaagaagcacttcgaggagcacaacagcatgaacgagctgaagcagcagcccatcaacaagggcggcgtgagaacccccgtgccccccagaggcagactgagcgtggccagcacccccatcagccagagaagaagccagggcagaagctgcggccccgccagccagagcaccctgggcctgaagggcagcctgaagagaagcgccatcagcgccgccaagaccggcgtgagattcagcgccgccaccaaggacaacgagcacaagagaagcctgaccaagacccccgccagaaagagcgcccacgtgaccgtgagcggcggcacccccaagggcgaggccgtgctgggcacccacaagctgaagaccatcaccggcaacagcgccgccgtgatcacccccttcaagctgaccaccgaggccacccagacccccgtgagcaacaagaagcccgtgttcgacctgaaggccagcctgagcagacccctgaactacgagccccacaagggcaagctgaagccctggggccagagcaaggagaacaactacctgaaccagcacgtgaacagaatcaacttctacaagaagacctacaagcagccccacctgcagaccaaggaggagcagagaaagaagagagagcaggagagaaaggagaagaaggccaaggtgctgggcatgagaagaggcctgatcctggccgaggactag

SEQ ID NO: 85882 - DNA, 2004 bp, Artificial Sequence
  derived and/or modified sequence
atgaagaggaaaggtaagctgaagaacaaggggagcaaacgtaaaaaagaggacctgcaggaagtggacggcgagatcgaagccgtgctgcagaaaaaagctaaggccagagggctggagttccagataagtaacgtgaagttcgaggatgtggggggtaatgacatgaccctgaaggaagtgtgcaagatgctgattcatatgaggcatcctgaggtgtaccatcatctaggggtggtccctccccgcggtgtgttgctgcatgggccccccggctgtggtaagaccctcttagctcatgctatagcgggcgcagaatgttccggcatgataacggcccattgttcattcgatttcagcggcagcaatgacccacctgcctccgccagccaagagcttgacctgccaatcctgaaggtagctgcaccggagatagtttccggagttagcggcgagtcagaacagaagcttagggagctcttcgagcaggccgtgtccaacgccccttgcattattttcatcgacgagattgatgccatcactcctaaacgcgaagtggcatctaaggacatggaacgccgtatcgtagcccaactcctgacctgcatggacgatctaaataatgtggcagctacagctcgcgtgctggtgatcggcgcgaccaatagacccgattcactggaccccgccttgagaagggccgggagattcgatcgagagatttgcctgggaatcccagacgaagcgagtcgcgaacgcatcctacagacactgtgccggaaactgcggttaccccaggccttcgacttctgtcatctggcccacctaacccctggctttgtgggagccgacctcatggccttgtgccgcgaggcggccatgtgcgcggtgaatcgcgtcctgatgaagctgcaggaacagcaaaaaaagaatcctgagatggaggacctcccttccaagggggtacaggaggagaggcttggaaccgagcccacctctgaaactcaggatgagcttcagcggctattgggcctgctgagagaccaggacccactgagcgaggagcagatgcagggcctgtgcattgagctgaacgactttattgtggctctgtcaagcgtccagcctagcgctaaacgagaaggtttcgtcacagtacctaatgtcacatgggccgatatcggcgccttagaggatatcagagaagaactcacaatggccatactggcgccagtcaggaatcccgatcagttcaaagccctcggccttgttacacctgccggggttctgctggctggcccccctgggtgtgggaagactctgcttgccaaggctgttgctaatgagtcaggtctcaatttcattagcgtaaaaggccccgaacttttgaacatgtacgtcggggaatctgaaagggcggttcggcaggtctttcagcgggccaagaactctgccccttgcgtgatcttcttcgatgaagtcgacgctctctgccccaggcgatccgatcgagagacaggcgcctctgtgagagtcgtgaaccagctgctcacagaaatggacggcctggaagcacgtcagcaagttttcattatggccgcaaccaaccgtcctgacattatagacccagccattctcagacctggaagacttgacaaaacgctgtttgtcggactgccgccccctgccgatcgccttgccattttgaaaactatcaccaagaatggaacaaaaccaccactagacgccgatgtaaatctggaagcaattgccggggaccttaggtgcgactgttacaccggagccgacctgtctgcactagtgcgtgaggcatcaatctgtgctttgagacaggaaatggcgcggcaaaagagcggcaacgaaaagggggaattgaaagtaagccataaacatttcgaagaggcatttaagaaggtgcggtccagcatctccaaaaaagaccagatcatgtacgaacgcctgcaagaaagtcttagccgctag

SEQ ID NO: 85883 - DNA, 2004 bp, Artificial Sequence
  derived and/or modified sequence
atgaagaggaagggcaagctgaagaacaagggcagcaagaggaagaaggaggacctgcaggaggtggatggagaaattgaggccgtgctgcagaagaaggccaaggcccggggcctggagttccagatcagcaatgtgaagtttgaagatgtgggcggcaatgacatgaccctgaaggaggtgtgcaagatgctgatccacatgaggcaccctgaggtgtaccaccacctgggcgtggtgcccccccggggcgtgctgctgcacggccccccaggctgcggcaagaccctgctggcccacgccatcgccggggctgagtgcagcggcatgatcacagcccactgcagctttgacttcagcggcagcaatgaccccccagccagcgccagccaggagctggacctgcccatcctgaaggtggccgcccctgagatcgtgtctggagtgtctggagagagcgagcagaagctgcgggagctgtttgagcaggccgtgtccaatgccccctgcatcatcttcattgatgaaattgatgccatcacccccaagcgggaggtggccagcaaggacatggagaggagaattgtggcccagctgctgacctgcatggatgacctgaacaacgtggccgccacagcccgggtgctggtgattggagccaccaacagaccagacagcctggaccctgccctgcggcgggccggccgctttgaccgggagatctgcctgggcatcccagatgaggccagccgggagcgcatcctgcagaccctgtgcaggaagctgcggctgccccaggcctttgacttctgccacctggcccacctgaccccaggctttgtgggcgctgacctgatggccctgtgccgggaggccgccatgtgtgctgtgaacagagtgctgatgaagctgcaggagcagcagaagaagaaccctgagatggaggacctgcccagcaagggcgtgcaggaggagcggctgggcacagagcccaccagcgagacccaggatgagctgcagaggctgctgggcctgctgcgggaccaggaccccctgtctgaggagcagatgcagggcctgtgcatcgagctgaatgacttcatcgtggccctgagctctgtgcagcccagcgccaagcgggagggctttgtgacagtgcccaacgtgacctgggccgacatcggggccctggaggacatccgggaggagctgaccatggccatcctggcccctgtgagaaatccagaccagttcaaggccctgggcctggtgaccccagctggggtgctgctggccggccccccaggctgcggcaagaccctgctggccaaggctgtggccaatgaaagtggcctgaacttcatctctgtgaagggccctgagctgctgaacatgtatgtgggggagagcgagagagctgtgcggcaggtgttccagagggccaagaacagcgccccctgtgtgatcttctttgatgaggtggatgccctgtgcccccggcggagtgaccgggagaccggggcctctgtgcgggtggtgaaccagctgctgacagagatggatggcctggaggcccggcagcaggtgttcatcatggccgccaccaacagaccagacatcattgatcctgccatcctgcggcccggccgcctggacaagaccctgtttgtgggcctgcccccacctgctgaccggctggccatcctgaagaccatcaccaagaatggcaccaagccacccctggatgctgatgtgaacctggaggccatcgccggggacctgcgctgtgactgctacaccggggctgacctgagcgccctggtgcgggaggccagcatctgtgccctgcggcaggagatggcccggcagaagtctggaaatgaaaaaggagagctgaaggtgagccacaagcactttgaggaggccttcaagaaggtgcgcagcagcatcagcaagaaggaccagatcatgtatgaaaggctgcaggagagcctgagcaggtag

SEQ ID NO: 85884 - DNA, 2004 bp, Artificial Sequence
  derived and/or modified sequence
atgaagcggaagggcaagctgaagaacaagggcagcaagcggaagaaagaagacttgcaggaagtggacggtgagatagaggccgtcttgcaaaaaaaagctaaggcccggggcctagagttccaaatctctaatgtcaagttcgaggacgtagggggaaacgatatgaccctgaaggaggtctgtaagatgttgatccatatgagacacccggaggtttatcaccacctgggtgtagtgccccccagaggggtgctgctacatggcccccccgggtgtgggaagaccctgctggctcacgccatagcaggtgctgaatgcagtggcatgatcacggctcactgcagctttgattttagcgggtcaaatgaccctcctgcctctgcctcacaggaactggatctgccaattctaaaggtcgccgcccccgagattgtgtccggagtatcaggcgagtctgaacaaaaactccgggagttgttcgagcaggccgtgagcaacgcgccctgcatcatatttattgacgaaatagatgcaattacccctaaacgagaagtggcctccaaggatatggagaggaggatcgtggcacaactgttgacatgcatggatgacctgaataatgtagccgccaccgcacgcgtgttggtaattggtgctacgaataggcccgactctctcgatcctgcacttcggcgcgctggccgcttcgaccgggagatctgtcttgggatccccgatgaagccagtcgggagcgcatcttgcaaaccctttgtcgtaagctaagactgccccaggccttcgacttctgccatttagcgcatctgacccccggcttcgtgggagccgacctgatggctctatgtcgggaagcagccatgtgcgcagtaaatagggtccttatgaaactgcaggaacagcaaaagaagaatcccgagatggaagacctaccatccaaaggcgttcaggaggaacgactcggcaccgagccaacatccgaaacccaggacgagctgcagagactgctgggcttactgcgcgaccaggatccactctctgaagagcagatgcagggactgtgtattgaactgaacgactttatcgtggccctaagctccgtccagcccagcgcaaaacgcgagggttttgtcacagtacctaacgtgacctgggccgatattggcgccctggaagatatcagggaggaacttactatggccatcctggcccctgtgaggaatcccgaccagttcaaggcccttggattggtgacccccgccggcgtcctgctggcaggcccacctgggtgcgggaagaccctcctcgcaaaggcagtagcaaatgagtctgggctgaactttatcagcgttaaaggcccagagctgttgaacatgtatgtcggtgagagtgagagggcggtcaggcaggtgtttcagagagcaaagaactctgctccctgtgtgatattcttcgacgaagtggacgccctttgtcctcgaagatcggaccgggaaaccggcgcgtctgtacgcgtggttaatcagctgctcaccgaaatggacgggttagaggcacgacaacaagtgtttatcatggccgccacgaatcgcccggatataatcgatcccgccatcctccgaccgggtcgccttgataaaaccctgtttgtcggcctccctccccccgcagatagactggcaatcttaaagacgatcaccaaaaatgggacaaagccaccgttagatgccgacgtgaatctcgaagctatcgctggcgacctgaggtgtgactgttatactggcgccgacctcagcgccctcgtgcgagaggcttccatttgtgccctgaggcaggaaatggcccgccagaagtccgggaacgaaaaaggagaactcaaggttagccacaagcacttcgaagaggctttcaaaaaggtaaggagcagcattagcaagaaggaccaaattatgtacgaacggctacaggagtctctgtcccggtag

SEQ ID NO: 85885 - DNA, 2431 bp, Artificial Sequence
  derived and/or modified sequence
aagaccgacgcgatgaagcccagacctgcagggttcgtggataataaactcaagcagcgagtcatccagtatagactatggtcgaagaaaaagaaatgcttttaggattcaggtagaaaaagtatttagcataattagtagtgagaaggaacttaagaatttaacagaattagaagatgaacatttggcaaaaagggcaagacaaggtgaagaggataatgagattcaaaagattcttctcttttggagagtgatatgaaacggaaaggcaagctaaagaataaaggaagcaaaaggaagaaagaagatcttcaggaagtagatggagaaattgaagctgtcctgcaaaagaaagctaaagccagggggttagaattccagatctccaacgtgaagtttgaagatgtgggaggcaatgatatgacattaaaagaggtctgcaagatgctcatacacatgcgtcacccggaggtgtaccaccacctgggcgtcgtgccccctcgtggagttctccttcatggaccaccaggctgtgggaagacattacttgcacatgcaattgctggggctgagtgcagtggcatgatcacagctcactgcagctttgacttctcaggctcaaatgatcctcctgcctcagcctcacaggaacttgacctgccaattttgaaagtggctgctccagagattgtgtctggagtatccggagagtctgagcagaagctgagagaactatttgagcaagctgtgtcaaatgcaccatgtatcattttcattgatgaaattgatgctattacccccaaaagagaagtggcttcaaaagatatggaacgaagaattgtagcccaactcctaacctgcatggatgatctgaataatgtggctgctacagcccgggtcctagttattggagctactaatcgaccagactcgttagaccctgctttgagacgtgcgggaaggttcgaccgagaaatatgcctaggtatcccagatgaagcatccagggaaagaatacttcaaacattgtgcagaaaactgaggcttcctcaagcttttgatttctgtcacttagcacacctaactccaggctttgttggtgctgatctcatggcactgtgccgagaggcagcaatgtgtgcagtcaatagagtcttaatgaagctacaggaacagcagaagaaaaatcctgaaatggaagatttgccatctaaaggagtccaggaggaaaggctgggaactgagcccacttctgaaacacaggatgaattacaaaggctgctggggttgctaagagaccaagatcccctctcagaggagcagatgcaaggactgtgcattgaactgaatgatttcattgttgctctatcctcagtccaaccctctgccaaaagggaaggctttgtcactgtccctaatgtgacatgggcagatattggtgccctggaagacattagagaggagctcaccatggcaatattggcaccagtacgcaacccagaccagttcaaagctcttggattggtgactccagctggggtcctccttgctggtcctcctggctgtgggaagactctgctggcgaaggctgttgcaaatgagtccggactaaattttatatctgtcaagggccccgaattactaaacatgtatgttggtgagagtgaacgtgctgtgcgacaagtttttcaacgagccaagaactcagcaccctgtgtgatattctttgatgaagtggatgctttatgtcctcgaagatcagaccgagagacaggggcaagtgtccgagtggtgaatcagctacttacagagatggatggtctggaagcacgccagcaggtttttattatggcagccactaacaggccagatataattgaccctgcaatcctgcgcccgggccgcctggacaaaacactgtttgtgggtttaccgccccctgcagatcgccttgccatcttaaaaactatcacaaaaaatggtaccaaaccaccactggatgcagatgtaaatttggaagcaattgctggtgaccttcgctgtgattgctatacgggcgcagatctctctgctttggtacgagaagcttctatctgtgccctgagacaggaaatggcaagacagaagagtggaaatgaaaaaggtgaactcaaggttagtcataagcattttgaagaagctttcaagaaagtaagatcatctatatcaaaaaaggatcaaatcatgtatgaacgtttgcaggagtccctcagccggtgatgtctccagcagccggcttagaggagctagcccatcaagccggcagagaatcccccacacgctctgaaggacccactttcagctggacacaggcgcggcctcatgtaaacattttattttcaaatgaatgaggccaagctgaagctgaagctgaagattcttcccatctggc

SEQ ID NO: 85886 - DNA, 2004 bp, Artificial Sequence
  derived and/or modified sequence
atgaagcgcaaggggaagctaaaaaacaagggaagtaaacggaagaaagaggaccttcaggaagttgacggagagattgaggccgtgcttcagaaaaaagccaaagcacggggtctggagttccagatctctaatgtgaagttcgaagatgtaggaggcaacgatatgactcttaaggaggtttgcaaaatgctcatacatatgcggcaccctgaggtgtatcatcatctgggtgtggtgcctccacggggtgtgcttctgcatgggcctccgggatgtggcaaaactctgctggcccacgctatagctggggcagaatgctcaggaatgatcacggcacactgcagttttgacttttcaggtagcaacgaccccccagcaagcgcgagccaagagcttgatcttcctattctgaaagtcgctgctccagagatagtctccggggtgtctggtgagagcgagcagaagttgcgcgaactctttgaacaggctgtgtccaatgcaccatgtatcatcttcatcgatgaaattgacgccattactccgaagcgcgaagtcgcgtcgaaggatatggaacgtcgcattgtggcccagttactgacttgtatggacgatctgaataatgtggccgctaccgccagagtcctggtgatcggcgctacgaaccggccagatagcctggatccggcattgagacgggcaggcagatttgatcgggaaatctgtttagggattcccgatgaggcttctcgagagaggatacttcagaccctgtgcaggaaattgcggctgccccaagcatttgacttttgccacctggctcatcttacacccggatttgtgggagccgacctcatggcgctgtgtcgggaagcagcaatgtgtgcagtgaacagggtgctcatgaagctccaggagcagcagaagaagaaccccgagatggaggatctgccatccaagggggtgcaggaggaacgcctcggcacggagccaacctctgagacccaggacgaactccaacgccttttgggtctgttaagggaccaggaccctctgagcgaggaacaaatgcagggcttgtgcattgagctgaatgatttcatagtggccctcagctccgtccagcccagtgcaaaaagggaaggattcgtcaccgtgcctaacgtgacgtgggcagacattggagccctggaagatattcgtgaggaactgactatggcgatcctggccccagtgcgtaatcctgatcagtttaaggctttaggattagtcacaccagccggtgttctcctcgccggacctcctggatgcggtaaaaccctgctggcaaaggcagtagccaacgagtcaggcctgaatttcatcagtgttaagggccctgagttgctgaatatgtacgtgggggaatccgagcgtgctgtcaggcaggtttttcagcgggctaaaaatagtgctccatgcgtgatcttttttgatgaagtcgacgcactttgtcctagacgcagtgacagagaaaccggagcgtctgtgagagtggtcaaccagcttttgacggagatggacggtcttgaggccaggcagcaggtgtttattatggcagccaccaacagaccagatatcatcgaccccgctattcttcggccaggaagactggacaaaactttattcgtgggtctgcctccccctgctgacaggctcgccatcctgaaaacaatcacaaaaaatggcacgaagccaccattggacgcagacgtgaatttggaggccatcgccggtgatctgcggtgcgactgttatactggggcagacctctccgctttagtgagggaggcgtctatctgcgcgctcagacaggaaatggctcgacaaaaatctgggaatgaaaagggggagcttaaggtctcccacaaacactttgaagaggcattcaaaaaggtaagatccagcatcagcaagaaggaccagattatgtacgagcgtctgcaagaatctctctccagatag

SEQ ID NO: 85887 - DNA, 2004 bp, Artificial Sequence
  derived and/or modified sequence
atgaagagaaagggcaagctgaagaacaagggcagcaagagaaagaaggaggacctgcaggaggtggacggcgagatcgaggccgtgctgcagaagaaggccaaggccagaggcctggagttccagatcagcaacgtgaagttcgaggacgtgggcggcaacgacatgaccctgaaggaggtgtgcaagatgctgatccacatgagacaccccgaggtgtaccaccacctgggcgtggtgccccccagaggcgtgctgctgcacggcccccccggctgcggcaagaccctgctggcccacgccatcgccggcgccgagtgcagcggcatgatcaccgcccactgcagcttcgacttcagcggcagcaacgacccccccgccagcgccagccaggagctggacctgcccatcctgaaggtggccgcccccgagatcgtgagcggcgtgagcggcgagagcgagcagaagctgagagagctgttcgagcaggccgtgagcaacgccccctgcatcatcttcatcgacgagatcgacgccatcacccccaagagagaggtggccagcaaggacatggagagaagaatcgtggcccagctgctgacctgcatggacgacctgaacaacgtggccgccaccgccagagtgctggtgatcggcgccaccaacagacccgacagcctggaccccgccctgagaagagccggcagattcgacagagagatctgcctgggcatccccgacgaggccagcagagagagaatcctgcagaccctgtgcagaaagctgagactgccccaggccttcgacttctgccacctggcccacctgacccccggcttcgtgggcgccgacctgatggccctgtgcagagaggccgccatgtgcgccgtgaacagagtgctgatgaagctgcaggagcagcagaagaagaaccccgagatggaggacctgcccagcaagggcgtgcaggaggagagactgggcaccgagcccaccagcgagacccaggacgagctgcagagactgctgggcctgctgagagaccaggaccccctgagcgaggagcagatgcagggcctgtgcatcgagctgaacgacttcatcgtggccctgagcagcgtgcagcccagcgccaagagagagggcttcgtgaccgtgcccaacgtgacctgggccgacatcggcgccctggaggacatcagagaggagctgaccatggccatcctggcccccgtgagaaaccccgaccagttcaaggccctgggcctggtgacccccgccggcgtgctgctggccggcccccccggctgcggcaagaccctgctggccaaggccgtggccaacgagagcggcctgaacttcatcagcgtgaagggccccgagctgctgaacatgtacgtgggcgagagcgagagagccgtgagacaggtgttccagagagccaagaacagcgccccctgcgtgatcttcttcgacgaggtggacgccctgtgccccagaagaagcgacagagagaccggcgccagcgtgagagtggtgaaccagctgctgaccgagatggacggcctggaggccagacagcaggtgttcatcatggccgccaccaacagacccgacatcatcgaccccgccatcctgagacccggcagactggacaagaccctgttcgtgggcctgcccccccccgccgacagactggccatcctgaagaccatcaccaagaacggcaccaagccccccctggacgccgacgtgaacctggaggccatcgccggcgacctgagatgcgactgctacaccggcgccgacctgagcgccctggtgagagaggccagcatctgcgccctgagacaggagatggccagacagaagagcggcaacgagaagggcgagctgaaggtgagccacaagcacttcgaggaggccttcaagaaggtgagaagcagcatcagcaagaaggaccagatcatgtacgagagactgcaggagagcctgagcagatag

SEQ ID NO: 85888 - protein, 765 aa, Artificial Sequence
  derived and/or modified sequence
MKPRPAGFVDNKLKQRVIQYLTSNKCGKYVDIGVLASDLQRVYSIDYGRRKRNAFRIQVEKVFSIISSEKELKNLTELEDEHLAKRARQGEEDNEYTESYSDDDSSMEDYPDPQDSKDSSLLESDMKRKGKLKNKGSKRKKEDLQEVDGEIEAVLQKKAKARGLEFQISNVKFEDVGGNDMTLKEVCKMLIHMRHPEVYHHLGVVPPRGVLLHGPPGCGKTLLAHAIAGELDLPILKVAAPEIVSGVSGESEQKLRELFEQAVSNAPCIIFIDEIDAITPKREVASKDMERRIVAQLLTCMDDLNNVAATARVLVIGATNRPDSLDPALRRAGRFDREICLGIPDEASRERILQTLCRKLRLPQAFDFCHLAHLTPGFVGADLMALCREAAMCAVNRVLMKLQEQQKKNPEMEDLPSKGVQEERLGTEPTSETQDELQRLLGLLRDQDPLSEEQMQGLCIELNDFIVALSSVQPSAKREGFVTVPNVTWADIGALEDIREELTMAILAPVRNPDQFKALGLVTPAGVLLAGPPGCGKTLLAKAVANESGLNFISVKGPELLNMYVGESERAVRQVFQRAKNSAPCVIFFDEVDALCPRRSDRETGASVRVVNQLLTEMDGLEARQQVFIMAATNRPDIIDPAILRPGRLDKTLFVGLPPPADRLAILKTITKNGTKPPLDADVNLEAIAGDLRCDCYTGADLSALVREASICALRQEMARQKSGNEKGELKVSHKHFEEAFKKVRSSISKKDQIMYERLQESLSR

SEQ ID NO: 85889 - DNA, 2298 bp, Artificial Sequence
  derived and/or modified sequence
atgaagcctagaccagccggtttcgtggacaacaaactgaaacagcgcgttatccaatatttaacctccaataagtgcggtaaatacgttgatattggtgtgttggcttctgatctgcagcgcgtttactcgatcgactacggtaggcgtaagcgcaacgccttccgcatccaggtggagaaggttttttctatcatttctagcgaaaaagagttaaagaatttgacggaactcgaggacgaacatctggctaagagggcaaggcagggcgaagaggataacgaatacacagaatcatatagcgacgatgactcgtccatggaagattatccagatccccaagacagcaaagactcaagcctgctggagtccgacatgaagaggaagggaaaactgaaaaataaggggtctaagcgtaaaaaagaagacctccaggaggtcgatggagaaatcgaagcagtcctgcagaagaaggctaaggcaagaggcctggaatttcagatttcaaatgttaagttcgaggacgtgggaggcaacgacatgaccctgaaagaagtgtgcaagatgctcattcacatgagacaccccgaggtctaccatcacttgggggtggttcccccaagaggggtgctgctgcacggtccacctgggtgtggcaagactcttctcgctcatgccatcgcaggagagcttgacctaccgattctgaaggtggcggcccctgagatagtgtctggagtgagcggtgagagcgagcagaaattgcgagagcttttcgagcaggcagtgagcaacgccccttgtatcatttttattgacgaaatcgacgctattaccccaaaacgggaagtggctagcaaagacatggagcggcgtatcgtcgcacagctcttgacttgcatggacgacctgaacaatgttgctgccacggcccgtgtattagtgatcggcgccaccaatagaccagattctctggacccggctctcagaagagccgggcgctttgacagagaaatttgccttggtattcctgacgaggcctcccgcgaacgaatcctgcagactttatgcagaaaactgagactgccccaggcatttgacttctgccacctcgcacacttaacacctggattcgtcggcgccgacctcatggcactgtgtcgcgaggctgccatgtgtgccgtgaatcgagtgctcatgaaacttcaggaacagcagaagaaaaacccagagatggaggatctgccatcaaaaggtgtacaggaagagcgcctgggcaccgaaccaacgagcgagacccaggatgagttgcagcgcttattggggctgctgagggatcaggacccactgtccgaggagcagatgcagggactatgtattgagctaaatgatttcatcgtagcactctcctctgtccaaccgagcgccaaacgagaaggcttcgttacagttccaaacgtcacctgggccgatattggcgctttggaggacataagagaggagctgaccatggcaatcttggccccggtcagaaaccccgatcagtttaaagcactgggcctcgtaacgcctgctggcgtactcctggccgggccccccgggtgcggcaaaacactcctggccaaagctgtagccaatgagtctgggcttaactttatcagcgttaaggggccggagcttttgaatatgtacgtgggcgaatccgagcgcgcggtccgccaggttttccagcgggcaaaaaattctgctccttgcgtgattttcttcgacgaagtcgacgccctttgccctcggcgatctgaccgagaaaccggcgcctcggtgcgggtggttaatcaacttctcactgagatggacggtctagaggcaaggcagcaggtctttataatggccgccacaaaccgccctgacatcattgaccccgcaatcctgcggccaggacgcttagataaaacgctcttcgtcgggctgcccccgcccgctgatcggctggccatactgaaaactatcacaaaaaatggaacaaaaccacccctggacgccgacgtgaatttagaggcaattgccggcgatctgcgatgtgactgttacaccggggccgatctctcagctctcgtgcgagaggcgagcatttgcgccttgcgccaagaaatggctcggcagaagagtggcaacgaaaagggcgaattgaaggtttcccacaagcactttgaggaagctttcaagaaggtccggtcatcgatcagcaaaaaagatcagatcatgtacgaacgccttcaagaaagcctgtcaaggtag

SEQ ID NO: 85890 - DNA, 2298 bp, Artificial Sequence
  derived and/or modified sequence
atgaagcccaggcctgctggctttgtggacaacaagctgaagcagagggtcatccagtacctgaccagcaacaagtgtgggaagtatgtggacatcggcgtgctggccagtgacctgcagagggtgtacagcattgattatggaagaaggaagagaaatgccttccgcatccaggtggagaaggtgttcagcatcatcagcagcgagaaggagctgaagaacctgacagagctggaggatgagcacctggccaagagggcccggcagggcgaggaggacaatgagtacacagagagctacagtgatgatgacagctccatggaggactacccagacccccaggacagcaaggacagcagcctgctggagagtgacatgaagaggaagggcaagctgaagaacaagggcagcaagaggaagaaggaggacctgcaggaggtggatggagaaattgaagctgtgctgcagaagaaggccaaggcccggggcctggagttccagatcagcaatgtgaagtttgaagatgtgggcggcaatgacatgaccctgaaggaggtgtgcaagatgctgatccacatgaggcaccctgaggtgtaccaccacctgggcgtggtgcccccccggggcgtgctgctgcacggccccccaggctgtgggaagaccctgctggcccacgccatcgccggggagctggacctgcccatcctgaaggtggccgcccctgagatcgtgtctggagtgtctggagagagcgagcagaagctgcgggagctgtttgagcaggccgtgtccaatgccccctgcatcatcttcattgatgaaattgatgccatcacccccaagcgggaggtggccagcaaggacatggagaggagaattgtggcccagctgctgacctgcatggatgacctgaacaacgtggccgccacagcccgggtgctggtgattggagccaccaacagaccagacagcctggaccctgccctgcggcgggccggccgctttgaccgggagatctgcctgggcatcccagatgaggccagccgggagcgcatcctgcagaccctgtgcaggaagctgcggctgccccaggcctttgacttctgccacctggcccacctgaccccaggctttgtgggcgctgacctgatggccctgtgccgggaggccgccatgtgtgctgtgaacagagtgctgatgaagctgcaggagcagcagaagaagaaccctgagatggaggacctgcccagcaagggcgtgcaggaggagcggctgggcacagagcccaccagcgagacccaggatgagctgcagaggctgctgggcctgctgcgggaccaggaccccctgtctgaggagcagatgcagggcctgtgcatcgagctgaatgacttcatcgtggccctgagctctgtgcagcccagcgccaagcgggagggctttgtgacagtgcccaacgtgacctgggccgacatcggggccctggaggacatccgggaggagctgaccatggccatcctggcccctgtgagaaatccagaccagttcaaggccctgggcctggtgaccccagctggggtgctgctggccggccccccaggctgcggcaagaccctgctggccaaggctgtggccaatgaaagtggcctgaacttcatctctgtgaagggccctgagctgctgaacatgtatgtgggggagagcgagagagctgtgcggcaggtgttccagagggccaagaacagcgccccctgtgtgatcttctttgatgaggtggatgccctgtgcccccggcggagtgaccgggagaccggggcctctgtgcgggtggtgaaccagctgctgacagagatggatggcctggaggcccggcagcaggtgttcatcatggccgccaccaacagaccagacatcattgatcctgccatcctgcggcccggccgcctggacaagaccctgtttgtgggcctgcccccacctgctgaccggctggccatcctgaagaccatcaccaagaatggcaccaagccacccctggatgctgatgtgaacctggaggccatcgccggggacctgcgctgtgactgctacaccggggctgacctgagcgccctggtgcgggaggccagcatctgtgccctgcggcaggagatggcccggcagaagtctggaaatgaaaaaggagagctgaaggtgagccacaagcactttgaggaggccttcaagaaggtgcgcagcagcatcagcaagaaggaccagatcatgtatgaaaggctgcaggagagcctgagcaggtag

SEQ ID NO: 85891 - DNA, 2298 bp, Artificial Sequence
  derived and/or modified sequence
atgaagccccggcccgccggcttcgtggacaacaagctgaagcagcgggtgattcagtacctcacgagtaataaatgcggcaaatatgtcgatatcggcgtgctggcctccgatttacagagggtgtactctatcgattatggtcggagaaagaggaacgctttccgcatccaggtggagaaagtgttcagcattataagcagtgagaaggagctaaagaaccttactgagcttgaggacgagcatctggcaaagcgagcccggcagggcgaggaagataatgagtacacagaatcatacagcgatgacgacagctcaatggaagactatcccgatcctcaagacagcaaagactcaagcctcttagagtctgatatgaaaagaaaggggaagctgaagaataagggatccaaacggaaaaaagaagacttgcaagaagtggatggagagatagaagccgttctccaaaaaaaggcgaaagcaagaggcttggaattccagatctctaatgtgaaattcgaggacgttggaggcaacgacatgaccctcaaagaagtgtgtaaaatgctaatccacatgcgccacccggaagtgtatcaccatctgggagtcgtgccacctcggggagtactgctgcatggtccacccggctgcgggaaaactctgttggctcatgcgatagccggtgagctggatctgcccattctgaaggtggcagctccggaaatcgtgagcggcgtatctggcgaatcggaacagaagctccgggagttgtttgaacaggctgtgagcaacgcaccatgcattattttcatcgacgaaatagacgctataacccctaaacgagaagtcgcatccaaagacatggagaggagaatcgttgcccagctgctcacctgcatggatgacctgaataatgtggcagcaaccgcccgtgtcctggttattggggcaaccaatcggcccgacagcctggatcccgccctgagacgcgctggcagattcgatagggaaatttgtctgggtatacccgacgaggctagcagggaaaggattcttcaaactctatgcagaaagttacggctgccgcaagcttttgacttttgtcacttggctcacctgactcctggcttcgtgggcgcagacctgatggccctgtgcagagaggctgcgatgtgtgcggtgaaccgagtcttgatgaagttacaagaacagcaaaaaaaaaatcccgagatggaggatctgccctcaaagggcgttcaggaggagcgccttgggaccgagccaacttctgagacacaagacgagctgcaacgactccttggactgctaagggaccaggatccgctctcagaggaacaaatgcagggtctttgtattgagctgaacgactttatcgtagctctttcatcagtgcagccttccgcaaagcgagagggtttcgtcactgtgcctaatgtgacctgggccgacattggcgccctagaggatatccgcgaggagctgactatggctatcttggcccccgtgaggaaccctgaccagttcaaggccctggggctggttaccccagctggcgtcctgctggccggcccaccgggatgtggcaagacccttcttgctaaagcggtggccaatgagtctggccttaatttcatcagcgtaaaaggtcccgagctgttgaatatgtacgtcggcgagtcagagagggctgttcggcaggtgtttcagcgcgccaagaacagcgctccttgtgtgatcttcttcgacgaggttgacgccctttgtccacgacgctcagaccgcgaaaccggagcaagcgtccgggtagtaaatcagctgctgactgagatggacggacttgaagccagacaacaggtattcatcatggcagcaacaaaccgcccagatatcatcgaccctgcgatcctgcgtccaggtcgattggacaagaccctgtttgtggggcttcctccccccgcagacagattggccattctgaaaaccatcacaaaaaacggaactaagccccctctggacgcagatgtcaacctggaagctattgccggagacttgcgttgcgactgttacaccggcgcagacctgtccgctttggtgcgagaggcttccatctgcgcactgcgacaggaaatggcgaggcagaaatcagggaatgagaagggtgaattgaaggtatcacacaagcattttgaggaagctttcaaaaaagtacggagctctatcagcaagaaggatcaaattatgtacgaacgtctacaggagtcgctcagccggtag

SEQ ID NO: 85892 - DNA, 2566 bp, Artificial Sequence
  derived and/or modified sequence
agaccgacgcgatgaagcccagacctgcagggttcgtggataataaactcaagcagcgagtcatccagtaccttaccagtaacaaatgtggcaaatatgtggacattggagtcttagcgtctgatttacaaagagtgtacagtatagactatggtcgaagaaaaagaaatgcttttaggattcaggtagaaaaagtatttagcataattagtagtgagaaggaacttaagaatttaacagaattagaagatgaacatttggcaaaaagggcaagacaaggtgaagaggataatgagtatactgaaagctattctgatgatgattcaagtatggaagactacccagatccacaggattcaaaagattcttctcttttggagagtgatatgaaacggaaaggcaagctaaagaataaaggaagcaaaaggaagaaagaagatcttcaggaagtagatggagaaattgaagctgtcctgcaaaagaaagctaaagccagggggttagaattccagatctccaacgtgaagtttgaagatgtgggaggcaatgatatgacattaaaagaggtctgcaagatgctcatacacatgcgtcacccggaggtgtaccaccacctgggcgtcgtgccccctcgtggagttctccttcatggaccaccaggctgtgggaagacattacttgcacatgcaattgctggggaacttgacctgccaattttgaaagtggctgctccagagattgtgtctggagtatccggagagtctgagcagaagctgagagaactatttgagcaagctgtgtcaaatgcaccatgtatcattttcattgatgaaattgatgctattacccccaaaagagaagtggcttcaaaagatatggaacgaagaattgtagcccaactcctaacctgcatggatgatctgaataatgtggctgctacagcccgggtcctagttattggagctactaatcgaccagactcgttagaccctgctttgagacgtgcgggaaggttcgaccgagaaatatgcctaggtatcccagatgaagcatccagggaaagaatacttcaaacattgtgcagaaaactgaggcttcctcaagcttttgatttctgtcacttagcacacctaactccaggctttgttggtgctgatctcatggcactgtgccgagaggcagcaatgtgtgcagtcaatagagtcttaatgaagctacaggaacagcagaagaaaaatcctgaaatggaagatttgccatctaaaggagtccaggaggaaaggctgggaactgagcccacttctgaaacacaggatgaattacaaaggctgctggggttgctaagagaccaagatcccctctcagaggagcagatgcaaggactgtgcattgaactgaatgatttcattgttgctctatcctcagtccaaccctctgccaaaagggaaggctttgtcactgtccctaatgtgacatgggcagatattggtgccctggaagacattagagaggagctcaccatggcaatattggcaccagtacgcaacccagaccagttcaaagctcttggattggtgactccagctggggtcctccttgctggtcctcctggctgtgggaagactctgctggcgaaggctgttgcaaatgagtccggactaaattttatatctgtcaagggccccgaattactaaacatgtatgttggtgagagtgaacgtgctgtgcgacaagtttttcaacgagccaagaactcagcaccctgtgtgatattctttgatgaagtggatgctttatgtcctcgaagatcagaccgagagacaggggcaagtgtccgagtggtgaatcagctacttacagagatggatggtctggaagcacgccagcaggtttttattatggcagccactaacaggccagatataattgaccctgcaatcctgcgcccgggccgcctggacaaaacactgtttgtgggtttaccgccccctgcagatcgccttgccatcttaaaaactatcacaaaaaatggtaccaaaccaccactggatgcagatgtaaatttggaagcaattgctggtgaccttcgctgtgattgctatacgggcgcagatctctctgctttggtacgagaagcttctatctgtgccctgagacaggaaatggcaagacagaagagtggaaatgaaaaaggtgaactcaaggttagtcataagcattttgaagaagctttcaagaaagtaagatcatctatatcaaaaaaggatcaaatcatgtatgaacgtttgcaggagtccctcagccggtgatgtctccagcagccggcttagaggagctagcccatcaagccggcagagaatcccccacacgctctgaaggacccactttcagctggacacaggcgcggcctcatgtaaacattttattttcaaatgaatgaggccaagctgaagctgaagctgaagattcttcccatctggccagccttgtgtgaaaatgccttcttcctctttaagaaaaaggacaatttttaaactgctgaaataaaatgactgttacatttttc

SEQ ID NO: 85893 - DNA, 2298 bp, Artificial Sequence
  derived and/or modified sequence
atgaaacctaggccagctggcttcgtcgacaacaaactaaaacagcgcgtcattcagtacctgacctctaataaatgtggcaagtacgtagacattggcgtcctggcctccgatctgcagcgagtgtactcaatcgactatgggcgtcgcaagcgaaatgcattccgaatacaggttgagaaagtgttcagcattatttcttctgagaaggaactgaaaaatttgaccgaattggaggatgaacacctggccaagcgcgctaggcagggggaggaagataacgaatacacggaatcatatagtgacgacgatagttcgatggaggactatcctgacccgcaggattctaaagatagctcactgctggagtctgatatgaagaggaaagggaagttaaagaacaagggatctaagagaaagaaggaagacctgcaggaggttgatggagaaatcgaggccgtgctacaaaagaaggccaaagcccgaggtcttgaattccaaatttcaaacgtgaaatttgaggatgtcggtggaaacgatatgacactgaaggaggtctgcaagatgctgatccacatgaggcatcctgaggtgtaccatcatttaggcgtcgtgcccccaagaggggtgttgttacatggtccgcctggctgtggcaagacgttgctggcacacgctatcgccggagaactagatttgccaattctcaaggtggcagctccggagatcgtgtcaggagttagcggcgaatcagaacaaaaactacgcgaactgtttgaacaagcagtctcaaacgccccatgcataatctttatcgacgagatcgatgctatcacccctaaacgtgaggtcgcctctaaagatatggaaaggaggatcgttgcccagctcttaacatgtatggacgatttaaataacgtcgccgcaactgctagagtccttgtgatcggggcaactaacagacccgacagtcttgacccagcgctccggagagccggtagatttgaccgggagatttgtctcggaatcccagatgaagcgagccgggagcgaatcttacagaccctctgccgcaagctaaggctgcctcaagccttcgacttttgccatttggcccaccttacgcccggttttgtcggagctgacctgatggcgctctgtcgggaggcagctatgtgcgccgtgaaccgagtcctaatgaagttgcaggagcagcagaagaagaacccagagatggaagatctgccgagcaagggtgtccaagaggagcgattaggcacagaacctacctccgagacacaagacgagttgcagagactgctaggcctattacgcgatcaggatcccctgtcagaggagcagatgcagggcttatgtattgagctcaatgactttattgtcgctctgtcatctgtccagccatcagctaagcgggagggcttcgtgaccgtacccaacgtcacctgggccgatatcggcgctctggaggatatcagggaggaattaacaatggccatcctagcgcctgtgaggaacccggatcagttcaaggcacttgggctcgtaacccccgctggcgttctcttggcagggccacctggatgcggcaagaccttgttggctaaggccgtcgcaaacgaatctggcctgaactttatttctgtcaagggccctgagctgctcaacatgtacgttggcgagagcgagagggctgtgagacaggtgtttcagcgggcaaagaattcggcaccttgtgtgatcttcttcgacgaagttgacgctttgtgccctaggagatccgacagagagactggcgctagtgttcgagtggttaaccagttgttaacagagatggatgggcttgaggcaagacagcaggtctttatcatggcagctaccaaccggcctgatatcatcgatccggcaatcctacgtcctggccgtttggacaaaactttatttgtggggctacctccgccagccgaccggttggcgatcctgaagaccatcactaaaaacggcactaagccaccactggatgcagatgtgaacctggaggctatcgcaggcgatttaagatgcgattgctacactggggctgatttgagtgccctggtgagggaggcttcaatatgcgccctcaggcaagaaatggctcgtcagaaaagcggaaatgaaaagggcgaactcaaagtgagtcataaacatttcgaggaagcctttaaaaaggttcgtagctccatctcaaagaaggaccaaattatgtatgaacgcctccaggaatccctgtctagatag

SEQ ID NO: 85894 - DNA, 2298 bp, Artificial Sequence
  derived and/or modified sequence
atgaagcccagacccgccggcttcgtggacaacaagctgaagcagagagtgatccagtacctgaccagcaacaagtgcggcaagtacgtggacatcggcgtgctggccagcgacctgcagagagtgtacagcatcgactacggcagaagaaagagaaacgccttcagaatccaggtggagaaggtgttcagcatcatcagcagcgagaaggagctgaagaacctgaccgagctggaggacgagcacctggccaagagagccagacagggcgaggaggacaacgagtacaccgagagctacagcgacgacgacagcagcatggaggactaccccgacccccaggacagcaaggacagcagcctgctggagagcgacatgaagagaaagggcaagctgaagaacaagggcagcaagagaaagaaggaggacctgcaggaggtggacggcgagatcgaggccgtgctgcagaagaaggccaaggccagaggcctggagttccagatcagcaacgtgaagttcgaggacgtgggcggcaacgacatgaccctgaaggaggtgtgcaagatgctgatccacatgagacaccccgaggtgtaccaccacctgggcgtggtgccccccagaggcgtgctgctgcacggcccccccggctgcggcaagaccctgctggcccacgccatcgccggcgagctggacctgcccatcctgaaggtggccgcccccgagatcgtgagcggcgtgagcggcgagagcgagcagaagctgagagagctgttcgagcaggccgtgagcaacgccccctgcatcatcttcatcgacgagatcgacgccatcacccccaagagagaggtggccagcaaggacatggagagaagaatcgtggcccagctgctgacctgcatggacgacctgaacaacgtggccgccaccgccagagtgctggtgatcggcgccaccaacagacccgacagcctggaccccgccctgagaagagccggcagattcgacagagagatctgcctgggcatccccgacgaggccagcagagagagaatcctgcagaccctgtgcagaaagctgagactgccccaggccttcgacttctgccacctggcccacctgacccccggcttcgtgggcgccgacctgatggccctgtgcagagaggccgccatgtgcgccgtgaacagagtgctgatgaagctgcaggagcagcagaagaagaaccccgagatggaggacctgcccagcaagggcgtgcaggaggagagactgggcaccgagcccaccagcgagacccaggacgagctgcagagactgctgggcctgctgagagaccaggaccccctgagcgaggagcagatgcagggcctgtgcatcgagctgaacgacttcatcgtggccctgagcagcgtgcagcccagcgccaagagagagggcttcgtgaccgtgcccaacgtgacctgggccgacatcggcgccctggaggacatcagagaggagctgaccatggccatcctggcccccgtgagaaaccccgaccagttcaaggccctgggcctggtgacccccgccggcgtgctgctggccggcccccccggctgcggcaagaccctgctggccaaggccgtggccaacgagagcggcctgaacttcatcagcgtgaagggccccgagctgctgaacatgtacgtgggcgagagcgagagagccgtgagacaggtgttccagagagccaagaacagcgccccctgcgtgatcttcttcgacgaggtggacgccctgtgccccagaagaagcgacagagagaccggcgccagcgtgagagtggtgaaccagctgctgaccgagatggacggcctggaggccagacagcaggtgttcatcatggccgccaccaacagacccgacatcatcgaccccgccatcctgagacccggcagactggacaagaccctgttcgtgggcctgcccccccccgccgacagactggccatcctgaagaccatcaccaagaacggcaccaagccccccctggacgccgacgtgaacctggaggccatcgccggcgacctgagatgcgactgctacaccggcgccgacctgagcgccctggtgagagaggccagcatctgcgccctgagacaggagatggccagacagaagagcggcaacgagaagggcgagctgaaggtgagccacaagcacttcgaggaggccttcaagaaggtgagaagcagcatcagcaagaaggaccagatcatgtacgagagactgcaggagagcctgagcagatag

SEQ ID NO: 85895 - DNA, 1179 bp, Artificial Sequence
  derived and/or modified sequence
atgctgaagtggaaccacggcctgcccagccccctgctgctggccagactgctgcccccccccagacccagctgcgtgcagcccctgctgctgggcggccagggcggccagctgcagctgctgcacctggccgagggcgccagcgtgcccagactggccggccccccccagagcctgcccagcagaatcgacagcctgcccgccttccccctgctggagcccaagatccagtggagactgcaggagagactgaaggcccccaccatcggcctggccgccgtggtgccccccctgcccagcgcccccacccccggcctggtgctgttccagctgagcgccgccggcgacgtgttctaccagcagctgagaccccaggtggacagcagcctgagaagagacgccggcccccccggcgacacccagcccgactgccacgcccccaccgccagctggaccagccaggacaccgccggctgcagccagtggctgaaggccctgctgaaggtgcccctggccccccccgtgtggaccgcccccaccttcacccacagacagatgctgggcagcaccgagctgagaagagaggaggaggagggccagagactgggcgtgctgagaaaggccatggccagaggccagctgctgctgcagagagacctgggcagcctgcccgccgccgagcccccccccgcccccgagagcggcctggaggacaagctgagcgagagactgggcgaggcctgggccggcagaggcgccgcctggtgggagagacagcagggcagaaccagcgagcccggcagacagaccagaagacccaagagaagaacccagctgagcagcagcttcagcctgagcggccacgtggaccccagcgaggacaccagcagcccccacagccccgagtggccccccgccgacgccctgcccctgccccccaccaccccccccagccaggagctgacccccgacgcctgcgcccagggcgtgcccagcgagcagagacagatgctgagagactacatggccaagctgcccccccagagagacacccccggctgcgccaccacccccccccacagccaggccagcagcgtgagagccaccagaagccagcagcacacccccgtgctgagcagcagccagcccctgagaaagaagcccagaatgggcttctag

SEQ ID NO: 85896 - DNA, 1179 bp, Artificial Sequence
  derived and/or modified sequence
atgctgaagtggaaccacggcctaccgagcccactcctcttagctagactcctgccgccgccaaggccctcttgtgttcagccgcttctcctgggagggcaaggcggacagctgcagctcctacatctggctgagggcgctagcgttccgcgattagcagggccaccacagagcctgccaagcagaatcgactcgcttcccgccttccccctgcttgaaccaaagatccagtggcggttgcaagagcgcttgaaggcaccaacgatcggcctggctgcagtggtgcccccattgccctctgcccccactccaggccttgtactctttcagttatcagcagcaggagatgtgttttaccagcaattgcggccccaggtcgacagtagtctgcggagagacgccggacctcccggggacacacaacccgactgccacgcgccaaccgcgtcctggacgagtcaggacactgcaggatgctctcagtggttgaaggccctgctcaaagttcccctggctcccccggtctggaccgcccccaccttcacccacagacagatgctgggctctaccgagctcagacgggaagaggaagaggggcagcgactcggtgtgctacgcaaagcaatggcccgagggcaacttcttctccagagggatttggggagcttacccgcagcggaacctccgcctgccccggaatccggcctggaagataagttgagcgagagattaggcgaggcatgggcaggcaggggagctgcgtggtgggaacgccagcagggacggacctccgagcccggacgccaaacgagaagacctaagcgcaggacccagttgagcagtagtttttctcttagtggacatgtagacccttctgaagacacttcctctccccatagtcccgagtggccccctgctgacgcgctgcccctgccacccactacccccccgagccaggaattgacccccgacgcttgtgctcagggggtaccatcagagcaacggcagatgctgcgggactacatggcaaaattgccaccacagcgcgacaccccaggttgcgccactacaccgcctcatagccaggcctcttccgtcagggccactcggtctcaacagcacacccctgttctgtcatccagccagccccttaggaagaagccgcgaatgggattctag

SEQ ID NO: 85897 - DNA, 1179 bp, Artificial Sequence
  derived and/or modified sequence
atgctgaagtggaaccacggcctgcccagccccctgctgctggcccggctgctgcccccaccccggcccagctgtgtgcagcccctgctgctgggcggccagggcggccagctgcagctgctgcacctggccgagggcgcctctgtgccccggctggccggccccccccagagcctgcccagcagaattgacagcctgcctgccttccccctgctggagcccaagatccagtggaggctgcaggagcggctgaaggcccccaccatcggcctggccgctgtggtgccccccctgcccagcgcccccaccccaggcctggtgctcttccagctgtctgctgctggagatgtgttctaccagcagctgcggccccaggtggacagcagcctgcggagagatgctggccccccaggggacacccagcctgactgccacgcccccacagcctcctggaccagccaggacacagctggctgcagccagtggctgaaggccctgctgaaggtgcccctggcccctcctgtgtggacagcccccaccttcacccaccggcagatgctgggcagcacagagctgcggcgggaggaggaggagggccagaggctgggcgtgctgaggaaggccatggcccggggccagctgctgctgcagagggacctgggcagcctgcctgctgctgagcccccaccagcccctgagagcggcctggaggacaagctgtctgagcggctgggggaggcctgggccggcagaggagctgcctggtgggagcggcagcagggccgcaccagcgagcccggccggcagacccggcggcccaagaggaggacccagctgagcagcagcttcagcctgagcggccacgtggaccccagcgaggacaccagcagcccccacagccctgagtggcccccagcagatgccctgcccctgccccccaccaccccacccagccaggagctgaccccagatgcctgtgcccagggcgtgcccagcgagcagaggcagatgctgcgggactacatggccaagctgcccccccagagggacaccccaggctgtgccaccaccccaccccacagccaggccagctctgtgcgggccaccaggagccagcagcacacccctgtgctgagcagcagccagcccctgaggaagaagcccaggatgggcttctag

SEQ ID NO: 85898 - DNA, 1179 bp, Artificial Sequence
  derived and/or modified sequence
atgctgaagtggaaccacggcctgcccagccccctgctgctggccaggttgcttccccctccgcgcccatcatgcgtccagccccttttattgggcggccaaggagggcagctccagttgctgcacctcgctgaaggggccagtgttccccgactggcgggacctccacagagtctaccgtctagaatcgactcattgcctgcattccctctcctggagccgaagatccagtggcggttgcaggaacgactgaaggcccctactatcggacttgccgcagtggttcctccactcccgagtgctcccacacctggtcttgtcctgtttcagttatccgccgctggagacgtgttctaccaacagctccgtccccaagtcgacagctcgctgcggcgcgacgccggacctcctggtgatacccagcccgattgtcacgcacctaccgcctcttggacgtcccaagatacagctggctgcagtcagtggctgaaagccctactcaaagtaccactcgccccccctgtgtggacagctccaacgtttactcataggcaaatgctgggttccacggaactgagaagagaggaggaggagggacagagattgggcgtgttgcggaaggcaatggctagggggcagcttctcttgcagcgcgatcttggctccttgcccgccgcagagccccccccggcaccagaatctggccttgaggataagctctcagaaaggctgggggaggcctgggctggccgcggggccgcttggtgggaacgacagcagggacggacaagtgagccgggcaggcagactcgccgccccaaacgccggactcagctcagcagctccttttccctcagcgggcatgtggatccctccgaggacacgtcttccccacacagtcccgaatggccgccagcagatgcactcccgctcccacctaccacgcctccctcacaggagctgactcctgacgcgtgcgctcagggcgtcccaagtgagcaaaggcagatgctgcgggactatatggctaagctgccaccacagcgagatacaccaggctgtgccactacaccaccccacagccaggcatcctccgttagggccaccaggtctcagcaacacaccccagtgctgtcatcctctcagccccttagaaagaagccaagaatgggcttttag

SEQ ID NO: 85899 - DNA, 1179 bp, Artificial Sequence
  derived and/or modified sequence
atgctgaagtggaaccacggcttaccttcacctctgctactggcgcgtttgctgcccccaccgagaccaagttgtgtgcagccactattgttaggaggccagggcggacaacttcagctgttacatctggccgagggcgcatcagttcctcgcctggcgggtccacctcagtcacttccaagtaggattgattcactgcctgcattccctttgctcgagccaaaaatccagtggcggttgcaggagcggctcaaagcacccacaattggactggccgctgtggttcccccactccctagcgcacctacgcctggacttgttttgtttcagctcagtgccgctggagatgtcttctatcagcagctgcggccacaggttgattcttccctccgcagggacgccggtcctcccggagacacgcaacctgattgtcacgcccctacagcctcttggacatcccaggatacagccggatgctcccaatggttgaaggccctcctgaaggtgccgttggccccaccggtgtggaccgctcccacattcacccatagacagatgctgggttctacggagcttcgcagagaggaggaggagggccagaggttaggggtgttgaggaaggcaatggccagagggcaactgctcctccagagggatcttggctctctacccgcagccgaacctccaccggcacccgaatctgggctcgaggacaaactgagcgagagactgggcgaggcttgggcaggacggggtgccgcttggtgggaaagacagcagggcaggactagcgagcccggacggcaaactagaaggcctaaaagacgaacccagctgtcatccagctttagcctttccggtcatgtggatccttccgaggatactagcagcccccatagccctgagtggccgccagctgatgccctgcccctgccaccaaccacccccccttctcaagagctcactcctgatgcctgcgcacaaggcgtgccaagtgaacagaggcagatgcttcgggattacatggctaaattgcctcctcaacgagatacgcctggctgcgccaccacgccgcctcactctcaggcttcttcagtaagagccacgagatcgcagcagcataccccagtactatcatcctctcagccactacgtaagaaaccacgtatgggtttctag

SEQ ID NO: 85900 - protein, 256 aa, Artificial Sequence
  derived and/or modified sequence
MAGTWLLLLLALGCPALPTGPVSFPSSPEAATTGPIWFSAGNGSALDAFTYGPSPATDGTWTNLAHLSLPSEELASWEPLVCHTGPGAEGHSRSTQPMHLSGEASTARTCPQEPLRGTPGGALWLGVLRLLLFKLLLFDLLLTCSCLCDPAGPLPSPATTTRLRALGSHRLHPATETGGREATSSPRPQPRDRRWGDTPPGRKPGSPVWGEGSYLSSYPTCPAQAWCSRSALRAPSSSLGAFFAGDLPPPLQAGAA

SEQ ID NO: 85901 - DNA, 771 bp, Artificial Sequence
  derived and/or modified sequence
atggcaggtacgtggctcctcttattgctcgcactgggctgtcccgctttgccaactggtcccgtttccttcccctcaagtcccgaagcagctaccactggacctatttggttctcagcaggtaacgggtcagctctggatgccttcacatacgggccgtcacctgctacggacggaacttggacaaatctcgcgcatctgagcctgccttccgaggaattggcatcctgggagccacttgtttgccatacgggaccaggcgccgagggccattctcggtctacccagcccatgcacctctctggagaggcatctacggctcgcacttgcccacaggagcccctgcgaggcacaccggggggggccctgtggctgggtgtattgcggctgctgctctttaaacttctcctgtttgacctcctcctcacttgtagctgcttgtgcgacccagcaggacccctccccagccccgcgaccaccactaggcttagggctctgggcagtcaccgcctccacccagcaaccgagacaggtggacgagaagctacctcaagtccccgtcctcagccacgagaccgacgctggggggatacccctcccggtaggaagcctgggtcacccgtgtggggcgaaggtagctacctgagctcatacccaacttgtccagctcaggcctggtgctccagatccgccctccgcgcccctagttcaagcttaggtgcgttctttgcgggggatttgcccccccctttgcaggctggagcagcctag

SEQ ID NO: 85902 - DNA, 771 bp, Artificial Sequence
  derived and/or modified sequence
atggccggcacctggctgctgctgctgctggccctgggctgcccagccctgcccactggacctgtgtccttccccagcagccctgaggccgccaccaccggccccatctggttctctgctggaaatggcagcgccctggatgccttcacctacggccccagccctgccacagatggcacctggaccaacctggcccacctgagcctgcccagcgaggagctggcctcctgggagcccctggtgtgccacacaggccctggagctgagggccacagccgcagcacccagcccatgcacctgtctggagaggccagcacagcccggacctgcccccaggagcccctgcggggcaccccaggaggagccctgtggctgggcgtgctgcggctgctgctcttcaagctgctgctgtttgacctgctgctgacctgcagctgcctgtgtgaccctgctggccccctgcccagccctgccaccaccacccggctgcgggccctgggcagccaccggctgcacccagccacagaaacaggaggccgggaggccaccagcagcccccggccccagccccgggaccggcgctggggagacaccccacctggcaggaagccaggcagccctgtgtggggcgagggcagctacctgagcagctaccccacctgcccagcccaggcctggtgcagccgcagcgccctgcgggcccccagcagcagcctgggcgccttctttgctggggacctgcccccacccctgcaggccggggccgcctag

SEQ ID NO: 85903 - DNA, 771 bp, Artificial Sequence
  derived and/or modified sequence
atggccggcacctggctgctgctgctgctggccctgggctgccccgcactccctacgggccccgtctccttcccaagctcccctgaggcagctactaccggtcctatctggttcagcgctggaaacgggagcgctctcgatgccttcacatacgggccatctcccgccaccgacgggacctggacaaacttggcgcatctgagtttaccctccgaagaactggcttcctgggagcccctggtctgccatacaggcccaggagcagaaggccactcccgaagcactcagcccatgcacctatccggtgaggctagcacggctagaacttgcccccaggagcccctaagaggcaccccaggaggagcactctggctgggcgttctgcggctgctgctatttaagctactgctttttgacctgctgctgacttgttcttgcctgtgcgacccagctggtccactgccaagccccgccaccacaaccagactgagagctctcggctctcaccggctccaccccgccaccgaaaccggcggtcgggaagccacttcctccccccgcccccagccgagggatcgcagatggggagataccccccccggccgcaagccagggtccccagtctggggtgaaggctcctatctaagttcttatcctacgtgcccggctcaggcatggtgtagccggtctgctctgcgagcacccagctcctctctgggggccttcttcgctggcgacctccctccaccccttcaagcaggagccgcttag

SEQ ID NO: 85904 - DNA, 1005 bp, Artificial Sequence
  derived and/or modified sequence
tagaaggcagtcttgtgggtgcctcctcccccagccgcaactcaggtctgcagctgggtcctgcctccttccgagtgggccatggccggtacatggctgctacttctcctggcccttgggtgtccagccctacccacaggtcctgtttccttcccttcctcaccagaggctgccacaacaggccccatctggttctcagccggcaatggcagtgcactggatgccttcacctatggcccttccccagcaacggatggcacctggaccaacttggcccatctctccctgccttctgaggagctggcatcctgggagcctttggtctgccacactgggcctggggctgagggtcacagcaggagtacacagcccatgcatctgtcaggagaggcttctacagccaggacctgcccccaggagcctctcagggggacaccgggtggggcgctgtggctgggggtcctgcggctgctgctcttcaagctgctgctgtttgacctgctcctgacctgcagctgcctgtgcgaccccgcgggcccgctgccttcccccgcaaccaccacccgcctgcgagccctcggctcccatcgactgcacccggccacggagactgggggacgagaggccaccagctcacccagaccccagcctcgggaccgccgctggggtgacacccctccgggtcggaagcccgggagcccagtatggggggaagggtcttacctcagcagttaccccacttgcccagcacaggcctggtgctcaagatctgccctcagggctccttcctccagtcttggagcattttttgcaggtgacctgcctcctcctctgcaggctggagctgcctgagggcagggctctacctcccctgcgtcacactgtgtgaggctgtgtctctgccatccaaaagggggccccttgagaatggtgatccacccagttacaggggcatttagggagcagatgactgagaacattaaaaaagaacttaaatgacacagc

SEQ ID NO: 85905 - DNA, 771 bp, Artificial Sequence
  derived and/or modified sequence
atggcaggaacatggttgctccttctgctcgctctggggtgccctgcccttccaacaggcccagtttcctttcctagtagcccggaggccgctaccacagggccaatttggttctcagctggaaatgggtccgcgctggatgctttcacctatggaccgagtcctgcgaccgatgggacctggacaaatctggcccacctgtccctgccttcggaggagctggcaagttgggagcctctcgtgtgtcatacaggtccaggcgctgagggacactcccggagtacacagccgatgcacctgtccggcgaggctagcacggcaaggacttgtccacaagagcccctaagagggacaccaggcggagccctgtggttgggtgtactgagactcctgttgtttaagttactgctctttgacctgttgctcacatgctcatgcctgtgtgaccctgcgggaccattgccttcaccggcaacgactactagactgcgagcactcggctcacatagactgcacccagctactgaaactgggggaagagaggccacgtctagtccacggcctcagccacgagatcgacgctggggggacactcctcctgggagaaaacctggttcaccagtttggggagaaggtagctatctgagttcatatccaacctgccccgcacaggcttggtgttctcgttcagctctgcgggcaccatccagtagcctgggagctttcttcgcgggagatttgcctcccccactgcaggccggagccgcatag

SEQ ID NO: 85906 - DNA, 771 bp, Artificial Sequence
  derived and/or modified sequence
atggccggcacctggctgctgctgctgctggccctgggctgccccgccctgcccaccggccccgtgagcttccccagcagccccgaggccgccaccaccggccccatctggttcagcgccggcaacggcagcgccctggacgccttcacctacggccccagccccgccaccgacggcacctggaccaacctggcccacctgagcctgcccagcgaggagctggccagctgggagcccctggtgtgccacaccggccccggcgccgagggccacagcagaagcacccagcccatgcacctgagcggcgaggccagcaccgccagaacctgcccccaggagcccctgagaggcacccccggcggcgccctgtggctgggcgtgctgagactgctgctgttcaagctgctgctgttcgacctgctgctgacctgcagctgcctgtgcgaccccgccggccccctgcccagccccgccaccaccaccagactgagagccctgggcagccacagactgcaccccgccaccgagaccggcggcagagaggccaccagcagccccagaccccagcccagagacagaagatggggcgacaccccccccggcagaaagcccggcagccccgtgtggggcgagggcagctacctgagcagctaccccacctgccccgcccaggcctggtgcagcagaagcgccctgagagcccccagcagcagcctgggcgccttcttcgccggcgacctgcccccccccctgcaggccggcgccgcctag

SEQ ID NO: 85907 - protein, 174 aa, Artificial Sequence
  derived and/or modified sequence
MAGTWLLLLLALGCPALPTGEASTARTCPQEPLRGTPGGALWLGVLRLLLFKLLLFDLLLTCSCLCDPAGPLPSPATTTRLRALGSHRLHPATETGGREATSSPRPQPRDRRWGDTPPGRKPGSPVWGEGSYLSSYPTCPAQAWCSRSALRAPSSSLGAFFAGDLPPPLQAGAA

SEQ ID NO: 85908 - DNA, 384 bp, Artificial Sequence
  derived and/or modified sequence
atggccgctacctcccctggaccttgggtaagtagcccaacccaccgctcgtgcttcctacccttcctcacaaggggatgccacaaccgggtatgggcagcacaccctttcctattgtggccccatcaatcttgttgttggtggatggagagctccagatggtggtggtcagcctggtccctgatgctgcatcctctggctttgaccgctccaggccggaagcccgggtcaccagtttggggagaggggagctacctctctagttacccaacttgcccagcccaggcttggtgctcaaggtccgccctgcgtgccccttctagcagcctcggcgccttctttgcaggagatctgccccccccattgcaggccggagcagcctag

SEQ ID NO: 85909 - DNA, 525 bp, Artificial Sequence
  derived and/or modified sequence
atggccggcacatggctgctgctgctgctggctctgggatgtcccgccctgcccacaggagaagcaagcacagcccggacctgtcctcaggaaccgctccgagggacacccggcggagccttgtggcttggcgtgttgagactgctgctctttaagttacttctcttcgatctgctgctgacctgcagctgcctctgcgaccccgccggccctttaccaagtccagcaacgactaccaggcttcgcgcattggggagtcataggctgcatccggcaactgagaccgggggtagggaggccacttcaagtccaagaccacagcctagagatcggcggtggggcgatactcctcccggcagaaagccagggtcacccgtatggggcgagggttcatatctgagctcttaccccacctgcccggcgcaggcctggtgttcccgtagtgcactgagggcaccttcttcctctctgggagccttcttcgccggcgatctgccacctccattacaggccggagccgcttag

SEQ ID NO: 85910 - DNA, 384 bp, Artificial Sequence
  derived and/or modified sequence
atggccgccaccagccctggcccctgggtgagcagccccacccacaggagctgcttcctgcccttcctgacccggggctgccacaacagagtgtgggccgcccaccccttcctgctgtggccccaccagagctgctgctggtggatggagagcagccgctggtggtggagcgcctggagcctgatgctgcaccccctggccctgacagcccctggcaggaagccaggcagccctgtgtggggcgagggcagctacctgagcagctaccccacctgcccagcccaggcctggtgcagccgcagcgccctgcgggcccccagcagcagcctgggcgccttctttgctggggacctgcccccacccctgcaggccggggccgcctag

SEQ ID NO: 85911 - DNA, 525 bp, Artificial Sequence
  derived and/or modified sequence
atggccggcacctggctgctgctgctgctggccctgggctgcccagccctgcccactggagaggccagcacagcccggacctgcccccaggagcccctgcggggcaccccaggaggagccctgtggctgggcgtgctgcggctgctgctcttcaagctgctgctgtttgacctgctgctgacctgcagctgcctgtgtgaccctgctggccccctgcccagccctgccaccaccacccggctgcgggccctgggcagccaccggctgcacccagccacagaaacaggaggccgggaggccaccagcagcccccggccccagccccgggaccggcgctggggagacaccccacctggcaggaagccaggcagccctgtgtggggcgagggcagctacctgagcagctaccccacctgcccagcccaggcctggtgcagccgcagcgccctgcgggcccccagcagcagcctgggcgccttctttgctggggacctgcccccacccctgcaggccggggccgcctag

SEQ ID NO: 85912 - DNA, 384 bp, Artificial Sequence
  derived and/or modified sequence
atggccgccaccagccccggcccctgggtgagcagccccacccacaggtcatgcttcttgccgttcctgactcggggttgtcacaaccgggtctgggctgcccatcctttcctcctgtggcctcaccaaagctgttgctggtggatggagtcttctaggtggtggtggtcagcgtggtctctgatgcttcaccctttggctcttactgcgcccggaaggaagccgggcagcccagtctggggcgaagggtcatacctgtctagctacccaacatgcccggctcaggcgtggtgttcaagatccgcactgagggcaccctcttcatctttgggggcgtttttcgccggcgacctgccacctccacttcaggcaggcgctgcatag

SEQ ID NO: 85913 - DNA, 525 bp, Artificial Sequence
  derived and/or modified sequence
atggccggcacctggctgctgctgctgctggccctgggctgccccgctttgccaaccggcgaggccagcacagcacgcacgtgcccccaggagccattgcggggcacgccagggggagctctgtggctcggcgttcttaggctccttctgttcaaattgctgctctttgacctgttgcttacatgtagttgcctgtgtgatcctgccgggcccctcccatcaccagcaacaactacacgcctgcgcgctctaggttcacataggttgcacccagctactgagaccggtggacgggaggctacatcgagtccccgtccccaacccagggatcgtagatggggagacaccccaccaggccgcaagccgggaagccctgtgtggggtgaagggagttatctgagttcatatccaacatgtccagcacaggcttggtgctccagatccgcgctgcgagcaccatcctcaagcctgggagccttcttcgctggcgatttgcccccccccttacaagccggagctgcctag

SEQ ID NO: 85914 - DNA, 880 bp, Artificial Sequence
  derived and/or modified sequence
gtgggccatggccggtacatggctgctacttctcctggcccttgggtgtccagccctacccacaggtcctgtttccttcccttcctcaccagaggctgccacaacagggtgtgggcggcacaccctttccttctctggccccaccaatcatgctgctggtggatggaaagcagcagatggtggtggtctgcctggtccttgatgttgcaccccctggccttgacagccccaggtcggaagcccgggagcccagtatggggggaagggtcttacctcagcagttaccccacttgcccagcacaggcctggtgctcaagatctgccctcagggctccttcctccagtcttggagcattttttgcaggtgacctgcctcctcctctgcaggctggagctgcctgagggcagggctctacctcccctgcgtcacactgtgtgaggctgtgtctctgccatccaaaagggggccccttgagaatggtgatccacccagttacaggggcatttagggagcagatgactgagaacattaaaaaagaacttaaatgacacagcaaatgaaaaatatttgaattcatgtctatcctgggaggaaggaatttggcagagttagaagtaggaaaaatccaggaaagctcccttgaggaagagggcttcctgagacagaacttgggaactgcagagtgggactggtggctgggaaggcggctgtctcctcccccaacagcaagcggggaggccccctcttctcctcaccctggcccaacctctgtgagaggtcagggcagagagcccaggaacccaggaaggtgggtggtgggtctgatgtgaactctcgtacagaggtgaacagggccagggtttctggggaacaggatcg

SEQ ID NO: 85915 - DNA, 759 bp, Artificial Sequence
  derived and/or modified sequence
tagaaggcagtcttgtgggtgcctcctcccccagccgcaactcaggtctgcagctgggtcctgcctccttccgagtgggccatggccggtacatggctgctacttctcctggcccttgggtgtccagccctacccacaggagaggcttctacagccaggacctgcccccaggagcctctcagggggacaccgggtggggcgctgtggctgggggtcctgcggctgctgctcttcaagctgctgctgtttgacctgctcctgacctgcagctgcctgtgcgaccccgcgggcccgctgccttcccccgcaaccaccacccgcctgcgagccctcggctcccatcgactgcacccggccacggagactgggggacgagaggccaccagctcacccagaccccagcctcgggaccgccgctggggtgacacccctccgggtcggaagcccgggagcccagtatggggggaagggtcttacctcagcagttaccccacttgcccagcacaggcctggtgctcaagatctgccctcagggctccttcctccagtcttggagcattttttgcaggtgacctgcctcctcctctgcaggctggagctgcctgagggcagggctctacctcccctgcgtcacactgtgtgaggctgtgtctctgccatccaaaagggggccccttgagaatggtgatccacccagttacaggggcatttagggagcagatgactgagaacattaaaaaagaacttaaatgacacagc

SEQ ID NO: 85916 - DNA, 384 bp, Artificial Sequence
  derived and/or modified sequence
atggctgcaacatctccaggaccctgggtctccagccctacacatcggtcatgttttctaccatttttgacaaggggatgtcataacagagtgtgggccgcacatccattcttactctggccccatcagagctgttgctggtggatggagagttcgagatggtggtggtccgcatggagcctcatgcttcaccccctcgcactgactgctcccggacgaaaacctggaagccccgtgtggggggaaggctcatacctgtcatcgtatcctacatgtcctgcccaggcctggtgtagtcgcagtgcactgagagcccctagcagttcactgggggctttttttgcaggtgacttgcccccaccgctccaggcaggggcagcttag

SEQ ID NO: 85917 - DNA, 525 bp, Artificial Sequence
  derived and/or modified sequence
atggcaggaacctggctcctcctgctgctcgcacttggctgtccagccctgccaaccggcgaagcctccaccgccagaacctgccctcaagagcctctccgaggcacaccagggggtgcactgtggctgggtgtattacgcctgctcctgttcaagttactcttattcgacctcttactcacctgctcctgcctttgcgaccctgcaggccctcttcccagccccgctacaaccacccggcttcgagccctcggcagccaccggctgcatcccgcaaccgagaccgggggaagggaagcgacaagctctccaaggcctcaaccacgcgacaggcggtggggcgacacaccaccagggagaaaacctgggagtccagtctggggagagggatcatacctgagctcatacccaacctgcccggctcaggcgtggtgtagtcgctccgctctgagggccccatcaagctccctcggagccttcttcgcgggtgacctaccaccccctcttcaggcaggagccgcttag

SEQ ID NO: 85918 - DNA, 384 bp, Artificial Sequence
  derived and/or modified sequence
atggccgccaccagccccggcccctgggtgagcagccccacccacagaagctgcttcctgcccttcctgaccagaggctgccacaacagagtgtgggccgcccaccccttcctgctgtggccccaccagagctgctgctggtggatggagagcagcagatggtggtggagcgcctggagcctgatgctgcaccccctggccctgaccgcccccggcagaaagcccggcagccccgtgtggggcgagggcagctacctgagcagctaccccacctgccccgcccaggcctggtgcagcagaagcgccctgagagcccccagcagcagcctgggcgccttcttcgccggcgacctgcccccccccctgcaggccggcgccgcctag

SEQ ID NO: 85919 - DNA, 525 bp, Artificial Sequence
  derived and/or modified sequence
atggccggcacctggctgctgctgctgctggccctgggctgccccgccctgcccaccggcgaggccagcaccgccagaacctgcccccaggagcccctgagaggcacccccggcggcgccctgtggctgggcgtgctgagactgctgctgttcaagctgctgctgttcgacctgctgctgacctgcagctgcctgtgcgaccccgccggccccctgcccagccccgccaccaccaccagactgagagccctgggcagccacagactgcaccccgccaccgagaccggcggcagagaggccaccagcagccccagaccccagcccagagacagaagatggggcgacaccccccccggcagaaagcccggcagccccgtgtggggcgagggcagctacctgagcagctaccccacctgccccgcccaggcctggtgcagcagaagcgccctgagagcccccagcagcagcctgggcgccttcttcgccggcgacctgcccccccccctgcaggccggcgccgcctag

SEQ ID NO: 85920 - protein, 364 aa, Artificial Sequence
  derived and/or modified sequence
MPYQYPALTPEQKKELSDIAHRIVAPGKGILAADESTGSIAKRLQSIGTENTEENRRFYRQLLLTADDRVNPCIGGVILFHETLYQKADDGRPFPQVIKSKGGVVGIKVDKGVVPLAGTNGETTTQGLDGLSERCAQYKKDGADFAKWRCVLKIGEHTPSALAIMENANVLARYASICQQNGIVPIVEPEILPDGDHDLKRCQYVTEKVLAAVYKALSDHHIYLEGTLLKPNMVTPGHACTQKFSHEEIAMATVTALRRTVPPAVTGITFLSGGQSEEEASINLNAINKCPLLKPWALTFSYGRALQASALKAWGGKKENLKAAQEEYVKRALANSLACQGKYTPSGQAGAAASESLFVSNHAY

SEQ ID NO: 85921 - protein, 418 aa, Artificial Sequence
  derived and/or modified sequence
MARRKPEGSSFNMTHLSMAMAFSFPPVASGQLHPQLGNTQHQTELGKELATTSTMPYQYPALTPEQKKELSDIAHRIVAPGKGILAADESTGSIAKRLQSIGTENTEENRRFYRQLLLTADDRVNPCIGGVILFHETLYQKADDGRPFPQVIKSKGGVVGIKVDKGVVPLAGTNGETTTQGLDGLSERCAQYKKDGADFAKWRCVLKIGEHTPSALAIMENANVLARYASICQQNGIVPIVEPEILPDGDHDLKRCQYVTEKVLAAVYKALSDHHIYLEGTLLKPNMVTPGHACTQKFSHEEIAMATVTALRRTVPPAVTGITFLSGGQSEEEASINLNAINKCPLLKPWALTFSYGRALQASALKAWGGKKENLKAAQEEYVKRALANSLACQGKYTPSGQAGAAASESLFVSNHAY

SEQ ID NO: 85922 - DNA, 1257 bp, Artificial Sequence
  derived and/or modified sequence
atggccagaagaaagcccgagggcagcagcttcaacatgacccacctgagcatggccatggccttcagcttcccccccgtggccagcggccagctgcacccccagctgggcaacacccagcaccagaccgagctgggcaaggagctggccaccaccagcaccatgccctaccagtaccccgccctgacccccgagcagaagaaggagctgagcgacatcgcccacagaatcgtggcccccggcaagggcatcctggccgccgacgagagcaccggcagcatcgccaagagactgcagagcatcggcaccgagaacaccgaggagaacagaagattctacagacagctgctgctgaccgccgacgacagagtgaacccctgcatcggcggcgtgatcctgttccacgagaccctgtaccagaaggccgacgacggcagacccttcccccaggtgatcaagagcaagggcggcgtggtgggcatcaaggtggacaagggcgtggtgcccctggccggcaccaacggcgagaccaccacccagggcctggacggcctgagcgagagatgcgcccagtacaagaaggacggcgccgacttcgccaagtggagatgcgtgctgaagatcggcgagcacacccccagcgccctggccatcatggagaacgccaacgtgctggccagatacgccagcatctgccagcagaacggcatcgtgcccatcgtggagcccgagatcctgcccgacggcgaccacgacctgaagagatgccagtacgtgaccgagaaggtgctggccgccgtgtacaaggccctgagcgaccaccacatctacctggagggcaccctgctgaagcccaacatggtgacccccggccacgcctgcacccagaagttcagccacgaggagatcgccatggccaccgtgaccgccctgagaagaaccgtgccccccgccgtgaccggcatcaccttcctgagcggcggccagagcgaggaggaggccagcatcaacctgaacgccatcaacaagtgccccctgctgaagccctgggccctgaccttcagctacggcagagccctgcaggccagcgccctgaaggcctggggcggcaagaaggagaacctgaaggccgcccaggaggagtacgtgaagagagccctggccaacagcctggcctgccagggcaagtacacccccagcggccaggccggcgccgccgccagcgagagcctgttcgtgagcaaccacgcctactag

SEQ ID NO: 85923 - DNA, 1550 bp, Artificial Sequence
  derived and/or modified sequence
tccttcttaaaaaaaaccagggctccagagaatcagaacagccaccatcaccgcagggagtcaagggaggagggagattagagaaggagccagggagggtggcagggaggccacgtgatccgagtcccctcacccctttccttcccacaggtccctggccaaagatttatttctcttgacaaccaagggcctccgtctggatttccaaggaagaatttcctctgaagcaccggaacttgctactaccagcaccatgccctaccaatatccagcactgaccccggagcagaagaaggagctgtctgacatcgctcaccgcatcgtggcacctggcaagggcatcctggctgcagatgagtccactgggagcattgccaagcggctgcagtccattggcaccgagaacaccgaggagaaccggcgcttctaccgccagctgctgctgacagctgacgaccgcgtgaacccctgcattgggggtgtcatcctcttccatgagacactctaccagaaggcggatgatgggcgtcccttcccccaagttatcaaatccaagggcggtgttgtgggcatcaaggtagacaagggcgtggtccccctggcagggacaaatggcgagactaccacccaagggttggatgggctgtctgagcgctgtgcccagtacaagaaggacggagctgacttcgccaagtggcgttgtgtgctgaagattggggaacacaccccctcagccctcgccatcatggaaaatgccaatgttctggcccgttatgccagtatctgccagcagaatggcattgtgcccatcgtggagcctgagatcctccctgatggggaccatgacttgaagcgctgccagtatgtgaccgagaaggtgctggctgctgtctacaaggctctgagtgaccaccacatctacctggaaggcaccttgctgaagcccaacatggtcaccccaggccatgcttgcactcagaagttttctcatgaggagattgccatggcgaccgtcacagcgctgcgccgcacagtgccccccgctgtcactgggatcaccttcctgtctggaggccagagtgaggaggaggcgtccatcaacctcaatgccattaacaagtgccccctgctgaagccctgggccctgaccttctcctacggccgagccctgcaggcctctgccctgaaggcctggggcgggaagaaggagaacctgaaggctgcgcaggaggagtatgtcaagcgagccctggccaacagccttgcctgtcaaggaaagtacactccgagcggtcaggctggggctgctgccagcgagtccctcttcgtctctaaccacgcctattaagcggaggtgttcccaggctgcccccaacactccaggccctgccccctcccactcttgaagaggaggccgcctcctcggggctccaggctggcttgcccgcgctctttcttccctcgtgacagtggtgtgtggtgtcgtctgtgaatgctaagtccatcaccctttccggcacactgccaaataaacagctatttaaggggga

SEQ ID NO: 85924 - DNA, 2104 bp, Artificial Sequence
  derived and/or modified sequence
tcgcctccgcgcgccgctagttccgccgccttctcgcgctccctgcgtgtcctctcgatgccctttcctccgcctcccttacgcctgggccagtgacagggtgtcggctccgcgccgattcagcccgcgggcgaggcaggctaacgcacgactgcgcgatgtggcccctatggtgacacgcgctgcagccgcgaagaccggaagctggggcggccccgggccgcgcgcgctgggcctgggaggcgaaactcagcttccttcgtttccgacttttccatccgcgtcctccacttccccgttccgccctcccccattgccaacattctggctgagtcacggcgccccagagcgcgccaggctgggggaaaggagcagaagggagggccctagcgacccgcgggatgtggtccgagtcacgtccgaggggggtggggagggatcgtgttctcggcgcccgccccttcctagcgcggcctctgggctgcgcctctcgggggcggcccgtagcccagtccgtcgcctgccattggacgccgcccgctcctcgtaaaggaaaaagctcggcggagggcggagtggtgcctttaaaaggccgggcgccgccttccgcctgcccgcctcctgcgccgccccttccgaggctaaatcggctgcgttcctctcggaacgcgccgcagaaggggtcctggtgacgagtcccgcgttctctccttgaatccactcgccagcccgccgccctctgccgccgcaccctgcacacccgcccctctcctgtgccaggaacttgctactaccagcaccatgccctaccaatatccagcactgaccccggagcagaagaaggagctgtctgacatcgctcaccgcatcgtggcacctggcaagggcatcctggctgcagatgagtccactgggagcattgccaagcggctgcagtccattggcaccgagaacaccgaggagaaccggcgcttctaccgccagctgctgctgacagctgacgaccgcgtgaacccctgcattgggggtgtcatcctcttccatgagacactctaccagaaggcggatgatgggcgtcccttcccccaagttatcaaatccaagggcggtgttgtgggcatcaaggtagacaagggcgtggtccccctggcagggacaaatggcgagactaccacccaagggttggatgggctgtctgagcgctgtgcccagtacaagaaggacggagctgacttcgccaagtggcgttgtgtgctgaagattggggaacacaccccctcagccctcgccatcatggaaaatgccaatgttctggcccgttatgccagtatctgccagcagaatggcattgtgcccatcgtggagcctgagatcctccctgatggggaccatgacttgaagcgctgccagtatgtgaccgagaaggtgctggctgctgtctacaaggctctgagtgaccaccacatctacctggaaggcaccttgctgaagcccaacatggtcaccccaggccatgcttgcactcagaagttttctcatgaggagattgccatggcgaccgtcacagcgctgcgccgcacagtgccccccgctgtcactgggatcaccttcctgtctggaggccagagtgaggaggaggcgtccatcaacctcaatgccattaacaagtgccccctgctgaagccctgggccctgaccttctcctacggccgagccctgcaggcctctgccctgaaggcctggggcgggaagaaggagaacctgaaggctgcgcaggaggagtatgtcaagcgagccctggccaacagccttgcctgtcaaggaaagtacactccgagcggtcaggctggggctgctgccagcgagtccctcttcgtctctaaccacgcctattaagcggaggtgttcccaggctgcccccaacactccaggccctgccccctcccactcttgaagaggaggccgcctcctcggggctccaggctggcttgcccgcgctctttcttccctcgtgacagtggtgtgtggtgtcgtctgtgaatgctaagtccatcaccctttccggcacactgccaaataaacagctatttaagggggagtcggc

SEQ ID NO: 85925 - DNA, 1663 bp, Artificial Sequence
  derived and/or modified sequence
aaaaggccgggcgccgccttccgcctgcccgcctcctgcgccgccccttccgaggctaaatcggctgcgttcctctcggaacgcgccgcagaaggggtcctggtgacgagtcccgcgttctctccttgaatccactcgccagcccgccgccctctgccgccgcaccctgcacacccgcccctctcctgtgccaggcaaggtgaccccatggcaaggcgcaagccagaagggtccagcttcaacatgacccacctgtccatggctatggccttttcctttcccccagttgccagtgggcaactccaccctcagctgggcaacacccagcaccagacagagttaggaaaggaacttgctactaccagcaccatgccctaccaatatccagcactgaccccggagcagaagaaggagctgtctgacatcgctcaccgcatcgtggcacctggcaagggcatcctggctgcagatgagtccactgggagcattgccaagcggctgcagtccattggcaccgagaacaccgaggagaaccggcgcttctaccgccagctgctgctgacagctgacgaccgcgtgaacccctgcattgggggtgtcatcctcttccatgagacactctaccagaaggcggatgatgggcgtcccttcccccaagttatcaaatccaagggcggtgttgtgggcatcaaggtagacaagggcgtggtccccctggcagggacaaatggcgagactaccacccaagggttggatgggctgtctgagcgctgtgcccagtacaagaaggacggagctgacttcgccaagtggcgttgtgtgctgaagattggggaacacaccccctcagccctcgccatcatggaaaatgccaatgttctggcccgttatgccagtatctgccagcagaatggcattgtgcccatcgtggagcctgagatcctccctgatggggaccatgacttgaagcgctgccagtatgtgaccgagaaggtgctggctgctgtctacaaggctctgagtgaccaccacatctacctggaaggcaccttgctgaagcccaacatggtcaccccaggccatgcttgcactcagaagttttctcatgaggagattgccatggcgaccgtcacagcgctgcgccgcacagtgccccccgctgtcactgggatcaccttcctgtctggaggccagagtgaggaggaggcgtccatcaacctcaatgccattaacaagtgccccctgctgaagccctgggccctgaccttctcctacggccgagccctgcaggcctctgccctgaaggcctggggcgggaagaaggagaacctgaaggctgcgcaggaggagtatgtcaagcgagccctggccaacagccttgcctgtcaaggaaagtacactccgagcggtcaggctggggctgctgccagcgagtccctcttcgtctctaaccacgcctattaagcggaggtgttcccaggctgcccccaacactccaggccctgccccctcccactcttgaagaggaggccgcctcctcggggctccaggctggcttgcccgcgctctttcttccctcgtgacagtggtgtgtggtgtcgtctgtgaatgctaagtccatcaccctttccggcacactgccaaataaacagctatttaaggg

SEQ ID NO: 85926 - DNA, 2303 bp, Artificial Sequence
  derived and/or modified sequence
cctagcttggcgcggaatccgtgaattgcccgcggcccgagggtgcagctcccggactgactggctctgcccttccccatggacgcctcctctagcccgtggaatccaaccccggctcctgtcagcagccctcccctgctgctccccatccctgccatcgtcttcatcgctgtgggcatctatttgttgctgctgggtctagtcctgctgactaggaactgcctgctggcccagggctgctgcgcggacggtagctccccctgcaggaagcaaggttcctccgggcccccagactgctgctggacctgtgcagaagcctgcaactttcctctgcctagcccggcccacttcctggatgcttgctgcccccagcccaccagagctgactgggcacctcgctgcccccgctgctgcccactctgcgactgtgcctgtacgtgccagctccccgactgccagagcctcaactgtctctgcttcgagatcaagctccgatgaggacccagggcccctgccctctggggagcggccagcccccagggcccatgtgccctcctccctgaagagcctttccccacgccactggaaccacagatggcctgccgagcacccaggcctgggaactggaagtggcagcgcagggcctggctccctgcagggcaggactcttggccggctggacggcagctcctctggagggccagaaaagagaggggctagtgctcgggcaggtgccctggcttcccttcccctccacacgtcaacgattctatttgaagttgggcaggggggtggcgctgctcaccacacacaagtgttataggaggagtctggcccttgagtaccgggtacgcaggggtgcctcaaccacactccgtccacggactctccgttattttaggaggtccctggccaaagatttatttctcttgacaaccaagggcctccgtctggatttccaaggaagaatttcctctgaagcaccggaacttgctactaccagcaccatgccctaccaatatccagcactgaccccggagcagaagaaggagctgtctgacatcgctcaccgcatcgtggcacctggcaagggcatcctggctgcagatgagtccactgggagcattgccaagcggctgcagtccattggcaccgagaacaccgaggagaaccggcgcttctaccgccagctgctgctgacagctgacgaccgcgtgaacccctgcattgggggtgtcatcctcttccatgagacactctaccagaaggcggatgatgggcgtcccttcccccaagttatcaaatccaagggcggtgttgtgggcatcaaggtagacaagggcgtggtccccctggcagggacaaatggcgagactaccacccaagggttggatgggctgtctgagcgctgtgcccagtacaagaaggacggagctgacttcgccaagtggcgttgtgtgctgaagattggggaacacaccccctcagccctcgccatcatggaaaatgccaatgttctggcccgttatgccagtatctgccagcagaatggcattgtgcccatcgtggagcctgagatcctccctgatggggaccatgacttgaagcgctgccagtatgtgaccgagaaggtgctggctgctgtctacaaggctctgagtgaccaccacatctacctggaaggcaccttgctgaagcccaacatggtcaccccaggccatgcttgcactcagaagttttctcatgaggagattgccatggcgaccgtcacagcgctgcgccgcacagtgccccccgctgtcactgggatcaccttcctgtctggaggccagagtgaggaggaggcgtccatcaacctcaatgccattaacaagtgccccctgctgaagccctgggccctgaccttctcctacggccgagccctgcaggcctctgccctgaaggcctggggcgggaagaaggagaacctgaaggctgcgcaggaggagtatgtcaagcgagccctggccaacagccttgcctgtcaaggaaagtacactccgagcggtcaggctggggctgctgccagcgagtccctcttcgtctctaaccacgcctattaagcggaggtgttcccaggctgcccccaacactccaggccctgccccctcccactcttgaagaggaggccgcctcctcggggctccaggctggcttgcccgcgctctttcttccctcgtgacagtggtgtgtggtgtcgtctgtgaatgctaagtccatcaccctttccggcacactgccaaataaacagctatttaaggggg

SEQ ID NO: 85927 - DNA, 1539 bp, Artificial Sequence
  derived and/or modified sequence
ggagggcggagtggtgcctttaaaaggccgggcgccgccttccgcctgcccgcctcctgcgccgccccttccgaggctaaatcggctgcgttcctctcggaacgcgccgcagaaggggtcctggtgacgagtcccgcgttctctccttgaatccactcgccagcccgccgccctctgccgccgcaccctgcacacccgcccctctcctgtgccaggaacttgctactaccagcaccatgccctaccaatatccagcactgaccccggagcagaagaaggagctgtctgacatcgctcaccgcatcgtggcacctggcaagggcatcctggctgcagatgagtccactgggagcattgccaagcggctgcagtccattggcaccgagaacaccgaggagaaccggcgcttctaccgccagctgctgctgacagctgacgaccgcgtgaacccctgcattgggggtgtcatcctcttccatgagacactctaccagaaggcggatgatgggcgtcccttcccccaagttatcaaatccaagggcggtgttgtgggcatcaaggtagacaagggcgtggtccccctggcagggacaaatggcgagactaccacccaagggttggatgggctgtctgagcgctgtgcccagtacaagaaggacggagctgacttcgccaagtggcgttgtgtgctgaagattggggaacacaccccctcagccctcgccatcatggaaaatgccaatgttctggcccgttatgccagtatctgccagcagaatggcattgtgcccatcgtggagcctgagatcctccctgatggggaccatgacttgaagcgctgccagtatgtgaccgagaaggtgctggctgctgtctacaaggctctgagtgaccaccacatctacctggaaggcaccttgctgaagcccaacatggtcaccccaggccatgcttgcactcagaagttttctcatgaggagattgccatggcgaccgtcacagcgctgcgccgcacagtgccccccgctgtcactgggatcaccttcctgtctggaggccagagtgaggaggaggcgtccatcaacctcaatgccattaacaagtgccccctgctgaagccctgggccctgaccttctcctacggccgagccctgcaggcctctgccctgaaggcctggggcgggaagaaggagaacctgaaggctgcgcaggaggagtatgtcaagcgagccctggccaacagccttgcctgtcaaggaaagtacactccgagcggtcaggctggggctgctgccagcgagtccctcttcgtctctaaccacgcctattaagcggaggtgttcccaggctgcccccaacactccaggccctgccccctcccactcttgaagaggaggccgcctcctcggggctccaggctggcttgcccgcgctctttcttccctcgtgacagtggtgtgtggtgtcgtctgtgaatgctaagtccatcaccctttccggcacactgccaaataaacagctatttaagggggagtcggc

SEQ ID NO: 85928 - DNA, 2447 bp, Artificial Sequence
  derived and/or modified sequence
atgccgcgaacggcttctgggcggggccggtccctcggacgattggacctagcttggcgcggaatccgtgaattgcccgcggcccgagggtgcagctcccggactgactggctctgcccttccccatggacgcctcctctagcccgtggaatccaaccccggctcctgtcagcagccctcccctgctgctccccatccctgccatcgtcttcatcgctgtgggcatctatttgttgctgctgggtctagtcctgctgactaggaactgcctgctggcccagggctgctgcgcggacggtagctccccctgcaggaagcaaggttcctccgggcccccagactgctgctggacctgtgcagaagcctgcaactttcctctgcctagcccggcccacttcctggatgcttgctgcccccagcccaccagagctggcttccattctggtgatggagagagagaaataaccaggccattacaacagagggtgagaaatgacgtgctatggagcagcggttgctcagccctgcatgcgatcagaagcaggactgggcacctcgctgcccccgctgctgcccactctgcgactgtgcctgtacgtgccagctccccgactgccagagcctcaactgtctctgcttcgagatcaagctccgatgaggacccagggcccctgccctctggggagcggccagcccccagggcccatgtgccctcctccctgaagagcctttccccacgccactggaaccacagatggcctgccgagcacccaggcctgggaactggaagtggcagcgcagggcctggctccctgcagggcaggactcttggccggctggacggcagctcctctggagggccagaaaagagaggggctagtgctcgggtccctggccaaagatttatttctcttgacaaccaagggcctccgtctggatttccaaggaagaatttcctctgaagcaccggcaaggtgaccccatggcaaggcgcaagccagaagggtccagcttcaacatgacccacctgtccatggctatggccttttcctttcccccagttgccagtgggcaactccaccctcagctgggcaacacccagcaccagacagagttaggaaaggaacttgctactaccagcaccatgccctaccaatatccagcactgaccccggagcagaagaaggagctgtctgacatcgctcaccgcatcgtggcacctggcaagggcatcctggctgcagatgagtccactgggagcattgccaagcggctgcagtccattggcaccgagaacaccgaggagaaccggcgcttctaccgccagctgctgctgacagctgacgaccgcgtgaacccctgcattgggggtgtcatcctcttccatgagacactctaccagaaggcggatgatgggcgtcccttcccccaagttatcaaatccaagggcggtgttgtgggcatcaaggtagacaagggcgtggtccccctggcagggacaaatggcgagactaccacccaagggttggatgggctgtctgagcgctgtgcccagtacaagaaggacggagctgacttcgccaagtggcgttgtgtgctgaagattggggaacacaccccctcagccctcgccatcatggaaaatgccaatgttctggcccgttatgccagtatctgccagcagaatggcattgtgcccatcgtggagcctgagatcctccctgatggggaccatgacttgaagcgctgccagtatgtgaccgagaaggtgctggctgctgtctacaaggctctgagtgaccaccacatctacctggaaggcaccttgctgaagcccaacatggtcaccccaggccatgcttgcactcagaagttttctcatgaggagattgccatggcgaccgtcacagcgctgcgccgcacagtgccccccgctgtcactgggatcaccttcctgtctggaggccagagtgaggaggaggcgtccatcaacctcaatgccattaacaagtgccccctgctgaagccctgggccctgaccttctcctacggccgagccctgcaggcctctgccctgaaggcctggggcgggaagaaggagaacctgaaggctgcgcaggaggagtatgtcaagcgagccctggccaacagccttgcctgtcaaggaaagtacactccgagcggtcaggctggggctgctgccagcgagtccctcttcgtctctaaccacgcctattaagcggaggtgttcccaggctgcccccaacactccaggccctgccccctcccactcttgaagaggaggccgcctcctcggggctccaggctggcttgcccgcgctctttcttccctcgtgacagtggtgtgtggtgtcgtctgtgaatgctaagtccatcaccctttccggcacactgccaaataaacagctatttaagggggagtcggc

SEQ ID NO: 85929 - DNA, 1450 bp, Artificial Sequence
  derived and/or modified sequence
aaaagggcaggggtcattagagaagatcggggacacatgtggggcgggcaggagctgccttataaccagcccgggaacccctagctcactcgctgctgaccaggctctgccggctccttcggcctcgccgcaggaacttgctactaccagcaccatgccctaccaatatccagcactgaccccggagcagaagaaggagctgtctgacatcgctcaccgcatcgtggcacctggcaagggcatcctggctgcagatgagtccactgggagcattgccaagcggctgcagtccattggcaccgagaacaccgaggagaaccggcgcttctaccgccagctgctgctgacagctgacgaccgcgtgaacccctgcattgggggtgtcatcctcttccatgagacactctaccagaaggcggatgatgggcgtcccttcccccaagttatcaaatccaagggcggtgttgtgggcatcaaggtagacaagggcgtggtccccctggcagggacaaatggcgagactaccacccaagggttggatgggctgtctgagcgctgtgcccagtacaagaaggacggagctgacttcgccaagtggcgttgtgtgctgaagattggggaacacaccccctcagccctcgccatcatggaaaatgccaatgttctggcccgttatgccagtatctgccagcagaatggcattgtgcccatcgtggagcctgagatcctccctgatggggaccatgacttgaagcgctgccagtatgtgaccgagaaggtgctggctgctgtctacaaggctctgagtgaccaccacatctacctggaaggcaccttgctgaagcccaacatggtcaccccaggccatgcttgcactcagaagttttctcatgaggagattgccatggcgaccgtcacagcgctgcgccgcacagtgccccccgctgtcactgggatcaccttcctgtctggaggccagagtgaggaggaggcgtccatcaacctcaatgccattaacaagtgccccctgctgaagccctgggccctgaccttctcctacggccgagccctgcaggcctctgccctgaaggcctggggcgggaagaaggagaacctgaaggctgcgcaggaggagtatgtcaagcgagccctggccaacagccttgcctgtcaaggaaagtacactccgagcggtcaggctggggctgctgccagcgagtccctcttcgtctctaaccacgcctattaagcggaggtgttcccaggctgcccccaacactccaggccctgccccctcccactcttgaagaggaggccgcctcctcggggctccaggctggcttgcccgcgctctttcttccctcgtgacagtggtgtgtggtgtcgtctgtgaatgctaagtccatcaccctttccggcacactgccaaataaacagctatttaaggggg

SEQ ID NO: 85930 - DNA, 1238 bp, Artificial Sequence
  derived and/or modified sequence
gggaaataagagagaaaagaagagtaagaagaaatataagagccaccatgccataccagtatcccgcgcttacgcctgagcagaagaaggagctgtcggacatcgctcatcggatcgtcgcacccgggaagggcattctcgcagctgatgaatcgacgggttcaattgcgaagcgactccagtcgatcgggacagaaaataccgaagaaaacagacggttctatcgccagctgttgctcacagcggatgatcgagtgaacccttgcattggaggggtcattctgtttcacgagacactttatcagaaagccgacgatggacgcccgttccctcaagtgatcaagagcaaaggcggagtggtcgggatcaaagtggacaagggagtggtaccccttgctggaactaatggtgagacaacgacgcagggtttggacgggctcagcgaacggtgcgcccagtacaaaaaggatggagccgatttcgccaaatggaggtgtgtactcaagatcggtgagcacaccccgtccgcacttgcgattatggaaaatgcaaatgtcttggcgaggtacgcgtcaatttgtcagcaaaacggcattgtaccgatcgtcgaacccgagatcctcccggacggggatcatgacttgaaaaggtgtcagtatgtaacggagaaggtgctcgcagcggtgtataaggcgctgtcagaccaccacatctacttggagggtactcttctgaaaccaaacatggtaactcccggacatgcatgcacacaaaagttttcgcacgaagagatcgccatggctactgtcaccgccttgcgcagaaccgtgccgcctgcagtgacgggtatcacgtttttgtccggagggcagtcggaggaagaggcctcgatcaatctgaacgcaatcaacaagtgtcccctgctgaagccctgggcgcttacgttcagctacggacgggcgttgcaggcgagcgccctcaaagcgtggggagggaagaaagagaacttgaaagcggcgcaagaggagtacgtcaagagagctcttgcgaactccctcgcctgccaggggaaatacacaccgtcaggacaggccggtgccgcagcgtcggaatcactttttgtgtccaatcatgcgtattgataagctgccttctgcggggcttgccttctggccatgcccttcttctctcccttgcacctgtacctcttggtctttgaataaagcctgagtaggaag

SEQ ID NO: 85931 - DNA, 1257 bp, Artificial Sequence
  derived and/or modified sequence
atggcccggagaaaacccgaaggctctagttttaacatgacacacctttctatggctatggcgttttccttcccccctgtggcaagcggacagcttcaccctcagttggggaacacccagcaccagactgagctgggcaaggagctcgccacgaccagcacaatgccataccagtacccagctctgactcccgagcagaagaaggagctgagtgacattgcccaccgtatcgtggctccaggcaaaggcatactcgccgccgacgagagtaccgggtctattgccaaaagactccagagcatcggcaccgaaaacacagaagaaaaccgccgattttatcggcagcttctccttactgccgacgaccgcgtgaacccttgtatagggggggtgatcctattccacgagactttatatcagaaagctgatgacggcagaccattcccccaggtcatcaagtccaagggaggcgtggtggggattaaggtcgataagggcgttgtccccctcgcaggcactaatggagaaacgacgacacagggcctcgacggcctctccgagcggtgtgcgcagtacaagaaagacggtgccgacttcgctaaatggcggtgcgtactcaaaattggcgagcatacaccatccgctcttgcgattatggagaacgcaaacgtcctcgcgaggtacgcctccatttgtcagcagaacggaatcgtgcctatcgtggaacccgaaattttaccagatggggaccacgacctgaagcggtgtcaatatgttacagagaaggttctggccgccgtgtataaggcactgtcagaccaccacatatacctggagggaaccctgttgaagccaaacatggtgaccccgggccacgcttgcacacagaaattcagccatgaagagatcgccatggccaccgtgaccgctctcagacggaccgtacctccagctgtcaccgggattacattcctgagcgggggccagtccgaagaagaggctagtataaatttgaacgcaattaacaaatgcccccttctcaaaccatgggcgctcacatttagctacggacgagccctgcaggcttctgcacttaaagcctgggggggcaaaaaagagaacctcaaagcagcccaggaggagtacgtgaagagggccctcgctaactctctcgcatgccagggcaaatacacccccagcgggcaggcaggagcagccgcttcagaaagtctctttgtgtccaatcacgcatactag

SEQ ID NO: 85932 - DNA, 1257 bp, Artificial Sequence
  derived and/or modified sequence
atggcaagacgcaagccagagggcagcagcttcaatatgacacacttatccatggctatggccttttcatttccacctgtggcctcagggcagctgcacccccagttgggcaacacccagcaccagaccgaactcggcaaggagcttgctaccactagcaccatgccatatcagtatcctgcgctcacgccagagcagaagaaagaactttctgacatcgcccaccggatcgtggcccctgggaagggtattcttgcagctgacgaaagcaccggctcaattgccaaacgcctccagtctattgggacggaaaatacagaggagaatcgacgcttttatcggcaactcctgctgacagctgatgaccgggtgaacccatgtatcggcggtgttattctgttccatgagactctttatcagaaggcagatgacggccggccgtttcctcaggtgatcaagtctaaaggcggcgtggtcggcatcaaagtagacaaaggggtggtacccctcgctgggaccaacggtgaaacaaccacccagggactcgacggcctaagtgaacggtgcgcccagtataagaaggacggagccgattttgcaaagtggagatgcgttttgaagatcggggagcacactcccagcgctctcgccattatggagaatgccaatgtgctggcacgttacgcctcgatttgccaacagaacggcattgttccgatcgtggagcccgagatcctgccagacggggaccacgatctgaaacgctgccagtatgtgacagagaaagtactggcagccgtgtacaaagcccttagtgaccaccacatctacctggagggtaccctcctgaagcccaacatggtcacacccggtcatgcatgtacacaaaagttcagccacgaagagatcgcgatggctacagtgactgcactccgccgaactgtgccacccgccgtaactggcatcacatttcttagtggagggcagagtgaggaggaagcatcgatcaatcttaatgctattaataagtgcccgcttctgaagccatgggcccttacgttttcctacgggcgcgccctacaggcgagcgccctgaaagcctgggggggcaaaaaggaaaaccttaaggcagcacaggaggaatacgtgaaacgggccttagcaaattccctagcctgtcagggcaagtatacacctagtgggcaggcgggcgccgctgcgtccgagtcgctgtttgtgagcaaccatgcctactag

SEQ ID NO: 85933 - DNA, 1257 bp, Artificial Sequence
  derived and/or modified sequence
atggcccggaggaagccagagggcagcagcttcaacatgacccacctgtccatggccatggccttctccttcccccctgtggccagcggccagctgcacccccagctgggcaacacccagcaccagacagagctgggcaaggagctggccaccaccagcaccatgccctaccagtacccagccctgaccccagagcagaagaaggagctgagtgacatcgcccacagaattgtggcccctgggaagggcatcctggccgcagatgagagcacaggcagcatcgccaagaggctgcagagcattggaacagagaacacagaggagaacagacgcttctaccggcagctgctgctgacagcagatgacagagtgaacccctgcatcggcggcgtcatcctcttccacgagaccctgtaccagaaggcagatgatggccggcccttcccccaggtgatcaagagcaaaggaggagtggtgggcatcaaggtggacaagggcgtggtgcccctggccggcaccaacggggagaccaccacccagggcctggatggcctgtctgagcgctgtgcccagtacaagaaggatggagctgactttgccaagtggaggtgtgtgctgaagatcggggagcacacccccagcgccctggccatcatggagaatgccaacgtgctggcccgctatgccagcatctgccagcagaatggaattgtgcccatcgtggagcctgagatcctgcctgatggagaccatgacctgaagcgctgccagtatgtgacagagaaggtgctggccgctgtgtacaaggccctgagtgaccaccacatctacctggagggcaccctgctgaagcccaacatggtgaccccaggccacgcctgcacccagaagttcagccatgaggagatcgccatggccaccgtgacagccctgcggaggacagtgcccccagctgtgacaggcatcaccttcctgagcggcggccagagcgaggaggaggccagcatcaacctgaatgccatcaacaagtgccccctgctgaagccctgggccctgaccttctcctatggccgggccctgcaggccagcgccctgaaggcctggggcggcaagaaggagaacctgaaggccgcccaggaggagtatgtgaagagggccctggccaacagcctggcctgccagggcaagtacacccccagcggccaggccggggccgccgccagcgagagcctgtttgtgagcaaccacgcctactag

SEQ ID NO: 85934 - DNA, 1257 bp, Artificial Sequence
  derived and/or modified sequence
atggcccggcggaagcccgagggcagcagcttcaacatgacccacttgagtatggcaatggcctttagctttcctccggtagcaagcgggcagctgcatccacaactggggaatacacagcatcagactgaattgggcaaggagctggcgacaacttccaccatgccataccagtatccagccctcacacccgaacagaagaaagaactttctgatatcgcccatcggatagtggcccctgggaaaggtattctggcggccgatgagtctaccggatccatagccaaacggttgcagtctatcgggaccgaaaacacggaggagaaccgcaggttttatcgacagctgctacttaccgctgatgatagggtgaatccgtgcattggcggagtaatattattccatgaaactctttatcagaaggcagacgatggccggcccttcccccaggtcatcaagtctaagggtggggtggtgggtatcaaggtggataagggagtggtaccactcgcaggcaccaacggcgaaactaccacccaggggctggacggattgtcagaacgctgcgcccaatataaaaaagacggtgcggactttgccaagtggagatgcgtcctaaagatcggcgaacacacaccttccgctctcgcaattatggagaatgccaatgttctcgcgcggtatgcctcgatctgtcaacagaatggcatagtacccattgtagagcctgaaatcctgccagacggagatcatgatctgaagcggtgtcaatacgtaactgagaaggtcctcgccgcggtctacaaagctctgtccgatcaccatatctacctggaaggtacgttgctgaagccaaatatggtgacaccaggccatgcatgcacccagaagttcagccatgaagagatcgccatggcgactgtcacagccttacgcagaactgttccacccgctgtcaccggaatcactttcctgtccggcggccaaagtgaagaggaggcgtccattaacctcaacgccatcaataaatgccctctgcttaagccctgggctttaaccttttcctacgggcgtgcactgcaagctagtgccctcaaggcttgggggggcaagaaggaaaatctcaaagcggcacaagaggagtacgtaaagagggcccttgccaatagcctggcatgccagggtaaatacacaccatctggtcaagccggagcggcagcatcagagagtctgttcgtatctaatcacgcctattag

SEQ ID NO: 85935 - DNA, 1257 bp, Artificial Sequence
  derived and/or modified sequence
atggcccggcggaagcccgagggcagcagcttcaacatgacccacctgagcatggcgatggccttcagtttcccacccgtggcttcgggacaactgcacccccagctggggaacacccaacaccagacagaattaggcaaggaactggccaccacatcaaccatgccttatcagtaccccgcactgaccccagaacagaaaaaggagctgagcgacatagcccatagaatcgtggcccccggaaagggaatcctcgcggctgacgaatccactggatccatcgccaagcgactacaatccattggaacggagaacactgaggaaaatcggcgattttaccgacagctacttcttactgctgacgatcgcgtaaacccttgcattggaggcgttatcctgtttcatgaaacgctttaccagaaggctgacgatggtcgcccatttccgcaggtgatcaaaagtaaggggggagtggtcgggataaaagtagacaaaggcgttgtgccgctggctggcaccaatggcgagaccactacccaaggcttggacgggctcagtgagagatgcgcacagtacaagaaggatggcgccgatttcgcaaaatggcgatgcgtgctaaagatcggagagcatacgccctccgctctggctattatggagaatgctaacgtcctggcgcgctatgcgtccatttgtcagcagaatggtatcgtgcccattgtcgaaccggaaatacttccggacggtgaccacgatctgaaacggtgccagtacgttacggaaaaggtgttagcggcagtgtataaagctctgtccgatcaccacatctacttggaaggtaccctgctgaaacccaacatggtgacacctggacacgcctgtactcaaaagttttctcacgaagagatcgctatggctactgtcacagcccttcgaaggaccgtacccccagctgttaccggaataactttcttatcaggcggtcagtctgaggaagaagcctccatcaatcttaatgctataaacaagtgtcccctgttgaagccttgggcgctcacctttagttatggacgggccctgcaagcctccgcgttgaaagcctggggaggaaaaaaggagaatctgaaggcagcacaagaagagtatgtgaaacgggcactcgccaatagcctggcctgtcaaggaaaatacacgccctcaggccaggctggcgccgctgccagcgagtccctgttcgtgtcgaatcacgcgtactag

SEQ ID NO: 85936 - DNA, 1257 bp, Artificial Sequence
  derived and/or modified sequence
atggctcgtagaaagccagagggatctagtttcaacatgacccacctgtcaatggctatggcgttcagtttcccccctgtggcctctggccagttacacccccaacttgggaacacccaacaccagacagagttggggaaggaattggccactaccagcaccatgccttaccaataccccgctcttacaccagaacaaaaaaaggagttgagcgatatcgcccacaggattgtagctccaggtaaggggattctggcagccgatgagtcgactggtagcatagctaaacgcctgcagtctatcgggacggagaatactgaagaaaatcggcgtttttacagacagctgttactcaccgctgatgatcgggtgaatccatgtatcgggggtgtgattctgtttcatgaaaccctgtatcagaaggcagatgacgggcgaccattccctcaggttattaagtcaaaggggggagtagtcggcatcaaggtggataagggcgtggtcccccttgccggaacaaatggcgaaactacaacacaaggcctggatggattgtcagagcggtgcgcacagtacaagaaggacggagccgattttgccaagtggagatgtgttctgaaaatcggagagcatactccaagtgctctggcgatcatggaaaacgctaatgtacttgcacggtacgccagcatatgccagcagaacggtattgtgccaattgtggagcccgagatcctccctgatggtgatcacgacctgaaaaggtgtcagtatgtgactgaaaaagtgcttgccgctgtgtataaggctcttagtgatcaccacatctacctagaagggacacttctcaaaccaaatatggtgacccctgggcatgcctgtacccaaaaattttcacacgaggagatagcgatggcgaccgttactgcacttcggaggaccgtgccccctgcggtcacagggattacattcctctccggaggtcagagtgaggaagaagcgtctatcaatcttaatgcaattaataaatgcccattactgaaaccatgggctctgaccttctcctacggcagggccctgcaggcatccgcacttaaagcttggggcggtaagaaagaaaatctcaaggccgcacaggaagaatatgtgaagcgcgcactcgccaattccctggcgtgtcagggaaagtacacacccagtgggcaggctggggcagcagcctctgagtccctctttgtgtccaaccatgcctattag

SEQ ID NO: 85937 - DNA, 1257 bp, Artificial Sequence
  derived and/or modified sequence
atggccaggagaaagcccgaaggttctagctttaatatgactcacttgtctatggcaatggcctttagtttcccgcctgtcgcctccggccagctacaccctcagctcggcaacacacagcaccagacggaactcggaaaggagctagctaccacctctactatgccataccagtaccccgcactcacaccggaacaaaagaaggagcttagcgatatcgcccaccgcatagtggccccaggaaagggaatcctcgccgctgacgagtccacaggaagtattgccaagcggctacaatccatagggacggaaaatactgaagagaacagacggttttatagacagctgctcctgaccgccgacgacagagtcaacccctgtattggtggtgtgatcctctttcacgaaacactataccagaaggcagacgacggtcggccatttccacaggttatcaagagcaagggtggagttgtcggcataaaagtagataaaggcgtcgtgccactcgctggcaccaacggtgagactacaacgcagggtctggatggacttagtgaacgctgcgctcagtacaagaaggacggtgcagattttgctaaatggaggtgcgtcctgaagattggcgagcacacacctagtgccttggccattatggagaatgccaacgtcctggccaggtacgcctctatatgccaacagaacggaattgtgcccattgttgaacctgagattttgcctgacggcgatcacgatctgaaacgctgccagtacgtcactgaaaaggtcctcgctgctgtgtacaaggccctcagcgaccaccatatttacttggaaggaaccctcttgaagccgaatatggtaacacccggacatgcttgcacgcaaaagttctctcatgaggaaatcgccatggcaacggttactgctttaagaaggactgtccctcccgcagtaacaggaattacctttctgagcggcggacagtccgaggaggaagctagcatcaatcttaatgcgattaacaagtgtcctcttcttaaaccatgggcgctgaccttctcctacggcagagcgctacaggccagcgctttgaaggcttgggggggaaagaaggaaaacttaaaagctgcgcaagaagagtacgttaagagagctctcgctaattcactggcttgtcaggggaaatacacaccttctggccaggcaggagctgccgcttctgaatctctcttcgttagcaatcacgcgtattag

SEQ ID NO: 85938 - RNA, 1238 nt, Artificial Sequence
  derived and/or modified sequence
gggaaauaagagagaaaagaagaguaagaagaaauauaagagccaccaugccauaccaguaucccgcgcuuacgccugagcagaagaaggagcugucggacaucgcucaucggaucgucgcacccgggaagggcauucucgcagcugaugaaucgacggguucaauugcgaagcgacuccagucgaucgggacagaaaauaccgaagaaaacagacgguucuaucgccagcuguugcucacagcggaugaucgagugaacccuugcauuggaggggucauucuguuucacgagacacuuuaucagaaagccgacgauggacgcccguucccucaagugaucaagagcaaaggcggaguggucgggaucaaaguggacaagggagugguaccccuugcuggaacuaauggugagacaacgacgcaggguuuggacgggcucagcgaacggugcgcccaguacaaaaaggauggagccgauuucgccaaauggagguguguacucaagaucggugagcacaccccguccgcacuugcgauuauggaaaaugcaaaugucuuggcgagguacgcgucaauuugucagcaaaacggcauuguaccgaucgucgaacccgagauccucccggacggggaucaugacuugaaaaggugucaguauguaacggagaaggugcucgcagcgguguauaaggcgcugucagaccaccacaucuacuuggaggguacucuucugaaaccaaacaugguaacucccggacaugcaugcacacaaaaguuuucgcacgaagagaucgccauggcuacugucaccgccuugcgcagaaccgugccgccugcagugacggguaucacguuuuuguccggagggcagucggaggaagaggccucgaucaaucugaacgcaaucaacaaguguccccugcugaagcccugggcgcuuacguucagcuacggacgggcguugcaggcgagcgcccucaaagcguggggagggaagaaagagaacuugaaagcggcgcaagaggaguacgucaagagagcucuugcgaacucccucgccugccaggggaaauacacaccgucaggacaggccggugccgcagcgucggaaucacuuuuuguguccaaucaugcguauugauaagcugccuucugcggggcuugccuucuggccaugcccuucuucucucccuugcaccuguaccucuuggucuuugaauaaagccugaguaggaag

SEQ ID NO: 85939 - protein, 1354 aa, Artificial Sequence
  derived and/or modified sequence
MPEQERQITAREGASRKILSKLSLPTRAWEPAMKKSFAFDNVGYEGGLDGLGPSSQVATSTVRILGMTCQSCVKSIEDRISNLKGIISMKVSLEQGSATVKYVPSVVCLQQVCHQIGDMGFEASIAEGKAASWPSRSLPAQEAVVKLRVEGMTCQSCVSSIEGKVRKLQGVVRVKVSLSNQEAVITYQPYLIQPEDLRDHVNDMGFEAAIKSKVAPLSLGPIDIERLQSTNPKRPLSSANQNFNNSETLGHQGSHVVTLQLRIDGMHCMISQLEGVQQISVSLAEGTATVLYNPSVISPEELRAAIEDMGFEASVVSESCSTNPLGNHSAGNSMVQTTDGTPTSVQEVAPHTGRLPANHAPDILAKSPQSTRAVAPQKCFLQIKGMTCASCVSNIERNLQKEAGVLSVLVALMAGKAEIKYDPEVIQPLEIAQFIQDLGFEAAVMEDYAGSDGNIELTITGMTCASCVHNIESKLTRTNGITYASVALATSKALVKFDPEIIGPRDIIKIIEEIGFHASLAQRNPNAHHLDHKMEIKQWKKSFLCSLVFGIPVMALMIYMLIPSNEPHQSMVLDHNIIPGLSILNLIFFILCTFVQLLGGWYFYVQAYKSLRHRSANMDVLIVLATSIAYVYSLVILVVAVAEKAERSPVTFFDTPPMLFVFIALGRWLEHLAKSKTSEALAKLMSLQATEATVVTLGEDNLIIREEQVPMELVQRGDIVKVVPGGKFPVDGKVLEGNTMADESLITGEAMPVTKKPGSTVIAGSINAHGSVLIKATHVGNDTTLAQIVKLVEEAQMSKAPIQQLADRFSGYFVPFIIIMSTLTLVVWIVIGFIDFGVVQRYFPNPNKHISQTEVIIRFAFQTSITVLCIACPCSLGLATPTAVMVGTGVAAQNGILIKGGKPLEMAHKIKTVMFDKTGTITHGVPRVMRVLLLGDVATLPLRKVLAVVGTAEASSEHPLGVAVTKYCKEELGTETLGYCTDFQAVPGCGIGCKVSNVEGILAHSERPLSAPASHLNEAGSLPAEKDAVPQTFSVLIGNREWLRRNGLTISSDVSDAMTDHEMKGQTAILVAIDGVLCGMIAIADAVKQEAALAVHTLQSMGVDVVLITGDNRKTARAIATQVGINKVFAEVLPSHKVAKVQELQNKGKKVAMVGDGVNDSPALAQADMGVAIGTGTDVAIEAADVVLIRNDLLDVVASIHLSKRTVRRIRINLVLALIYNLVGIPIAAGVFMPIGIVLQPWMGSAAMAASSVSVVLSSLQLKCYKKPDLERYEAQAHGHMKPLTASQVSVHIGMDDRWRDSPRATPWDQVSYVSQVSLSSLTSDKPSRHSAAADDDGDKWSLLLNGRDEEQYI

SEQ ID NO: 85940 - DNA, 4065 bp, Artificial Sequence
  derived and/or modified sequence
atgcccgagcaggagagacagatcaccgccagagagggcgccagcagaaagatcctgagcaagctgagcctgcccaccagagcctgggagcccgccatgaagaagagcttcgccttcgacaacgtgggctacgagggcggcctggacggcctgggccccagcagccaggtggccaccagcaccgtgagaatcctgggcatgacctgccagagctgcgtgaagagcatcgaggacagaatcagcaacctgaagggcatcatcagcatgaaggtgagcctggagcagggcagcgccaccgtgaagtacgtgcccagcgtggtgtgcctgcagcaggtgtgccaccagatcggcgacatgggcttcgaggccagcatcgccgagggcaaggccgccagctggcccagcagaagcctgcccgcccaggaggccgtggtgaagctgagagtggagggcatgacctgccagagctgcgtgagcagcatcgagggcaaggtgagaaagctgcagggcgtggtgagagtgaaggtgagcctgagcaaccaggaggccgtgatcacctaccagccctacctgatccagcccgaggacctgagagaccacgtgaacgacatgggcttcgaggccgccatcaagagcaaggtggcccccctgagcctgggccccatcgacatcgagagactgcagagcaccaaccccaagagacccctgagcagcgccaaccagaacttcaacaacagcgagaccctgggccaccagggcagccacgtggtgaccctgcagctgagaatcgacggcatgcactgcatgatcagccagctggagggcgtgcagcagatcagcgtgagcctggccgagggcaccgccaccgtgctgtacaaccccagcgtgatcagccccgaggagctgagagccgccatcgaggacatgggcttcgaggccagcgtggtgagcgagagctgcagcaccaaccccctgggcaaccacagcgccggcaacagcatggtgcagaccaccgacggcacccccaccagcgtgcaggaggtggccccccacaccggcagactgcccgccaaccacgcccccgacatcctggccaagagcccccagagcaccagagccgtggccccccagaagtgcttcctgcagatcaagggcatgacctgcgccagctgcgtgagcaacatcgagagaaacctgcagaaggaggccggcgtgctgagcgtgctggtggccctgatggccggcaaggccgagatcaagtacgaccccgaggtgatccagcccctggagatcgcccagttcatccaggacctgggcttcgaggccgccgtgatggaggactacgccggcagcgacggcaacatcgagctgaccatcaccggcatgacctgcgccagctgcgtgcacaacatcgagagcaagctgaccagaaccaacggcatcacctacgccagcgtggccctggccaccagcaaggccctggtgaagttcgaccccgagatcatcggccccagagacatcatcaagatcatcgaggagatcggcttccacgccagcctggcccagagaaaccccaacgcccaccacctggaccacaagatggagatcaagcagtggaagaagagcttcctgtgcagcctggtgttcggcatccccgtgatggccctgatgatctacatgctgatccccagcaacgagccccaccagagcatggtgctggaccacaacatcatccccggcctgagcatcctgaacctgatcttcttcatcctgtgcaccttcgtgcagctgctgggcggctggtacttctacgtgcaggcctacaagagcctgagacacagaagcgccaacatggacgtgctgatcgtgctggccaccagcatcgcctacgtgtacagcctggtgatcctggtggtggccgtggccgagaaggccgagagaagccccgtgaccttcttcgacaccccccccatgctgttcgtgttcatcgccctgggcagatggctggagcacctggccaagagcaagaccagcgaggccctggccaagctgatgagcctgcaggccaccgaggccaccgtggtgaccctgggcgaggacaacctgatcatcagagaggagcaggtgcccatggagctggtgcagagaggcgacatcgtgaaggtggtgcccggcggcaagttccccgtggacggcaaggtgctggagggcaacaccatggccgacgagagcctgatcaccggcgaggccatgcccgtgaccaagaagcccggcagcaccgtgatcgccggcagcatcaacgcccacggcagcgtgctgatcaaggccacccacgtgggcaacgacaccaccctggcccagatcgtgaagctggtggaggaggcccagatgagcaaggcccccatccagcagctggccgacagattcagcggctacttcgtgcccttcatcatcatcatgagcaccctgaccctggtggtgtggatcgtgatcggcttcatcgacttcggcgtggtgcagagatacttccccaaccccaacaagcacatcagccagaccgaggtgatcatcagattcgccttccagaccagcatcaccgtgctgtgcatcgcctgcccctgcagcctgggcctggccacccccaccgccgtgatggtgggcaccggcgtggccgcccagaacggcatcctgatcaagggcggcaagcccctggagatggcccacaagatcaagaccgtgatgttcgacaagaccggcaccatcacccacggcgtgcccagagtgatgagagtgctgctgctgggcgacgtggccaccctgcccctgagaaaggtgctggccgtggtgggcaccgccgaggccagcagcgagcaccccctgggcgtggccgtgaccaagtactgcaaggaggagctgggcaccgagaccctgggctactgcaccgacttccaggccgtgcccggctgcggcatcggctgcaaggtgagcaacgtggagggcatcctggcccacagcgagagacccctgagcgcccccgccagccacctgaacgaggccggcagcctgcccgccgagaaggacgccgtgccccagaccttcagcgtgctgatcggcaacagagagtggctgagaagaaacggcctgaccatcagcagcgacgtgagcgacgccatgaccgaccacgagatgaagggccagaccgccatcctggtggccatcgacggcgtgctgtgcggcatgatcgccatcgccgacgccgtgaagcaggaggccgccctggccgtgcacaccctgcagagcatgggcgtggacgtggtgctgatcaccggcgacaacagaaagaccgccagagccatcgccacccaggtgggcatcaacaaggtgttcgccgaggtgctgcccagccacaaggtggccaaggtgcaggagctgcagaacaagggcaagaaggtggccatggtgggcgacggcgtgaacgacagccccgccctggcccaggccgacatgggcgtggccatcggcaccggcaccgacgtggccatcgaggccgccgacgtggtgctgatcagaaacgacctgctggacgtggtggccagcatccacctgagcaagagaaccgtgagaagaatcagaatcaacctggtgctggccctgatctacaacctggtgggcatccccatcgccgccggcgtgttcatgcccatcggcatcgtgctgcagccctggatgggcagcgccgccatggccgccagcagcgtgagcgtggtgctgagcagcctgcagctgaagtgctacaagaagcccgacctggagagatacgaggcccaggcccacggccacatgaagcccctgaccgccagccaggtgagcgtgcacatcggcatggacgacagatggagagacagccccagagccaccccctgggaccaggtgagctacgtgagccaggtgagcctgagcagcctgaccagcgacaagcccagcagacacagcgccgccgccgacgacgacggcgacaagtggagcctgctgctgaacggcagagacgaggagcagtacatctag

SEQ ID NO: 85941 - DNA, 4065 bp, Artificial Sequence
  derived and/or modified sequence
atgcctgagcaggagcgtcagatcactgctagggagggcgcctcccgcaagatattgagcaaattatcactgcccacccgcgcttgggagcccgctatgaagaagtcctttgccttcgacaatgtaggctatgaggggggactggacggcctgggtcccagtagtcaggtagccacaagcactgtgagaattctcggcatgacctgccagtcctgtgtgaagtccatagaagatcgaatctccaatcttaaaggtatcatcagcatgaaggtgagcttggaacaaggtagcgctaccgtgaagtacgtgccctctgtcgtgtgcttacagcaggtctgtcaccaaatcggcgacatggggttcgaggcctcaatcgctgaggggaaagcagccagttggccatcaaggagcctgcccgctcaagaagcggtggtaaagcttagggtggaaggtatgacctgccagagttgtgtttcgtcaattgagggaaaagtgcggaagttgcaaggtgtggttcgcgtgaaagtatcactttctaaccaggaagccgtgatcacctaccagccgtaccttattcagccggaggacttaagagaccacgttaatgacatgggattcgaagccgctatcaagtctaaggtagctcccctgtcactgggccccattgacatcgagcgcctgcagtctacgaatccaaaacgccccctcagctcagcgaatcagaatttcaacaatagcgaaactctgggtcaccaaggaagccacgtagtcacactgcagttgaggatagacggaatgcattgcatgatcagccagttggagggcgtgcagcagattagcgtcagcctggccgaaggcacggcaacagtgctgtataatccctcggtgatctcacccgaagagctgcgagccgcaatcgaggacatgggatttgaagcatcagtcgtttctgagagctgctctacaaaccctctcggaaaccactcggccgggaattctatggtgcagactacagatgggactcctacctccgtccaggaggtggcacctcacacaggtcggctcccggcaaatcacgccccggatatcctggctaaatccccccagtcaactcgggccgtggccccccagaaatgctttctgcaaatcaagggcatgacgtgcgcatcttgtgtgagcaacatagagcggaacctccaaaaagaagccggagtcctgtcagtgctggtggcccttatggccggtaaagcagaaataaagtatgaccccgaagtaattcagcctctggaaatcgctcaatttatacaggacctcggattcgaggccgcagttatggaggactacgctgggtccgatggaaacatcgagctcaccatcaccggcatgacctgcgcgtcttgcgtacacaatattgagtctaaacttacacggaccaatgggatcacgtacgcatccgtagcgctggctacttctaaggccctcgttaagttcgatccagagattataggccctcgagacatcattaaaatcatcgaagagatcggctttcatgcatcactggctcagaggaaccccaacgcccatcaccttgatcacaagatggaaatcaagcagtggaagaagagtttcctgtgctcgctagtgttcggcattcccgtaatggccctgatgatttacatgctgatcccgagtaacgaacctcatcaaagcatggttcttgatcataatatcatccctggtttgagtatactgaatctgattttttttattttatgtacctttgtccagctcctggggggctggtatttctatgtgcaggcctataagtctctcagacaccgttcagccaacatggatgtgttaattgtattggccacctctattgcgtacgtttacagtttggtcatattggtggtggcagtggcagagaaggcggagcgctcaccggtgaccttcttcgatacccctccaatgttatttgtgttcattgccctgggcagatggctcgaacatttggccaagtcaaaaacctctgaggcactcgcgaagcttatgtcgctgcaggccaccgaggctaccgtcgtgaccttgggggaagataaccttattattcgggaagagcaggttcccatggagctggtgcaaaggggagatatagtgaaggttgtgcccggaggaaagttcccagtcgacgggaaggttttggaaggcaatactatggctgacgagtccctcatcaccggggaggcaatgcccgtaaccaagaagccaggcagcaccgttatcgctggctctatcaatgcgcacggaagtgtgctgatcaaggctacccacgtcggaaacgatacaaccttagcccagatagtgaagcttgtcgaggaagcacagatgtccaaggcccccatccagcagcttgccgaccgattcagcggctatttcgtcccatttattattataatgtccactctgactctcgtagtgtggatcgtgattggctttatcgatttcggcgtagtgcagcggtattttcctaatccgaacaagcacatttctcagactgaggtgatcattagattcgcatttcaaacttcaattacggtgctgtgcattgcttgcccctgttccctaggactcgccactcctacggccgtcatggttggtaccggcgtagccgcgcaaaacggcatcttaatcaaaggcgggaaaccgcttgaaatggctcacaagatcaagacggtgatgtttgataagactgggaccatcacacatggagtgccccgggttatgcgggtacttcttctcggcgatgtcgctaccttacctctgcggaaagtgttggcagtggtggggaccgcagaggcatccagtgagcaccccttgggggttgccgtcactaaatattgtaaggaggaactcgggaccgagacccttggttactgtactgactttcaggctgtccctggatgcggcataggctgcaaagtgagtaatgtagaaggcatcctcgcccactcggaaagacccctctccgccccagcttctcacctgaatgaggcaggcagcctgccagcagaaaaggatgctgtgccccagactttcagcgtcctgattggaaaccgggagtggctcaggagaaacggtcttaccattagctctgacgttagtgatgccatgacagaccacgagatgaagggccagacggcaattctagtcgccatagacggcgttctttgcgggatgatagctattgccgacgcagttaaacaagaggccgccctggccgtccacaccctgcagtctatgggcgtggatgtggtcctgattactggtgacaaccggaaaactgcacgcgccattgccacacaggttggcataaataaagtctttgccgaggtgctgccaagtcataaagttgccaaggtccaggagctgcaaaataagggtaagaaagtggcaatggtcggagatggcgttaacgactcacccgcactggctcaagctgacatgggcgttgccattgggaccggcactgatgtcgctatagaggctgcagatgtggtgctgatccggaatgatctgctggacgttgtcgcatctatacatctgagcaaaagaacagtgcgtagaatacggattaatctagtcctggcgttaatttataatctcgtaggcataccgatcgctgccggtgtgtttatgcccattggaattgtcctgcagccgtggatgggctccgccgcgatggccgcatcatccgtaagcgtcgtcttatcttccctccagctgaagtgctataaaaaacccgacctcgaacgctatgaggcccaggctcacggtcatatgaagccactcaccgccagccaggtctccgtgcacataggcatggatgacaggtggagggactcaccaagggcaaccccatgggaccaggttagttacgtgagtcaggtctctttgtcaagcctgacaagtgataagccatcccggcactcggcggcggcggacgatgatggggataagtggagtctgctgctgaacggtcgagatgaagagcagtatatatag

SEQ ID NO: 85942 - DNA, 6304 bp, Artificial Sequence
  derived and/or modified sequence
ttcccggacccctgtttgctttagagccgagccgcgccgatgccctcacactctgcgcctcctctcccgggactttaacaccccgctctcctccaccgaccaggtgaccttttgctctgagccagatcagagaagaattcggtgtccgtgcgggacgatgcctgagcaggagagacagatcacagccagagaaggggccagtcggaaaatcttatctaagctttctttgcctacccgtgcctgggaaccagcaatgaagaagagttttgcttttgacaatgttggctatgaaggtggtctggatggcctgggcccttcttctcaggtggccaccagcacagtcaggatcttgggcatgacttgccagtcatgtgtgaagtccattgaggacaggatttccaatttgaaaggcatcatcagcatgaaggtttccctggaacaaggcagtgccactgtgaaatatgtgccatcggttgtgtgcctgcaacaggtttgccatcaaattggggacatgggcttcgaggccagcattgcagaaggaaaggcagcctcctggccctcaaggtccttgcctgcccaggaggctgtggtcaagctccgggtggagggcatgacctgccagtcctgtgtcagctccattgaaggcaaggtccggaaactgcaaggagtagtgagagtcaaagtctcactcagcaaccaagaggccgtcatcacttatcagccttatctcattcagcccgaagacctcagggaccatgtaaatgacatgggatttgaagctgccatcaagagcaaagtggctcccttaagcctgggaccaattgatattgagcggttacaaagcactaacccaaagagacctttatcttctgctaaccagaattttaataattctgagaccttggggcaccaaggaagccatgtggtcaccctccaactgagaatagatggaatgcattgcatgatctcccaactggaaggggtgcagcaaatatcggtgtctttggccgaagggactgcaacagttctttataatccctctgtaattagcccagaagaactcagagctgctatagaagacatgggatttgaggcttcagtcgtttctgaaagctgttctactaaccctcttggaaaccacagtgctgggaattccatggtgcaaactacagatggtacacctacatctgtgcaggaagtggctccccacactgggaggctccctgcaaaccatgccccggacatcttggcaaagtccccacaatcaaccagagcagtggcaccgcagaagtgcttcttacagatcaaaggcatgacctgtgcatcctgtgtgtctaacatagaaaggaatctgcagaaagaagctggtgttctctccgtgttggttgccttgatggcaggaaaggcagagatcaagtatgacccagaggtcatccagcccctcgagatagctcagttcatccaggacctgggttttgaggcagcagtcatggaggactacgcaggctccgatggcaacattgagctgacaatcacagggatgacctgcgcgtcctgtgtccacaacatagagtccaaactcacgaggacaaatggcatcacttatgcctccgttgcccttgccaccagcaaagcccttgttaagtttgacccggaaattatcggtccacgggatattatcaaaattattgaggaaattggctttcatgcttccctggcccagagaaaccccaacgctcatcacttggaccacaagatggaaataaagcagtggaagaagtctttcctgtgcagcctggtgtttggcatccctgtcatggccttaatgatctatatgctgatacccagcaacgagccccaccagtccatggtcctggaccacaacatcattccaggactgtccattctaaatctcatcttctttatcttgtgtacctttgtccagctcctcggtgggtggtacttctacgttcaggcctacaaatctctgagacacaggtcagccaacatggacgtgctcatcgtcctggccacaagcattgcttatgtttattctctggtcatcctggtggttgctgtggctgagaaggcggagaggagccctgtgacattcttcgacacgccccccatgctctttgtgttcattgccctgggccggtggctggaacacttggcaaagagcaaaacctcagaagccctggctaaactcatgtctctccaagccacagaagccaccgttgtgacccttggtgaggacaatttaatcatcagggaggagcaagtccccatggagctggtgcagcggggcgatatcgtcaaggtggtccctgggggaaagtttccagtggatgggaaagtcctggaaggcaataccatggctgatgagtccctcatcacaggagaagccatgccagtcactaagaaacccggaagcactgtaattgcggggtctataaatgcacatggctctgtgctcattaaagctacccacgtgggcaatgacaccactttggctcagattgtgaaactggtggaagaggctcagatgtcaaaggcacccattcagcagctggctgaccggtttagtggatattttgtcccatttatcatcatcatgtcaactttgacgttggtggtatggattgtaatcggttttatcgattttggtgttgttcagagatactttcctaaccccaacaagcacatctcccagacagaggtgatcatccggtttgctttccagacgtccatcacggtgctgtgcattgcctgcccctgctccctggggctggccacgcccacggctgtcatggtgggcaccggggtggccgcgcagaacggcatcctcatcaagggaggcaagcccctggagatggcgcacaagataaagactgtgatgtttgacaagactggcaccattacccatggcgtccccagggtcatgcgggtgctcctgctgggggatgtggccacactgcccctcaggaaggttctggctgtggtggggactgcggaggccagcagtgaacaccccttgggcgtggcagtcaccaaatactgtaaagaggaacttggaacagagaccttgggatactgcacggacttccaggcagtgccaggctgtggaattgggtgcaaagtcagcaacgtggaaggcatcctggcccacagtgagcgccctttgagtgcaccggccagtcacctgaatgaggctggcagccttcccgcagaaaaagatgcagtcccccagaccttctctgtgctgattggaaaccgtgagtggctgaggcgcaacggtttaaccatttctagcgatgtcagtgacgctatgacagaccacgagatgaaaggacagacagccatcctggtggctattgacggtgtgctctgtgggatgatcgcaatcgcagacgctgtcaagcaggaggctgccctggctgtgcacacgctgcagagcatgggtgtggacgtggttctgatcacgggggacaaccggaagacagccagagctattgccacccaggttggcatcaacaaagtctttgcagaggtgctgccttcgcacaaggtggccaaggtccaggagctccagaataaagggaagaaagtcgccatggtgggggatggggtcaatgactccccggccttggcccaggcagacatgggtgtggccattggcaccggcacggatgtggccatcgaggcagccgacgtcgtccttatcagaaatgatttgctggatgtggtggctagcattcacctttccaagaggactgtccgaaggatacgcatcaacctggtcctggcactgatttataacctggttgggatacccattgcagcaggtgtcttcatgcccatcggcattgtgctgcagccctggatgggctcagcggccatggcagcctcctctgtgtctgtggtgctctcatccctgcagctcaagtgctataagaagcctgacctggagaggtatgaggcacaggcgcatggccacatgaagcccctgacggcatcccaggtcagtgtgcacataggcatggatgacaggtggcgggactcccccagggccacaccatgggaccaggtcagctatgtcagccaggtgtcgctgtcctccctgacgtccgacaagccatctcggcacagcgctgcagcagacgatgatggggacaagtggtctctgctcctgaatggcagggatgaggagcagtacatctgatgacttcaggcaggcgggccggggcagggacttgcctccactcaccacaagctgagcaggacagccagcagcaggatgggctgagctagcctccagctttggggacttccgctccctggatatgtccagtcatcctgccctgcagcacgcggccttgtctgggtgcagctgggcttggcctggagaggacggccctgcctgcctcttggcctcacgggaccgtcagcatgggctttgtcttggactctagtccttggctggactgtagaaggtgagaggcgagtcaccctcctcacagacctctgcttggagtatttaggatgactgctgtgaaatggagaacagtttcatcaggaccaaaaaacctcactgggcctttccagagaactgcagacctcactgtcagggtctttctgatgacgcctgtctgtgtgcatcatgtttctgagaccacagtttacctcaggtgtgcctgttgctttcttcctgcatagtctgttcctttcttcgtacatagtctgttccttttctctcctgtgtgcttgtcagtggggacccctcgcaaccctgcctgtcacctgggagggtgggaccaatgtccttgtggtctttgctgctgctctcaggcgcttctccaatgctctggagtgtgcatttcagcttgaacctgcttcctggctcacacatccccagccagggagcttgccacactcttcttcaagttgaggagagttcttttttgcttaaagcccccttctccatggagtgttggcttctcaatagagtgttgttgctgaccagctggagtgagggcctcagagcctgacctgagagtccgtactcggcttcctgtggggtgtaggttctcgcgattcaggacgtccttccatatccctgcccagcctgtggtgcttgaaacgtttgccccatgggaaacgtatgtgtgcaggagcctccctgcacggcccaaggggcttcgttttcagtcttctgactgtcacctcgtggggttcagtagagaattcatgtgactagcgcctggccttgtgtggcttggaggaaatggtactgcccaaataggaggaaaacacagcctccctgagcctgcattctgcacgctgcccaggggcttcagaaaaggagtggccacagcaccccgaagggagcatctgtttacctggcagtggctctcagagcagcagaacgggttcagttttagactctgaagttggttgtgattgacagaaccctttgggagcaaactagtagagttggattaaattctgggtgaaacccttttctcccacacaaaatagttttagtgatttttttcattgtccattacttgccaggggcagttttagcagcacttttgatagattacgtctaatcctcccaaccaaccagcagggtagctattactgtccacattttacaggcaaggaaacaggctccaagaggctgaggactttgcccaggatgacatagccaatggacaagcagtgtctgtcagctgtgaaggcttcactcttattgtccttctaccttgaatagaagttttcctgataagaataaacgaggaaaaggtccttgcctcctggaagaacaaatctaccaggtgatctattcattgtttcaactcagaatgcacttgattcaggaggtcatctgaccttcaccttggatggttagtttcactttttacatatagtttttgcagggttttattttataaaatccaagcgcgctgttgattgtgttttccttgttttcagcccccccactccagcccgcagcacatttccgctgtccgtcagtaattgtgtcctctctttatgcttgcttggggaatgttgttttctgactaggctgatcattatctaaagaatctaattctgttgatttttaaaacttttaggaccataaacgttgtgttcatatatggacatggaaatatttatataattttatagaaaataaccttttagatggtcaaagtgtaaggagtttttttgtcagataatcatttctacttcaaaaacatttcatgcaatattagaataaagttcctgtcattcctct

SEQ ID NO: 85943 - DNA, 4065 bp, Artificial Sequence
  derived and/or modified sequence
atgcctgagcaggagcggcagatcacagcccgggagggcgccagcaggaagatcctgagcaagctgagcctgcccacccgggcctgggagcccgccatgaagaagagctttgcctttgacaacgtgggctatgagggcggcctggatggcctgggccccagcagccaggtggccaccagcacagtgcgcatcctgggcatgacctgccagagctgtgtgaagagcattgaagatcgcatcagcaacctgaagggcatcatctccatgaaggtgtccctggagcagggcagcgccaccgtgaagtatgtgcccagcgtggtgtgcctgcagcaggtgtgccaccagatcggggacatgggctttgaggccagcattgctgagggcaaggccgcctcctggcccagccgcagcctgcctgcccaggaggccgtggtgaagctgcgggtggagggcatgacctgccagagctgtgtgagcagcattgagggcaaggtgaggaagctgcagggcgtggtgcgggtgaaggtgtccctgagcaaccaggaggccgtcatcacctaccagccctacctgatccagcctgaggacctgcgggaccacgtgaatgacatgggctttgaggccgccatcaagagcaaggtggcccccctgagcctgggccccatcgacatcgagcggctgcagagcaccaaccccaagaggcccctgagcagcgccaaccagaacttcaacaacagcgagaccctgggccaccagggcagccacgtggtgaccctgcagctgagaattgatggcatgcactgcatgatcagccagctggagggcgtgcagcagatctctgtgtccctggccgagggcacagccaccgtgctgtacaaccccagcgtcatcagccctgaggagctgcgggccgccatcgaggacatgggctttgaggcctctgtggtgtctgagagctgcagcaccaaccccctgggcaaccacagcgctggcaacagcatggtgcagaccacagatggcacccccacctctgtgcaggaggtggccccccacacaggccgcctgcctgccaaccacgccccagacatcctggccaagagcccccagagcaccagggctgtggccccccagaagtgcttcctgcagatcaagggcatgacctgtgccagctgtgtgagcaacattgaaagaaacctgcagaaggaggccggcgtgctgtctgtgctggtggccctgatggccggcaaggccgagatcaagtatgaccctgaggtgatccagcccctggagatcgcccagttcatccaggacctgggctttgaggccgctgtgatggaggactatgccggcagtgatggcaacatcgagctgaccatcaccggcatgacctgtgccagctgtgtgcacaacatcgagagcaagctgaccaggaccaacggcatcacctacgcctctgtggccctggccaccagcaaggccctggtgaagtttgatcctgagatcatcggcccccgggacatcatcaagatcatcgaggagatcggcttccacgccagcctggcccagaggaaccccaatgcccaccacctggaccacaagatggagatcaagcagtggaagaagagcttcctgtgcagcctggtgtttggcatccctgtgatggccctgatgatctacatgctgatccccagcaatgagccccaccagagcatggtgctggaccacaacatcatccctggcctgagcatcctgaacctgatcttcttcatcctgtgcacctttgtgcagctgctgggcggctggtacttctacgtgcaggcctacaagagcctgcggcacaggtctgccaacatggatgtgctgattgtgctggccaccagcatcgcctacgtgtacagcctggtgatcctggtggtggccgtggccgagaaggccgagaggagccctgtgaccttctttgacaccccacccatgctgtttgtgttcatcgccctgggccgctggctggagcacctggccaagagcaagaccagcgaggccctggccaagctgatgagcctgcaggccacagaggccaccgtggtgaccctgggggaggacaacctgatcatccgggaggagcaggtgcccatggagctggtgcagagaggagacatcgtgaaggtggtgcctgggggcaagtttcctgtggatggcaaggtgctggagggcaacaccatggctgatgagagcctcatcactggagaggccatgcctgtgaccaagaagccaggcagcacagtgattgctggcagcatcaatgcccacggctctgtgctgatcaaggccacccacgtgggcaatgacaccaccctggcccagatcgtgaagctggtggaggaggcccagatgagcaaggcccccatccagcagctggccgaccgcttcagcggctactttgtgcccttcatcatcatcatgagcaccctgaccctggtggtgtggatcgtgattggcttcatcgactttggagtggtgcagcgctacttccccaaccccaacaagcacatcagccagacagaggtgatcatccgctttgccttccagaccagcatcaccgtgctgtgcatcgcctgcccctgcagcctgggcctggccacccccacagctgtgatggtgggcaccggggtggccgcccagaatggcatcctgatcaagggcggcaagcccctggagatggcccacaagatcaagacagtgatgtttgacaagacaggcaccatcacccatggagtgccccgggtgatgagggtgctgctgctgggagatgtggccaccctgcccctgaggaaggtgctggccgtggtgggcacagctgaggccagcagcgagcaccccctgggcgtggccgtgaccaagtactgcaaggaggagctgggcacagagaccctgggctactgcacagacttccaggccgtgcccggctgcggcatcggctgcaaggtgtccaatgtggagggcatcctggcccacagcgagcggcccctgagcgccccagccagccacctgaatgaagctggcagcctgcctgctgagaaggatgctgtgccccagaccttctctgtgctgattggcaaccgggagtggctgcggagaaatggcctgaccatcagcagtgatgtgtctgatgccatgacagaccacgagatgaagggccagacagccatcctggtggccattgatggagtgctgtgtggcatgattgccatcgcagatgctgtgaagcaggaggccgccctggccgtgcacaccctgcagagcatgggcgtggatgtggtgctgatcactggagacaacaggaagacagcccgggccatcgccacccaggtgggcatcaacaaggtgtttgctgaggtgctgcccagccacaaggtggccaaggtgcaggagctgcagaacaagggcaagaaggtggccatggtgggagatggagtgaatgacagccctgccctggcccaggccgacatgggcgtggccatcggcactggaacagatgtggccattgaagctgctgatgtggtgctgatcagaaatgacctgctggatgtggtggccagcatccacctgagcaagaggacagtgcggcgcatccgcatcaacctggtgctggccctgatctacaacctggtgggcatccccatcgctgctggggtcttcatgcccatcggcatcgtgctgcagccctggatgggcagcgctgccatggccgccagctctgtgtctgtggtgctgagcagcctgcagctgaagtgctacaagaagccagacctggagagatatgaggcccaggcccacggccacatgaagcccctgacagccagccaggtgtctgtgcacatcggcatggatgaccgctggagggacagcccccgggccaccccctgggaccaggtgtcctatgtgtcccaggtgtccctgagcagcctgaccagtgacaagcccagccgccacagcgctgctgctgatgatgatggagacaagtggagcctgctgctgaatggaagagatgaggagcagtacatctag

SEQ ID NO: 85944 - DNA, 4065 bp, Artificial Sequence
  derived and/or modified sequence
atgcccgagcaggagcggcagatcaccgcccgggagggcgccagccgcaaaatactgagcaagctctcactcccaactagagcatgggaacccgcgatgaagaaatcgttcgcattcgataatgtgggctatgaaggggggctggatggacttggcccaagctcacaggttgccacatctaccgtacgcattctcggaatgacatgccagtcctgtgtcaagtccattgaagatcggatatcaaacttgaagggaatcatatcaatgaaagttagcctggaacagggctcagccaccgtaaagtacgtaccttctgttgtctgcctccagcaggtttgccaccagataggtgacatgggatttgaagcctcaatagccgagggtaaggcagcctcttggccttcacgctccttgcccgctcaggaggcggtggtaaagctgagagttgagggaatgacctgccagtcttgtgtcagctcgattgaaggcaaagttaggaagctgcagggcgtggtccgcgttaaggtctcactgtcaaaccaggaggctgttatcacataccagccatacctgattcaaccagaagaccttagagatcacgtcaacgacatgggctttgaagcggctattaagagcaaggttgcacccttatccctggggccaatcgacatcgagaggctccagtccactaatcctaaacgacctctatccagtgctaaccagaacttcaacaatagcgagactctgggtcatcagggtagccatgtggtgactctccagcttcggattgatggtatgcattgtatgatcagtcagctcgaaggtgtgcaacagatttctgtcagcttggctgaggggacagccacggtcctctataacccctccgtgattagccctgaggagctgcgtgctgcaatcgaagacatgggtttcgaggcatcagtcgtctccgaatcctgttctacgaatccattgggcaaccattcggcaggaaactcaatggtgcagactacggatgggacacctacgtccgtccaggaggtggccccccatacagggcgcttacccgcaaaccacgcacctgacatactcgccaaatccccgcaaagtacgagggctgtcgcccctcagaaatgtttcctccagatcaaaggaatgacatgtgcatcgtgcgtgtccaacattgaacgtaatctgcagaaggaggcgggggtcctgtctgtcctggtggccctgatggctggtaaagctgaaatcaagtacgatccagaagtgattcagcccctcgaaatcgctcagtttattcaggacttaggctttgaagcagcagtgatggaagactacgctggcagtgatggaaacatcgagcttaccattaccggaatgacatgtgccagctgcgtgcataacattgaatccaagctgaccaggaccaatggtatcacgtatgcgagcgtggctctagctacttcgaaagctctcgtcaagttcgaccccgagattatcgggccccgagacatcattaagattatcgaggagatcggatttcatgcctctttggctcagaggaatcctaatgcccatcacttggatcacaagatggagatcaagcagtggaaaaagtcatttctgtgctccctggtgttcggaatcccggtgatggcactgatgatttacatgctcataccttctaacgagccccatcaaagtatggttctggatcataacataatacctggcctctcaattctaaacctcatctttttcatactctgtactttcgtccaactcttgggcggatggtatttttacgttcaggcgtacaagtccctgcgccacagaagcgcaaatatggatgttcttattgttctagctacttcgatcgcatacgtctatagtctggtgatactggtcgttgccgtggctgaaaaggctgagcgctctcccgtcactttctttgataccccgccgatgctctttgtatttatcgccctgggaaggtggctcgagcatttggccaaaagcaagacatctgaagccctagctaaacttatgtctctgcaggccactgaagctactgtcgtgaccctgggagaggataacctgatcatacgggaagagcaggttccaatggagctggttcagagaggggatatcgttaaagtggtgcctggaggaaagtttcccgtagacgggaaagtcttagagggcaataccatggccgatgaatcactaatcactggcgaggccatgcccgtgactaagaagcctggctcaacagtcattgcaggctctataaacgcccatggaagtgtcctcatcaaagccacacatgtggggaacgacactaccttggcccagatcgtcaagctggtggaggaggcccagatgtccaaggcacccatacagcagctcgctgaccgcttctcgggatactttgttccctttattatcatcatgagtactttgaccttagtagtatggatcgttattgggtttattgacttcggcgtggtccagcgatacttccccaaccctaataaacacatcagtcaaacagaggttatcattcgatttgcattccagacttccatcactgtgctgtgcatagcctgtccttgctccctgggtctggctacccctaccgcggtgatggtggggacaggtgtggctgctcagaacggcatcctcattaaagggggaaaaccgttagagatggctcataagatcaagactgtgatgttcgacaagaccgggacaatcactcatggagtgccccgtgtcatgcgggttcttctgctgggggatgtagcgaccctgcctctgagaaaggtgctggcagttgtgggcacagctgaggcaagctctgagcatccactgggagtagctgtcacaaaatattgcaaagaagagctgggaaccgaaactctcgggtattgcaccgattttcaggctgtacctggctgtggaatcggatgcaaagtatcgaatgtagaaggcatcctggcacattcagagaggcctcttagcgcacccgcctctcatctaaacgaggccggatctctgcccgctgagaaggacgccgttccccagacattttcagtacttataggcaatcgcgaatggctgcgcaggaacggtctgacgattagcagcgatgtgagtgatgctatgactgatcacgagatgaaaggccagaccgcaatactggtggctatagatggtgtgctatgcgggatgatcgctatagctgatgcggtgaaacaggaggcggcactggctgttcataccctgcaaagcatgggcgtcgatgtggtgcttattaccggagacaaccggaagactgctagagcaatagccacacaggttggcatcaataaagtgtttgccgaagttctgcccagtcacaaggttgctaaggtccaggagcttcagaacaagggaaagaaagtcgctatggtaggcgatggggttaacgatagtcctgctttagcccaggcggacatgggagtcgccatcggaacaggaactgatgtagctattgaagccgcagatgtagtgctaattcgcaatgacttgctggacgtggtggcttctattcacctatctaaacgcacagtaagacgcattagaattaacctcgttctcgcacttatctacaacttggttgggatacctatagccgccggtgtctttatgccgattggaatcgtcttgcagccctggatgggctccgcagccatggccgcctcgtcagtgagcgtggtactctcctcactgcaactcaaatgctacaagaagcccgacttggagcgttacgaagcgcaggcacatggccatatgaagccactgaccgcgtcccaggtgagcgtgcacattggtatggacgatcggtggcgtgattctccaagggccactccctgggatcaggtgtcttacgtgagccaggtttctttatcctcgttaacgtctgacaagccttcccgccattccgccgccgccgatgatgatggcgataaatggtcgctgctgttgaacggcagggacgaggagcagtacatatag

SEQ ID NO: 85945 - DNA, 4065 bp, Artificial Sequence
  derived and/or modified sequence
atgccggagcaagaacgtcaaattacggcacgagaaggagcctcgagaaaaatcttgagcaaactctcccttccaactagggcatgggagccagccatgaagaagagtttcgcctttgataacgtgggttacgaaggcggtcttgatggtctgggaccttcaagccaggtggcaacctctacagttcgcattcttggcatgacctgtcagagctgcgttaagagcatcgaggacaggatctcaaacttaaaaggaattatttcaatgaaagttagcctcgagcagggaagtgctaccgtcaagtatgttccatctgtggtgtgtcttcagcaggtctgtcatcagattggagacatgggcttcgaggctagcatagcagaagggaaggcggctagctggccaagccgcagtttacccgctcaggaggcagtggtgaaactcagggtcgagggaatgacttgtcagagctgcgtgtcttccatcgaagggaaggtgagaaaactgcagggtgtcgtgcgagttaaagtgagcctctccaaccaagaggccgttattacctatcagccttacctgatacagccagaagacctgcgggaccacgtgaacgacatgggtttcgaggctgctatcaaaagcaaggtggccccactgtctctgggaccaattgacatcgagaggctgcagagtactaacccaaaaaggcccctgtcaagtgcaaaccagaactttaacaactcggagaccctcggccatcaggggtcccatgttgttacactgcaactgagaattgacggcatgcactgcatgatatcccagctggaaggagtgcaacaaatcagcgtctcactcgcagagggaacagctaccgttctgtataatccgagcgtgatcagtcctgaagaattgagagctgctatcgaagacatgggctttgaagcttccgtggtgagcgagtcatgttcaaccaatccgctcggcaaccacagcgcaggcaactcgatggtccagaccacagacggaacacccacaagtgtgcaggaggtggccccacataccgggagactgcccgctaatcatgctcccgatatcttggccaagtcacctcagagcactagggccgtggctccccagaagtgttttttacagattaaagggatgacttgcgcatcctgtgtctccaatatagagaggaacttgcagaaggaggctggagtcctgagcgtgctggttgccctgatggcgggaaaggccgagatcaaatatgacccagaagtcatccaacccttagagatcgcccagttcatccaagacttaggctttgaggccgctgtaatggaggactatgcgggttccgatggcaacattgagctgaccataacaggcatgacctgcgcgtcttgcgtgcacaacattgagagcaagctgacgagaactaatggaataacatacgctagcgtcgcgctggccacctctaaagctctggtgaaatttgatcccgaaatcattggccctcgagatatcattaagattatcgaggagattggctttcacgctagtctcgcccagagaaaccctaatgcacaccacctcgaccacaaaatggagatcaaacagtggaagaagtcattcctttgcagtttggtgtttggcatccctgtcatggcacttatgatctacatgctgatacccagcaacgagcctcaccaatccatggtgctggatcataacatcataccaggcctttctattctgaacctgattttttttatattatgcacgtttgtccaattgctcggtggctggtacttctacgtccaggcttataaaagcctgcgccacaggtccgcgaatatggacgtgcttatagttctggccacttcgatcgcttacgtatactctctggtgattctggtagttgctgtggcagagaaggcagagcgatcccctgtgaccttctttgatacgcctcccatgctgtttgtgttcattgcgctgggacgatggctggaacatctggccaagtcgaaaaccagcgaggcactggctaagctgatgtcactgcaggccactgaagccaccgtggtgactctgggtgaggataatctcattatacgtgaagagcaagtcccgatggagcttgtgcagcgaggcgacatcgtcaaagtagtccccggagggaaatttccagttgacggaaaggtgctggagggaaacactatggcggatgaaagcctcattaccggagaggcaatgccggtgacaaagaaacctggttctacagtgatcgccggaagcattaatgcacacggctcagttctgattaaggccacacatgtggggaatgacaccacactggcgcagatcgtgaagctagtggaggaggcacagatgagcaaagctccaatccagcagttagcggatcgcttcagtggttatttcgtaccttttattattattatgtccaccttgacattggtggtgtggattgtaatcggctttatagactttggagtagtacagaggtattttccaaaccccaacaagcacatcagccaaaccgaggtaattatccgtttcgcttttcaaacctcaatcactgtgctttgtatcgcttgtccatgctccctgggactagctactcctacagcagtcatggtcggtaccggagtagcagcgcaaaacggcatactgatcaaaggcggaaagccgctggagatggctcacaaaattaaaacagtaatgttcgataaaactgggaccataactcatggggtgccacgcgtgatgagggttctgttactgggagacgtggcaactctgccgctgagaaaggttctcgcagtggtgggcactgcagaagcatcttccgaacatccactgggtgtggcagtcacgaagtactgtaaagaagagcttggcacagagaccttgggctactgtacggatttccaggccgttccgggttgcggaatcggatgcaaggtgtccaatgttgaaggaatcttggcacactccgaacgcccactgtcagcaccagcctcacatctaaacgaggccggatctttacctgctgagaaggacgccgtgcctcaaacattctctgtgttgatcggcaacagggagtggctgcgacgcaacgggctcacgatatccagcgatgttagcgatgccatgaccgaccacgaaatgaaaggccaaaccgctatcctggtcgctattgatggagttctgtgtggaatgatcgccatcgccgatgccgtgaagcaagaggccgctctagccgtccacaccttgcagagcatgggagtggacgtggtcctgatcacgggcgataataggaaaactgcacgcgctatcgctacacaggtgggtattaataaggttttcgcagaggtcctcccatctcataaggtagctaaagtgcaggaactccaaaacaagggaaagaaagttgccatggttggagatggagtcaatgactcgcctgccctggctcaagctgatatgggggtcgccatcggtactggaacggatgtggcaattgaggcagccgacgtggtgcttatcagaaacgacctgttggacgtggtggcctcaatccatctgtctaaacgcactgtgcgtcgaatcaggatcaatctagtgctggctctgatttataatcttgtcgggatcccaatcgccgctggagtatttatgccaatcggcatcgttttacagccctggatggggtccgctgccatggctgcatcctccgtttctgttgtgctatccagcctgcagctgaagtgctacaaaaagcctgatcttgagcgatacgaagctcaggcacatggccatatgaaacccctcactgcttctcaagtgtctgtgcacatcggcatggacgacagatggcgtgattcaccccgtgcaaccccatgggaccaagtgagctatgttagtcaggtctccctatcgtccttaaccagtgacaaacccagcagacactccgcagccgctgacgatgacggagataagtggtctttactgttaaacggaagggacgaagagcagtatatttag

SEQ ID NO: 85946 - DNA, 4065 bp, Artificial Sequence
  derived and/or modified sequence
atgccagaacaggaaagacaaattacagcaagggaaggcgcgtcacgcaaaatcctcagcaagcttagtcttccaactcgcgcatgggaacctgctatgaaaaagtcttttgcattcgacaatgtgggttacgagggtgggttagacggactgggcccttcctcccaggtggcaacaagtacagtacgaatcctcggcatgacctgtcagtcttgtgtgaagtctattgaagaccgcatttccaacctgaaggggattattagcatgaaagtgagcctagagcaagggtcggccaccgtcaagtatgtgccaagcgtggtatgccttcagcaggtgtgtcatcagattggagacatgggatttgaagcctctatcgccgaaggcaaggccgccagttggcctagtcgaagcctacctgcgcaggaggctgtggtgaagctgagggttgaaggaatgacatgtcagtcatgtgtcagctctatcgaagggaaggtgagaaaacttcagggagtggtccgggtgaaggtgtcgctgagtaaccaggaggccgtaattacataccagccatacctgatccagcccgaagacctgcgagatcacgttaacgacatggggttcgaggctgccattaagtcaaaagtggccccactatcccttggacccattgatatcgagcgcctccagtccaccaatccaaaacggcccctgagttccgccaaccagaattttaataactccgaaacccttggacaccaaggaagtcatgttgtgaccctgcagctgcgaatcgatggcatgcattgcatgatatcacagttggaaggggttcagcagatctctgtgtctctcgccgaagggactgcaacggtcttatacaatccgtcagtcatttctccagaggaattgagagctgcaatcgaagatatggggtttgaagcaagcgtggtctcagaatcttgttcaactaaccccctgggaaatcatagcgcaggcaacagcatggtccaaacaactgacgggacccccacctcagtccaggaagttgctccacacaccggcaggttgccagccaatcacgccccagatattttggcaaaaagtccgcagagcacccgagctgtcgccccacaaaagtgtttcttgcagataaaggggatgacttgcgcctcttgcgtgagcaacatagaaaggaacttgcaaaaggaagccggtgtcctatcagtgctcgtggcgctgatggccggcaaagccgaaatcaagtacgaccccgaggtcatacagccgctggagattgcccaattcatccaagacctcggctttgaagcggctgtgatggaggactatgcaggtagcgacgggaacatcgagcttacgattaccggcatgacatgcgcctcatgtgtgcacaacattgagtccaaattgacaaggacaaacggaattacatacgcatctgtagccttggcaacttctaaagcactggttaagtttgaccccgagataattggacctagggacattatcaagatcatcgaagagatcggattccacgcctcattggcacaacgcaatcccaacgcacaccatttggaccacaaaatggagatcaagcagtggaaaaagagttttctgtgtagccttgtcttcggaattccagtgatggcccttatgatatatatgctgattccgagtaacgaaccgcaccagagcatggtcttggatcacaacatcatccctggactgtcaatcctgaacttgatatttttcatcctgtgcactttcgtccagttgcttggcgggtggtatttctatgttcaagcttataagtccctacgccaccggtcggctaatatggacgtcttgatcgtcctcgctactagtatcgcatatgtgtactctctggtgatactggtggtagcagtcgcagaaaaggctgagagaagcccagtgacattttttgatactcccccaatgctatttgtgtttatcgcattaggacggtggttagagcatctagctaagtccaaaacctcagaggccttagccaaactcatgtccctgcaagctacagaagctaccgtagtgacgctgggagaagataatctcataatcagggaggaacaggtgcccatggagctagttcagaggggagacattgtcaaagtggtgccgggagggaagttccccgtggatggcaaagttctcgagggtaatactatggctgacgaatctctaattactggcgaagccatgcccgtgaccaagaagcctggttctaccgtgattgccggatcgattaacgcccacgggtcagtcctgatcaaggcgacccatgttggaaacgatacaacgctcgcccagatcgtcaagctggttgaagaggcccaaatgtctaaagcacctattcagcagctggcagatagattcagtggatattttgtgcctttcatcatcataatgtcaacattaaccctggttgtttggatagtcattggctttatcgattttggggtggtacagcgctactttcccaaccccaataaacatatttctcagacggaagtgataatcagatttgcattccagactagcattacagttctgtgtatcgcttgcccgtgttccctagggctcgcaactcccaccgctgttatggtgggcacgggagtagccgcccagaatggcattctgatcaaaggagggaaaccacttgagatggcacacaagatcaaaacagtaatgtttgacaaaacaggaactataactcatggcgttccacgggtgatgcgggtgctgttgcttggggatgtcgccacgttgcctctcaggaaagtgctagctgtcgtcgggacagccgaagcgtcaagtgagcacccactgggagtggcggttactaaatactgcaaagaagagcttgggacagagaccctgggctactgtactgactttcaagctgtgcctggatgtgggattggctgtaaagtgagtaacgtggaagggatactggcccacagcgagcgtcccctgagtgcaccagcttcccacttgaatgaggcagggtcactccccgcagaaaaagatgccgttccccagaccttctcagtgctgatcgggaacagagaatggctgaggagaaatggtctcactatcagcagcgacgtgtctgacgccatgacggatcatgaaatgaaggggcaaacagccatccttgtagcgattgacggagtgttatgtggcatgattgcgatcgctgacgctgtaaaacaagaggcagcactagccgtacacaccctgcaaagcatgggggtggatgtcgttctcatcacaggagataaccggaagactgcccgtgctatcgccactcaagtcgggattaacaaggtttttgcagaagtgttgccctcacataaggttgcgaaagtgcaggaacttcagaataagggcaagaaggtggccatggtaggagacggggttaatgactccccagcactggcacaggccgatatgggggttgctatcgggactggcacggatgtagccatcgaagcagcagatgttgtgttgattcgcaacgacctgctggacgtggtggccagtattcacctgtctaagaggaccgtgagacggatccgaattaatttggtgttagccctgatctataatctggtaggaattcccatcgctgcaggcgtgttcatgccaattggaatcgtgctacaaccttggatggggtccgcagcaatggcagctagttccgtttcagtggttttgagttctcttcagctgaaatgttataagaaacccgacctggagcgctacgaagcccaggctcatgggcatatgaagcccctgactgcttctcaggtgtcagtacacataggcatggatgaccgatggcgagatagcccaagagctaccccctgggatcaggtctcctacgtgtcccaagtatctctcagttcacttacttcagacaaaccaagcaggcacagtgcagcggccgacgatgacggcgacaagtggtccctgttactcaacggccgcgatgaggagcaatacatttag

SEQ ID NO: 85947 - DNA, 4065 bp, Artificial Sequence
  derived and/or modified sequence
atgccagaacaggaaagacaaattacagcaagggaaggcgcgtcacgcaaaatcctcagcaagcttagtcttccaactcgcgcatgggaacctgctatgaaaaagtcttttgcattcgacaatgtgggttacgagggtgggttagacggactgggcccttcctcccaggtggcaacaagtacagtacgaatcctcggcatgacctgtcagtcttgtgtgaagtctattgaagaccgcatttccaacctgaaggggattattagcatgaaagtgagcctagagcaagggtcggccaccgtcaagtacgtgcccagcgtcgtgtgtctccaacaggtatgtcatcaaataggggacatgggattcgaggcctctatcgcagaggggaaagctgcgtcctggccatccagatctttgcctgctcaggaagcagtcgtgaaacttcgagtggagggcatgacgtgccaatcatgtgtttctagcattgaaggaaaggtgcgcaaattgcagggggtcgtcagagttaaagtaagcctgtctaatcaggaagctgtcattacctatcaaccatacctgattcagccagaggacctcagggatcacgtaaatgacatgggattcgaggcagcaattaaatctaaggtcgcaccactatcactgggccccatcgacatcgaacgactgcagagtacaaatccaaaacgccctttaagttcagcaaaccaaaacttcaacaatagcgagactttaggccaccaggggagtcacgtggttaccctccagttaaggattgatggaatgcactgcatgatttcccagcttgaaggggtgcagcagattagtgtgtctctggcagagggaaccgcaacagttttatacaatccttctgtgattagccctgaagaattgcgggctgccattgaagacatgggatttgaagcttccgtggtctccgaatcttgcagtactaaccctctgggtaatcatagcgccggaaattccatggtccaaacaaccgatgggactcctacaagtgttcaagaagtcgctcctcacactggacgcctgcctgctaaccacgctcccgatattcttgccaaatctccccagtcgacaagggcggtggcaccccagaagtgtttcttacagattaaagggatgacttgcgccagctgcgtgtctaatatagaacggaatctgcagaaagaggctggcgtcctttcagttctggttgccctgatggccggaaaagccgagataaaatatgacccagaggtgattcaaccacttgaaatcgcacagtttattcaggacctgggatttgaggcggccgtgatggaggattatgcaggaagcgacggcaatatcgaattgacaatcacaggaatgacttgcgcctcctgcgtgcacaatatagagagtaagctgacccgcacaaatggaatcacctacgcctctgttgccctcgctacctcgaaagcactagttaaatttgaccccgagatcattggaccacgggatatcattaaaatcattgaagagataggattccatgcatcacttgcccagagaaacccaaacgctcatcacttggatcacaaaatggagatcaagcaatggaagaagtcatttctgtgctccttggtgtttggcattccggtgatggccctgatgatatatatgcttattccatcaaatgaacctcatcaatcaatggtactcgatcataacattatccctggcctcagtatcttgaatctcatctttttcattctttgtacctttgtgcagctccttggagggtggtatttctatgtgcaagcctacaagtcattaaggcatcgctccgcgaatatggacgtgctaattgtgctcgccacttctatcgcttacgtttattcgcttgtcatcttggttgtagcggttgcagagaaagccgaacgatctcccgtcacatttttcgataccccacccatgctcttcgtgttcattgctcttggtagatggctggagcaccttgccaaatcaaaaaccagcgaagctctggccaagttgatgtcactgcaagccaccgaagccaccgtggtgactcttggggaagataatctcattatccgagaagagcaggtgccaatggagctagtccagcgcggcgacattgtgaaagttgtaccaggagggaagtttccagttgacggcaaggtactggaaggaaacactatggctgatgaaagtctgatcaccggcgaggctatgccagtcactaagaagccggggagtacagtaattgctgggtctattaacgcgcacggttccgttctgattaaagcaacgcacgttggtaacgacacaactctggcacaaatagtaaagctcgtggaagaggctcaaatgtctaaggcccccatccaacagctcgcggatagattcagcgggtacttcgtgcccttcattataattatgagtactctaacattggtggtgtggatagtcattggcttcatcgatttcggggtggtgcagcgatattttcctaatccgaacaaacacatctcccagactgaggttatcatccgttttgcctttcagacctctatcacggtcctctgcatagcctgcccatgtagcctaggcctggctacccctactgcggtaatggtcggtactggtgtagcagcccagaatggaatattaattaaaggagggaagccgctggaaatggctcataaaatcaagacggttatgttcgacaagactggtactatcactcatggagttccaagggtaatgcgagtcttacttttaggagatgtcgccacactaccactcaggaaggtcctcgccgttgttggcaccgcagaggcctcgtcggaacaccctcttggcgtcgcagtcacaaaatattgtaaggaggaactcgggacagagacattgggatactgcacggatttccaggctgttcccgggtgtgggattggctgcaaggtgtcaaatgtcgaaggcatactggcccacagcgagcgtcccctgagtgcaccagcttcccacttgaatgaggcagggtcactccccgcagaaaaagatgccgttccccagaccttctcagtgctgatcgggaacagagaatggctgaggagaaatggtctcactatcagcagcgacgtgtctgacgccatgacggatcatgaaatgaaggggcaaacagccatccttgtagcgattgacggagtgttatgtggcatgattgcgatcgctgacgctgtaaaacaagaggcagcactagccgtacacaccctgcaaagcatgggtgtggacgtcgtgctcatcacgggcgacaatcgtaagaccgctagagccattgcaactcaagtcggtatcaacaaggtcttcgccgaagtccttccctcacataaggtagcgaaggtacaagagctgcagaacaaaggcaaaaaagtggcaatggtgggtgatggcgtaaacgattctccagctctcgctcaggctgatatgggggtggctataggaaccgggacagacgtagctatcgaagccgcagatgttgtgctgattagaaatgacctacttgatgttgtagcctcaatacatctgtctaagcgaactgtgcgtaggattaggattaacctggtactcgctctgatttataacctggtaggaatcccgatagcggcgggggtattcatgccgataggtatcgtgttacaaccatggatgggatcagccgccatggctgcttcttctgtatcagtggtattgtcctctctgcagctgaaatgctacaaaaaacctgacctcgaaagatacgaagctcaggcccacggacacatgaaacctctgaccgcctcccaagtcagcgtgcatattgggatggacgatcgctggagggatagtccgcgcgccacaccctgggatcaagtctcttacgtgagccaagtgtccctatcttctctcacatccgataaaccttccagacattcagccgccgccgatgatgacggagacaagtggtcccttttgctaaacggacgggatgaagagcagtacatctag

SEQ ID NO: 85948 - RNA, 4065 nt, Artificial Sequence
  derived and/or modified sequence
augccagaacaggaaagacaaauuacagcaagggaaggcgcgucacgcaaaauccucagcaagcuuagucuuccaacucgcgcaugggaaccugcuaugaaaaagucuuuugcauucgacaauguggguuacgaggguggguuagacggacugggcccuuccucccagguggcaacaaguacaguacgaauccucggcaugaccugucagucuugugugaagucuauugaagaccgcauuuccaaccugaaggggauuauuagcaugaaagugagccuagagcaagggucggccaccgucaaguaugugccaagcgugguaugccuucagcaggugugucaucagauuggagacaugggauuugaagccucuaucgccgaaggcaaggccgccaguuggccuagucgaagccuaccugcgcaggaggcuguggugaagcugaggguugaaggaaugacaugucagucaugugucagcucuaucgaagggaaggugagaaaacuucagggagugguccgggugaaggugucgcugaguaaccaggaggccguaauuacauaccagccauaccugauccagcccgaagaccugcgagaucacguuaacgacaugggguucgaggcugccauuaagucaaaaguggccccacuaucccuuggacccauugauaucgagcgccuccaguccaccaauccaaaacggccccugaguuccgccaaccagaauuuuaauaacuccgaaacccuuggacaccaaggaagucauguugugacccugcagcugcgaaucgauggcaugcauugcaugauaucacaguuggaagggguucagcagaucucugugucucucgccgaagggacugcaacggucuuauacaauccgucagucauuucuccagaggaauugagagcugcaaucgaagauaugggguuugaagcaagcguggucucagaaucuuguucaacuaacccccugggaaaucauagcgcaggcaacagcaugguccaaacaacugacgggacccccaccucaguccaggaaguugcuccacacaccggcagguugccagccaaucacgccccagauauuuuggcaaaaaguccgcagagcacccgagcugucgccccacaaaaguguuucuugcagauaaaggggaugacuugcgccucuugcgugagcaacauagaaaggaacuugcaaaaggaagccgguguccuaucagugcucguggcgcugauggccggcaaagccgaaaucaaguacgaccccgaggucauacagccgcuggagauugcccaauucauccaagaccucggcuuugaagcggcugugauggaggacuaugcagguagcgacgggaacaucgagcuuacgauuaccggcaugacaugcgccucaugugugcacaacauugaguccaaauugacaaggacaaacggaauuacauacgcaucuguagccuuggcaacuucuaaagcacugguuaaguuugaccccgagauaauuggaccuagggacauuaucaagaucaucgaagagaucggauuccacgccucauuggcacaacgcaaucccaacgcacaccauuuggaccacaaaauggagaucaagcaguggaaaaagaguuuucuguguagccuugucuucggaauuccagugauggcccuuaugauauauaugcugauuccgaguaacgaaccgcaccagagcauggucuuggaucacaacaucaucccuggacugucaauccugaacuugauauuuuucauccugugcacuuucguccaguugcuuggcgggugguauuucuauguucaagcuuauaagucccuacgccaccggucggcuaauauggacgucuugaucguccucgcuacuaguaucgcauauguguacucucuggugauacuggugguagcagucgcagaaaaggcugagagaagcccagugacauuuuuugauacucccccaaugcuauuuguguuuaucgcauuaggacggugguuagagcaucuagcuaaguccaaaaccucagaggccuuagccaaacucaugucccugcaagcuacagaagcuaccguagugacgcugggagaagauaaucucauaaucagggaggaacaggugcccauggagcuaguucagaggggagacauugucaaaguggugccgggagggaaguuccccguggauggcaaaguucucgaggguaauacuauggcugacgaaucucuaauuacuggcgaagccaugcccgugaccaagaagccugguucuaccgugauugccggaucgauuaacgcccacgggucaguccugaucaaggcgacccauguuggaaacgauacaacgcucgcccagaucgucaagcugguugaagaggcccaaaugucuaaagcaccuauucagcagcuggcagauagauucaguggauauuuugugccuuucaucaucauaaugucaacauuaacccugguuguuuggauagucauuggcuuuaucgauuuuggggugguacagcgcuacuuucccaaccccaauaaacauauuucucagacggaagugauaaucagauuugcauuccagacuagcauuacaguucuguguaucgcuugcccguguucccuagggcucgcaacucccaccgcuguuauggugggcacgggaguagccgcccagaauggcauucugaucaaaggagggaaaccacuugagauggcacacaagaucaaaacaguaauguuugacaaaacaggaacuauaacucauggcguuccacgggugaugcgggugcuguugcuuggggaugucgccacguugccucucaggaaagugcuagcugucgucgggacagccgaagcgucaagugagcacccacugggaguggcgguuacuaaauacugcaaagaagagcuugggacagagacccugggcuacuguacugacuuucaagcugugccuggaugugggauuggcuguaaagugaguaacguggaagggauacuggcccacagcgagcguccccugagugcaccagcuucccacuugaaugaggcagggucacuccccgcagaaaaagaugccguuccccagaccuucucagugcugaucgggaacagagaauggcugaggagaaauggucucacuaucagcagcgacgugucugacgccaugacggaucaugaaaugaaggggcaaacagccauccuuguagcgauugacggaguguuauguggcaugauugcgaucgcugacgcuguaaaacaagaggcagcacuagccguacacacccugcaaagcauggggguggaugucguucucaucacaggagauaaccggaagacugcccgugcuaucgccacucaagucgggauuaacaagguuuuugcagaaguguugcccucacauaagguugcgaaagugcaggaacuucagaauaagggcaagaagguggccaugguaggagacgggguuaaugacuccccagcacuggcacaggccgauauggggguugcuaucgggacuggcacggauguagccaucgaagcagcagauguuguguugauucgcaacgaccugcuggacgugguggccaguauucaccugucuaagaggaccgugagacggauccgaauuaauuugguguuagcccugaucuauaaucugguaggaauucccaucgcugcaggcguguucaugccaauuggaaucgugcuacaaccuuggaugggguccgcagcaauggcagcuaguuccguuucagugguuuugaguucucuucagcugaaauguuauaagaaacccgaccuggagcgcuacgaagcccaggcucaugggcauaugaagccccugacugcuucucaggugucaguacacauaggcauggaugaccgauggcgagauagcccaagagcuacccccugggaucaggucuccuacgugucccaaguaucucucaguucacuuacuucagacaaaccaagcaggcacagugcagcggccgacgaugacggcgacaaguggucccuguuacucaacggccgcgaugaggagcaauacauuuag

SEQ ID NO: 85949 - RNA, 4065 nt, Artificial Sequence
  derived and/or modified sequence
augccagaacaggaaagacaaauuacagcaagggaaggcgcgucacgcaaaauccucagcaagcuuagucuuccaacucgcgcaugggaaccugcuaugaaaaagucuuuugcauucgacaauguggguuacgaggguggguuagacggacugggcccuuccucccagguggcaacaaguacaguacgaauccucggcaugaccugucagucuugugugaagucuauugaagaccgcauuuccaaccugaaggggauuauuagcaugaaagugagccuagagcaagggucggccaccgucaaguacgugcccagcgucgugugucuccaacagguaugucaucaaauaggggacaugggauucgaggccucuaucgcagaggggaaagcugcguccuggccauccagaucuuugccugcucaggaagcagucgugaaacuucgaguggagggcaugacgugccaaucauguguuucuagcauugaaggaaaggugcgcaaauugcagggggucgucagaguuaaaguaagccugucuaaucaggaagcugucauuaccuaucaaccauaccugauucagccagaggaccucagggaucacguaaaugacaugggauucgaggcagcaauuaaaucuaaggucgcaccacuaucacugggccccaucgacaucgaacgacugcagaguacaaauccaaaacgcccuuuaaguucagcaaaccaaaacuucaacaauagcgagacuuuaggccaccaggggagucacgugguuacccuccaguuaaggauugauggaaugcacugcaugauuucccagcuugaaggggugcagcagauuagugugucucuggcagagggaaccgcaacaguuuuauacaauccuucugugauuagcccugaagaauugcgggcugccauugaagacaugggauuugaagcuuccguggucuccgaaucuugcaguacuaacccucuggguaaucauagcgccggaaauuccaugguccaaacaaccgaugggacuccuacaaguguucaagaagucgcuccucacacuggacgccugccugcuaaccacgcucccgauauucuugccaaaucuccccagucgacaagggcgguggcaccccagaaguguuucuuacagauuaaagggaugacuugcgccagcugcgugucuaauauagaacggaaucugcagaaagaggcuggcguccuuucaguucugguugcccugauggccggaaaagccgagauaaaauaugacccagaggugauucaaccacuugaaaucgcacaguuuauucaggaccugggauuugaggcggccgugauggaggauuaugcaggaagcgacggcaauaucgaauugacaaucacaggaaugacuugcgccuccugcgugcacaauauagagaguaagcugacccgcacaaauggaaucaccuacgccucuguugcccucgcuaccucgaaagcacuaguuaaauuugaccccgagaucauuggaccacgggauaucauuaaaaucauugaagagauaggauuccaugcaucacuugcccagagaaacccaaacgcucaucacuuggaucacaaaauggagaucaagcaauggaagaagucauuucugugcuccuugguguuuggcauuccggugauggcccugaugauauauaugcuuauuccaucaaaugaaccucaucaaucaaugguacucgaucauaacauuaucccuggccucaguaucuugaaucucaucuuuuucauucuuuguaccuuugugcagcuccuuggagggugguauuucuaugugcaagccuacaagucauuaaggcaucgcuccgcgaauauggacgugcuaauugugcucgccacuucuaucgcuuacguuuauucgcuugucaucuugguuguagcgguugcagagaaagccgaacgaucucccgucacauuuuucgauaccccacccaugcucuucguguucauugcucuugguagauggcuggagcaccuugccaaaucaaaaaccagcgaagcucuggccaaguugaugucacugcaagccaccgaagccaccguggugacucuuggggaagauaaucucauuauccgagaagagcaggugccaauggagcuaguccagcgcggcgacauugugaaaguuguaccaggagggaaguuuccaguugacggcaagguacuggaaggaaacacuauggcugaugaaagucugaucaccggcgaggcuaugccagucacuaagaagccggggaguacaguaauugcugggucuauuaacgcgcacgguuccguucugauuaaagcaacgcacguugguaacgacacaacucuggcacaaauaguaaagcucguggaagaggcucaaaugucuaaggcccccauccaacagcucgcggauagauucagcggguacuucgugcccuucauuauaauuaugaguacucuaacauuggugguguggauagucauuggcuucaucgauuucgggguggugcagcgauauuuuccuaauccgaacaaacacaucucccagacugagguuaucauccguuuugccuuucagaccucuaucacgguccucugcauagccugcccauguagccuaggccuggcuaccccuacugcgguaauggucgguacugguguagcagcccagaauggaauauuaauuaaaggagggaagccgcuggaaauggcucauaaaaucaagacgguuauguucgacaagacugguacuaucacucauggaguuccaaggguaaugcgagucuuacuuuuaggagaugucgccacacuaccacucaggaagguccucgccguuguuggcaccgcagaggccucgucggaacacccucuuggcgucgcagucacaaaauauuguaaggaggaacucgggacagagacauugggauacugcacggauuuccaggcuguucccgggugugggauuggcugcaaggugucaaaugucgaaggcauacuggcccacagcgagcguccccugagugcaccagcuucccacuugaaugaggcagggucacuccccgcagaaaaagaugccguuccccagaccuucucagugcugaucgggaacagagaauggcugaggagaaauggucucacuaucagcagcgacgugucugacgccaugacggaucaugaaaugaaggggcaaacagccauccuuguagcgauugacggaguguuauguggcaugauugcgaucgcugacgcuguaaaacaagaggcagcacuagccguacacacccugcaaagcauggguguggacgucgugcucaucacgggcgacaaucguaagaccgcuagagccauugcaacucaagucgguaucaacaaggucuucgccgaaguccuucccucacauaagguagcgaagguacaagagcugcagaacaaaggcaaaaaaguggcaauggugggugauggcguaaacgauucuccagcucucgcucaggcugauauggggguggcuauaggaaccgggacagacguagcuaucgaagccgcagauguugugcugauuagaaaugaccuacuugauguuguagccucaauacaucugucuaagcgaacugugcguaggauuaggauuaaccugguacucgcucugauuuauaaccugguaggaaucccgauagcggcggggguauucaugccgauagguaucguguuacaaccauggaugggaucagccgccauggcugcuucuucuguaucagugguauuguccucucugcagcugaaaugcuacaaaaaaccugaccucgaaagauacgaagcucaggcccacggacacaugaaaccucugaccgccucccaagucagcgugcauauugggauggacgaucgcuggagggauaguccgcgcgccacacccugggaucaagucucuuacgugagccaagugucccuaucuucucucacauccgauaaaccuuccagacauucagccgccgccgaugaugacggagacaaguggucccuuuugcuaaacggacgggaugaagagcaguacaucuag

SEQ ID NO: 85950 - protein, 313 aa, Artificial Sequence
  derived and/or modified sequence
MLLSKINSLAHLRAAPCNDLHATKLAPGKEKEPLESQYQVGPLLGSGGFGSVYSGIRVSDNLPVAIKHVEKDRISDWGELPNGTRVPMEVVLLKKVSSGFSGVIRLLDWFERPDSFVLILERPEPVQDLFDFITERGALQEELARSFFWQVLEAVRHCHNCGVLHRDIKDENILIDLNRGELKLIDFGSGALLKDTVYTDFDGTRVYSPPEWIRYHRYHGRSAAVWSLGILLYDMVCGDIPFEHDEEIIRGQVFFRQRVSSECQHLIRWCLALRPSDRPTFEEIQNHPWMQDVLLPQETAEIHLHSLSPGPSK

SEQ ID NO: 85951 - DNA, 2650 bp, Artificial Sequence
  derived and/or modified sequence
gaggaggcccgagaggagtcggtggcagcggcggcggcgggaccggcagcagcagcagcagcagcagcagcagcaaccactagcctcctgccccgcggcgctgccgcacgagccccacgagccgctcaccccgccgttctcagcgctgcccgaccccgctggcgcgccctcccgccgccagtcccggcagcgccctcagttgtcctccgactcgccctcggccttccgcgccagccgcagccacagccgcaacgccacccgcagccacagccacagccacagccccaggcatagccttcggcacagccccggctccggctcctgcggcagctcctctgggcaccgtccctgcgccgacatcctggaggttgggatgctcttgtccaaaatcaactcgcttgcccacctgcgcgccgcgccctgcaacgacctgcacgccaccaagctggcgcccggcaaggagaaggagcccctggagtcgcagtaccaggtgggcccgctactgggcagcggcggcttcggctcggtctactcaggcatccgcgtctccgacaacttgccggtggccatcaaacacgtggagaaggaccggatttccgactggggagagctgcctaatggcactcgagtgcccatggaagtggtcctgctgaagaaggtgagctcgggtttctccggcgtcattaggctcctggactggttcgagaggcccgacagtttcgtcctgatcctggagaggcccgagccggtgcaagatctcttcgacttcatcacggaaaggggagccctgcaagaggagctggcccgcagcttcttctggcaggtgctggaggccgtgcggcactgccacaactgcggggtgctccaccgcgacatcaaggacgaaaacatccttatcgacctcaatcgcggcgagctcaagctcatcgacttcgggtcgggggcgctgctcaaggacaccgtctacacggacttcgatgggacccgagtgtatagccctccagagtggatccgctaccatcgctaccatggcaggtcggcggcagtctggtccctggggatcctgctgtatgatatggtgtgtggagatattcctttcgagcatgacgaagagatcatcaggggccaggttttcttcaggcagagggtctcttcagaatgtcagcatctcattagatggtgcttggccctgagaccatcagataggccaaccttcgaagaaatccagaaccatccatggatgcaagatgttctcctgccccaggaaactgctgagatccacctccacagcctgtcgccggggcccagcaaatagcagcctttctggcaggtcctcccctctcttgtcagatgcccgagggaggggaagcttctgtctccagcttcccgagtaccagtgacacgtctcgccaagcaggacagtgcttgatacaggaacaacatttacaactcattccagatcccaggcccctggaggctgcctcccaacagtggggaagagtgactctccaggggtcctaggcctcaactcctcccatagatactctcttcttctcataggtgtccagcattgctggactctgaaatatcccgggggtggggggtgggggtgggtcagaaccctgccatggaactgtttccttcatcatgagttctgctgaatgccgcgatgggtcaggtaggggggaaacaggttgggatgggataggactagcaccattttaagtccctgtcacctcttccgactctttctgagtgccttctgtggggactccggctgtgctgggagaaatacttgaacttgcctcttttacctgctgcttctccaaaaatctgcctgggttttgttccctatttttctctcctgtcctccctcaccccctccttcatatgaaaggtgccatggaagaggctacagggccaaacgctgagccacctgcccttttttctgcctcctttagtaaaactccgagtgaactggtcttcctttttggtttttacttaactgtttcaaagccaagacctcacacacacaaaaaatgcacaaacaatgcaatcaacagaaaagctgtaaatgtgtgtacagttggcatggtagtatacaaaaagattgtagtggatctaatttttaagaaattttgcctttaagttattttacctgtttttgtttcttgttttgaaagatgcgcattctaacctggaggtcaatgttatgtatttatttatttatttatttggttcccttcctattccaagcttccatagctgctgccctagttttctttcctcctttcctcctctgacttggggaccttttgggggagggctgcgacgcttgctctgtttgtggggtgacgggactcaggcgggacagtgctgcagctccctggcttctgtggggcccctcacctacttacccaggtgggtcccggctctgtgggtgatggggaggggcattgctgactgtgtatataggataattatgaaaagcagttctggatggtgtgccttccagatcctctctggggctgtgttttgagcagcaggtagcctgctggttttatctgagtgaaatactgtacaggggaataaaagagatcttatttttttttttatacttggcgttttttgaataaaaaccttttgtctt

SEQ ID NO: 85952 - protein, 522 aa, Artificial Sequence
  derived and/or modified sequence
MCHDVIFMAWLKQQFSECTLIDATHRDVDVLLLLSNSAYYVAYYDDEVDKVNQYQRLSLENLEKIEIGPEPTLFGKPKFSCMRLHYRYKEASGYFHTLRAVMRNPEEDGKDTLQCIAEMLQITKQAMGSDLPIIEKKLERKSSKPHEDIIGIRSQNQGSLAQGKNFLMSKFSSLNQKVKQTKSNVNIGNLRKLGNFTKPEMKVNFLKPNLKVNLWKSDSSLETMENTGVMDKVQAESDGDMSSDNDSYHSDEFLTNSKSDEDRQLANSLESVGPIDYVLPSCGIIASAPRLGSRSQSLSSTDSSVHAPSEITVAHGSGLGKGQESPLKKSPSAGDVHILTGFAKPMDIYCHRFVQDAQNKVTHLSETRSVSQQASQERNQMTNQVSNETQSESTEQTPSRPSQLDVSLSATGPQFLSVEPAHSVASQKTPTSASSMLELETGLHVTPSPSESSSSRAVSPFAKIRSSMVQVASITQAGLTHGINFAVSKVQKSPPEPEIINQVQQNELKKMFIQCQTRIIQI

SEQ ID NO: 85953 - DNA, 1569 bp, Artificial Sequence
  derived and/or modified sequence
atgtgccacgacgtgatcttcatggcctggctgaagcagcagttcagcgagtgcaccctgatcgacgccacccacagagacgtggacgtgctgctgctgctgagcaacagcgcctactacgtggcctactacgacgacgaggtggacaaggtgaaccagtaccagagactgagcctggagaacctggagaagatcgagatcggccccgagcccaccctgttcggcaagcccaagttcagctgcatgagactgcactacagatacaaggaggccagcggctacttccacaccctgagagccgtgatgagaaaccccgaggaggacggcaaggacaccctgcagtgcatcgccgagatgctgcagatcaccaagcaggccatgggcagcgacctgcccatcatcgagaagaagctggagagaaagagcagcaagccccacgaggacatcatcggcatcagaagccagaaccagggcagcctggcccagggcaagaacttcctgatgagcaagttcagcagcctgaaccagaaggtgaagcagaccaagagcaacgtgaacatcggcaacctgagaaagctgggcaacttcaccaagcccgagatgaaggtgaacttcctgaagcccaacctgaaggtgaacctgtggaagagcgacagcagcctggagaccatggagaacaccggcgtgatggacaaggtgcaggccgagagcgacggcgacatgagcagcgacaacgacagctaccacagcgacgagttcctgaccaacagcaagagcgacgaggacagacagctggccaacagcctggagagcgtgggccccatcgactacgtgctgcccagctgcggcatcatcgccagcgcccccagactgggcagcagaagccagagcctgagcagcaccgacagcagcgtgcacgcccccagcgagatcaccgtggcccacggcagcggcctgggcaagggccaggagagccccctgaagaagagccccagcgccggcgacgtgcacatcctgaccggcttcgccaagcccatggacatctactgccacagattcgtgcaggacgcccagaacaaggtgacccacctgagcgagaccagaagcgtgagccagcaggccagccaggagagaaaccagatgaccaaccaggtgagcaacgagacccagagcgagagcaccgagcagacccccagcagacccagccagctggacgtgagcctgagcgccaccggcccccagttcctgagcgtggagcccgcccacagcgtggccagccagaagacccccaccagcgccagcagcatgctggagctggagaccggcctgcacgtgacccccagccccagcgagagcagcagcagcagagccgtgagccccttcgccaagatcagaagcagcatggtgcaggtggccagcatcacccaggccggcctgacccacggcatcaacttcgccgtgagcaaggtgcagaagagcccccccgagcccgagatcatcaaccaggtgcagcagaacgagctgaagaagatgttcatccagtgccagaccagaatcatccagatctag

SEQ ID NO: 85954 - DNA, 1569 bp, Artificial Sequence
  derived and/or modified sequence
atgtgccacgatgttatttttatggcctggttaaaacagcagttctccgaatgtaccctgatagatgctacccatcgggatgttgacgtgctcttattgttatcaaactctgcgtattacgtggcctattacgacgacgaagtagataaggttaatcagtatcagagactttcactggagaacctggagaagatcgagatcgggccagaaccgacgctcttcggcaagcccaaattttcctgtatgcggttgcattatcgctataaagaggccagtggatactttcacactctgagagccgttatgcggaatccagaggaggacggaaaggatacactgcagtgcattgctgagatgctccagatcaccaagcaggccatgggcagcgacctgccaataatcgagaagaagcttgaaagaaagagctccaagcctcatgaagacattatcgggattagatctcaaaatcaagggtctctggctcagggaaagaacttcctaatgtccaaattctcgagcctgaaccaaaaggtgaagcagacaaaatcgaatgtgaacatagggaatttgaggaaacttggaaactttaccaagccagagatgaaggttaattttctgaagcccaatctgaaggtgaatttatggaaatccgactccagcctcgaaacaatggagaatactggtgtaatggataaggtgcaggccgagtcagacggtgatatgtcctccgacaacgatagttaccattctgatgagttccttaccaactctaaatcagatgaagacaggcagctcgctaacagtctagagtcagtgggacctatcgattatgtgcttcctagctgcggaatcattgcctctgccccgcgcctgggctctcggtcccagtccctcagctcgacggactcatcagtgcacgcgcccagcgaaatcaccgtggctcatgggtctggactgggcaagggccaagagagccctctgaagaaatctccctcggcaggagatgtgcacatcttgaccggttttgccaagcccatggacatctactgtcaccgcttcgtgcaagatgcgcagaacaaagtgactcacctgagcgaaacccgatcagtgagccagcaggcatcacaagaaaggaatcagatgactaaccaagtttccaacgaaacccagtcagaaagtaccgaacagacaccatcccggccctcccagcttgatgtgagcttatcggcgactggtccacagtttctgtccgtcgagcctgcccattcagtcgccagccagaagacacccaccagcgcgtcttccatgctggaactggagacagggcttcacgtgaccccctcaccaagcgagtccagctcttcacgcgccgtatctccctttgccaagataagatcctctatggttcaggtggccagcatcacccaggctggtcttacacatggcatcaactttgccgtttccaaggttcagaaaagccccccggagcctgaaattatcaaccaagtacagcagaatgagctgaagaaaatgttcattcagtgtcagacccgtattatccagatttag

SEQ ID NO: 85955 - DNA, 1569 bp, Artificial Sequence
  derived and/or modified sequence
atgtgccatgatgtgatcttcatggcctggctgaagcagcagttctctgaatgtaccctgattgatgccacccacagagatgtggatgtgctgctgctgctgagcaacagcgcctactacgtggcctactatgatgatgaggtggacaaggtgaaccagtaccagaggctgagcctggagaacctggagaagattgaaattggccctgagcccaccctgtttgggaagcccaagttcagctgcatgaggctgcactaccgctacaaggaggccagcggctacttccacaccctgcgggctgtgatgagaaatccagaagaagatggcaaggacaccctgcagtgcatcgccgagatgctgcagatcaccaagcaggccatgggcagtgacctgcccatcatcgagaagaagctggagaggaagagcagcaagccccatgaggacatcatcggcatccgcagccagaaccagggcagcctggcccagggcaagaacttcctgatgagcaagttcagcagcctgaaccagaaggtgaagcagaccaagagcaatgtgaacatcggcaacctgaggaagctgggcaacttcaccaagccagagatgaaggtgaacttcctgaagcccaacctgaaggtgaacctgtggaagagtgacagcagcctggagaccatggagaacacaggagtgatggacaaggtgcaggccgagagtgatggagacatgagcagtgacaatgacagctaccacagtgatgagttcctgaccaacagcaagagtgatgaagatcggcagctggccaacagcctggagagcgtgggccccattgattatgtgctgcccagctgtggcatcatcgccagcgccccccggctgggcagccgcagccagagcctgagcagcacagacagctctgtgcacgcccccagcgagatcaccgtggcccacggcagcggcctgggcaagggccaggagagccccctgaagaagagccccagcgctggagatgtgcacatcctgaccggctttgccaagcccatggacatctactgccacagatttgtgcaggatgcccagaacaaggtgacccacctgtctgagaccaggtctgtgtcccagcaggccagccaggagaggaaccagatgaccaaccaggtgtccaatgagacccagagcgagagcacagagcagacccccagccggcccagccagctggatgtgtccctgagcgccaccggcccccagttcctgtctgtggagcccgcccacagcgtggccagccagaagacccccaccagcgccagctccatgctggagctggagaccggcctgcacgtgacccccagccccagcgagagcagcagcagcagagctgtgagcccctttgccaagatccgcagctccatggtgcaggtggccagcatcacccaggccggcctgacccacggcatcaactttgctgtgtccaaggtgcagaagagccccccagagcctgagatcatcaaccaggtgcagcagaatgagctgaagaagatgttcatccagtgccagacccgcatcatccagatctag

SEQ ID NO: 85956 - DNA, 2882 bp, Artificial Sequence
  derived and/or modified sequence
gcattcgccgcattcgctgcaggcgcgaggttgggtgcaggcagctgtttgagcctcgaggcatcgacggacggacagacggacggactgactgacgatgccgcgctctcacaggcctccgcctaccgcgcagcgggctgccactgccgcagcagccgagcccaagtctgagggcgttgtggctatgactttcaagatttttctcctttttgcagggcttatggttaaagttcctgtggggttatatttttcctgcaaattacttcttttccaaagtctgatgttgatgtcccctgaagacagcggcttttatgcgaccattgttgcagtggtcgggcttcatgtggtgctggcaattttcgtcttcatagtgtggaaggagggcttgccccagtggcgggaaaacaaaaacgaatagagcagcttcttcagagctgcagacgtggggggtggggaaatacctaaagggtttttgtcttgtttcttgttcgtattgaacgtgctttttttttttttttttttttttttaaaggggaagggtgggtggggagggaattaaatatttactgcagctaagacttcagtaaaattgggggtggggggagggttgacattttccgactgcctgttacgtgccaagtgctttttgttaaggacataatgtttttgactggggatcatgtttggctgatgtaaatattaatgccaaaataggagctaggatgaaagtaacactgtaattagtagtagaatttatttcatattaaaatgtgtcatgacgtaatttttatggcttggctcaagcaacaattttcagagtgcaccctcattgatgctactcacagagacgtggatgtgctgttactgctttctaactctgcctactacgtggcctattatgatgatgaagttgataaagtaaaccagtatcaacgactaagtctagaaaacctggaaaaaattgaaataggccctgaacccactctttttggtaagccaaagttctcctgcatgcgactgcactacagatacaaagaagcgagtggctatttccacacattgcgagctgtaatgcgtaatcctgaagaggatggaaaagatacccttcagtgcattgcagagatgctgcagatcaccaagcaagccatgggatcggatttacccataattgagaagaaacttgagaggaagagcagtaaacctcacgaagacatcattggtatcaggtctcaaaaccaaggttctttggcccagggaaagaattttttaatgagcaaattttcatctctaaatcaaaaagtgaagcagaccaaatccaatgtaaatattggcaacctccgaaagctaggaaactttaccaaacctgaaatgaaagttaactttctaaaaccaaacttaaaagtaaatctttggaaatcagatagtagtcttgaaactatggaaaacacaggagtgatggataaggttcaggcagagtctgatggggacatgtcttcagataatgactcataccactctgatgaattccttacaaattctaagtctgatgaagacaggcagctagctaactcattagagagtgtagggccaatagattacgttcttcctagttgtggtattattgcctcagcgcctcgattgggcagtcggtcccagtctcttagcagcacagatagtagcgttcatgctccttcagagattactgttgctcatgggagtgggcttggaaaaggccaggagtctcctttgaagaaaagtccttctgctggcgacgtacacatattgactggctttgccaagcctatggatatttactgccacagatttgtgcaagatgcacagaacaaagtgacccacctatcagagaccagatctgtgtctcagcaggctagtcaggaaagaaatcaaatgaccaatcaagtttcaaatgaaacccaatcagaatcaacagaacagacaccttctcggccatcgcaattagatgtctctctttctgcaacaggcccacagtttttgtcagttgagccagcgcattcagttgcatctcaaaaaacccccacctccgcttccagcatgcttgaacttgagacagggcttcatgtaactccttctccttcagagagcagtagcagcagagcagtctctccctttgccaagattcgaagttccatggtccaggttgctagtattacccaagctggattaacccatgggataaactttgcagtgtcaaaagttcagaagagtcctccagaacctgaaatcattaatcaagtccagcaaaatgaacttaaaaagatgtttatacaatgccagacacggataattcagatttagcttttagccataagaatccttccatggcttttatttaaaaatatgaaattttcacctcttggggtattttaattgtactgtctgaacccagggatcacaaattctgttcattggaaagggttttaaacggagtcggaacctgagtagatttccaaattttacagccaggactacagaagtgcatcattctagaatgtgtagacctgagtagcttatacactacagagcactttgcttatttgaaagtaattcagcaacaggtcactttgggatataacctgaacctttttttggagtggggtgggtagactacagtagacacaagggctggacatgcagatgcttaggggattagcgtttttcataatttgttctgtttgtcagttcattcctgtgtgttcttacctctacaaagtaaattacacatttagtttttagtgactttaacatgttactgaagcatttgaatataaagctattttagttttgatggcttaactgttccctgaggagttgagggttattgacactagagaaatgaattc

SEQ ID NO: 85957 - DNA, 1569 bp, Artificial Sequence
  derived and/or modified sequence
atgtgccacgacgtgatcttcatggcctggctgaagcagcagttcagtgaatgcacactcatcgacgctacccatagggatgtcgatgtgttactattgctgtcaaattccgcatattacgtggcgtactacgacgacgaggtggataaggtcaaccaatatcagcggctctcgctggagaatttggagaagattgagatcggacccgaaccgacattgtttgggaaaccgaagtttagttgtatgcggcttcactaccgttacaaggaagcctccggttattttcatacattgcgcgcagtgatgaggaatcccgaggaggacgggaaggacaccctgcagtgcattgcggaaatgttacagatcactaaacaagctatggggtctgacttgcctattattgagaagaaacttgagcgcaagtcttccaagcctcatgaagacatcattggcatccgatcgcagaatcagggatccttggcgcaaggcaagaacttcctcatgagcaaattttctagtctcaatcagaaggtgaaacagacgaagagcaatgttaatattgggaatctgcggaaactcggcaacttcacgaagccggaaatgaaggttaattttctgaaaccgaacctaaaggtaaatctgtggaaatcagactcctcactggagactatggaaaacacaggagtaatggataaagtgcaggccgagtccgacggcgacatgagctcggacaacgactcctaccattcagacgagttcttaactaactccaagagcgatgaagatcggcagctggccaacagtctggagtccgtgggtccaatagactacgttctgccctcttgtgggataatcgcttccgcacctaggctcggaagccggagtcagtccctgagttccacagactcgtctgtgcacgccccgtccgaaattactgtagctcatggaagtggcttgggcaaagggcaagaatcccctctcaaaaaatctccgtctgccggcgacgtgcacattctcaccggatttgccaaaccaatggatatctactgtcaccgcttcgttcaggatgcccaaaataaggtgacacacctctcagaaacccggtcagttagccagcaggcgtcccaggagagaaatcagatgaccaatcaagtctccaatgaaacacaatccgagagcaccgagcagacgccttcccgcccgtcccagctggacgtgtcactctcagccaccggcccacagttcctgagtgttgaacccgcccattctgtggcgtcccagaagacacctacaagcgcatcatcgatgcttgaattggagaccggtttacatgtgacccccagcccctccgaatccagctcctcccgggccgtgagcccattcgctaagataagatcttccatggttcaagtggcaagtatcacccaggctgggctcacacatgggattaacttcgccgtatcaaaggtgcagaagtcgcccccggaacccgagattatcaatcaagtgcagcagaacgaacttaaaaaaatgttcatccagtgtcagacgcggataatacaaatctag

SEQ ID NO: 85958 - DNA, 1569 bp, Artificial Sequence
  derived and/or modified sequence
atgtgccatgacgtcatcttcatggcatggttaaaacagcaattctcagaatgcacattgatcgatgcaacgcatagggatgtggatgtgcttttgctcctctcaaattccgcgtactacgtagcctattatgatgacgaggtcgacaaagttaatcaatatcaacgattatccctggagaatttggagaagatcgaaattgggcctgagcccaccctgtttggcaagcccaagttctcatgtatgcgcctccactacaggtacaaggaggcatccgggtacttccatactctgcgcgcagttatgcgcaatccggaggaagacggcaaagatacgcttcagtgtatagctgaaatgctgcagataaccaagcaggctatgggatcggaccttccgatcatcgagaaaaagctcgaacgcaagtcttcaaaaccgcacgaggatatcatcggcatacgaagccagaatcaggggtcactcgcacaaggaaaaaatttcctgatgtccaagttctcctctttgaatcaaaaggtcaagcaaacaaagtctaacgtgaatatcgggaatctgcggaagttaggaaatttcacaaaacctgagatgaaggtgaatttcctgaaaccaaatctgaaggtgaatctctggaagtctgattccagcctggagacaatggaaaacaccggagtcatggataaggtgcaggctgagagcgatggcgacatgagcagcgacaacgactcttaccacagcgatgaatttctcactaacagtaagtcggacgaagatcggcagctcgccaacagtctggaaagcgtgggacccatagactacgtgctcccttcttgtgggattatcgcatcggcccctagattgggctcacgctctcagagcctatcaagtacggactcatcggtgcatgcgccttctgagatcaccgtcgcacatgggtctgggttaggcaagggtcaggagtcccccctgaagaagagtccaagtgccggagacgttcatatactcacgggcttcgccaagcccatggacatatactgtcaccggttcgttcaggacgcccagaacaaggtgactcatttgagcgaaactcgtagtgtctcccagcaagcttcacaggaacgaaatcagatgacaaatcaggtttccaatgagactcagtccgagagtacagagcagaccccctcccgcccatcacagctggatgtcagcctgtccgccaccggcccacaattcctctctgtggagccagcccatagtgtggccagtcaaaagacaccaacatctgcatcatccatgctggagctggagacgggcctccatgtgacaccttccccatctgagagctcaagcagtagagcagtctctcctttcgccaagatacggagctccatggtccaggtggcctcgatcacccaggcaggtctcactcacggaatcaactttgccgtgagcaaggttcagaaatcccctccagaacccgaaatcatcaatcaagtccagcagaatgaactgaagaaaatgttcatacagtgccagacccgcatcattcagatctag

SEQ ID NO: 85959 - protein, 123 aa, Artificial Sequence
  derived and/or modified sequence
MEPQDLELELCKKHHFGINKPEKIIPSPDDSKFLLKTFTHIKSNVSAPNKKKVKESKEKEKLERRLLEELLKMFMDSESFYYSLTYDLTNSVQRQSTGERDGRPLWQKVPLTARRAGFALGKK

SEQ ID NO: 85960 - DNA, 372 bp, Artificial Sequence
  derived and/or modified sequence
atggagccccaggacctggagctggagctgtgcaagaagcaccacttcggcatcaacaagcccgagaagatcatccccagccccgacgacagcaagttcctgctgaagaccttcacccacatcaagagcaacgtgagcgcccccaacaagaagaaggtgaaggagagcaaggagaaggagaagctggagagaagactgctggaggagctgctgaagatgttcatggacagcgagagcttctactacagcctgacctacgacctgaccaacagcgtgcagagacagagcaccggcgagagagacggcagacccctgtggcagaaggtgcccctgaccgccagaagagccggcttcgccctgggcaagaagtag

SEQ ID NO: 85961 - DNA, 372 bp, Artificial Sequence
  derived and/or modified sequence
atggagcctcaggatctcgagctggagctgtgcaaaaaacatcattttggtattaataaacccgagaagattatacctagcccagacgattcaaaattccttctaaagacatttacgcacattaaatccaacgtgagcgccccaaataagaagaaagtgaaagagtcgaaggagaaggagaagcttgaaaggaggttattggaagagctgctgaaaatgttcatggattcggaatccttttattattctctaacttacgatcttacaaatagtgtccagcggcaatccaccggtgagcgggatggcaggccactgtggcaaaaagtgccactgaccgcaagacgggccgggtttgctctcggaaaaaaatag

SEQ ID NO: 85962 - DNA, 372 bp, Artificial Sequence
  derived and/or modified sequence
atggagccccaggacctggagctggagctgtgcaagaagcaccacttcggcatcaacaagccagagaagatcatccccagcccagatgacagcaagttcctgctgaagaccttcacccacatcaagagcaatgtgtctgcccccaacaagaagaaggtgaaggagagcaaggagaaggagaagctggagcggcggctgctggaggagctgctgaagatgttcatggattctgagagcttctactacagcctgacctatgacctgaccaacagcgtgcagaggcagagcactggagagagagatggccggcccctgtggcagaaggtgcccctgacagcccggcgggccggctttgccctgggcaagaagtag

SEQ ID NO: 85963 - DNA, 611 bp, Artificial Sequence
  derived and/or modified sequence
tctttcagatcttccatggtggcttattctaattcggcagaaagcattggtgggcaaactcccaggagaccatgaggtctgtaaagttaccaaaattgctgtgctctcactttctgaaatggaacctcaggatcttgagctagagctctgtaagaagcatcattttggtattaacaaaccagagaagatcataccatctcctgatgactcaaagtttctactgaagacctttacgcatattaaatccaatgtgtctgctcctaataaaaagaaagttaaggaaagtaaagagaaggagaagttggagaggagattacttgaagagttgctgaagatgttcatggactcagaatccttttattatagcttgacctatgacctgaccaattccgtgcagaggcagagcactggggagagggacggtcggcccctctggcagaaggtaccactcacagctcgtagagcagggtttgcacttgggaagaagtgatggcctgttttggcttttgtaggaaaactgaaataatgtgtttctgaactattgttcctgcaccttttctaggttgatgaccgatttttttggaataaatacatgatacaagatcttactg

SEQ ID NO: 85964 - DNA, 372 bp, Artificial Sequence
  derived and/or modified sequence
atggagccccaggacctggagctggagctgtgcaagaagcaccactttggcattaataaacccgaaaaaattataccatctcctgatgactcgaagttccttctaaaaacttttacgcacataaaaagtaacgtctcagcccctaacaaaaagaaggtaaaagagtctaaagaaaaggaaaagctcgaaagacgccttcttgaagaattactcaagatgtttatggattccgaaagcttttactactctctgacgtacgacttaaccaactccgtacagcgacagagtacaggagaacgcgacggcagacctctgtggcaaaaagtccctctcactgctcgcagggccgggttcgccctgggcaaaaaatag

SEQ ID NO: 85965 - DNA, 372 bp, Artificial Sequence
  derived and/or modified sequence
atggaaccacaggatttagagttggagctgtgcaagaaacaccactttggcatcaataagccagaaaaaatcatcccatcacccgacgactccaaatttctcctcaaaacatttacgcacattaaatctaacgtcagcgctcccaataaaaaaaaagttaaggaaagtaaggagaaggagaaattggaacggaggttgttggaggagctgctaaagatgtttatggatagtgaatcgttctactactccctcacatacgatctaaccaattcggtccagagacagagcaccggcgagagagacggcaggcctctgtggcagaaagtgcctttgactgccagacgggctgggtttgctttaggcaaaaaatag

SEQ ID NO: 85966 - protein, 986 aa, Artificial Sequence
  derived and/or modified sequence
MDRMASSMKQVPNPLPKVLSRRGVGAGLEAAERESFERTQTVSINKAINTQEVAVKEKHARTCILGTHHEKGAQTFWSVVNRLPLSSNAVLCWKFCHVFHKLLRDGHPNVLKDSLRYRNELSDMSRMWGHLSEGYGQLCSIYLKLLRTKMEYHTKNPRFPGNLQMSDRQLDEAGESDVNNFFQLTVEMFDYLECELNLFQTVFNSLDMSRSVSVTAAGQCRLAPLIQVILDCSHLYDYTVKLLFKLHSCLPADTLQGHRDRFMEQFTKLKDLFYRSSNLQYFKRLIQIPQLPENPPNFLRASALSEHISPVVVIPAEASSPDSEPVLEKDDLMDMDASQQNLFDNKFDDIFGSSFSSDPFNFNSQNGVNKDEKDHLIERLYREISGLKAQLENMKTESQRVVLQLKGHVSELEADLAEQQHLRQQAADDCEFLRAELDELRRQREDTEKAQRSLSEIERKAQANEQRYSKLKEKYSELVQNHADLLRKNAEVTKQVSMARQAQVDLEREKKELEDSLERISDQGQRKTQEQLEVLESLKQELATSQRELQVLQGSLETSAQSEANWAAEFAELEKERDSLVSGAAHREEELSALRKELQDTQLKLASTEESMCQLAKDQRKMLLVGSRKAAEQVIQDALNQLEEPPLISCAGSADHLLSTVTSISSCIEQLEKSWSQYLACPEDISGLLHSITLLAHLTSDAIAHGATTCLRAPPEPADSLTEACKQYGRETLAYLASLEEEGSLENADSTAMRNCLSKIKAIGEELLPRGLDIKQEELGDLVDKEMAATSAAIETATARIEGTASPKEFYAKNSRWTEGLISASKAVGWGATVMVDAADLVVQGRGKFEELMVCSHEIAASTAQLVAASKVKADKDSPNLAQLQQASRGVNQATAGVVASTISGKSQIEETDNMDFSSMTLTQIKRQEMDSQVRVLELENELQKERQKLGELRKKHYELAGVAEGWEEGTEASPPTLQEVVTEKE

SEQ ID NO: 85967 - DNA, 2961 bp, Artificial Sequence
  derived and/or modified sequence
atggacagaatggccagcagcatgaagcaggtgcccaaccccctgcccaaggtgctgagcagaagaggcgtgggcgccggcctggaggccgccgagagagagagcttcgagagaacccagaccgtgagcatcaacaaggccatcaacacccaggaggtggccgtgaaggagaagcacgccagaacctgcatcctgggcacccaccacgagaagggcgcccagaccttctggagcgtggtgaacagactgcccctgagcagcaacgccgtgctgtgctggaagttctgccacgtgttccacaagctgctgagagacggccaccccaacgtgctgaaggacagcctgagatacagaaacgagctgagcgacatgagcagaatgtggggccacctgagcgagggctacggccagctgtgcagcatctacctgaagctgctgagaaccaagatggagtaccacaccaagaaccccagattccccggcaacctgcagatgagcgacagacagctggacgaggccggcgagagcgacgtgaacaacttcttccagctgaccgtggagatgttcgactacctggagtgcgagctgaacctgttccagaccgtgttcaacagcctggacatgagcagaagcgtgagcgtgaccgccgccggccagtgcagactggcccccctgatccaggtgatcctggactgcagccacctgtacgactacaccgtgaagctgctgttcaagctgcacagctgcctgcccgccgacaccctgcagggccacagagacagattcatggagcagttcaccaagctgaaggacctgttctacagaagcagcaacctgcagtacttcaagagactgatccagatcccccagctgcccgagaacccccccaacttcctgagagccagcgccctgagcgagcacatcagccccgtggtggtgatccccgccgaggccagcagccccgacagcgagcccgtgctggagaaggacgacctgatggacatggacgccagccagcagaacctgttcgacaacaagttcgacgacatcttcggcagcagcttcagcagcgaccccttcaacttcaacagccagaacggcgtgaacaaggacgagaaggaccacctgatcgagagactgtacagagagatcagcggcctgaaggcccagctggagaacatgaagaccgagagccagagagtggtgctgcagctgaagggccacgtgagcgagctggaggccgacctggccgagcagcagcacctgagacagcaggccgccgacgactgcgagttcctgagagccgagctggacgagctgagaagacagagagaggacaccgagaaggcccagagaagcctgagcgagatcgagagaaaggcccaggccaacgagcagagatacagcaagctgaaggagaagtacagcgagctggtgcagaaccacgccgacctgctgagaaagaacgccgaggtgaccaagcaggtgagcatggccagacaggcccaggtggacctggagagagagaagaaggagctggaggacagcctggagagaatcagcgaccagggccagagaaagacccaggagcagctggaggtgctggagagcctgaagcaggagctggccaccagccagagagagctgcaggtgctgcagggcagcctggagaccagcgcccagagcgaggccaactgggccgccgagttcgccgagctggagaaggagagagacagcctggtgagcggcgccgcccacagagaggaggagctgagcgccctgagaaaggagctgcaggacacccagctgaagctggccagcaccgaggagagcatgtgccagctggccaaggaccagagaaagatgctgctggtgggcagcagaaaggccgccgagcaggtgatccaggacgccctgaaccagctggaggagccccccctgatcagctgcgccggcagcgccgaccacctgctgagcaccgtgaccagcatcagcagctgcatcgagcagctggagaagagctggagccagtacctggcctgccccgaggacatcagcggcctgctgcacagcatcaccctgctggcccacctgaccagcgacgccatcgcccacggcgccaccacctgcctgagagccccccccgagcccgccgacagcctgaccgaggcctgcaagcagtacggcagagagaccctggcctacctggccagcctggaggaggagggcagcctggagaacgccgacagcaccgccatgagaaactgcctgagcaagatcaaggccatcggcgaggagctgctgcccagaggcctggacatcaagcaggaggagctgggcgacctggtggacaaggagatggccgccaccagcgccgccatcgagaccgccaccgccagaatcgagggcaccgccagccccaaggagttctacgccaagaacagcagatggaccgagggcctgatcagcgccagcaaggccgtgggctggggcgccaccgtgatggtggacgccgccgacctggtggtgcagggcagaggcaagttcgaggagctgatggtgtgcagccacgagatcgccgccagcaccgcccagctggtggccgccagcaaggtgaaggccgacaaggacagccccaacctggcccagctgcagcaggccagcagaggcgtgaaccaggccaccgccggcgtggtggccagcaccatcagcggcaagagccagatcgaggagaccgacaacatggacttcagcagcatgaccctgacccagatcaagagacaggagatggacagccaggtgagagtgctggagctggagaacgagctgcagaaggagagacagaagctgggcgagctgagaaagaagcactacgagctggccggcgtggccgagggctgggaggagggcaccgaggccagcccccccaccctgcaggaggtggtgaccgagaaggagtag

SEQ ID NO: 85968 - DNA, 2961 bp, Artificial Sequence
  derived and/or modified sequence
atggacagaatggcgtcatccatgaagcaggtgcccaaccccttgcccaaggtactgtctaggaggggggtgggcgccggcctggaggcggcagagcgtgaaagtttcgaacggactcaaacagtcagcatcaacaaagcgatcaatacgcaggaagtagctgtgaaggagaaacacgcccgtacctgcattttggggacgcaccacgaaaagggggcccagaccttctggtcggtggtgaatcggctccctctctcatcaaacgctgtgctctgttggaagttttgccatgtgttccacaagcttctcagggatggacatcccaacgtcctaaaggatagcttgcgttataggaatgaactcagcgacatgagtagaatgtggggtcatctgtctgagggatacgggcagctgtgctctatttatctcaagctgttgcggacaaagatggaatatcacacaaaaaatcccagatttcctggcaacttgcaaatgagtgatcggcagctggacgaagcaggcgagagcgatgtgaataatttttttcagctgacagtcgaaatgttcgactaccttgaatgtgaacttaaccttttccagactgtgtttaactcacttgacatgtctcggtcagtttccgtgaccgcggccggacaatgcaggctggctcccctcatacaggtgatccttgactgtagtcacctgtatgactatactgtgaagctgttgttcaagctgcactcgtgtttgcctgcagatacattgcaaggccaccgggacagatttatggagcagttcaccaaattaaaagacctcttttatagatcctccaatttgcagtatttcaaacgactgatccagattcctcaactccccgagaaccccccaaatttcctgagagcctccgccctgtctgagcatattagccctgtagtagtgattcctgcagaggcttcatcacccgactcagaaccagtgctcgaaaaagatgacttgatggatatggacgcaagccaacagaatctgtttgacaataagttcgatgacatatttgggagttccttcagcagtgatccctttaacttcaatagtcagaatggggtaaataaggacgagaaggaccatctcattgagaggttgtatagagaaatatcagggttaaaggcgcagcttgaaaatatgaagacagaaagccaacgggtggtgttacagttaaaaggccacgtgtccgagctggaagcagacctggctgaacagcaacaccttcgtcaacaggccgcggacgattgcgagttcctgcgggctgaactcgacgaactaaggcggcagagagaagacacagaaaaggcccagcggtcactatctgagattgaaaggaaagcccaggccaacgagcagcgatacagcaagttgaaggaaaaatattcagaattggtccagaaccatgccgacctgttgagaaaaaacgctgaggtgactaagcaggtttccatggcaagacaggcccaggtcgacctggagcgagagaagaaagagctcgaggatagtttggagcgaatttccgaccaggggcaaaggaagacccaggagcagctggaagtcttagagtcccttaaacaggagctcgccactagccagcgtgaactccaggtcctgcaggggagcctggagacatccgcacaatccgaggccaactgggctgctgagttcgctgagctggagaaagaaagagatagtcttgtgtctggggctgcacatcgcgaggaggagttgtcggcactgaggaaggagttgcaagacacgcaattgaagctcgccagcaccgaagagagcatgtgtcagctggccaaagaccaaaggaagatgttgctcgtcggaagcaggaaggccgcagaacaagtgattcaggatgccctgaaccagctcgaggaaccgccccttatatcttgcgcggggagtgctgaccatctgctgagcaccgtgacttcaatctcgtcatgtatcgaacaactggagaaatcatggagccagtacttggcgtgtccagaggatatttccggattgctgcattcaatcacactgttagcccatctcactagcgacgccattgcgcacggcgcaacaacctgtttacgtgcacccccggagccagcagacagcctgaccgaagcgtgcaagcaatacggaagagagacacttgcatatctggcatcactggaggaagagggaagcctcgagaacgctgattctaccgcaatgaggaactgcctgagcaaaatcaaggccatcggcgaggagttgctgcctcgggggctggacatcaaacaggaggagttgggggacctggtggataaggaaatggccgctacaagcgcagcaatagagaccgctaccgctaggatcgaagggacagcaagccccaaagagttctacgctaagaactcacgctggacagaagggcttatctctgcttctaaagccgtgggctggggcgcaactgttatggtggacgccgctgatttggtggtccagggaagaggcaaattcgaagaattaatggtctgtagtcacgagatagccgcatcaactgcccaactggtggccgcatccaaagttaaggctgacaaagactcacccaatctcgctcagctgcaacaggcatccagaggtgtgaatcaggcgactgccggggtggtagcctctaccatatccggaaaaagccaaatcgaagagactgacaatatggattttagtagcatgacgctcacccagatcaagcggcaggagatggattcacaggtccgagtactcgagctggaaaacgaactgcagaaagagcgacagaaactgggggagctaaggaagaaacactacgagttggcaggagtagccgaaggatgggaggaaggtaccgaggcatcgccgccaaccttacaggaagtggtcactgaaaaagaatag

SEQ ID NO: 85969 - DNA, 2961 bp, Artificial Sequence
  derived and/or modified sequence
atggacaggatggccagctccatgaagcaggtgcccaaccccctgcccaaggtgctgagcagaagaggagtgggcgccggcctggaggccgctgagcgggagagctttgagaggacccagacagtgtccatcaacaaggccatcaacacccaggaggtggccgtgaaggagaagcacgcccggacctgcatcctgggcacccaccacgagaagggggcccagaccttctggagcgtggtgaaccggctgcccctgagcagcaatgctgtgctgtgctggaagttctgccacgtgttccacaagctgctgagagatggccaccccaacgtgctgaaggacagcctgcgctacagaaatgagctgagtgacatgagcaggatgtggggccacctgtctgagggctacggccagctgtgcagcatctacctgaagctgctgcggaccaagatggagtaccacaccaagaacccccgcttccctggcaacctgcagatgtctgaccggcagctggatgaagctggggagagtgatgtgaacaacttcttccagctgactgtggagatgtttgactacctggagtgtgagctgaacctcttccagacagtgttcaacagcctggacatgagccgctctgtgtctgtgacagctgctggccagtgccgcctggcccccctcatccaggtgatcctggactgcagccacctgtatgactacacagtgaagctgctcttcaagctgcacagctgcctgcctgctgacaccctgcagggccaccgggaccgcttcatggagcagttcaccaagctgaaggacctcttctaccgcagcagcaacctgcagtacttcaagaggctcatccagatcccccagctgcctgaaaatccacccaacttcctgcgggccagcgccctgtctgagcacatcagccctgtggtggtgatcccagctgaggccagcagcccagattctgagcctgtgctggagaaggatgacctgatggacatggatgccagccagcagaacctgtttgacaacaagtttgatgacatcttcggcagcagcttcagcagtgaccccttcaacttcaacagccagaatggagtgaacaaggatgagaaggaccacctgattgagcggctgtaccgggagatcagcggcctgaaggcccagctggagaacatgaagacagagagccagagggtggtgctgcagctgaagggccacgtgtctgagctggaggccgacctggccgagcagcagcacctgcggcagcaggccgcagatgactgtgagttcctgcgggcagagctggatgagctgcggcggcagcgggaggacacagagaaggcccagaggagcctgtctgaaattgaaaggaaggcccaggccaatgagcagcgctacagcaagctgaaggagaagtacagcgagctggtgcagaaccacgccgacctgctgaggaagaatgctgaggtgaccaagcaggtgtccatggcccggcaggcccaggtggacctggagcgggagaagaaggagctggaggacagcctggagcgcatcagtgaccagggccagaggaagacccaggagcagctggaggtgctggagagcctgaagcaggagctggccaccagccagcgggagctgcaggtgctgcagggcagcctggagaccagcgcccagagcgaggccaactgggccgctgagtttgctgagctggagaaggagcgggacagcctggtgtctggggccgcccaccgggaggaggagctgagcgccctgaggaaggagctgcaggacacccagctgaagctggccagcacagaggagagcatgtgccagctggccaaggaccagaggaagatgctgctggtgggcagcaggaaggctgctgagcaggtgatccaggatgccctgaaccagctggaggagcccccactcatcagctgtgccggcagcgctgaccacctgctgagcacagtgaccagcatcagcagctgcatcgagcagctggagaagtcctggagccagtacctggcctgcccagaggacatcagcggcctgctgcacagcatcaccctgctggcccacctgaccagtgatgccatcgcccatggagccaccacctgcctgcgggcccctcctgagcctgctgacagcctgacagaggcctgcaagcagtatggccgggagaccctggcctacctggccagcctggaggaggagggcagcctggagaatgctgacagcacagccatgaggaactgcctgagcaagatcaaggccatcggggaggagctgctgccccggggcctggacatcaagcaggaggagctgggggacctggtggacaaggagatggccgccaccagcgctgccatcgagacagccacagccagaattgagggcacagccagccccaaggagttctacgccaagaacagccgctggacagagggcctcatcagcgccagcaaggctgtgggctggggcgccaccgtgatggtggatgctgctgacctggtggtgcagggccggggcaagtttgaggagctgatggtgtgcagccatgaaattgctgccagcacagcccagctggtggccgccagcaaggtgaaggctgacaaggacagccccaacctggcccagctgcagcaggccagccggggcgtgaaccaggccacagctggggtggtggccagcaccatcagcggcaagagccagatcgaggagacagacaacatggacttcagctccatgaccctgacccagatcaagaggcaggagatggacagccaggtgcgggtgctggagctggagaatgagctgcagaaggagcggcagaagctgggggagctgaggaagaagcactatgagctggccggcgtggccgagggctgggaggagggcacagaggccagcccccccaccctgcaggaggtggtgacagagaaggagtag

SEQ ID NO: 85970 - DNA, 7066 bp, Artificial Sequence
  derived and/or modified sequence
gactcggctcctcgcggcgacatggatcggatggccagctccatgaagcaggtgcccaacccactgcccaaggtgctgagccggcgcggggtcggcgctgggctggaggcggcggagcgcgagagcttcgagcggactcagactgtcagcatcaataaggccattaatacgcaggaagtggctgtaaaggaaaaacacgccagaacgtgcatactgggcacccaccatgagaaaggggcacagaccttctggtctgttgtcaaccgcctgcctctgtctagcaacgcagtgctctgctggaagttctgccatgtgttccacaaactcctccgagatggacacccgaacgtcctgaaggactctctgagatacagaaatgaattgagtgacatgagcaggatgtggggccacctgagcgaggggtatggccagctgtgcagcatctacctgaaactgctaagaaccaagatggagtaccacaccaaaaatcccaggttcccaggcaacctgcagatgagtgaccgccagctggacgaggctggagaaagtgacgtgaacaactttttccagttaacagtggagatgtttgactacctggagtgtgaactcaacctcttccaaacagtattcaactccctggacatgtcccgctctgtgtccgtgacggcagcagggcagtgccgcctcgccccgctgatccaggtcatcttggactgcagccacctttatgactacactgtcaagcttctcttcaaactccactcctgcctcccagctgacaccctgcaaggccaccgggaccgcttcatggagcagtttacaaagttgaaagatctgttctaccgctccagcaacctgcagtacttcaagcggctcattcagatcccccagctgcctgagaacccacccaacttcctgcgagcctcagccctgtcagaacatatcagccctgtggtggtgatccctgcagaggcctcatcccccgacagcgagccagtcctagagaaggatgacctcatggacatggatgcctctcagcagaatttatttgacaacaagtttgatgacatctttggcagttcattcagcagtgatcccttcaatttcaacagtcaaaatggtgtgaacaaggatgagaaggaccacttaattgagcgactatacagagagatcagtggattgaaggcacagctagaaaacatgaagactgagagccagcgggttgtgctgcagctgaagggccacgtcagcgagctggaagcagatctggccgagcagcagcacctgcggcagcaggcggccgacgactgtgaattcctgcgggcagaactggacgagctcaggaggcagcgggaggacaccgagaaggctcagcggagcctgtctgagatagaaaggaaagctcaagccaatgaacagcgatatagcaagctaaaggagaagtacagcgagctggttcagaaccacgctgacctgctgcggaagaatgcagaggtgaccaaacaggtgtccatggccagacaagcccaggtagatttggaacgagagaaaaaagagctggaggattcgttggagcgcatcagtgaccagggccagcggaagactcaagaacagctggaagttctagagagcttgaagcaggaacttgccacaagccaacgggagcttcaggttctgcaaggcagcctggaaacttctgcccagtcagaagcaaactgggcagccgagttcgccgagctagagaaggagcgggacagcctggtgagtggcgcagctcatagggaggaggaattatctgctcttcggaaagaactgcaggacactcagctcaaactggccagcacagaggaatctatgtgccagcttgccaaagaccaacgaaaaatgcttctggtggggtccaggaaggctgcggagcaggtgatacaagacgccctgaaccagcttgaagaacctcctctcatcagctgcgctgggtctgcagatcacctcctctccacggtcacatccatttccagctgcatcgagcaactggagaaaagctggagccagtatctggcctgcccagaagacatcagtggacttctccattccataaccctgctggcccacttgaccagcgacgccattgctcatggtgccaccacctgcctcagagccccacctgagcctgccgactcactgaccgaggcctgtaagcagtatggcagggaaaccctcgcctacctggcctccctggaggaagagggaagccttgagaatgccgacagcacagccatgaggaactgcctgagcaagatcaaggccatcggcgaggagctcctgcccaggggactggacatcaagcaggaggagctgggggacctggtggacaaggagatggcggccacttcagctgctattgaaactgccacggccagaatagagggtacagcatcccctaaagagttttatgccaagaactctcgatggacagaaggacttatctcagcctccaaggctgtgggctggggagccactgtcatggtggatgcagctgatctggtggtacaaggcagagggaaatttgaggagctaatggtgtgttctcatgaaattgctgctagcacagcccagcttgtggctgcatccaaggtgaaagctgataaggacagccccaacctagcccagctgcagcaggcctctcggggagtgaaccaggccactgccggcgttgtggcctcaaccatttccggcaaatcacagatcgaagagacagacaacatggacttctcaagcatgacgctgacacagatcaaacgccaagagatggattctcaggttagggtgctagagctagaaaatgaattgcagaaggagcgtcaaaaactgggagagcttcggaaaaagcactacgagcttgctggtgttgctgagggctgggaagaaggaacagaggcatctccacctacactgcaagaagtggtaaccgaaaaagaatagagccaaaccaacaccccatatgtcagtgtaaatccttgttacctatctcgtgtgtgttatttccccagccacaggccaaatccttggagtcccaggggcagccacaccactgccattacccagtgccgaggacatgcatgacacttccaaagactccctccatagcgacaccctttctgtttggacccatggtcatctctgttcttttcccgcctccctagttagcatccaggctggccagtgctgcccatgagcaagcctaggtacgaagaggggtggtggggggcagggccactcaacagagaggaccaacatccagtcctgctgactatttgacccccacaacaatgggtatccttaatagaggagctgcttgttgtttgttgacagcttggaaagggaagatcttatgccttttcttttctgttttcttctcagtcttttcagtttcatcatttgcacaaacttgtgagcatcagagggctgatggattccaaaccaggacactaccctgagatctgcacagtcagaaggacggcaggagtgtcctggctgtgaatgccaaagccattctccccctctttgggcagtgccatggatttccactgcttcttatggtggttggttgggttttttggttttgtttttttttttaagtttcactcacatagccaactctcccaaagggcacacccctggggctgagtctccagggccccccaactgtggtagctccagcgatggtgctgcccaggcctctcggtgctccatctccgcctccacactgaccaagtgctggcccacccagtccatgctccagggtcaggcggagctgctgagtgacagctttcctcaaaaagcagaaggagagtgagtgcctttccctcctaaagctgaatcccggcggaaagcctctgtccgcctttacaagggagaagacaacagaaagagggacaagagggttcacacagcccagttcccgtgacgaggctcaaaaacttgatcacatgcttgaatggagctggtgagatcaacaacactacttccctgccggaatgaactgtccgtgaatggtctctgtcaagcgggccgtctcccttggcccagagacggagtgtgggagtgattcccaactcctttctgcagacgtctgccttggcatcctcttgaataggaagatcgttccaccttctacgcaattgacaaacccggaagatcagatgcaattgctcccatcagggaagaaccctatacttggtttgctacccttagtatttattactaacctcccttaagcagcaacagcctacaaagagatgcttggagcaatcagaacttcaggtgtgactctagcaaggctcatctttctgcccggctacatcagccttcaagaatcagaagaaaggccaaggtgctggactgttactgacttggatcccaaagcaaggagatcatttggagctcttgggtcagagaaaatgagaaaggacagagccagcggctccaactcctttcagccacatgccccaggctctcgctgccctgtggacaggatgaggacagagggcacatgaacagcttgccagggatgggcagcccaacagcacttttcctcttctagatggaccccagcatttaagtgaccttctgatcttggaaaaacagcgtcttccttctttatctatagcaactcattggtggtagccatcaagcacttcccaggatctgctccaacagaatattgctaggttttgctacatgacgggttgtgagacttctgtttgatcactgtgaaccaacccccatctccctagcccacccccctccccaactccctctctgtgcattttctaagtgggacattcaaaaaactctctcccaggacctcggatgaccatactcagacgtgtgacctccatactgggctaaggaagtatcagcactagaaattgggcagtcttaatgttgaatgctgctttctgcttagtatttttttgattcaaggctcagaaggaatggtgcgtggcttccctgtcccagttgtggcaactaaaccaatcggtgtgttcttgatgcgggtcaacatttccaaaagtggctagtcctcacttctagatctcagccattctaactcatatgttcccaattaccaaggggtggccgggcacagtggctcacgcctgtaatcccagcactttgagaggctgaggtggtaggatcacctgaggtcaggagttcaagaccagcctgtccaacatggtgaaacccccatctctactaaaaataccaaaaattagccgagcgtagtgacgggtgcccgtaatcccagctactcaggaggctgagacaggagaatcacctgaaccccagaggcagaggttgcagtgagctgagatcacgccattgtactccagcctgggcaacaagagcaaaactccgtctcaaaaaaaaaaaaaaattacaaatggggcaaacagtctagtgtaatggatcaaattaagattctctgcccagccgggcacagtggcgcatgcctgtaatcccagaactttgggaggccaagacgggatgattgcttgagctcaggagtttgagaccaggctgggcatcatagcaagacctcatctctactaaaattcaaaaacaaaattagccgggcatgatggtgcatgcctgtagtctcagctagttggggagctaaggtgggagaattgcttgagcttgggaagtcgaggctgcagtcagccctgattgtgccagtgcactccggcctgggtgacagagtgagaccctgtctcaaaaaaaaaaagattctgtgtcagagcccagcccaggagtttgaggctgcaatgagccatgatttcccactgcactccagcctgagtgacagagcgagactccatctctttaaaaacaaacaaaaaattatctgaatgatcctgtctctaaaaagaagccacagaaatgtttaaaaacttcatcgacttagcctgagtcataacggttaagaaagcacttaaacagaagcagaggctaattcagtgtcacatgaggaagtagctgtcagatgtcacataattactttcgtaatagctcagattagaatggctaccccattctctagacaaaatcaaattgtcctattgtgactcttctaaaaatgaagatgaagagctatttaatgacacaccttggattaaaacgggaatcacatcttaaagctaaaaatgaacctgcaagccttctaaatgagtcactgagcatcactagtgacaagtctcgggtgagcgtaaatgggtcatgacaagatgggacagcaacaaaatcatggcttaggatcgacaagaagttaaaaaacagctgcatctgttacttaagtttgtaagacagtgccctgagacctctagagaaaagatgtttgtttacataagagaaagaggccagacatggtgtctcacacgtttaatcccagcactttgggaggcaggggcgggtggatcacctgaggtcaggagttcaagactagcctggccaacatggtgaaaccccgtctctactaaaaatacaaaaattagccgggcatggtggcaggcgcctataatcccagctactggggaggctgaggcaggagaatcacttgaacccgggggacagaggttgtagtgagccaagatcgcaccactgcactccagcctgggtcacagagtgagactccatctcaaaaaaaaaaaagagagagagagagaaagaaatagaagagaagagccatcttggcagggttattttatatctgagcaaggagtttaaatgagactagtttagattgtctgctgatgcagccgtccatagcagtacccctaaaatcccaccagaatacgggtccctctaacccagtggctggaagaaccactgtctagagcaacttttcttggaactgtcccagctaccaagtcagacaccaaggtttatgccaccaggtaacacgggaatcacaggtacatgtcgctccggtcagattagttggctttggcccctcgaccctgtgcaggagctagttctcagcttgcagctggaagttccctct

SEQ ID NO: 85971 - DNA, 2961 bp, Artificial Sequence
  derived and/or modified sequence
atggaccggatggccagcagcatgaagcaggtgcccaaccccctgcccaaagtgctgtcacgccgcggcgtcggcgccggcttggaagcagcagagagggagtcttttgagcgtacccagacggtgtcaattaacaaggccattaacacgcaagaggtcgcagtgaaggaaaaacatgccaggacctgcatactcggaacccatcacgagaagggcgctcagacattttggagcgtagtcaaccggctgcctctctcaagtaacgctgtcctgtgctggaagttttgtcacgtcttccacaaacttctcagagatggccacccgaatgtgctgaaggacagtctgcgctatcgaaatgaattatctgatatgagccgtatgtgggggcacttgagcgaggggtacgggcagctctgcagcatctacctgaaactgctccggaccaagatggagtatcatacgaagaacccacgcttccccgggaacctccaaatgtcagatcgccagttggatgaagccggtgaatcagatgttaataattttttccaactcaccgttgagatgttcgactacctggagtgcgaactgaatctctttcagacggtgtttaacagcctcgacatgagtaggagcgtcagcgtcaccgctgcaggtcaatgtcgactcgcacccctgatccaagtgatcctcgactgcagtcatctctacgattacacagtgaagctgttattcaaacttcattcttgtctccccgccgatacactgcagggccatagggacagatttatggagcagtttactaagctgaaggatctgttctaccggagctccaatctccagtactttaagaggcttattcagattcctcagctgcccgaaaatcccccaaattttctgagagcgagtgccctgtccgaacacatctccccggtcgtggttattcctgctgaggccagctcccccgacagtgaacctgtgctggagaaggacgacctaatggacatggatgcttctcagcagaaccttttcgacaacaagtttgacgatattttcggttcctctttttcatctgatcccttcaactttaacagccaaaatggagtgaacaaggacgagaaggatcatttgatcgagagactatatcgagaaatttctggtctcaaagcccagcttgaaaacatgaaaaccgaatcccagcgcgtggtgctgcagttgaagggacacgtgagcgagctggaagctgatttggccgaacagcaacatctgcgtcagcaggcagccgatgactgcgaattcttgcgcgctgagctcgacgaactccgacgacagagagaggataccgagaaagcccagagatctttatcagagattgaaagaaaggctcaggctaacgagcaaagatacagcaaactgaaggaaaaatactccgagctggttcagaaccacgccgacctgctccgtaaaaatgccgaggtgacaaagcaagtttctatggccagacaagcgcaggtggacctggagagggagaagaaggaactggaagactctcttgagcgaatatctgatcaaggccagcggaaaacccaagagcagctggaggtgctggagtcactaaagcaggagctcgccacttcccagagggagctgcaggtgctgcaagggagtctcgaaacaagtgcccaatccgaagccaattgggcagcagaattcgcggagctcgaaaaagagagggactccctcgtgtcgggcgccgcccacagagaggaagagttgagcgccctcaggaaggaactccaagatactcaactcaagctcgcctccaccgaagaaagcatgtgtcaacttgctaaagatcagagaaagatgcttctggttggcagccgcaaagctgctgagcaggtcatccaagacgcattgaaccaattggaagaaccccccctgatcagttgcgctggatccgccgaccatctgcttagtacggtgacttccatcagcagctgcatcgaacagttggaaaagtcctggtcccagtatctggcttgtcctgaagatattagcggtctgttgcactccatcactcttcttgcccatctgacttccgacgccatcgcccatggtgctacaacatgcctgcgcgcccctccagaacctgccgacagtctgaccgaggcttgtaaacaatacggtagggagacactcgcgtatctggcctctctggaggaggagggatccctggaaaatgctgactcaacggccatgaggaattgcctgagcaaaatcaaggctatcggcgaagaactcctgccccggggactcgacatcaagcaagaggagctcggggatctggttgacaaggaaatggcagctacaagtgcagctattgagactgcaacggcaaggattgaaggaacagccagtcccaaagaattttacgccaagaatagccgctggacagaaggtttgatttcagcctcaaaggcagtgggatggggagcaacagtcatggtcgatgctgctgatcttgtagttcagggccgcggtaaatttgaagagctgatggtgtgcagccacgaaatagcggcctctaccgcccagctggttgccgcgagcaaagttaaggcagacaaggacagcccgaacttggctcaactacagcaggcctcccggggcgtgaatcaagctacagcgggagttgtggccagtacaatcagcggcaagtcccaaattgaggagacagataacatggatttctcatcgatgactctgacgcagatcaaacggcaggagatggacagccaggtgagagtgttagagctggagaacgagctccaaaaggaacgacaaaaactgggcgaactgcgaaaaaagcattacgagctggcaggcgtagcggagggatgggaggaaggaaccgaggcaagcccccccactctgcaggaggtggtcactgagaaagaatag

SEQ ID NO: 85972 - DNA, 2961 bp, Artificial Sequence
  derived and/or modified sequence
atggatcggatggccagttcaatgaagcaggtgcccaacccgctccccaaggtcctttcccggagaggggtcggcgcagggctcgaggccgcagagagggagagctttgaacggacacagaccgtctcaattaacaaggcaattaatacgcaagaggtggccgtgaaggaaaagcacgccagaacttgtattctgggaactcaccacgagaagggcgctcagactttctggtccgtggtgaatcggttacccctgtcctctaatgcagtgctgtgctggaagttttgtcatgtttttcataaattgttgagggacgggcatcctaatgtgctcaaggacagtctgcgttatcgaaacgagctgagcgatatgtcccgcatgtggggacatctgtctgagggatacggacagctgtgttcaatttatctgaagttgctgcgaacaaagatggagtaccacactaagaatcctaggtttccaggaaacctgcaaatgtctgacagacagctcgatgaggccggtgagtccgacgtgaacaacttttttcagctgactgttgagatgtttgactacttagagtgtgagctaaatctgtttcaaacggtttttaactccctggacatgagtcggtctgtgtccgtcactgcagcaggtcagtgtcggttagcgcctttgatacaagtcatcctcgactgtagtcacctatacgactacacagtcaaactgctttttaagttgcattcctgtctgccagctgacactctccagggtcacagggataggttcatggaacagttcactaaacttaaggatctattttaccgtagctccaacctgcagtatttcaagagactcattcagattccccagttgcccgagaacccccctaatttcctgcgcgcttctgcactttctgaacatatttctcctgtcgttgtgatcccggcagaagcttccagccccgactccgaaccagtgcttgaaaaagacgatctcatggacatggacgcgagtcaacaaaatctgtttgacaacaaatttgacgacatcttcgggtccagcttcagctctgacccatttaacttcaactcccaaaatggtgtcaacaaggacgagaaggatcatttgatagagaggctgtacagggagatatccggtctgaaggcgcagctcgagaacatgaagacggagtcccagcgagtcgtgctgcagttgaagggccatgtgagcgaattggaggccgatcttgctgagcagcagcacctcagacagcaggccgcagacgactgcgaattcctgcgggcagagttggatgagttacgcaggcagagggaagatactgagaaggctcagagaagcctgtccgagattgagaggaaagctcaggcaaatgagcaacgatactcaaagctgaaagagaaatactctgagctcgttcagaatcacgccgatctgcttaggaagaacgcagaggtaactaaacaggtctccatggctagacaagcgcaagtggacttggaaagggagaaaaaggagctggaggatagtctggagcgcattagcgatcaagggcagcggaaaacacaggaacagctagaggtgctggaatcactgaagcaagagctcgccacatcccagcgcgaacttcaggtcttgcaggggagccttgagaccagcgcacagtccgaggccaactgggccgcagaattcgccgagctagaaaaggagcgcgacagccttgtaagcggtgccgcacatcgagaagaggagctttcagcactgcggaaggagttgcaggatacacagctcaagctggcctctactgaagaatcaatgtgtcagttggctaaggaccagcgaaagatgctgctcgtaggctcccgaaaagccgcagagcaggttatccaggatgccttgaatcaacttgaggagcccccacttatatcctgtgccggaagcgccgaccatttgctatcgacggtcacttccatttcttcttgtatcgaacaattggagaagagttggtctcagtatctggcttgtccagaagacatttcagggcttttacattccattacattgttagcccacttgacctccgacgccatcgctcacggtgctacaacgtgcctacgagcaccacccgagcccgctgactccctgactgaggcttgtaaacagtacggcagagagaccttagcatacctagctagtctcgaagaggaaggttctctggaaaacgctgattccaccgccatgcgcaattgcctgagtaaaatcaaggccataggagaagagttactccctcgtggcctcgatattaagcaagaagagctaggtgacttggttgacaaggagatggctgctacgagcgctgccatagagaccgcaaccgccaggatcgaagggaccgcatcccctaaagaattctatgctaagaacagccgttggacagagggactcatttcagcctccaaggctgtgggctggggggctacagtaatggtagacgccgctgaccttgtggtccaaggacgaggcaagttcgaagagctgatggtgtgttctcatgagatcgcagcctccacagctcagctcgtggccgcatcaaaagtgaaggctgacaaggattcccctaacctagcgcaacttcaacaggcctcccgtggagtgaatcaggccacagcaggtgtggtggcaagcacgatctccggcaagagccagatagaagagacagataatatggatttttcgtccatgactctgacccagatcaagcgccaggagatggactctcaagttagggtgctcgagcttgaaaacgagctccagaaagagcgacaaaagttgggagagctgaggaagaagcactatgaactggctggagtagccgaaggatgggaagaaggcacagaagccagtccaccaacgcttcaagaagtagtcaccgagaaagagtag

SEQ ID NO: 85973 - DNA, 2961 bp, Artificial Sequence
  derived and/or modified sequence
atggataggatggcctcatctatgaagcaggtccctaatcccctgcctaaagtgttgtcccggcggggtgtgggggctggacttgaagccgccgaacgcgagagcttcgagaggacacaaaccgtttcaatcaacaaagccatcaatacacaagaggttgcggtgaaagagaagcacgctcgcacctgcatcctgggaacccaccatgagaaaggcgcccaaactttttggagcgtagtcaacaggctgccacttagctctaatgccgttctgtgttggaagttttgtcatgtcttccataagttgctcagagacggtcatccaaacgtactgaaagatagtctgagataccgtaatgagcttagtgatatgtctaggatgtggggacacctatccgaaggatacggccagctctgtagcatttatctcaagttgcttcgcacgaagatggagtatcatacaaaaaacccaagatttcctggtaacttacaaatgagtgatcgccagctggatgaagcaggggagagcgacgtcaacaatttcttccaacttacagttgagatgttcgattacctcgaatgcgagttaaacttattccagacagtctttaatagcctcgacatgtctagaagtgtgtccgtcactgctgccgggcagtgtcggttggccccactgattcaggtgatactggattgctctcacctctatgactacactgttaaattactattcaaattgcacagctgtttaccggcggacacactccagggtcacagagacagatttatggagcagtttacgaaactgaaggatttgttttaccgctctagcaatttgcagtacttcaagcggctaatccagatcccacaattaccagagaacccccccaattttcttagagcctcggccctcagcgagcacatttctccagtcgtcgtgattccagccgaggcttcaagccctgacagcgaacctgtgttggagaaggatgatctgatggacatggacgcctctcagcagaacctctttgataataagtttgacgacatcttcgggtcttctttttcctcagaccccttcaactttaatagccagaacggtgtaaacaaggacgaaaaggatcatttaattgagagactctatcgtgagatttcaggtctgaaggcacagctggaaaacatgaaaactgagagccagcgcgtagtgttacaactgaaagggcatgtgtcagaactggaggccgacctagccgagcagcagcatcttcgccagcaggctgcagacgactgtgagttcctgcgcgccgagctggacgaattgcggcgccagcgagaagatactgaaaaggctcagaggtctctctctgagatagagcgcaaagcacaggccaacgagcagcgttattctaaactgaaagagaaatatagtgaattagtgcagaatcatgctgacctcctcagaaagaacgctgaggtaacgaagcaggtgtccatggctagacaggcacaggtggaccttgaacgggaaaagaaggagttggaagacagtctcgaacggattagcgaccaagggcagcgcaagacgcaggaacaactcgaagttctagaatcactcaagcaggagctggctacatctcagagggaactacaggtgctgcaaggttccctggagacctccgcacagagtgaagcgaactgggctgccgaattcgccgagctggagaaagaacgggatagtctcgtaagcggagcagctcaccgagaagaggaactgtccgcccttagaaaagaactgcaggacacccaattgaagctagcttctactgaggagagcatgtgtcagttggcgaaggatcaaaggaagatgctccttgtaggaagcaggaaagctgcggagcaagttattcaagacgcactcaatcagctggaagaacccccactaatttcctgcgccgggtctgcagaccaccttctgtccacagtgacatctatatcttcatgcattgagcagctcgaaaagtcctggagccaatatctcgcctgccctgaagacatttccggactgctgcatagcattacgcttcttgcccatctgacctcagatgctattgctcacggcgccacgacttgcctgcgcgccccgcctgagcctgctgattctctcacagaagcatgcaagcagtatgggcgtgaaaccttagcatatcttgctagtcttgaggaggaaggaagtttggagaatgccgattccaccgctatgcgcaactgtctgtcaaagatcaaggctatcggtgaggaactactgccgcgggggcttgacatcaaacaggaagagttgggtgacctggtcgataaggaaatggctgcgaccagcgccgccattgagacagcgacggcccgtatagaaggcaccgctagccccaaggaattctacgctaagaacagcagatggacagaggggctcatctctgcctctaaagccgtgggttggggcgctactgtcatggtagacgctgccgacctggtggtacaaggtcgaggcaagttcgaggaactgatggtgtgttcccacgaaatcgccgcttctaccgctcagcttgtagccgcttctaaagtgaaggccgataaggatagcccaaaccttgctcagctgcagcaagcatcccgcggcgtaaaccaggccactgctggcgttgtggcctcgacaatttccgggaagtcacagatagaggaaacagacaacatggatttctcgtccatgacactgacccagatcaagcgacaagaaatggactcgcaagtgagagtactggaactagaaaacgaactgcagaaagaacgccagaaattaggcgaattgcgaaagaaacattacgagcttgccggcgtggccgaaggctgggaagaggggactgaggcctcccctccaacactgcaggaggtggttaccgagaaagagtag

SEQ ID NO: 85974 - DNA, 2961 bp, Artificial Sequence
  derived and/or modified sequence
atggaccggatggccagcagcatgaagcaggtgcccaaccccctgcctaaagtgctcagtcggcgaggcgtgggtgctggcctggaagctgctgagcgtgagagttttgagcgcactcagaccgtgagtattaacaaggctattaatactcaggaggtggccgtaaaggagaaacatgcccggacatgcattctcggcactcatcatgaaaagggcgcccagaccttctggagcgtcgtgaacagacttccgttgagctctaacgccgtcctgtgttggaagttttgtcacgtgtttcataagttattgagggatggccaccctaatgtccttaaggattcactccggtacagaaatgaactgagcgacatgtcacgcatgtgggggcatctctccgaaggctacggccagctctgctccatatacctcaagctgctcaggactaagatggagtaccacacaaagaatccgagattcccgggaaatctgcagatgagcgatcgccagcttgatgaagccggggaaagcgatgttaacaactttttccagttaaccgttgagatgtttgactatttagagtgcgaattaaatttgtttcagacggtgttcaacagccttgatatgagtaggagtgtcagcgtgactgcggcaggccagtgtcgcctcgcacccttgatccaggtgatcctagactgttcacatctgtacgactacacagtgaagctgctgttcaaactgcactcgtgcctccctgccgacaccctgcaggggcaccgggaccgatttatggaacagttcacgaagctgaaagacctcttttatcggtccagcaacctccaatactttaagcggctgattcagataccacagctcccagaaaaccctcctaatttcctgagggcatctgctttgagtgaacatattagtccggtggttgtgattccagcagaggcttcatctccggactcggagccggtgcttgagaaagacgacctgatggacatggatgctagccagcagaacctcttcgataacaagtttgatgacattttcggtagctctttctcttctgaccctttcaactttaattctcagaacggggttaataaggatgagaaagatcacctgatcgagcgactctatagggagatctctggcctcaaagcgcagctggagaacatgaaaacagaatcccaacgggttgtgttgcagcttaaagggcacgtgtcagagttagaggcagatttagccgaacagcagcatctgcgccagcaggccgcagatgactgtgagttccttcgcgccgaattggatgagctaaggcgccagagagaagacaccgaaaaagcccagcggagtctttctgaaattgaacgcaaagcacaggctaatgaacagcggtacagtaagctgaaggaaaagtattctgaactggtgcaaaaccatgcagatctcctcagaaagaatgcggaggtgactaaacaggttagcatggctcgccaggcccaggtggacctggagagggagaaaaaggaactggaggattcattagaaaggatcagcgatcagggtcagcgaaaaacacaggaacaactcgaagtactcgaaagcttgaagcaagagctggccacctcacagcgggaactccaggtactgcaggggtcactggagacatccgcccaatccgaggcgaactgggctgccgagtttgctgaacttgaaaaagaacgtgattccctcgtgagcggagccgctcatcgggaagaagagctgagcgccctccgcaaggagttacaggatacccaacttaaactcgctagcacagaggaatctatgtgtcagctcgctaaggaccaaagaaagatgctactggtcgggagccgcaaggctgccgagcaggtgatccaagatgcactcaatcagctagaggagccccctctcatctcatgcgcaggttcggccgatcacttactctcaacagtgacttccatcagtagctgcattgaacaattggaaaaatcctggagccagtaccttgcttgcccggaagatatatccggtctgctgcatagtatcactttgctcgcacatctgacatccgatgccatcgcgcacggcgcaacgacgtgtctgcgggcaccccctgaacccgccgacagtctcacagaggcatgtaagcagtatggtcgcgaaaccctcgcgtacctcgcttctctggaagaggagggttcgctcgaaaacgcggacagcaccgccatgagaaattgcctatctaagattaaggccatcggtgaagaactcctccccagaggcctggacataaagcaggaagaacttggcgacctcgttgacaaagagatggcagctacctcagccgccattgagactgctaccgcccgaatcgagggaaccgcatcaccaaaagagttttacgccaaaaatagccggtggaccgagggcctgatcagcgcctctaaggccgtgggatggggtgcaaccgtcatggttgatgccgctgacctggtagtgcagggtcgaggtaaattcgaagagttaatggtgtgctcacacgagattgccgcctcaacagctcagctggtggctgcatccaaagtgaaagctgataaggattcccccaacttagcgcagcttcagcaggcctctcggggggtgaatcaggcgacagcaggggtcgttgcctcaaccatctccggcaagtctcagatcgaggaaactgataatatggacttctcctcaatgactttgacacagataaaacgtcaggaaatggattcacaagtgcgcgtgctggaactggaaaatgagctgcagaaggagaggcagaagctgggagagctgagaaagaaacattacgaactagctggcgtggctgagggatgggaggaaggaacggaggcctctccacctaccctccaggaggtcgtgacagagaaggaatag

SEQ ID NO: 85975 - DNA, 2961 bp, Artificial Sequence
  derived and/or modified sequence
atggatcgcatggcatctagcatgaagcaagttcctaatccccttcctaaggtcctatccagacggggtgtaggagccggactagaggcggcagaaagagagtccttcgagagaactcagaccgtatctatcaataaggcgattaacactcaggaagtagccgttaaggagaagcacgcaaggacttgtattctgggcacccaccacgagaagggagcccagactttttggtctgtggtcaatcgcctgcccctcagcagtaacgccgtcctttgttggaaattctgtcatgtgttccataaactgctgagagacggacaccctaatgtgctgaaggactccttaaggtaccgaaatgaactgtctgatatgagccgtatgtggggacacctcagtgaaggctacgggcagctctgctcaatttatcttaaactcctgaggactaagatggaatatcataccaaaaacccgcgattccccggtaatctacagatgtctgatcgacaactcgatgaagcaggggagtccgatgtgaacaacttctttcagttaacagttgagatgtttgactacctggaatgtgaacttaacctgttccagactgtgtttaacagtctggacatgagccgcagtgtgtctgttacagcagcgggacagtgccggttagctccactaatccaggttatactggattgttcgcacttatatgactacaccgtgaaactgctctttaagctgcacagctgcttgcccgctgatacccttcaaggccatcgggaccgatttatggagcagtttaccaaattaaaggacttgttctatcgctcgtcaaacttgcagtatttcaaacgcctcatccaaatacctcagctgcctgaaaatcctcctaatttcttacgggcatctgccctgagcgaacatattagccctgtggtggtaatccccgcagaggcatcgtcacccgacagtgagccggtactggagaaggacgacctgatggatatggacgccagccagcaaaacttatttgataacaagttcgatgacatattcgggtcctctttctcgtcagaccccttcaacttcaactctcagaatggagtcaacaaggacgagaaggaccacctgattgagcgcctgtaccgtgagatcagtgggttgaaggcccagcttgagaatatgaaaactgaatcccagcgcgtcgtattgcagttgaagggccacgtgagtgaactagaagccgatctggccgaacaacagcacctgcgccagcaggctgctgatgattgtgagttcctccgggcagaactcgatgagctgcgtcgacagagagaagatacagaaaaagctcagagatcactgtcagagatcgaacggaaggctcaggccaatgagcagcgatattcgaaactgaaggagaagtactcagagttagtgcagaaccatgcagatctcctcagaaagaatgccgaggttacaaagcaggtgagtatggccagacaggcgcaggtggacctggagagggagaaaaaagagcttgaagactccctggaaaggataagtgaccaagggcagagaaaaacacaggagcagcttgaggtcctggagagcttgaagcaggagctggcgaccagccagagggaactgcaggtcctccagggctctttggagacttcggctcagagcgaagccaattgggccgctgaatttgcggagttagagaaagaaagagacagcctcgtctcgggcgctgcccatagggaagaagagctgtccgccctcaggaaggaactgcaagatacacagctgaaactagccagtacagaagaaagcatgtgtcagctggcaaaagatcaaagaaagatgctgctggtgggctcccggaaggcggctgaacaggtgatccaggacgcattgaaccagctggaggagccccctctcatttcctgtgccggttcagctgaccacttgctgtcgactgtgacatccattagtagctgcattgagcagctggagaaaagctggagccagtatctggcctgccccgaagatatctccggcctcctgcactcgattacactgctcgcccacttaacctcggatgccatcgcgcacggagcaacaacatgccttagggcaccacctgaacccgctgatagtctgacggaggcctgcaagcagtatggtagggagaccttggcttaccttgctagcctggaagaagaagggtctttggaaaacgccgactccaccgctatgcgcaactgcctcagtaagattaaagccatcggggaagaactattgccaagggggctggacataaagcaggaagaactgggtgacctggtggacaaagaaatggcagctaccagcgccgcaattgaaacagccacagctcggattgaaggcaccgcttctcccaaagaattttatgctaagaactctagatggacagaaggactgatttcagcctccaaggccgtcggatggggcgctacagtgatggtcgacgccgctgacctggtcgtacagggtagaggtaagttcgaggagctgatggtgtgtagtcacgaaatcgctgcatccaccgcccagctggtggcagccagtaaagtgaaagcggataaggactcaccaaatcttgcccagcttcagcaagctagccgtggggtgaatcaggccaccgcaggcgtggttgcctcgaccattagcgggaaaagccagatcgaggaaacagataatatggacttttctagcatgactttgacgcagattaaaagacaggagatggatagccaagtgagggtccttgagctggagaacgaactgcaaaaggagcgccagaaacttggcgagctgaggaagaaacactatgagcttgcaggtgtagcagagggctgggaggagggcactgaagcttcacccccaacactccaggaggtggtgactgagaaggagtag

SEQ ID NO: 85976 - protein, 296 aa, Artificial Sequence
  derived and/or modified sequence
MSWVQATLLARGLCRAWGGTCGAALTGTSISQVPRRLPRGLHCSAAAHSSEQSLVPSPPEPRQRPTKALVPFEDLFGQAPGGERDKASFLQTVQKFAEHSVRKRGHIDFIYLALRKMREYGVERDLAVYNQLLNIFPKEVFRPRNIIQRIFVHYPRQQECGIAVLEQMENHGVMPNKETEFLLIQIFGRKSYPMLKLVRLKLWFPRFMNVNPFPVPRDLPQDPVELAMFGLRHMEPDLSARVTIYQVPLPKDSTGAADPPQPHIVELTCCPRRRGKWKRRRRSGTSTTRCSWTWSM

SEQ ID NO: 85977 - DNA, 891 bp, Artificial Sequence
  derived and/or modified sequence
atgtcatgggtccaggcgactttgctcgccaggggcctatgtagggcctggggcggcacttgcggagccgccttaaccgggacatcaatctcacaagtaccccgacgtctgccgagaggactgcactgttcagcagccgcccattcctcagaacagtcccttgtcccctctccaccagaacccaggcaacggcctaccaaagcattggtcccatttgaggatctcttcggccaggctccaggcggagaacgcgataaggctagcttcctgcaaaccgtgcaaaagtttgcagagcacagtgtccgcaaaaggggccatatagattttatatacctggctctgaggaagatgagagaatatggcgtggaacgggacctcgccgtctacaatcagcttttaaacattttcccaaaggaagtttttaggccccggaatataattcaacggattttcgtgcactatccgcgtcagcaggaatgtggaattgctgtcctggaacaaatggaaaaccatggcgtcatgcctaataaagaaactgagttcctactcatacagatttttggacgtaaaagctatcccatgttgaagctggtacgcctgaaactgtggttcccccgcttcatgaacgtgaacccttttcctgtgcctagggacctgccccaggatccggttgaactcgccatgttcggcctgcggcatatggaacccgacctgtctgctagagtgaccatctaccaggtgcctctcccgaaggactcgacaggggccgctgacccaccccagccgcacattgtggaactgacatgctgtccccgaagaagaggaaagtggaagcggaggcggcgcagcggaacttccacaacccggtgcagttggacatggtctatgtag

SEQ ID NO: 85978 - DNA, 891 bp, Artificial Sequence
  derived and/or modified sequence
atgtcctgggtgcaggccaccctgctggcccggggcctgtgccgggcctggggcggcacctgtggggccgccctgaccggcaccagcatcagccaggtgccccggcggctgccccggggcctgcactgcagcgctgctgcccacagcagcgagcagagcctggtgcccagccccccagagccccggcagaggcccaccaaggccctggtgccctttgaggacctgtttggccaggcccctggaggagagcgggacaaggccagcttcctgcagacagtgcagaagtttgctgagcacagcgtgaggaagaggggccacatcgacttcatctacctggccctgaggaagatgagagaatatggagtggagcgggacctggccgtgtacaaccagctgctgaacatcttccccaaggaggtgttccggcccaggaacatcatccagaggatctttgtgcactacccccggcagcaggagtgtggcattgctgtgctggagcagatggagaaccacggcgtgatgcccaacaaggagacagagttcctgctgatccagatctttggaaggaagagctaccccatgctgaagctggtgcggctgaagctgtggttcccccgcttcatgaatgtgaaccccttccctgtgccccgggacctgccccaggaccctgtggagctggccatgtttggcctgcggcacatggagccagacctgagcgcccgggtgaccatctaccaggtgcccctgcccaaggacagcactggagctgctgaccccccccagccccacatcgtggagctgacctgctgccccaggagaagaggcaagtggaagagaagaagaagaagtggcaccagcaccacccgctgctcctggacctggagcatgtag

SEQ ID NO: 85979 - DNA, 891 bp, Artificial Sequence
  derived and/or modified sequence
atgagctgggtgcaggccaccctgctggcccggggcctgtgccgggcttggggagggacttgcggcgccgctctgacaggaacttccatatcacaggtgcctcggagactgcccaggggcctgcactgcagcgctgcagcccatagctctgaacaaagcctggtcccaagtcctccagaaccacgccagcgaccgaccaaggctctcgttccgttcgaagacctgtttgggcaggccccgggtggcgaaagagataaggccagtttcctgcaaactgttcaaaaattcgcggagcattccgtgcggaagcgcggccacatcgatttcatctatctggccctcagaaaaatgagggagtatggagtagaaagagatctcgctgtttacaaccagctcctgaacatttttccgaaagaggtgtttcgtccccggaatataatccagcgaatcttcgtgcactacccccgccagcaagaatgcgggattgcagttctggagcaaatggagaaccacggggtgatgccgaacaaggaaactgaattcttgctcattcagattttcggtcgtaaaagctatcctatgctcaagctcgtacgccttaaactttggttccccagatttatgaatgtgaatccgttccccgtccctagagacttgcctcaggatccagtggagcttgccatgtttggattgcgacacatggagccagacctcagtgccagggtgactatctaccaggtcccccttcccaaggactcgaccggggctgctgatccccctcagcctcatatcgttgagctaacttgctgcccaaggcggcgaggaaagtggaagaggcgtcggcggtctggtaccagcactactagatgcagctggacatggtcgatgtag

SEQ ID NO: 85980 - DNA, 891 bp, Artificial Sequence
  derived and/or modified sequence
atgtcttgggtgcaggctacattactcgccaggggactttgtagagcttggggcggaacctgcggagcagcgctcaccggcacatccatctctcaagtaccacggagactgccccgaggcctgcactgctccgcagcagcccactcatcagaacagagtctggttccttccccaccagagcctcgccagcggcctaccaaagccctggtgcccttcgaggacctttttggccaggcaccaggtggcgagagagataaggccagctttcttcagactgtgcaaaagttcgctgagcactccgtgagaaaaagggggcatattgattttatctacctcgcacttaggaagatgcgggaatacggagttgagcgggacctcgccgtttataaccagctgctgaatatcttcccaaaggaggtctttcgtccacgtaatatcatccagcgaatctttgtgcattacccacgccagcaggaatgcggaatagcggtcctagaacagatggaaaatcatggtgtaatgccaaataaagagacagagttcctcctgattcagatctttggcagaaagagttatcctatgctcaaactcgttcggttaaagttgtggttcccccgatttatgaatgtgaatccgtttcctgtgcccagagatctgccccaagacccagtcgagctggctatgtttggtctgagacatatggagcctgacctctctgcccgtgttaccatttaccaggtgcccttaccgaaggattccacaggagcagcggaccccccacagccccacatcgtggagctgacgtgttgccccaggcggagaggaaagtggaagcggaggcggaggtccggcacatcaaccaccaggtgttcttggacttggagtatgtag

SEQ ID NO: 85981 - DNA, 891 bp, Artificial Sequence
  derived and/or modified sequence
atgagctgggtgcaggccaccctgctggccagaggcctgtgcagagcctggggcggcacctgcggcgccgccctgaccggcaccagcatcagccaggtgcccagaagactgcccagaggcctgcactgcagcgccgccgcccacagcagcgagcagagcctggtgcccagcccccccgagcccagacagagacccaccaaggccctggtgcccttcgaggacctgttcggccaggcccccggcggcgagagagacaaggccagcttcctgcagaccgtgcagaagttcgccgagcacagcgtgagaaagagaggccacatcgacttcatctacctggccctgagaaagatgagagagtacggcgtggagagagacctggccgtgtacaaccagctgctgaacatcttccccaaggaggtgttcagacccagaaacatcatccagagaatcttcgtgcactaccccagacagcaggagtgcggcatcgccgtgctggagcagatggagaaccacggcgtgatgcccaacaaggagaccgagttcctgctgatccagatcttcggcagaaagagctaccccatgctgaagctggtgagactgaagctgtggttccccagattcatgaacgtgaaccccttccccgtgcccagagacctgccccaggaccccgtggagctggccatgttcggcctgagacacatggagcccgacctgagcgccagagtgaccatctaccaggtgcccctgcccaaggacagcaccggcgccgccgaccccccccagccccacatcgtggagctgacctgctgccccagaagaagaggcaagtggaagagaagaagaagaagcggcaccagcaccaccagatgcagctggacctggagcatgtag

SEQ ID NO: 85982 - protein, 189 aa, Artificial Sequence
  derived and/or modified sequence
MAAEPVEDNCINFVAMKFIDNTLYFIENLESDYFGKLESKLSVIRNLNDQVLFIDQGNRPLFEDMTDSDCRDNAPRTIFIISMYKDSQPRGMAVTISVKCEKISTLSCENKIISFKEMNPPDNIKDTKSDIIFFQRSVPGHDNKMQFESSSYEGYFLACEKERDLFKLILKKEDELGDRSIMFTVQNED

SEQ ID NO: 85983 - DNA, 570 bp, Artificial Sequence
  derived and/or modified sequence
atggccgccgagcccgtggaggacaactgcatcaacttcgtggccatgaagttcatcgacaacaccctgtacttcatcgagaacctggagagcgactacttcggcaagctggagagcaagctgagcgtgatcagaaacctgaacgaccaggtgctgttcatcgaccagggcaacagacccctgttcgaggacatgaccgacagcgactgcagagacaacgcccccagaaccatcttcatcatcagcatgtacaaggacagccagcccagaggcatggccgtgaccatcagcgtgaagtgcgagaagatcagcaccctgagctgcgagaacaagatcatcagcttcaaggagatgaacccccccgacaacatcaaggacaccaagagcgacatcatcttcttccagagaagcgtgcccggccacgacaacaagatgcagttcgagagcagcagctacgagggctacttcctggcctgcgagaaggagagagacctgttcaagctgatcctgaagaaggaggacgagctgggcgacagaagcatcatgttcaccgtgcagaacgaggactag

SEQ ID NO: 85984 - DNA, 570 bp, Artificial Sequence
  derived and/or modified sequence
atggctgccgaacctgtcgaggataattgcatcaattttgtcgcaatgaaatttattgacaatacgctgtactttattgaaaatcttgagtctgactacttcggtaagctggagagcaaactttcagtgattcggaatctcaacgaccaggttttgtttatagatcagggtaaccgccctctcttcgaagacatgacagactccgactgtagggacaatgcacctcggaccatcttcatcatctccatgtacaaagactctcagccccgaggcatggccgtaactattagcgtcaagtgcgagaaaatctctaccctgtcctgtgaaaacaagattatctcatttaaggaaatgaatccacccgataacatcaaggatacaaagagtgacatcatcttcttccagaggagcgttcccgggcacgacaacaaaatgcagtttgagagctcttcctacgaaggttatttcctggcctgtgaaaaagagcgcgacctcttcaaacttatcttaaaaaaggaagatgagctgggcgatagatcgattatgttcacagttcagaacgaggactag

SEQ ID NO: 85985 - DNA, 570 bp, Artificial Sequence
  derived and/or modified sequence
atggctgctgagcctgtggaggacaactgcatcaactttgtggccatgaagttcatcgacaacaccctgtacttcatcgagaacctggagagtgactactttgggaagctggagagcaagctgagcgtcatccggaacctgaatgaccaggtgctcttcatcgaccagggcaaccggcccctgtttgaggacatgacagacagcgactgccgggacaatgcccccaggaccatcttcatcatctccatgtacaaggacagccagccccggggcatggctgtgaccatctctgtgaagtgtgagaagatcagcaccctgagctgtgagaacaagatcatctccttcaaggagatgaaccccccagacaacatcaaggacaccaagagtgacatcatcttcttccagaggtctgtgcccggccatgacaacaagatgcagtttgagagcagcagctatgagggctacttcctggcctgtgagaaggagcgggacctcttcaagctgatcctgaagaaggaggatgagctgggggacaggagcatcatgttcaccgtgcagaatgaagattag

SEQ ID NO: 85986 - DNA, 1090 bp, Artificial Sequence
  derived and/or modified sequence
gcctggacagtcagcaaggaattgtctcccagtgcattttgccctcctggctgccaactctggctgctaaagcggctgccacctgctgcagtctacacagcttcgggaagaggaaaggaacctcagaccttccagatcgcttcctctcgcaacaaactatttgtcgcaggaataaagatggctgctgaaccagtagaagacaattgcatcaactttgtggcaatgaaatttattgacaatacgctttactttatagaaaacctggaatcagattactttggcaagcttgaatctaaattatcagtcataagaaatttgaatgaccaagttctcttcattgaccaaggaaatcggcctctatttgaagatatgactgattctgactgtagagataatgcaccccggaccatatttattataagtatgtataaagatagccagcctagaggtatggctgtaactatctctgtgaagtgtgagaaaatttcaactctctcctgtgagaacaaaattatttcctttaaggaaatgaatcctcctgataacatcaaggatacaaaaagtgacatcatattctttcagagaagtgtcccaggacatgataataagatgcaatttgaatcttcatcatacgaaggatactttctagcttgtgaaaaagagagagacctttttaaactcattttgaaaaaagaggatgaattgggggatagatctataatgttcactgttcaaaacgaagactagctattaaaatttcatgccgggcgcagtggctcacgcctgtaatcccagccctttgggaggctgaggcgggcagatcaccagaggtcaggtgttcaagaccagcctgaccaacatggtgaaacctcatctctactaaaaatacaaaaaattagctgagtgtagtgacgcatgccctcaatcccagctactcaagaggctgaggcaggagaatcacttgcactccggaggtagaggttgtggtgagccgagattgcaccattgcgctctagcctgggcaacaacagcaaaactccatctcaaaaaataaaataaataaataaacaaataaaaaattcataatgtg

SEQ ID NO: 85987 - DNA, 570 bp, Artificial Sequence
  derived and/or modified sequence
atggccgccgagcccgtggaggacaactgcatcaacttcgtggccatgaagttcatcgacaacactctctacttcatcgagaatcttgaatcagactatttcggcaagctggaatcaaaactatctgttattcggaatctcaacgatcaggtgctgtttatcgaccaaggcaatcgccccctctttgaggacatgaccgatagcgactgtcgggataatgccccccgaaccattttcatcatcagtatgtacaaggattcacagcctaggggaatggctgtgacaatcagcgtaaagtgcgaaaagattagcacacttagttgcgagaataagattatatcattcaaggagatgaatccccctgacaacattaaggacactaagtctgacataatctttttccagaggagcgtccctgggcatgacaacaagatgcagtttgagtctagctcatatgagggttatttcttggcttgcgagaaggaacgcgatcttttcaagctgattctcaagaaggaagatgagttgggggaccgctctattatgttcacagtgcaaaatgaagattag

SEQ ID NO: 85988 - DNA, 570 bp, Artificial Sequence
  derived and/or modified sequence
atggctgcggaacccgtagaagacaattgtattaacttcgtggctatgaaatttatagacaacaccctgtatttcatcgagaatttggagtccgactacttcggcaaattggagagcaagctgtctgtgattcggaacctcaacgatcaggtgctttttatcgatcagggtaatcgtcctctctttgaggatatgacagatagcgactgcagagacaacgctccacgcacgatttttatcatttctatgtataaagattcacaacctagaggaatggcagtgactataagtgtgaaatgtgaaaagataagtaccttgtcatgcgaaaataaaatcatctcatttaaggaaatgaaccccccagacaacatcaaggacactaaaagtgatattatcttttttcagaggtccgtgccaggtcacgataacaagatgcagtttgagtcctcttcttacgagggctatttcctggcttgtgaaaaagaaagagatttgtttaaactaattctaaaaaaggaggacgaacttggagacagaagcatcatgttcaccgttcagaacgaggattag

SEQ ID NO: 85989 - DNA, 570 bp, Artificial Sequence
  derived and/or modified sequence
atggcagccgagccggtcgaagacaactgtatcaatttcgttgccatgaagtttatagacaacacattgtatttcatcgagaacctcgaatccgactactttggtaagctggaaagcaaactgagcgtcattagaaatctcaatgaccaagtcctatttattgatcagggaaaccgcccactcttcgaggatatgacagactcagattgtagggataacgcaccaagaacaatttttattatatctatgtataaagacagccagcctagggggatggctgtaaccatcagcgtcaaatgcgagaagatctccacattatcatgcgaaaacaaaattattagctttaaagaaatgaacccaccagataacatcaaggacaccaaatctgacattatttttttccagcgatccgtgcctggacatgataataagatgcagtttgagagttctagctatgagggttactttcttgcctgtgagaaggaacgcgatctgttcaaattgatcctgaagaaagaggatgaattaggggataggagcattatgttcaccgtccaaaacgaggactag

SEQ ID NO: 85990 - DNA, 570 bp, Artificial Sequence
  derived and/or modified sequence
atggctgccgaacccgtggaggataactgtataaactttgtggcaatgaaattcatcgacaatacgctgtattttatcgaaaacctcgagagcgactattttggaaaactggagtcaaaactatccgtaatcaggaacttgaatgaccaggtgctgttcattgaccagggaaatcggcccttattcgaagacatgacagattccgactgtcgagataacgccccacgcactatctttatcatcagtatgtataaagattctcagcccagaggcatggccgttacaatttccgtcaagtgcgagaagatttcaacccttagctgcgagaataaaataatttctttcaaagaaatgaaccccccagacaacataaaggacactaaatccgatattatattttttcagaggagcgttcccggtcacgataataaaatgcagttcgaatcatctagttacgagggttactttctagcgtgtgagaaggaacgcgacttgttcaaactgattttgaagaaagaggacgagctaggcgacagatccatcatgttcacagtccaaaacgaagactag

SEQ ID NO: 85991 - RNA, 570 nt, Artificial Sequence
  derived and/or modified sequence
auggcagccgagccggucgaagacaacuguaucaauuucguugccaugaaguuuauagacaacacauuguauuucaucgagaaccucgaauccgacuacuuugguaagcuggaaagcaaacugagcgucauuagaaaucucaaugaccaaguccuauuuauugaucagggaaaccgcccacucuucgaggauaugacagacucagauuguagggauaacgcaccaagaacaauuuuuauuauaucuauguauaaagacagccagccuagggggauggcuguaaccaucagcgucaaaugcgagaagaucuccacauuaucaugcgaaaacaaaauuauuagcuuuaaagaaaugaacccaccagauaacaucaaggacaccaaaucugacauuauuuuuuuccagcgauccgugccuggacaugauaauaagaugcaguuugagaguucuagcuaugaggguuacuuucuugccugugagaaggaacgcgaucuguucaaauugauccugaagaaagaggaugaauuaggggauaggagcauuauguucaccguccaaaacgaggacuag

SEQ ID NO: 85992 - RNA, 570 nt, Artificial Sequence
  derived and/or modified sequence
auggcugccgaacccguggaggauaacuguauaaacuuuguggcaaugaaauucaucgacaauacgcuguauuuuaucgaaaaccucgagagcgacuauuuuggaaaacuggagucaaaacuauccguaaucaggaacuugaaugaccaggugcuguucauugaccagggaaaucggcccuuauucgaagacaugacagauuccgacugucgagauaacgccccacgcacuaucuuuaucaucaguauguauaaagauucucagcccagaggcauggccguuacaauuuccgucaagugcgagaagauuucaacccuuagcugcgagaauaaaauaauuucuuucaaagaaaugaaccccccagacaacauaaaggacacuaaauccgauauuauauuuuuucagaggagcguucccggucacgauaauaaaaugcaguucgaaucaucuaguuacgaggguuacuuucuagcgugugagaaggaacgcgacuuguucaaacugauuuugaagaaagaggacgagcuaggcgacagauccaucauguucacaguccaaaacgaagacuag

SEQ ID NO: 85993 - protein, 583 aa, Artificial Sequence
  derived and/or modified sequence
MGGLEKKKYERGSATNYITRNKARKKLQLSLADFRRLCILKGIYPHEPKHKKKVNKGSTAARTFYLIKDIRFLLHEPIVNKFREYKVFVRKLRKAYGKSEWNTVERLKDNKPNYKLDHIIKERYPTFIDALRDLDDALSMCFLFSTFPRTGKCHVQTIQLCRRLTVEFMHYIIAARALRKVFLSIKGIYYQAEVLGQPIVWITPYAFSHDHPTDVDYRVMATFTEFYTTLLGFVNFRLYQLLNLHYPPKLEGQAQAEAKAGEGTYALDSESCMEKLAALSASLARVVVPATEEEAEVDEFPTDGEEDRRKELEAQEKHKKLFEGLKFFLNREVPREALAFIIRSFGGEVSWDKSLCIGATYDVTDSRITHQIVDRPGQQTSVIGRCYVQPQWVFDSVNARLLLPVAEYFSGVQLPPHLSPFVTEKEGDYVPPEKLKLLALQRGEDPGNLNESEEEEEEDDNNEGDGDEEGENEEEEEDAEAGSEKEEEARLAALEEQRMEGKKPRVMAGTLKLEDKQRLAQEEESEAKRLAIMMMKKREKYLYQKIMFGKRRKIREANKLAEKRKAHDEAVRSEKKAKKARPE

SEQ ID NO: 85994 - DNA, 1752 bp, Artificial Sequence
  derived and/or modified sequence
atgggcggcctggagaagaagaagtacgagagaggcagcgccaccaactacatcaccagaaacaaggccagaaagaagctgcagctgagcctggccgacttcagaagactgtgcatcctgaagggcatctacccccacgagcccaagcacaagaagaaggtgaacaagggcagcaccgccgccagaaccttctacctgatcaaggacatcagattcctgctgcacgagcccatcgtgaacaagttcagagagtacaaggtgttcgtgagaaagctgagaaaggcctacggcaagagcgagtggaacaccgtggagagactgaaggacaacaagcccaactacaagctggaccacatcatcaaggagagataccccaccttcatcgacgccctgagagacctggacgacgccctgagcatgtgcttcctgttcagcaccttccccagaaccggcaagtgccacgtgcagaccatccagctgtgcagaagactgaccgtggagttcatgcactacatcatcgccgccagagccctgagaaaggtgttcctgagcatcaagggcatctactaccaggccgaggtgctgggccagcccatcgtgtggatcaccccctacgccttcagccacgaccaccccaccgacgtggactacagagtgatggccaccttcaccgagttctacaccaccctgctgggcttcgtgaacttcagactgtaccagctgctgaacctgcactacccccccaagctggagggccaggcccaggccgaggccaaggccggcgagggcacctacgccctggacagcgagagctgcatggagaagctggccgccctgagcgccagcctggccagagtggtggtgcccgccaccgaggaggaggccgaggtggacgagttccccaccgacggcgaggaggacagaagaaaggagctggaggcccaggagaagcacaagaagctgttcgagggcctgaagttcttcctgaacagagaggtgcccagagaggccctggccttcatcatcagaagcttcggcggcgaggtgagctgggacaagagcctgtgcatcggcgccacctacgacgtgaccgacagcagaatcacccaccagatcgtggacagacccggccagcagaccagcgtgatcggcagatgctacgtgcagccccagtgggtgttcgacagcgtgaacgccagactgctgctgcccgtggccgagtacttcagcggcgtgcagctgcccccccacctgagccccttcgtgaccgagaaggagggcgactacgtgccccccgagaagctgaagctgctggccctgcagagaggcgaggaccccggcaacctgaacgagagcgaggaggaggaggaggaggacgacaacaacgagggcgacggcgacgaggagggcgagaacgaggaggaggaggaggacgccgaggccggcagcgagaaggaggaggaggccagactggccgccctggaggagcagagaatggagggcaagaagcccagagtgatggccggcaccctgaagctggaggacaagcagagactggcccaggaggaggagagcgaggccaagagactggccatcatgatgatgaagaagagagagaagtacctgtaccagaagatcatgttcggcaagagaagaaagatcagagaggccaacaagctggccgagaagagaaaggcccacgacgaggccgtgagaagcgagaagaaggccaagaaggccagacccgagtag

SEQ ID NO: 85995 - DNA, 1752 bp, Artificial Sequence
  derived and/or modified sequence
atgggcgggctcgagaaaaagaagtatgaacgtgggtcagccaccaattacatcactcgcaataaagccaggaagaagttacagctcagtctggccgactttcgtcgactctgtatcttaaaaggcatatacccgcatgaacccaagcacaagaaaaaagtaaacaagggttccacagctgctcggacattttacctgataaaggacattaggttccttcttcatgaacccattgtcaacaaatttagggaatacaaggtgtttgtgagaaagctgaggaaggcctatgggaaatccgagtggaacaccgtggagcgcctcaaggacaataagccaaattacaagcttgatcatatcattaaagagaggtatccaacgtttattgacgcactgagagacctggacgatgctcttagcatgtgttttttgttctccacgttcccgcgaaccggaaaatgtcacgtgcagactatccaactatgcagacggctcactgtggagttcatgcactatatcatagcagctcgtgccctccgcaaggtgttcctttccatcaaaggcatttactaccaagccgaagtgctgggtcaacctatcgtttggattactccgtacgccttcagccatgaccatcctacagacgtagactaccgagtgatggccaccttcactgaattctataccacactactcggctttgtcaactttcgtctctaccagctattgaacttgcactacccaccaaaactggaaggccaagcgcaggccgaggcaaaagcgggggaggggacttacgccctggatagcgagagctgcatggagaaactcgccgccctgagcgcttccctggcacgggttgtagtgcctgcaacagaggaggaagcagaagtggatgaattccctaccgatggagaggaggaccgacggaaggagctggaagcacaagagaagcataagaagcttttcgaaggcctgaaatttttcctgaatagggaggtcccgcgagaagctttggcctttatcattcgctcatttggcggggaagttagctgggataagtctctctgcattggggccacctacgatgtgacagactcacggattacacaccaaatcgtagaccgcccagggcagcaaacctctgtcatcggaaggtgctacgtccagccacagtgggtgtttgattctgtcaatgctaggctgcttctgcctgtggctgagtacttttcaggcgtgcagctacccccgcacctgtcacccttcgttacagaaaaggagggggactacgttccccctgaaaaactgaaactgctggccttgcagagaggggaagatcccggcaatttgaacgagagtgaggaagaggaagaagaagatgataacaacgagggcgacggggatgaggagggggagaacgaggaggaggaagaggatgctgaagcagggtcagagaaggaagaggaagcccgactggcagccttagaagagcagcgaatggaaggcaagaagccgagggtcatggccggaacactgaagcttgaagataagcaacggctcgcccaagaagaagagtcagaagctaagcggttagctattatgatgatgaagaagcgggagaagtacctgtaccagaaaatcatgtttgggaaaagacgaaagatccgggaggcaaataaactggccgaaaagcgcaaagcccacgacgaggcggtgcgcagtgaaaagaaagcaaaaaaggccagaccagaatag

SEQ ID NO: 85996 - DNA, 1752 bp, Artificial Sequence
  derived and/or modified sequence
atgggcggcctggagaagaagaagtatgagcggggcagcgccaccaactacatcaccaggaacaaggccaggaagaagctgcagctgagcctggccgacttccggcggctgtgcatcctgaagggcatctacccccatgagcccaagcacaagaagaaggtgaacaagggcagcacagctgcccggaccttctacctgatcaaggacatccgcttcctgctgcacgagcccatcgtgaacaagttccgggagtacaaggtgtttgtgaggaagctgaggaaggcctacggcaagtctgagtggaacacagtggagcggctgaaggacaacaagcccaactacaagctggaccacatcatcaaggagcgctaccccaccttcattgatgccctgcgggacctggatgatgccctgtccatgtgcttcctgttcagcaccttccccaggacaggcaagtgccacgtgcagaccatccagctgtgccggcggctgactgtggagttcatgcactacatcatcgccgcccgggccctgaggaaggtgttcctgagcatcaagggcatctactaccaggccgaggtgctgggccagcccatcgtgtggatcaccccctatgccttcagccatgaccaccccacagatgtggactacagagtgatggccaccttcacagagttctacaccaccctgctgggctttgtgaacttccggctgtaccagctgctgaacctgcactacccacccaagctggagggccaggcccaggccgaggccaaggccggggagggcacctacgccctggacagcgagagctgcatggagaagctggccgccctgagcgccagcctggcccgggtggtggtgcctgccacagaggaggaggccgaggtggatgagttccccacagatggagaggaggacaggaggaaggagctggaggcccaggagaagcacaagaagctgtttgagggcctgaagttcttcctgaaccgggaggtgccccgggaggccctggccttcatcatccgcagctttggaggagaggtgtcctgggacaagagcctgtgcattggagccacctatgatgtgacagacagccgcatcacccaccagatcgtggaccggcccggccagcagacctctgtgattggccgctgctacgtgcagccccagtgggtgtttgacagcgtgaatgcccggctgctgctgcctgtggccgagtacttcagcggcgtgcagctgcccccccacctgagcccctttgtgacagagaaggagggggactatgtgcccccagagaagctgaagctgctggccctgcagagaggagaggaccccggcaacctgaatgaaagtgaggaggaggaggaggaggatgacaacaatgaaggagatggagatgaggagggagaaaatgaggaggaggaggaggatgctgaggccggcagcgagaaggaggaggaggcccggctggccgccctggaggagcagaggatggagggcaagaagccccgggtgatggccggcaccctgaagctggaggacaagcagaggctggcccaggaggaggagagcgaggccaagaggctggccatcatgatgatgaagaagcgggagaagtacctgtaccagaagatcatgtttgggaagaggaggaagatccgggaggccaacaagctggccgagaagaggaaggcccatgatgaggccgtgcgctctgagaagaaggccaagaaggcccggcctgagtag

SEQ ID NO: 85997 - DNA, 1752 bp, Artificial Sequence
  derived and/or modified sequence
atgggcggcctggagaagaagaagtacgagcggggcagcgccaccaattacattacccggaacaaagcacgcaagaaattacagctttcacttgcagacttccggcgattatgtatcctgaaagggatctacccacatgagccaaaacacaaaaaaaaggtaaataaaggtagcacagccgcgagaactttttatctaataaaggatattaggtttttgttacatgagcccatagtgaacaaattccgcgagtacaaagtgttcgtgaggaagcttaggaaggcatatggcaaaagtgaatggaacactgtggagagactcaaggataataagcctaactataagctcgaccacatcatcaaggaaagataccccaccttcatcgatgccctgagggatcttgatgatgcactgtcaatgtgctttttattctcaaccttcccaagaactggcaagtgccacgtacaaacaatacagttgtgccgtcgcctcactgtcgagttcatgcactacattatagcagctagggccttgaggaaggtcttccttagcatcaaaggaatttactatcaagccgaagtgctgggccaaccaatcgtatggatcacaccatatgcgtttagccatgatcatccgacagacgtggattatcgggtgatggcgacttttactgagttctatacaactctcctcggattcgtgaacttcaggctgtatcagctactaaacttacattatccccctaagctggagggtcaagcgcaggctgaagctaaagcgggggagggaacttatgcactggactccgagtcctgcatggagaaactcgcggcactatcagcttccttggcccgagtagtggtgcctgctaccgaggaagaagcagaagtggacgagtttcccactgacggcgaggaagaccgccgaaaggaattggaagcccaagagaagcacaagaaactcttcgagggtctaaagttcttcttaaatagggaagtgccccgtgaagctctggcattcattatcaggtcttttggtggcgaggtctcatgggacaagagcctgtgcattggtgcaacctacgacgtgaccgattcaaggattacccaccagattgtggaccggccaggccagcagaccagtgtgattgggcgatgctacgtgcagccccagtgggtgttcgatagcgttaatgcccggctccttctcccagtggctgaatatttctcgggcgtgcaactgcccccccacctatctccattcgtgaccgagaaggagggagattacgtcccgcccgagaagctgaagctgctcgccttgcagaggggagaggacccagggaacctcaatgaatcagaggaagaagaggaggaggatgacaataacgaaggcgatggggacgaagagggtgaaaacgaggaagaggaagaggatgccgaggcgggctcagaaaaggaagaagaggccagactcgcggcgctcgaagaacagagaatggagggtaaaaagcctagagtgatggctggcactttaaaattggaggataaacagagactcgctcaagaggaggaatccgaagctaagcgattggctattatgatgatgaagaagagggaaaagtacttgtatcaaaagatcatgttcgggaaaagacggaaaattcgggaagccaacaaactggccgagaagcgaaaagctcacgacgaagcagtccggtctgagaaaaaagcgaaaaaggcgagaccagaatag

SEQ ID NO: 85998 - DNA, 1752 bp, Artificial Sequence
  derived and/or modified sequence
atggggggactcgaaaaaaagaagtacgagaggggctccgccacaaattacatcaccagaaacaaggccaggaagaagcttcagctcagcttggccgattttaggcggctgtgtattttaaaggggatctatccgcatgaaccaaaacataaaaaaaaagtgaacaaaggttccaccgctgctaggactttttacctcattaaagatatcagattcctgctgcacgaaccgattgtcaacaagtttcgtgaatacaaagtctttgtgagaaagttaagaaaggcgtacggtaagtctgaatggaataccgtcgaaagactcaaggacaataagcctaattacaaattggaccacattatcaaggagcggtacccaacattcattgatgccttacgagacctcgatgacgcgctcagcatgtgcttcctttttagcacttttcctcggaccgggaagtgccatgttcagaccatccaattgtgtcgccgtctgaccgtcgaatttatgcattatattatcgccgcaagggccctgcggaaggtctttctctctataaagggaatttactaccaggctgaagttctcgggcagccgattgtctggattacaccttatgctttttcccacgaccacccgaccgacgtcgactatcgtgtgatggcgacctttaccgaattttacaccacattactgggcttcgtcaacttccggctgtaccaactgctgaacctgcactatccaccaaagctcgaagggcaggcccaagcggaggctaaggctggggaagggacctacgctttagactccgagtcttgcatggaaaaacttgctgccctctccgcaagcttggctcgagtggtggttcccgctaccgaggaggaagctgaagtcgacgagtttcctacagatggggaagaggaccgcagaaaagagctggaggctcaggagaaacataaaaaacttttcgaagggctgaaattctttctgaatcgcgaagtgccaagggaggcactggccttcatcattaggtcattcggaggcgaggtgtcttgggacaaatccctatgtattggagcgacctatgacgtgacagacagccggataacgcaccaaatcgtcgatagaccaggccaacagacctcggtgattggcagatgttacgttcagccgcagtgggtctttgattctgtgaacgccaggttgctgctccccgtggccgaatacttcagcggcgtacagctgccaccccacttgagtccctttgttaccgagaaagaaggagattacgttcccccagagaaactcaagctgcttgccttacagcgcggagaagaccccggaaatttgaacgagagcgaggaggaggaggaagaagatgataacaacgaaggggacggcgatgaagaaggtgaaaacgaagaggaggaggaggatgcggaagcaggttccgagaaagaagaagaggcgagactcgccgctctagaagaacaacgaatggagggtaagaagccaagagtgatggccggtacccttaagctcgaggacaaacagcggctggcgcaggaggaagaatccgaggctaagaggctggccatcatgatgatgaaaaagcgcgaaaagtatctgtatcagaagatcatgttcgggaagcgaagaaaaatcagagaagcaaacaaacttgccgaaaagagaaaagcccatgacgaggccgtgagatccgaaaaaaaagcgaaaaaggcacggccagagtag

SEQ ID NO: 85999 - DNA, 1988 bp, Artificial Sequence
  derived and/or modified sequence
ctagtcggctcctcaacgtggagcgatgggaggccttgagaagaagaagtatgaacgaggctcggccaccaactacatcacccggaacaaagcccggaagaagctccagctgagcttggctgactttaggcggctgtgcattctgaagggcatttatccccatgaacccaaacacaagaagaaggttaacaagggttctacagcagcccgaacgttttaccttatcaaagacatcaggtttctcctccacgaacccattgtcaacaagttccgtgaatacaaggtgttcgtccggaagctccggaaggcttatgggaagagcgagtggaacactgtagagcgtttaaaggacaataagcccaactacaaactcgaccacatcatcaaggaacggtatcccacgttcatcgatgccctgcgggacctggacgatgccctctccatgtgcttcctgttttccaccttcccgcggactggcaagtgccacgtgcagaccattcagctgtgccgccggctcactgtggagttcatgcactacattatcgctgcccgtgccctgcgcaaggtcttcctgtccatcaaaggcatttactaccaggccgaggtactggggcagcccatcgtgtggatcactccctatgccttctcccatgaccacccgacagacgtggactacagggtcatggccaccttcaccgagttctacaccacgctgctgggctttgtcaacttccgcctttaccagttgctcaacctccactatcccccgaagctcgagggtcaggcccaagcagaggcaaaggccggtgagggcacctacgcgttggactccgagagttgtatggagaaactggcagccctcagtgccagcctggcccgcgtggtggtgcctgccacagaggaggaggccgaggtggatgagtttcccaccgatggggaggaagaccgcaggaaggagctggaggcgcaggagaagcacaagaagctttttgagggcctgaagttcttcctgaaccgagaggtgccccgtgaggccctggccttcatcatcaggagttttggtggggaagtgtcctgggacaaatctttgtgcattggggccacctatgacgtcacagactcccgcatcacccatcagattgtcgaccggcctgggcagcagacctcagtcattggcaggtgctacgtgcagccccagtgggtgtttgactcagtgaacgccaggctccttctccccgtggcagagtacttctctggggtgcagctgcccccacacctttcaccctttgtgaccgagaaggaaggagattacgttccacctgagaagctgaagctgctggctctgcagcggggagaggacccaggaaacctgaatgagtcagaagaggaggaggaagaggacgacaacaacgaaggtgatggtgatgaagagggagaaaatgaggaggaggaggaagatgcagaggctggttcagaaaaggaggaagaggcccggctggcagccctggaagagcagaggatggaggggaagaagcccagggtgatggcaggcaccttgaagctggaggataagcagcggctggcccaggaggaggagagtgaggccaagcgcctggccattatgatgatgaagaagcgggagaagtacctgtaccagaagatcatgtttggcaagaggcgaaaaatccgagaggccaacaagctggcggagaagcggaaagcccacgatgaggcggtgaggtctgagaagaaggccaagaaggcaaggccggagtgagtgcctgcggcccctcacagggctgaggccagcccctagcagctggatgtggcagaggcaggccagaggacctaagtgtgatggaccagagtcacttctcctcctcctttctccagccagccctgacccctcatgctctctggctgggccagtgggcagccctcgcttcccttggatggagctgccctgctggtgcctggtcagagaagag

SEQ ID NO: 86000 - protein, 671 aa, Artificial Sequence
  derived and/or modified sequence
MHHQQRMAALGTDKELSDLLDFSAMFSPPVSSGKNGPTSLASGHFTGSNVEDRSSSGSWGNGGHPSPSRNYGDGTPYDHMTSRDLGSHDNLSPPFVNSRIQSKTERGSYSSYGRESNLQGCHQQSLLGGDMDMGNPGTLSPTKPGSQYYQYSSNNPRRRPLHSSAMEVQTKKVRKVPPGLPSSVYAPSASTADYNRDSPGYPSSKPATSTFPSSFFMQDGHHSSDPWSSSSGMNQPGYAGMLGNSSHIPQSSSYCSLHPHERLSYPSHSSADINSSLPPMSTFHRSGTNHYSTSSCTPPANGTDSIMANRGSGAAGSSQTGDALGKALASIYSPDHTNNSFSSNPSTPVGSPPSLSAGTAVWSRNGGQASSSPNYEGPLHSLQSRIEDRLERLDDAIHVLRNHAVGPSTAMPGGHGDMHGIIGPSHNGAMGGLGSGYGTGLLSANRHSLMVGTHREDGVALRGSHSLLPNQVPVPQLPVQSATSPDLNPPQDPYRGMPPGLQGQSVSSGSSEIKSDDEGDENLQDTKSSEDKKLDDDKKDIKSITRSRSSNNDDEDLTPEQKAEREKERRMANNARERLRVRDINEAFKELGRMVQLHLKSDKPQTKLLILHQAVAVILSLEQQVRERNLNPKAACLKRREEEKVSSEPPPLSLAGPHPGMGDASNHMGQM

SEQ ID NO: 86001 - protein, 773 aa, Artificial Sequence
  derived and/or modified sequence
MFSKRLEKIAQVPLLFPFIFIILTNYSKMEGAVESQPSFFKTSQDIVTCTWVENCYSSFSRRPLEQMFCKHQSKNIISWTGMVAHTCNPSTLGGQGLCDFAKMHHQQRMAALGTDKELSDLLDFSAMFSPPVSSGKNGPTSLASGHFTGSNVEDRSSSGSWGNGGHPSPSRNYGDGTPYDHMTSRDLGSHDNLSPPFVNSRIQSKTERGSYSSYGRESNLQGCHQQSLLGGDMDMGNPGTLSPTKPGSQYYQYSSNNPRRRPLHSSAMEVQTKKVRKVPPGLPSSVYAPSASTADYNRDSPGYPSSKPATSTFPSSFFMQDGHHSSDPWSSSSGMNQPGYAGMLGNSSHIPQSSSYCSLHPHERLSYPSHSSADINSSLPPMSTFHRSGTNHYSTSSCTPPANGTDSIMANRGSGAAGSSQTGDALGKALASIYSPDHTNNSFSSNPSTPVGSPPSLSAGTAVWSRNGGQASSSPNYEGPLHSLQSRIEDRLERLDDAIHVLRNHAVGPSTAMPGGHGDMHGIIGPSHNGAMGGLGSGYGTGLLSANRHSLMVGTHREDGVALRGSHSLLPNQVPVPQLPVQSATSPDLNPPQDPYRGMPPGLQGQSVSSGSSEIKSDDEGDENLQDTKSSEDKKLDDDKKDIKSITRSRSSNNDDEDLTPEQKAEREKERRMANNARERLRVRDINEAFKELGRMVQLHLKSDKPQTKLLILHQAVAVILSLEQQVRERNLNPKAACLKRREEEKVSSEPPPLSLAGPHPGMGDASNHMGQM

SEQ ID NO: 86002 - protein, 647 aa, Artificial Sequence
  derived and/or modified sequence
MFSPPVSSGKNGPTSLASGHFTGSNVEDRSSSGSWGNGGHPSPSRNYGDGTPYDHMTSRDLGSHDNLSPPFVNSRIQSKTERGSYSSYGRESNLQGCHQQSLLGGDMDMGNPGTLSPTKPGSQYYQYSSNNPRRRPLHSSAMEVQTKKVRKVPPGLPSSVYAPSASTADYNRDSPGYPSSKPATSTFPSSFFMQDGHHSSDPWSSSSGMNQPGYAGMLGNSSHIPQSSSYCSLHPHERLSYPSHSSADINSSLPPMSTFHRSGTNHYSTSSCTPPANGTDSIMANRGSGAAGSSQTGDALGKALASIYSPDHTNNSFSSNPSTPVGSPPSLSAGTAVWSRNGGQASSSPNYEGPLHSLQSRIEDRLERLDDAIHVLRNHAVGPSTAMPGGHGDMHGIIGPSHNGAMGGLGSGYGTGLLSANRHSLMVGTHREDGVALRGSHSLLPNQVPVPQLPVQSATSPDLNPPQDPYRGMPPGLQGQSVSSGSSEIKSDDEGDENLQDTKSSEDKKLDDDKKDIKSITRSRSSNNDDEDLTPEQKAEREKERRMANNARERLRVRDINEAFKELGRMVQLHLKSDKPQTKLLILHQAVAVILSLEQQVRERNLNPKAACLKRREEEKVSSEPPPLSLAGPHPGMGDASNHMGQM

SEQ ID NO: 86003 - DNA, 2016 bp, Artificial Sequence
  derived and/or modified sequence
atgcaccaccagcagagaatggccgccctgggcaccgacaaggagctgagcgacctgctggacttcagcgccatgttcagcccccccgtgagcagcggcaagaacggccccaccagcctggccagcggccacttcaccggcagcaacgtggaggacagaagcagcagcggcagctggggcaacggcggccaccccagccccagcagaaactacggcgacggcaccccctacgaccacatgaccagcagagacctgggcagccacgacaacctgagcccccccttcgtgaacagcagaatccagagcaagaccgagagaggcagctacagcagctacggcagagagagcaacctgcagggctgccaccagcagagcctgctgggcggcgacatggacatgggcaaccccggcaccctgagccccaccaagcccggcagccagtactaccagtacagcagcaacaaccccagaagaagacccctgcacagcagcgccatggaggtgcagaccaagaaggtgagaaaggtgccccccggcctgcccagcagcgtgtacgcccccagcgccagcaccgccgactacaacagagacagccccggctaccccagcagcaagcccgccaccagcaccttccccagcagcttcttcatgcaggacggccaccacagcagcgacccctggagcagcagcagcggcatgaaccagcccggctacgccggcatgctgggcaacagcagccacatcccccagagcagcagctactgcagcctgcacccccacgagagactgagctaccccagccacagcagcgccgacatcaacagcagcctgccccccatgagcaccttccacagaagcggcaccaaccactacagcaccagcagctgcaccccccccgccaacggcaccgacagcatcatggccaacagaggcagcggcgccgccggcagcagccagaccggcgacgccctgggcaaggccctggccagcatctacagccccgaccacaccaacaacagcttcagcagcaaccccagcacccccgtgggcagcccccccagcctgagcgccggcaccgccgtgtggagcagaaacggcggccaggccagcagcagccccaactacgagggccccctgcacagcctgcagagcagaatcgaggacagactggagagactggacgacgccatccacgtgctgagaaaccacgccgtgggccccagcaccgccatgcccggcggccacggcgacatgcacggcatcatcggccccagccacaacggcgccatgggcggcctgggcagcggctacggcaccggcctgctgagcgccaacagacacagcctgatggtgggcacccacagagaggacggcgtggccctgagaggcagccacagcctgctgcccaaccaggtgcccgtgccccagctgcccgtgcagagcgccaccagccccgacctgaaccccccccaggacccctacagaggcatgccccccggcctgcagggccagagcgtgagcagcggcagcagcgagatcaagagcgacgacgagggcgacgagaacctgcaggacaccaagagcagcgaggacaagaagctggacgacgacaagaaggacatcaagagcatcaccagaagcagaagcagcaacaacgacgacgaggacctgacccccgagcagaaggccgagagagagaaggagagaagaatggccaacaacgccagagagagactgagagtgagagacatcaacgaggccttcaaggagctgggcagaatggtgcagctgcacctgaagagcgacaagccccagaccaagctgctgatcctgcaccaggccgtggccgtgatcctgagcctggagcagcaggtgagagagagaaacctgaaccccaaggccgcctgcctgaagagaagagaggaggagaaggtgagcagcgagcccccccccctgagcctggccggcccccaccccggcatgggcgacgccagcaaccacatgggccagatgtag

SEQ ID NO: 86004 - DNA, 2322 bp, Artificial Sequence
  derived and/or modified sequence
atgttcagcaagagactggagaagatcgcccaggtgcccctgctgttccccttcatcttcatcatcctgaccaactacagcaagatggagggcgccgtggagagccagcccagcttcttcaagaccagccaggacatcgtgacctgcacctgggtggagaactgctacagcagcttcagcagaagacccctggagcagatgttctgcaagcaccagagcaagaacatcatcagctggaccggcatggtggcccacacctgcaaccccagcaccctgggcggccagggcctgtgcgacttcgccaagatgcaccaccagcagagaatggccgccctgggcaccgacaaggagctgagcgacctgctggacttcagcgccatgttcagcccccccgtgagcagcggcaagaacggccccaccagcctggccagcggccacttcaccggcagcaacgtggaggacagaagcagcagcggcagctggggcaacggcggccaccccagccccagcagaaactacggcgacggcaccccctacgaccacatgaccagcagagacctgggcagccacgacaacctgagcccccccttcgtgaacagcagaatccagagcaagaccgagagaggcagctacagcagctacggcagagagagcaacctgcagggctgccaccagcagagcctgctgggcggcgacatggacatgggcaaccccggcaccctgagccccaccaagcccggcagccagtactaccagtacagcagcaacaaccccagaagaagacccctgcacagcagcgccatggaggtgcagaccaagaaggtgagaaaggtgccccccggcctgcccagcagcgtgtacgcccccagcgccagcaccgccgactacaacagagacagccccggctaccccagcagcaagcccgccaccagcaccttccccagcagcttcttcatgcaggacggccaccacagcagcgacccctggagcagcagcagcggcatgaaccagcccggctacgccggcatgctgggcaacagcagccacatcccccagagcagcagctactgcagcctgcacccccacgagagactgagctaccccagccacagcagcgccgacatcaacagcagcctgccccccatgagcaccttccacagaagcggcaccaaccactacagcaccagcagctgcaccccccccgccaacggcaccgacagcatcatggccaacagaggcagcggcgccgccggcagcagccagaccggcgacgccctgggcaaggccctggccagcatctacagccccgaccacaccaacaacagcttcagcagcaaccccagcacccccgtgggcagcccccccagcctgagcgccggcaccgccgtgtggagcagaaacggcggccaggccagcagcagccccaactacgagggccccctgcacagcctgcagagcagaatcgaggacagactggagagactggacgacgccatccacgtgctgagaaaccacgccgtgggccccagcaccgccatgcccggcggccacggcgacatgcacggcatcatcggccccagccacaacggcgccatgggcggcctgggcagcggctacggcaccggcctgctgagcgccaacagacacagcctgatggtgggcacccacagagaggacggcgtggccctgagaggcagccacagcctgctgcccaaccaggtgcccgtgccccagctgcccgtgcagagcgccaccagccccgacctgaaccccccccaggacccctacagaggcatgccccccggcctgcagggccagagcgtgagcagcggcagcagcgagatcaagagcgacgacgagggcgacgagaacctgcaggacaccaagagcagcgaggacaagaagctggacgacgacaagaaggacatcaagagcatcaccagaagcagaagcagcaacaacgacgacgaggacctgacccccgagcagaaggccgagagagagaaggagagaagaatggccaacaacgccagagagagactgagagtgagagacatcaacgaggccttcaaggagctgggcagaatggtgcagctgcacctgaagagcgacaagccccagaccaagctgctgatcctgcaccaggccgtggccgtgatcctgagcctggagcagcaggtgagagagagaaacctgaaccccaaggccgcctgcctgaagagaagagaggaggagaaggtgagcagcgagcccccccccctgagcctggccggcccccaccccggcatgggcgacgccagcaaccacatgggccagatgtag

SEQ ID NO: 86005 - DNA, 1944 bp, Artificial Sequence
  derived and/or modified sequence
atgttcagcccccccgtgagcagcggcaagaacggccccaccagcctggccagcggccacttcaccggcagcaacgtggaggacagaagcagcagcggcagctggggcaacggcggccaccccagccccagcagaaactacggcgacggcaccccctacgaccacatgaccagcagagacctgggcagccacgacaacctgagcccccccttcgtgaacagcagaatccagagcaagaccgagagaggcagctacagcagctacggcagagagagcaacctgcagggctgccaccagcagagcctgctgggcggcgacatggacatgggcaaccccggcaccctgagccccaccaagcccggcagccagtactaccagtacagcagcaacaaccccagaagaagacccctgcacagcagcgccatggaggtgcagaccaagaaggtgagaaaggtgccccccggcctgcccagcagcgtgtacgcccccagcgccagcaccgccgactacaacagagacagccccggctaccccagcagcaagcccgccaccagcaccttccccagcagcttcttcatgcaggacggccaccacagcagcgacccctggagcagcagcagcggcatgaaccagcccggctacgccggcatgctgggcaacagcagccacatcccccagagcagcagctactgcagcctgcacccccacgagagactgagctaccccagccacagcagcgccgacatcaacagcagcctgccccccatgagcaccttccacagaagcggcaccaaccactacagcaccagcagctgcaccccccccgccaacggcaccgacagcatcatggccaacagaggcagcggcgccgccggcagcagccagaccggcgacgccctgggcaaggccctggccagcatctacagccccgaccacaccaacaacagcttcagcagcaaccccagcacccccgtgggcagcccccccagcctgagcgccggcaccgccgtgtggagcagaaacggcggccaggccagcagcagccccaactacgagggccccctgcacagcctgcagagcagaatcgaggacagactggagagactggacgacgccatccacgtgctgagaaaccacgccgtgggccccagcaccgccatgcccggcggccacggcgacatgcacggcatcatcggccccagccacaacggcgccatgggcggcctgggcagcggctacggcaccggcctgctgagcgccaacagacacagcctgatggtgggcacccacagagaggacggcgtggccctgagaggcagccacagcctgctgcccaaccaggtgcccgtgccccagctgcccgtgcagagcgccaccagccccgacctgaaccccccccaggacccctacagaggcatgccccccggcctgcagggccagagcgtgagcagcggcagcagcgagatcaagagcgacgacgagggcgacgagaacctgcaggacaccaagagcagcgaggacaagaagctggacgacgacaagaaggacatcaagagcatcaccagaagcagaagcagcaacaacgacgacgaggacctgacccccgagcagaaggccgagagagagaaggagagaagaatggccaacaacgccagagagagactgagagtgagagacatcaacgaggccttcaaggagctgggcagaatggtgcagctgcacctgaagagcgacaagccccagaccaagctgctgatcctgcaccaggccgtggccgtgatcctgagcctggagcagcaggtgagagagagaaacctgaaccccaaggccgcctgcctgaagagaagagaggaggagaaggtgagcagcgagcccccccccctgagcctggccggcccccaccccggcatgggcgacgccagcaaccacatgggccagatgtag

SEQ ID NO: 86006 - DNA, 2016 bp, Artificial Sequence
  derived and/or modified sequence
atgcatcaccagcaaagaatggccgcacttggcaccgataaggaactgtcagacttactggacttcagcgcaatgttcagcccacctgtgtcatctggcaaaaacggacctacaagcctggcaagcggccattttactggttctaatgttgaagaccgcagctccagtggtagttggggcaatggcgggcatccttccccttctagaaattacggggacggaaccccctacgaccacatgacttctcgtgaccttgggagccacgacaacttgtcaccccccttcgtcaattctcggattcagagtaagactgagagagggtcttatagttcgtacggaagagagagcaaccttcagggctgccaccagcagagtctcttagggggtgacatggatatgggtaacccgggcacactgagccccactaaaccaggttctcagtattatcaatattccagcaataacccgcgacgacggccattgcactcatctgcaatggaagtccagacaaagaaggtcagaaaggtcccgccaggccttccaagcagtgtatacgccccttcagcgtcaactgctgattacaatagggattcacccggttacccctctagcaaaccggctaccagcactttcccatcaagtttttttatgcaagacggccatcacagcagcgacccctggagcagttcgtcaggcatgaatcagcccggctatgcggggatgctcgggaattcgagccatattccccagtcctcatcctattgctcactgcacccccacgagaggctgagctacccatcacactcctctgccgacatcaacagtagtttaccacccatgtctacatttcatcggtccgggactaaccactactcaacatcgagctgtacacctccggccaatggaaccgactcgatcatggccaaccgaggtagcggggctgccggatcatcacagaccggagatgcattgggaaaggctctggccagcatttactctccagatcacaccaataattccttctctagtaacccaagcacacctgttggcagcccaccttcactcagcgccggaacggctgtgtggagcagaaacggcggtcaggcgagctctagtcccaactatgagggacccttacatagcctgcagtcaagaatcgaagataggctggagcgcctggatgacgccatccatgtattgaggaatcacgccgtgggtccttccaccgctatgccgggcggtcacggggatatgcatggcattatcgggccatcacataacggcgcaatgggcgggctcgggtccgggtacggtaccggactgctcagcgctaatagacactctttgatggtagggacccatcgcgaggacggcgtggctcttagaggtagccactctctgctgcccaaccaggtccctgtcccccagttgcccgtccaatctgccacctcccccgacctgaatcctccccaagacccatatcggggcatgccacccgggctccagggccagtccgtctcatctggcagttctgagatcaaaagcgacgatgagggggatgaaaacctccaggatactaagagctccgaagacaaaaagctggacgacgacaaaaaggatattaaaagtatcactcggtcacggagtagcaacaacgacgacgaggacctaacccccgaacaaaaggcagagcgggagaaagagagaagaatggctaataacgctagagaaagattgcgagtccgggacataaacgaggcctttaaggagcttgggagaatggtacaactgcacctgaaatcagacaaacctcaaacgaagctgctcatcttgcaccaggccgtggcggtgatcctgagtttggaacagcaggtcagagagaggaatctcaatcctaaagctgcttgtctgaagcgccgcgaggaagaaaaggtgtcatccgagcccccgccgctttccctcgcaggcccccatccaggaatgggcgacgccagcaaccatatgggacagatgtag

SEQ ID NO: 86007 - DNA, 2322 bp, Artificial Sequence
  derived and/or modified sequence
atgtttagcaaaagactggagaagattgcccaggtccctctgttatttccgttcatctttatcatcttaaccaattactcgaaaatggagggcgctgtggaaagccagccctctttcttcaagacctcccaggacattgtaacttgtacttgggtggagaactgctatagcagttttagccggaggccacttgaacagatgttttgcaaacaccagtcaaagaacattatctcttggaccggcatggtagctcacacctgtaaccccagtacactcggcggccagggactctgcgattttgccaagatgcatcatcagcagcggatggccgcattaggtaccgacaaggaactgtccgacctcctggattttagtgctatgttcagtcccccagtttctagcggtaagaatggccctacaagcctggcctcagggcactttaccgggtctaatgtggaggatcgttccagcagtggttcttgggggaatggcggccatcctagcccctccaggaactacggagatggcaccccctacgatcatatgacaagtcgcgatctcggctcccatgataatctgtctccgccattcgtaaacagtagaattcaatcgaagaccgaacgcgggagctacagcagttacggacgggaaagtaaccttcagggatgtcaccagcagtcacttctgggaggggatatggacatgggtaacccgggtacgctctctcctacaaaaccgggctctcaatactatcagtactcctctaacaatcctcgtagaaggcccttacattcctccgcaatggaagttcagaccaagaaggtgcgaaaggtaccacccggcctcccatcgagcgtgtatgcccccagcgcttcgaccgccgactacaatagggactcccccggctacccctccagtaaaccagcaacgagtacattcccttcttctttttttatgcaggacggccaccactcgagcgatccttggtcttctagttctggcatgaaccagccagggtatgctggcatgcttggcaacagcagtcacatcccacaatcctcatcttactgttcattgcatccacatgaaaggctgtcttaccctagccactccagcgcagatatcaactcttctcttccacctatgtctacttttcacaggtcggggacaaaccactattccacctcctcctgtacgcctcctgctaatgggaccgactccattatggccaatagaggctctggggcagcggggagctctcaaacaggggacgcactaggtaaagcactggcctccatctactcacccgaccataccaacaactctttcagctccaatccatcgacacctgttggaagtcctccgtctctgtccgcaggaactgcagtctggagccgcaacggtggccaggccagctcatctcctaattacgagggaccactgcattcgctgcagagtcggatagaagaccggctggagagattagatgacgctatccacgtcttacggaatcatgccgtgggccccagcacagcaatgccaggcggccacggtgacatgcacggaatcataggcccttcacataatggtgctatgggtggcctgggttccggttacggtaccgggctgctgtctgccaacaggcacagcttgatggtcgggacccacagggaggacggcgtggcactgaggggaagtcactcacttctgcctaaccaggttcctgttcctcagcttcccgtgcaatctgctacgtcccccgatcttaatcccccacaagacccatacaggggcatgcctccaggactccaggggcagagcgtctcgtcagggagctccgagatcaaaagtgatgacgaaggtgatgaaaatctccaggacaccaagtcttctgaagacaaaaaactcgatgacgataagaaagacatcaagtcgataactcggtctcgctcctccaacaacgatgatgaggatttgacccccgaacagaaagccgagcgagaaaaggagcgccgaatggccaataacgcccgagagcgccttagggttcgggatatcaatgaggccttcaaggaattaggccggatggtgcagcttcacctgaaatcagacaaaccccagaccaaactactcattctgcaccaagcagtggctgttatcctgtcattggaacagcaggtccgagagcgcaatctcaacccaaaggcggcttgcctaaagcgccgcgaggaagagaaggtttcctccgagcctcctccactttcactggccggcccacaccctggcatgggcgatgcctcaaatcacatggggcagatgtag

SEQ ID NO: 86008 - DNA, 1944 bp, Artificial Sequence
  derived and/or modified sequence
atgttctccccacctgtctcttctgggaaaaacggacctacctctctcgcgtcaggccactttacaggatctaacgtggaggatcggtcctctagtggttcatgggggaacggcgggcacccatctccatcgcggaactacggcgacggcactccttacgaccacatgacgagcagggaccttggaagccatgataacctgagtcccccattcgtgaactcccgcatccagagcaagaccgaaagaggatcgtattcctcttacggtcgggagtctaatctgcaaggatgtcaccagcagtctctgctgggaggagatatggacatgggcaatcccggaactttgagccctaccaaacccggatctcagtactaccagtattcatctaacaatccccggagacgaccactccactcctccgccatggaggtccagaccaagaaggtccgaaaggttccacctggactgccctcaagtgtatatgccccctcagcctccaccgcagactacaaccgagattccccaggttacccaagcagcaaacctgccacttctacatttcccagtagcttctttatgcaagatggacaccacagctccgacccatggtcgtcctcgtccggtatgaaccagcccggctacgctggcatgctgggcaattcttctcatataccacagtccagtagctattgtagtctccaccctcacgagagactgtcctaccctagccacagctctgccgacattaacagcagcctgcccccaatgtccacttttcataggagcggcacaaaccattactccacctcatcttgcacacctcctgccaacggcacggatagcattatggccaataggggttctggcgccgcaggtagctctcaaactggtgacgctcttggcaaggccctcgctagcatatattctccagatcatacaaacaattcattctcctctaatccatccacccccgtggggagccctccatcactctctgccgggacggccgtgtggtcaagaaacggtggacaggcttcttcctcgccaaattacgaagggcccctccatagtctgcaatctcgaatagaggatagactagaacgtttggatgacgcgatccacgtccttcggaaccatgccgttggaccatccacagctatgcccggtggtcacggggacatgcacggcatcatcgggccgagtcacaatggagccatgggtggcctcggcagcgggtacggaactggactcttgagcgccaacagacatagtctgatggtgggtacccaccgtgaggacggcgtggctctcagaggcagtcacagccttctgcctaaccaggttcccgttcctcagctgcccgtgcaaagtgccacgtcccctgacctcaaccccccccaagacccctatcgcggtatgcccccgggactgcaaggccagtccgtgagttcaggtagctccgagattaaatccgatgacgagggagatgagaatctacaggacacgaaaagttctgaggataaaaagctagatgacgacaaaaaagacattaaatccatcacccggagtagatcgtctaataatgacgacgaagacctcacccctgagcagaaggcggagagggagaaggaaagacgaatggctaacaacgctagggagaggctccgggtccgggacatcaacgaagcgttcaaggagctggggcggatggtgcagctccatcttaaaagtgataaaccccaaaccaagctgttgatcctccaccaggccgtggcggtgatcctaagcctggagcagcaggtccgggagagaaatctgaaccctaaggctgcgtgtctcaaacgcagggaggaagagaaggtttcttccgagcctccacctttatccctcgctggccctcaccctggtatgggcgatgcatcaaatcacatggggcagatgtag

SEQ ID NO: 86009 - DNA, 2016 bp, Artificial Sequence
  derived and/or modified sequence
atgcaccaccagcagaggatggccgccctgggcacagacaaggagctgagtgacctgctggacttcagcgccatgttcagcccccctgtgagcagcggcaagaatggccccaccagcctggccagcggccacttcaccggcagcaatgtggaggacaggagcagcagcggctcctggggcaatggaggccaccccagccccagcagaaattatggagatggcaccccctatgaccacatgaccagccgggacctgggcagccatgacaacctgagccccccatttgtgaacagccgcatccagagcaagacagagcggggcagctacagcagctatggccgggagagcaacctgcagggctgccaccagcagagcctgctgggcggggacatggacatgggcaaccctggcaccctgagccccaccaagccaggcagccagtactaccagtacagcagcaacaacccccggcggcggcccctgcacagcagcgccatggaggtgcagaccaagaaggtgaggaaggtgcccccaggcctgcccagctctgtgtatgcccccagcgccagcacagctgactacaacagagacagccctggctaccccagcagcaagccagccaccagcaccttccccagcagcttcttcatgcaggacggccaccacagcagtgacccctggagcagcagcagcggcatgaaccagcccggctacgccggcatgctgggcaacagcagccacatcccccagagcagcagctactgcagcctgcacccccatgagcggctgagctaccccagccacagcagcgctgacatcaacagcagcctgccccccatgagcaccttccacaggagcggcaccaaccactacagcaccagcagctgcaccccaccagccaatggaacagacagcatcatggccaacagaggcagcggggctgctggcagcagccagacaggagatgccctgggcaaggccctggccagcatctacagcccagaccacaccaacaacagcttcagcagcaaccccagcacccctgtgggcagcccccccagcctgtctgctggaacagctgtgtggagcagaaatggaggccaggccagcagcagccccaactatgagggccccctgcacagcctgcagagcagaattgaagatcggctggagcggctggatgatgccatccacgtgctgagaaatcatgctgtgggccccagcacagccatgcctgggggccatggagacatgcacggcatcatcggccccagccacaatggagccatgggcggcctgggcagcggctatggaacaggcctgctgagcgccaacagacacagcctgatggtgggcacccaccgggaggatggagtggccctgcggggcagccacagcctgctgcccaaccaggtgcctgtgccccagctgcctgtgcagagcgccaccagcccagacctgaaccccccccaggacccctaccggggcatgcctcctggcctgcagggccagagcgtgagcagcggcagcagcgagatcaagagtgatgatgaaggagatgagaacctgcaggacaccaagagcagcgaggacaagaagctggatgatgacaagaaggacatcaagagcatcaccaggagccgcagcagcaacaatgatgatgaggacctgaccccagagcagaaggccgagcgggagaaggagaggaggatggccaacaatgcccgggagcggctgcgggtgcgggacatcaatgaggccttcaaggagctgggccgcatggtgcagctgcacctgaagagtgacaagccccagaccaagctgctgatcctgcaccaggccgtggccgtcatcctgagcctggagcagcaggtgcgggagaggaacctgaaccccaaggccgcctgcctgaagagaagagaggaggagaaggtgtcctctgagcccccacccctgagcctggccggcccccaccctggcatgggagatgccagcaaccacatgggccagatgtag

SEQ ID NO: 86010 - DNA, 2322 bp, Artificial Sequence
  derived and/or modified sequence
atgttcagcaagaggctggagaagatcgcccaggtgcccctgctcttccccttcatcttcatcatcctgaccaactacagcaagatggagggcgctgtggagagccagcccagcttcttcaagaccagccaggacatcgtgacctgcacctgggtggagaactgctacagcagcttcagcagaagacccctggagcagatgttctgcaagcaccagagcaagaacatcatctcctggacaggcatggtggcccacacctgcaaccccagcaccctgggcggccagggcctgtgtgactttgccaagatgcaccaccagcagaggatggccgccctgggcacagacaaggagctgagtgacctgctggacttcagcgccatgttcagcccccctgtgagcagcggcaagaatggccccaccagcctggccagcggccacttcaccggcagcaatgtggaggacaggagcagcagcggctcctggggcaatggaggccaccccagccccagcagaaattatggagatggcaccccctatgaccacatgaccagccgggacctgggcagccatgacaacctgagccccccatttgtgaacagccgcatccagagcaagacagagcggggcagctacagcagctatggccgggagagcaacctgcagggctgccaccagcagagcctgctgggcggggacatggacatgggcaaccctggcaccctgagccccaccaagccaggcagccagtactaccagtacagcagcaacaacccccggcggcggcccctgcacagcagcgccatggaggtgcagaccaagaaggtgaggaaggtgcccccaggcctgcccagctctgtgtatgcccccagcgccagcacagctgactacaacagagacagccctggctaccccagcagcaagccagccaccagcaccttccccagcagcttcttcatgcaggacggccaccacagcagtgacccctggagcagcagcagcggcatgaaccagcccggctacgccggcatgctgggcaacagcagccacatcccccagagcagcagctactgcagcctgcacccccatgagcggctgagctaccccagccacagcagcgctgacatcaacagcagcctgccccccatgagcaccttccacaggagcggcaccaaccactacagcaccagcagctgcaccccaccagccaatggaacagacagcatcatggccaacagaggcagcggggctgctggcagcagccagacaggagatgccctgggcaaggccctggccagcatctacagcccagaccacaccaacaacagcttcagcagcaaccccagcacccctgtgggcagcccccccagcctgtctgctggaacagctgtgtggagcagaaatggaggccaggccagcagcagccccaactatgagggccccctgcacagcctgcagagcagaattgaagatcggctggagcggctggatgatgccatccacgtgctgagaaatcatgctgtgggccccagcacagccatgcctgggggccatggagacatgcacggcatcatcggccccagccacaatggagccatgggcggcctgggcagcggctatggaacaggcctgctgagcgccaacagacacagcctgatggtgggcacccaccgggaggatggagtggccctgcggggcagccacagcctgctgcccaaccaggtgcctgtgccccagctgcctgtgcagagcgccaccagcccagacctgaaccccccccaggacccctaccggggcatgcctcctggcctgcagggccagagcgtgagcagcggcagcagcgagatcaagagtgatgatgaaggagatgagaacctgcaggacaccaagagcagcgaggacaagaagctggatgatgacaagaaggacatcaagagcatcaccaggagccgcagcagcaacaatgatgatgaggacctgaccccagagcagaaggccgagcgggagaaggagaggaggatggccaacaatgcccgggagcggctgcgggtgcgggacatcaatgaggccttcaaggagctgggccgcatggtgcagctgcacctgaagagtgacaagccccagaccaagctgctgatcctgcaccaggccgtggccgtcatcctgagcctggagcagcaggtgcgggagaggaacctgaaccccaaggccgcctgcctgaagagaagagaggaggagaaggtgtcctctgagcccccacccctgagcctggccggcccccaccctggcatgggagatgccagcaaccacatgggccagatgtag

SEQ ID NO: 86011 - DNA, 1944 bp, Artificial Sequence
  derived and/or modified sequence
atgttcagcccccctgtgagcagcggcaagaatggccccaccagcctggccagcggccacttcaccggcagcaatgtggaggacaggagcagcagcggctcctggggcaatggaggccaccccagccccagcagaaattatggagatggcaccccctatgaccacatgaccagccgggacctgggcagccatgacaacctgagccccccatttgtgaacagccgcatccagagcaagacagagcggggcagctacagcagctatggccgggagagcaacctgcagggctgccaccagcagagcctgctgggcggggacatggacatgggcaaccctggcaccctgagccccaccaagccaggcagccagtactaccagtacagcagcaacaacccccggcggcggcccctgcacagcagcgccatggaggtgcagaccaagaaggtgaggaaggtgcccccaggcctgcccagctctgtgtatgcccccagcgccagcacagctgactacaacagagacagccctggctaccccagcagcaagccagccaccagcaccttccccagcagcttcttcatgcaggacggccaccacagcagtgacccctggagcagcagcagcggcatgaaccagcccggctacgccggcatgctgggcaacagcagccacatcccccagagcagcagctactgcagcctgcacccccatgagcggctgagctaccccagccacagcagcgctgacatcaacagcagcctgccccccatgagcaccttccacaggagcggcaccaaccactacagcaccagcagctgcaccccaccagccaatggaacagacagcatcatggccaacagaggcagcggggctgctggcagcagccagacaggagatgccctgggcaaggccctggccagcatctacagcccagaccacaccaacaacagcttcagcagcaaccccagcacccctgtgggcagcccccccagcctgtctgctggaacagctgtgtggagcagaaatggaggccaggccagcagcagccccaactatgagggccccctgcacagcctgcagagcagaattgaagatcggctggagcggctggatgatgccatccacgtgctgagaaatcatgctgtgggccccagcacagccatgcctgggggccatggagacatgcacggcatcatcggccccagccacaatggagccatgggcggcctgggcagcggctatggaacaggcctgctgagcgccaacagacacagcctgatggtgggcacccaccgggaggatggagtggccctgcggggcagccacagcctgctgcccaaccaggtgcctgtgccccagctgcctgtgcagagcgccaccagcccagacctgaaccccccccaggacccctaccggggcatgcctcctggcctgcagggccagagcgtgagcagcggcagcagcgagatcaagagtgatgatgaaggagatgagaacctgcaggacaccaagagcagcgaggacaagaagctggatgatgacaagaaggacatcaagagcatcaccaggagccgcagcagcaacaatgatgatgaggacctgaccccagagcagaaggccgagcgggagaaggagaggaggatggccaacaatgcccgggagcggctgcgggtgcgggacatcaatgaggccttcaaggagctgggccgcatggtgcagctgcacctgaagagtgacaagccccagaccaagctgctgatcctgcaccaggccgtggccgtcatcctgagcctggagcagcaggtgcgggagaggaacctgaaccccaaggccgcctgcctgaagagaagagaggaggagaaggtgtcctctgagcccccacccctgagcctggccggcccccaccctggcatgggagatgccagcaaccacatgggccagatgtag

SEQ ID NO: 86012 - DNA, 2016 bp, Artificial Sequence
  derived and/or modified sequence
atgcaccaccagcagcggatggccgccctgggcaccgacaaggagctgagcgatttgctcgacttttctgcaatgttttccccgcccgtctcatcggggaaaaacggacctactagcctggcctctgggcatttcactgggtccaacgtcgaggaccgctcgtcatctggtagctggggcaatggcggccaccctagcccatcacgcaactacggcgacgggaccccctatgaccatatgacctctcgtgatctcggcagtcacgataatcttagtccaccctttgtcaatagtagaatacagtcaaaaaccgaacgaggctcatattcaagttacggacgtgaatctaatctgcaggggtgccaccagcaatctctgctcggcggtgacatggatatgggcaacccaggcacccttagcccaactaagcccggttctcagtactatcaatacagctctaacaaccccaggcggcggccccttcatagcagcgctatggaagtgcagaccaaaaaggtccgaaaggtccctccgggactgcccagttccgtgtacgcacccagcgcttctacagctgattataaccgcgactctcccggctaccctagcagtaaacctgccacctccactttcccttccagcttcttcatgcaggatggccatcattctagcgatccatggtcatcttcatcggggatgaatcagcctggctacgctggcatgctggggaactcttcgcatatcccgcaatctagttcttactgtagcctgcacccccacgagcgcctttcgtatccgtcccatagctccgccgacattaactcgagcctccctccaatgagtacatttcataggtccggcactaatcattatagcaccagtagctgcactccccccgccaatggaaccgatagcatcatggccaataggggttccggggctgccggcagctctcagaccggtgatgctctgggcaaggccctggccagcatctattctcccgaccacactaataattccttctcttccaatccgagtactcccgtaggaagtcccccgagcttatcagctgggactgccgtctggtcgcggaatggcggacaggccagctcctcacctaactacgagggccccctgcatagcctccaaagccgcattgaagatcggcttgagaggctcgacgacgcaatccatgtactaaggaatcatgctgtggggcctagcactgcgatgccaggcgggcatggggatatgcatggtatcattgggccatcgcacaatggtgccatgggggggctgggatccgggtacgggactggcctgctgtctgccaaccggcattcactaatggttgggacacacagagaggatggggtggcgctgcggggctctcatagcctcctaccgaaccaggtgccggtgcctcagctgcccgtgcagagtgctacgagccctgatctaaacccacctcaggatccttatcggggcatgccgcctggactgcagggacagtcggtctcttcagggagctcagagattaaaagcgatgacgaaggtgatgagaacttgcaggataccaaaagctctgaggacaaaaaattggatgacgataagaaggacattaagtctatcactagaagccgaagctcgaacaatgacgacgaagatctcactcctgagcagaaagcggagcgcgaaaaggagaggcggatggccaataacgctcgcgaaaggttgcgcgtgcgagatattaatgaggcttttaaagagcttggacgaatggtccaactacatctgaaaagtgacaaaccacaaacgaagctattgattctgcatcaagccgtggcagtgatcctctcgctcgaacagcaggtgagagagcgcaacttgaaccctaaggctgcctgtctaaagagaagagaggaggaaaaggtttcgagtgagccacctcccctgagtttggccggtcctcaccccggaatgggagatgcgtcgaatcatatgggacagatgtag

SEQ ID NO: 86013 - DNA, 2322 bp, Artificial Sequence
  derived and/or modified sequence
atgttcagcaagcggctggagaagatcgcccaggtgcccctgctgttcccctttatttttattatcttgacaaattattcaaagatggaaggcgctgtggagtcccaaccctcattcttcaagacatcgcaagatatcgtgacctgtacttgggtagagaactgctattcctccttcagtcgcaggccactagagcagatgttctgtaaacaccaatctaagaacattattagctggaccggaatggttgcccacacttgtaatccgtccacactgggcggacaggggttgtgtgacttcgctaagatgcatcaccagcagagaatggccgccctcgggactgacaaggagctttctgacctacttgatttctcagcaatgtttagcccacccgtgtcaagtggtaagaacggtccaactagcctggcgtctggccattttactggctccaatgtggaggaccggagctcctccggaagctgggggaatggcgggcatccatctccgtccagaaactatggagacggaaccccttacgaccatatgacgagccgtgatctaggctcgcacgacaatctttctcctcctttcgttaactctcgcatacagtccaaaaccgaacgtggctcttactcttcctatggccgagagagtaaccttcagggctgtcaccaacagtcactcttggggggcgatatggacatggggaatcctggcactcttagtcctactaaacccggttcgcagtattaccagtacagtagcaataaccctcggaggcggccattgcatagcagcgcaatggaagtgcagaccaagaaagtgaggaaggtgccccctgggttgccttccagtgtgtacgccccctccgctagcaccgctgattataatagggatagcccgggctatccatcatccaaaccagccactagcacttttcctagctctttctttatgcaggatggtcaccattccagcgacccatggtcctccagctctggcatgaaccaaccggggtacgccgggatgttaggcaactcatcacatattccacagagtagtagttattgctccctgcatcctcatgagaggctatcctatccgtcacattcttccgctgatatcaacagctcgcttcccccaatgagtacttttcatcgctccggcacaaaccactacagcacatcttcttgtactccccctgccaacggcactgactcgattatggcaaaccggggcagtggggcagccggatcatctcagaccggggatgctctcgggaaagcactggcctccatctattctccggaccataccaacaactctttctcttcaaatccatctacgccggtcggcagcccaccaagcctgagcgctgggaccgcagtctggtcacgcaacggaggccaagcatcttccagccctaactatgaaggcccactccacagcctgcagtccaggatcgaggaccggcttgaaagactggacgatgctattcatgtgctgcgtaaccatgccgtgggaccaagtacagctatgccgggaggacatggcgatatgcacggcataattggccctagtcacaatggagctatgggaggcctagggtccggctatggcaccggcctgttatctgccaatagacacagtttaatggtgggaacccatcgggaggacggcgtggcactcagaggatcacatagtctgctgcccaatcaggtgcctgtgccccagctgcccgtgcagtctgcaacttcccccgacctgaacccccctcaggatccataccgcggaatgccgcccgggcttcaaggccagtccgtgtcgagtggcagttcagagattaaaagcgatgatgagggggacgagaacctccaagatactaagtcctccgaggacaagaaattggacgacgataaaaaagacataaagtcaattacccggtccagatcctccaacaatgatgacgaggatctgacccctgagcagaaggctgagcgggagaaggaacgaaggatggccaacaacgcccgagagagattacgggtgcgtgacatcaacgaagcgttcaaggagctcggcagaatggtgcagcttcatctgaagtcagataagccacagaccaagctgctgatactgcatcaggcggtagcggtcattctttccctggagcagcaggtgagagaacgcaacctcaatccaaaagcggcgtgccttaagaggcgcgaggaagagaaggtgagcagcgaacccccgcccctatccctcgctggcccccatcctggaatgggtgacgcttccaaccatatgggccagatgtag

SEQ ID NO: 86014 - DNA, 1944 bp, Artificial Sequence
  derived and/or modified sequence
atgttcagcccccccgtgagcagcggcaagaacggccccaccagcctagcaagtggacactttacaggctcaaacgtggaggacaggtcctccagtggctcatggggtaacggcgggcatccaagtccaagtcgaaactatggcgacggtacaccgtatgaccacatgactagccgcgatcttggcagtcatgacaatctttcaccaccatttgttaattctaggatacagtccaaaacagagcgcggcagttacagttcgtacgggagggagagcaacctccagggatgtcaccagcagagcttacttgggggggacatggacatgggcaacccaggcacgctctctcccacgaaacctgggtcacagtactatcaatacagcagcaacaaccctcgccggcgccctttgcactctagtgcaatggaggtgcagaccaaaaaagtgcgaaaggtgcctcctgggctgccatcgtctgtgtatgccccttctgctagtacagcagattataacagggactcccccggctatccatcgtcaaaacctgcaacaagtactttcccgagcagcttctttatgcaggatgggcaccacagctccgatccatggtccagctcctcgggtatgaatcagcccggctacgccggaatgctgggcaattcttctcacatccctcagtcctcaagctattgtagcctccatcctcatgaacgcttatcctatccctcgcattctagtgccgatattaattccagcttacctcccatgtcgacgttccatcgatcaggaaccaaccattacagcacgagctcctgcaccccacccgcaaatggcaccgactcaatcatggcaaatcgcggcagcggcgctgccggaagcagccagacgggggacgcacttggcaaggctctagcaagcatctatagcccagaccacactaataactcctttagttctaacccatcgactccggtcggctctccgccctctctgagcgcaggcacagcggtgtggtcaagaaacggtggtcaggcctccagtagcccaaattacgagggacccctgcactcacttcagagcagaatcgaggaccggctggagcggctagacgatgctattcacgtgttaaggaatcacgctgttggacccagcacagcaatgcctggaggccacggggacatgcacggaataattgggccctcacataatggagctatgggaggcttagggtctggctatggtaccggtctgctgagtgcaaacagacattctctcatggtgggaacacaccgggaggatggggtcgccctccgcggttcacattcattattgccgaaccaggtgcccgtgccccagttgccggtgcagtcagccacgtcccctgaccttaacccccctcaggacccctaccgaggcatgcctccaggtctgcagggccagtccgtgagcagcggtagttccgaaatcaagtctgatgacgagggggacgaaaaccttcaagatactaagagctcagaagacaaaaaactagacgacgacaaaaaggacatcaagagcatcaccaggagcaggtcttccaataatgatgatgaggacctgacaccagaacagaaggccgaacgggaaaaggaacgccggatggcaaacaatgcccgggagagattacgcgtcagggatattaacgaagcctttaaggaattaggccgcatggttcagctgcacctgaagtccgataaaccccagacgaagctgcttatcctacaccaggccgtggctgtgatcctgtctctggaacagcaggtgagggagagaaacttaaatcctaaagcagcctgtttgaaacgacgtgaggaggaaaaggtaagcagcgaacccccacccctctctctagcaggtccacatccgggtatgggggatgcatccaaccatatgggccagatgtag

SEQ ID NO: 86015 - DNA, 2016 bp, Artificial Sequence
  derived and/or modified sequence
atgcatcatcagcagcggatggccgcactgggtactgacaaagaactttctgatctcctggacttttcagccatgtttagccctccagtgtccagcggaaagaatggccctacctcccttgctagcgggcacttcactgggagcaatgtggaagaccgatcatcctccggaagttggggtaacggcggacatccttccccctcccgcaactatggagatggcaccccctatgaccatatgacttctagggacctgggatcccatgacaacctgtccccacccttcgtcaattcccggatccagtccaagacggagcgcggaagttattcatcgtacggtagagaaagcaacttgcagggatgtcatcagcagtctctgctgggcggagacatggacatgggaaatccaggtacgctgagccccacaaaacccggttctcagtactaccagtattcatccaataaccccagacggagacctctgcactcgagtgccatggaagtgcagactaaaaaggtgcgcaaagtaccgcctggcctgccctcctctgtgtatgcccctagcgcttctactgccgactacaatagagattcaccgggatatcccagcagtaagcccgctacctccaccttccccagttctttcttcatgcaagatggccaccatagctcggatccctggtcctcatcctcgggaatgaatcagcctgggtacgcgggtatgttagggaactcctcccacatcccacagtccagctcctattgttccttgcacccccatgagcggctctcatacccaagtcattctagtgcagacatcaattccagccttccaccaatgtctacctttcaccggtctggcaccaatcactactccacctcttcctgcacaccccctgccaacggcacagactctattatggctaacaggggcagtggggctgccggatcgtctcagacaggcgacgcactgggcaaggccctggctagcatttattcccctgatcatacaaataattctttcagctccaatcctagcacacctgttggctccccaccgtccctgtccgccggtaccgcggtctggtcacggaatgggggacaggcgagctccagtcccaactacgaggggccattacactctctgcaatcacggatcgaggataggcttgagcgcctcgacgacgcgatacacgtactcaggaatcatgccgtgggacccagcactgccatgccaggagggcatggcgacatgcatggcattatagggccatcacacaacggggcaatggggggactcggctcaggatatggcacgggcctgctgtccgcgaacagacatagccttatggtcgggacacatcgagaggatggggtcgcgctgcgtggctcccacagtttgctgcctaatcaggtgccagtcccacagctgccagtgcagtcggcgacctccccagaccttaacccccctcaggatccctaccgcggaatgccacctgggttgcaaggccagagcgtttctagcggcagcagcgagatcaagtcggatgatgagggcgatgaaaatctccaggatacaaaaagctccgaggacaagaagctggacgacgacaagaaagatattaagagcatcaccagaagtagatccagcaacaacgacgacgaagacctgactccagagcagaaagctgagcgtgagaaagaacggaggatggccaacaatgccagggagaggctccgcgtacgcgacatcaacgaagcatttaaagaactgggccgtatggttcagcttcacctgaagtcggataagccccagaccaagttgctcatcctccaccaagccgtcgccgtgattctgtcccttgaacagcaggttcgcgagaggaatctaaatccaaaggcggcatgcctcaagaggcgggaggaagagaaggtcagcagcgagccccctccattaagcctagcgggacctcatccagggatgggtgatgcttcaaaccacatgggccagatgtag

SEQ ID NO: 86016 - DNA, 2322 bp, Artificial Sequence
  derived and/or modified sequence
atgttttccaaaagattggaaaaaatcgcacaggtgcccttgctattccctttcattttcattattctgactaactactctaaaatggagggtgccgtagaaagtcagccttctttctttaagacctctcaggatattgtgacctgtacgtgggttgaaaactgctattcctccttttcacgtagaccgctcgaacagatgttttgcaagcatcagtccaaaaatatcatctcttggaccgggatggtggcccatacctgtaaccccagcactctcgggggacagggtctttgcgacttcgcgaagatgcaccaccagcagcgcatggctgcactcggcacggacaaagagctcagtgaccttctcgacttcagtgccatgttttcgcccccagtctcgagtgggaaaaatggcccaacatctttggcatcgggccatttcacgggctccaatgtcgaggatcggtcatcgtcaggatcgtggggcaatggtggacacccatcaccttcccgcaactacggtgatgggaccccatacgatcatatgaccagtcgggacttaggctctcacgataacctgtctcctcccttcgtaaattctcgcatccagtccaagaccgaacgtggcagctattcttcatatggacgggaaagtaacctgcaggggtgtcaccagcagagccttctgggtggcgacatggatatgggcaaccctggcactctgagccccactaaacctgggagccagtattaccagtactcgtctaataaccctcggcgaagacctctgcattcctccgccatggaggtacaaacaaagaaggtccggaaggtcccacctggactgccctcatccgtgtatgcgccatccgcttctaccgcggattacaaccgggatagccccggataccctagctccaagccagcaacatcaacattcccatcgtcctttttcatgcaggatggccatcactcatccgatccttggagtagcagcagcggtatgaaccagccaggttatgccggaatgctcggcaactcctcacatattcctcagagcagttcttactgcagcctgcacccgcatgaacgactctcctacccttcccattcaagtgccgatatcaacagctccctcccccctatgagcacattccaccggtctgggaccaaccactattctacatctagctgtacaccgccagcaaacggaacagattcaatcatggctaacaggggcagcggcgctgccggttcctcacagaccggggatgcccttgggaaggcgctagcctctatttactctccggatcacactaataacagtttctcaagtaatcctagcacacctgttgggagccctccaagtctctcggcgggaaccgcagtgtggtctaggaatggtggacaagcaagcagcagccctaactacgagggtcccctgcactccttacaaagtcggattgaagaccggctagaaagacttgacgacgcaattcacgtattacgtaatcacgctgttggaccctccacggctatgccaggcggacatggcgacatgcacgggattattggcccaagtcataatggggctatgggaggccttggctccggatacgggactggcctactgagcgccaaccggcacagcttgatggttgggactcaccgtgaagacggggttgccctgcggggatcacatagtctcctgcctaaccaggtgcctgtgccccagctacccgtacagagcgccacctcccctgacctgaacccaccgcaggatccctatagaggcatgccacccggtttgcagggccagagcgtttccagtggcagtagtgaaataaagtcagatgacgagggcgacgagaacttgcaagataccaaaagctccgaggataagaagttggatgacgacaaaaaggatattaaaagtatcacccggtctcgcagctccaacaacgacgacgaggatctcacccctgagcagaaagctgagcgagagaaggaacgtcggatggccaacaatgcacgggagcggctgcgggtccgggatatcaacgaggctttcaaggagcttggacgcatggtgcagctgcatctcaaatccgataagcctcagaccaaactattgatcttgcatcaggctgtggctgtgattctaagcctggaacagcaggtacgggagcgtaatttgaatcctaaagcggcttgtctcaaacgcagggaagaggagaaagtcagcagcgaaccaccccctctgtccctggcagggcctcaccccggaatgggcgacgctagcaaccatatgggccagatgtag

SEQ ID NO: 86017 - DNA, 1944 bp, Artificial Sequence
  derived and/or modified sequence
atgtttagtccgcctgtgagctctggcaaaaacgggccaacatccctagcttccgggcacttcaccggctccaatgtggaagaccggagtagctctggatcttggggaaacggcggtcatccatctccttcaagaaattacggtgacggtacgccgtatgatcatatgacatcaagagatctcggatctcacgacaatctgtctcctccctttgtgaactcacggatacagtctaaaaccgagagaggcagctattcttcatacggcagggagtcgaatctgcaagggtgccatcagcagtcccttctgggtggtgatatggatatgggaaaccctggaacacttagtccaacaaaaccagggtcccagtactatcagtactctagcaacaaccccaggagaaggcccttacatagctctgcaatggaagtgcagacaaaaaaagtcagaaaggttcctcctggtttgcccagcagcgtgtacgccccatccgcaagcactgccgactataatcgggactcccctgggtaccccagcagcaagcccgcaacatctacattccccagtagtttcttcatgcaggacggacatcactcaagtgacccttggagttccagctcaggtatgaaccagccagggtacgctggcatgctcggaaattcctctcatattcctcagagtagcagctactgctccctgcacccacatgagcgcctttcctacccgagccactctagtgccgacataaattcttctctgcctcctatgagtacctttcacagatccgggaccaatcactattccacatcatcttgcactccaccagccaacggcaccgacagtattatggccaataggggctcaggtgctgctggaagctctcagaccggcgatgcattaggaaaagcgcttgcctccatatattctccagatcataccaacaactctttctcgtctaacccatctacccccgtgggcagccccccatctcttagcgctgggactgcagtgtggtctcgcaacgggggacaggcttctagcagtcccaactacgaaggccctctgcactcacttcagtctagaattgaggaccgcctcgaaagattagacgatgccatccatgttctgaggaatcacgccgtcggtccatcgaccgcaatgccagggggtcacggtgatatgcacggcatcattggacctagtcacaatggtgccatgggcggactaggttcgggctacggcaccggtttactgtccgcaaataggcatagtctaatggtaggcacacatcgtgaggatggagtggccctgcgcggtagccacagtcttctgcccaaccaggtgccagtcccacaattaccagtccagtccgccacgtccccggacctaaacccaccgcaggacccttacaggggaatgcctccgggtttgcagggccagagtgtgagcagcggatcttctgagataaagtccgatgacgagggagatgaaaatcttcaggacacaaagagctcagaggataaaaagcttgacgacgataaaaaggacattaagtcgatcacaaggagcaggtcatccaacaacgatgatgaggatttgacgcctgaacagaaagcagaacgggagaaagagagacggatggccaataatgcgagagagcgccttagagttcgtgacattaatgaggccttcaaagaattgggacgcatggtacagctgcatctcaagtcagataagccccagaccaagctgttgatcctccaccaagctgtcgctgtgatactctctttagaacagcaggtacgcgagcgcaatctcaatccgaaggccgcttgcctcaagcgacgagaggaggaaaaagtgagcagcgagccacctcctctcagtctggctggaccgcatcctggaatgggggacgcgagtaatcatatggggcagatgtag

SEQ ID NO: 86018 - DNA, 8332 bp, Artificial Sequence
  derived and/or modified sequence
gtgtgtggatgtgtgagtgagagggaacgagagtaagagaaagaaagaagtgaggggatgtaaactcgaataaatttcaaagtgcctccgagggatgcaacgggcaaaaactgaactgttcaggcttcagattgtaactgacgatctgaggaaaaatgaggtgctcgatgaattttcgtttgtattttttggcgaggcgggggaggtgttgagattttttttttttcccctcggggtgggtgcgagggggatgcatcctagcctgcccgacccggagcaagtcgcgtctccccgccggagcccccccacccatttctttgctgaacttgcaattccgtgcgcctcggcgtgtttccccctccccccttccctccgtcccctcccctccccggagaagagagttggtgttaagagtcagggatcttggctgtgtgtctgcggatctgtagtggcggcggcggcggcggcggcggggaggcagcaggcgcgggagcgggcgcaggagcaggcggcggcggtggcggcggcggttagacatgaacgccgcctcggcgccggcggtgcacggagagccccttctcgcgcgcgggcggtttgtgtgattttgctaaaatgcatcaccaacagcgaatggctgccttagggacggacaaagagctgagtgatttactggatttcagtgcgatgttttcacctcctgtgagcagtgggaaaaatggaccaacttctttggcaagtggacattttactggctcaaatgtagaagacagaagtagctcagggtcctgggggaatggaggacatccaagcccgtccaggaactatggagatgggactccctatgaccacatgaccagcagggaccttgggtcacatgacaatctctctccaccttttgtcaattccagaatacaaagtaaaacagaaaggggctcatactcatcttatgggagagaatcaaacttacagggttgccaccagcagagtctccttggaggtgacatggatatgggcaacccaggaaccctttcgcccaccaaacctggttcccagtactatcagtattctagcaataatccccgaaggaggcctcttcacagtagtgccatggaggtacagacaaagaaagttcgaaaagttcctccaggtttgccatcttcagtctatgctccatcagcaagcactgccgactacaatagggactcgccaggctatccttcctccaaaccagcaaccagcactttccctagctccttcttcatgcaagatggccatcacagcagtgacccttggagctcctccagtgggatgaatcagcctggctatgcaggaatgttgggcaactcttctcatattccacagtccagcagctactgtagcctgcatccacatgaacgtttgagctatccatcacactcctcagcagacatcaattccagtcttcctccgatgtccactttccatcgtagtggtacaaaccattacagcacctcttcctgtacgcctcctgccaacgggacagacagtataatggcaaatagaggaagcggggcagccggcagctcccagactggagatgctctggggaaagcacttgcttcgatctattctccagatcacactaacaacagcttttcatcaaacccttcaactcctgttggctctcctccatctctctcagcaggcacagctgtttggtctagaaatggaggacaggcctcatcgtctcctaattatgaaggacccttacactctttgcaaagccgaattgaagatcgtttagaaagactggatgatgctattcatgttctccggaaccatgcagtgggcccatccacagctatgcctggtggtcatggggacatgcatggaatcattggaccttctcataatggagccatgggtggtctgggctcagggtatggaaccggccttctttcagccaacagacattcactcatggtggggacccatcgtgaagatggcgtggccctgagaggcagccattctcttctgccaaaccaggttccggttccacagcttcctgtccagtctgcgacttcccctgacctgaacccaccccaggacccttacagaggcatgccaccaggactacaggggcagagtgtctcctctggcagctctgagatcaaatccgatgacgagggtgatgagaacctgcaagacacgaaatcttcggaggacaagaaattagatgacgacaagaaggatatcaaatcaattactaggtcaagatctagcaataatgacgatgaggacctgacaccagagcagaaggcagagcgtgagaaggagcggaggatggccaacaatgcccgagagcgtctgcgggtccgtgacatcaacgaggctttcaaagagctcggccgcatggtgcagctccacctcaagagtgacaagccccagaccaagctcctgatcctccaccaggcggtggccgtcatcctcagtctggagcagcaagtccgagaaaggaatctgaatccgaaagctgcgtgtctgaaaagaagggaggaagagaaggtgtcctcagagcctccccctctctccttggccggcccacaccctggaatgggagacgcatcgaatcacatgggacagatgtaaaagggtccaagttgccacattgcttcattaaaacaagagaccacttccttaacagctgtattatcttaaacccacataaacacttctccttaacccccatttttgtaatataagacaagtctgagtagttatgaatcgcagacgcaagaggtttcagcattcccaattatcaaaaaacagaaaaacaaaaaaaagaaagaaaaaagtgcaacttgagggacgactttctttaacatatcattcagaatgtgcaaagcagtatgtacaggctgagacacagcccagagactgaacggcaatctttccacactgtggaacaatgcatttgtgcctaaacttcttttggaaaaaaaaaatataattaatttgtaagtctgaaaaaaaaatatttaatttaaaaaaaattgtaaacttgcaataatgaaaaagtgtacttctgaagaaaactacatgaacgtttttgttggtattcaagtcagctagtgtttataattactggatattgaattaggggaagctcggctgccctagtaacaaaaccagcaaacgtcctgatgacaacgaagtgatgacattagccattccttagggtaggaggaacagatggatcttatagacctatgacaaatatatatataaatatatatataaatatatattaaaaatttagtgactatggtaagcttttgttcatttgtttcagacttttttctcctgtaaaaaaatagtactgattaacttttttaaaagaaagattttactgtaaatatggatttttttttttttggtcttatttctgtccctttccctggtttgttatcgtaacctgtagtgccaactctgcttccagaggggtagtgcaggatgaaatgctgaccctgatgttgcttctcattcataaataagtagaaagttgtttctccagtcttttgggaacacaggacttaaaagtcacatcatgtgtagatattacaagcagcattaccaagacatggcaaaaagagtttgtctgaattgtaatgttgcgtttgtgaacctattctgggattttcagaggtacaaggttagaatgctacaatgttaccactgtgccttccaatgtttatatcatcggaaacataacataatcaaagtggctgtgatttaacaaaatgattaaagtgttacctacctgtgtagccgaagtagtgtgcagtgaggcgtttctgaatacatggtcagatttttggaaaaaaacaaaaacaaaaaaaacaagtaaagttcaaaaaccgtcaaatgagaaaattgcaagtagtgtgacagagctgattgattttgttgctttcttgattttttttttcaaaatgggtttactaaaatgtagatgacttaactgcctcctccttcgtctgaaaaatgccaatattcaatcatcatgcagcattataacaagccttataagtcctaaagcattaagttgcacttttttgaggaggggtagtgcagtatttctctggccagtatgaatgaagtttatacttaccatatttgatagaaacatagatcaagctatggcacagcgactcatcagatagctagctttgacgtctgggcacaattgaaccaacttccatcgtgaatctttataatgattgactttggtgtatagtgcagtaaacaaatagtgctcctagttaagtatttgtcagcatccttttgtctctaacttgtttctatttttacagccacacaattcttggcatgtattaagaaaaaaaaaaatccctgttcaagtagtttttccacctatcagcactgagtaaatgccataaatccattgaaatggtctaaatgttccatctgttctcctgttttgccagttatatagtaatgaaatacatttgtaaattttatgcaacaaatggcaaacgtatcattattttgaaattgtgtatgtaaaagttatatttttacatgtagactcttgttattatgtgttttaatacattgtatcagtttttgtttttttttaaaaactgtggtttaaaaagaagtctcatttaaatgaaatagctacaagaatcagaattttatgttcatttctgaaaatgtaagaacaaataagatagttaccacgtggtcatcttttacaaacccataaacattttgattagctgtgtgtgtgttgaaaaactgtaaatatgttcagtagcgataaaactaaaataactttgatttgttgataagttcctaaaatgtggaggtggattaaaaccttaggagaatagcagaaatcaaacttcatgaaaagttattttggggctttcctgtgaaatgtatgaacaaagaggctcagagaaggacatggaagacaataatgtatactctctcctcctccctgaataatgaaaaccatgtgtatttgttccctccgtatgttaaagatttccttttagtggtacattctgcactcattttgtatagtctaccaaggcgggtatccctaggaacaatattatataggaagcaggtatactctgatcacattcaggataagtgtacagaagaaaatacggtgtttactctttagggaactggaaacactccctgcattgatgtacattttaagaatggcacttttgatacatgttatcataaaggtgcttaatagagctgaattaaagtttttcaaatctgtaaacaaagcaaaaaagtaaattgtagtcatttgattattttttaaattggtgctttatattttgttctcactcagagtaaaagctgcaatttattgttcaccagctttgatgtattcattactcagtaatgcaatacctctattgttgaattccctttggaaataagtgaaaattctaacggccactgaaagctgctcgctaggttttgcttggtggagaaacataatctgcacctatccatattaattgggttgtatccccattaaaaaagaaaaaaagggaatgtggcctttttagtgtgttttttattgttgttgttttgtaattatcaaacccaggtaagatattggtatcctgcactggattttcaaatgaagttcagcagaagacagttaagattaaagtactatacaaaaatttcaaaagggtccatactacgctatctgtatgacgacacttaggctggggatctctttcagaaactcggactttaaaagcaacttggagcagttgatccacctccacattcaagtaatttatgaatatgcagaatagggatctgttcatctagaaatttttaccatttgtcttctgtgtagctgcaaggaacactaatgtttatacaactgtcagtccacccagtggtgcaactggttctgattcagtcttccgattcctttttatttttcactttttcctatttctgaatttttttttttatttgtgatcttgattttgatgaggggttggggagtggggagggagtcgaaccaagacttggagttaagaggattttcatcttttgcatccaacaggcagaatatgatctgtgtccaaaagtgaacttgagtcaggaatgaatcaatttcagcataaacaagcacaaaaatttagtctgctggctgactggaagcaaaaaagtcaagatggaatatgatgaattccaacacaatggggcaccaaggcctttaggcctctctttttattttgctttggttttgtttgtttttctttagagacatgctctttctcatgggacttgaagtggactcatctttgtgcagtgctggttttgccatactcatttcaagtattatagacatatgtaatggtgaaaatatatgaactgtggcctttttcattcttgttacttgtgatgcaattaagtgaagataagaaaaaaaaaaaaaaagcagagatttaccatgtatcagtgcctggctttttgttataaagctttgtttgtctagtgctcttttgctataaaatagactgtagtacaccctagtaggaaaaaaaaaaaactaaatttaaaaataaaaaatatatttggcttatttttcgcaggagcaatccttttataccatgaatattacaaaaaaattgtcagattctgaatatttcttctttgtagatttttggaatcattatgagtaaaagtttgttactttattttactatttaaaagatgttattttaccatgtgttaccaagatgaaactgtatgggtagcttttttgtttgttttttgttttgtttttgtttttgtttttgtttttagttgtaggtcgcagcggggaaattttttgcgactgtacacatagctgcagcattaaaaacttaaaaaaattgttaaaaaaaaaaaaagggaaaacatttcaaaaaaaaaaaaaaagataaacagttacaccttgttttcaatgtgtggctgagtgcctcgattttttcatgtttttggtgtatttctgatttgtagaagtgtccaaacaggttgtgtgctggagttccttcaagacaaaaacaaacccagcttggtcaaggccattacctgtttcccatctgtagttattcgatgaagtcatgtacatgaccgttctgtagcaataaatgtgccatttttataaactgtttctgacacttgtttcatttcattttgcattgtccatatagctatgattctcttctgtaagtaaaacgcatctatatttcattttccaagtgttggaggtattgacagcttaacaaacaaaacatacaaaaaaaatcacaaaaacaaattgaaaagcaaagcacatgattgatcaaggaagagatgcccttaatgaaaatggaacgggatgcatgcaaaacaaaaagaaaactgtctagaggattaactaattgaaggaatataattaatgtgtgtgtaacactgaagctatgcatttgaagagctctgaactgcaccagtgttttcggttgtgctgcaggttgctaagtcaagtcagccttaaccttttgcaccagttggtcggctgtttggcagaacattctcagatcttttcagtcaaaaatctaagatgatttattttgtatcactttgttaaaagctgaatattgttaactacagttaatattaacactgtatttatactttctcaaactacatccgccccaccacttctggttgcctctgttgactattaatccagatgtaaacaaccagatgtttttttctaacttgtacaaactgacgtgtgtcaactatcatggaaggaaaaaaatgtacagattaaaattattcagtgttatgtactgtaagttaatatttttgtagaatggacatcaatctactttgcaaaatttggaggctatttcaacattgcactgtagaaatgtaaagtaatgtatgcaatgtaaaggaaagcccgcggtagctgagcgcttcataacagaatgttctaatcaagtacgtggtatttggggatgtctccaatattgctcttgtattctttctaattgggtttagtgactagttgaaggaaaatgttataacgccatttggttcacatgtgaagtgccctccatagccaaatgttgggatttttttttttttcgtttttggttggactgtttgcagatatttaaattttatgaaatttccaaagattttggttgataacccccttttaccttctaaatgatttgagatgttcttatgttcttactgtgtgttttaaatatatataaaagagccacaagcattt

SEQ ID NO: 86019 - DNA, 2478 bp, Artificial Sequence
  derived and/or modified sequence
gtctacagtatcacctttcttgtagattggcacttatgcggccaaaggaacaacaccatgttttctaaaaggctggagaaaatagcacaggtgcctctcctctttcccttcatcttcatcattttgacaaattactcaaagatggagggtgcagttgaaagccagccatcattttttaaaacttctcaggacattgtaacatgcacttgggttgagaactgctactcgagcttctccaggaggcccttggagcaaatgttttgtaaacaccaatctaagaacattatctcttggacgggcatggtggctcacacctgtaatcccagcactttgggaggccaaggtttgtgtgattttgctaaaatgcatcaccaacagcgaatggctgccttagggacggacaaagagctgagtgatttactggatttcagtgcgatgttttcacctcctgtgagcagtgggaaaaatggaccaacttctttggcaagtggacattttactggctcaaatgtagaagacagaagtagctcagggtcctgggggaatggaggacatccaagcccgtccaggaactatggagatgggactccctatgaccacatgaccagcagggaccttgggtcacatgacaatctctctccaccttttgtcaattccagaatacaaagtaaaacagaaaggggctcatactcatcttatgggagagaatcaaacttacagggttgccaccagcagagtctccttggaggtgacatggatatgggcaacccaggaaccctttcgcccaccaaacctggttcccagtactatcagtattctagcaataatccccgaaggaggcctcttcacagtagtgccatggaggtacagacaaagaaagttcgaaaagttcctccaggtttgccatcttcagtctatgctccatcagcaagcactgccgactacaatagggactcgccaggctatccttcctccaaaccagcaaccagcactttccctagctccttcttcatgcaagatggccatcacagcagtgacccttggagctcctccagtgggatgaatcagcctggctatgcaggaatgttgggcaactcttctcatattccacagtccagcagctactgtagcctgcatccacatgaacgtttgagctatccatcacactcctcagcagacatcaattccagtcttcctccgatgtccactttccatcgtagtggtacaaaccattacagcacctcttcctgtacgcctcctgccaacgggacagacagtataatggcaaatagaggaagcggggcagccggcagctcccagactggagatgctctggggaaagcacttgcttcgatctattctccagatcacactaacaacagcttttcatcaaacccttcaactcctgttggctctcctccatctctctcagcaggcacagctgtttggtctagaaatggaggacaggcctcatcgtctcctaattatgaaggacccttacactctttgcaaagccgaattgaagatcgtttagaaagactggatgatgctattcatgttctccggaaccatgcagtgggcccatccacagctatgcctggtggtcatggggacatgcatggaatcattggaccttctcataatggagccatgggtggtctgggctcagggtatggaaccggccttctttcagccaacagacattcactcatggtggggacccatcgtgaagatggcgtggccctgagaggcagccattctcttctgccaaaccaggttccggttccacagcttcctgtccagtctgcgacttcccctgacctgaacccaccccaggacccttacagaggcatgccaccaggactacaggggcagagtgtctcctctggcagctctgagatcaaatccgatgacgagggtgatgagaacctgcaagacacgaaatcttcggaggacaagaaattagatgacgacaagaaggatatcaaatcaattactaggtcaagatctagcaataatgacgatgaggacctgacaccagagcagaaggcagagcgtgagaaggagcggaggatggccaacaatgcccgagagcgtctgcgggtccgtgacatcaacgaggctttcaaagagctcggccgcatggtgcagctccacctcaagagtgacaagccccagaccaagctcctgatcctccaccaggcggtggccgtcatcctcagtctggagcagcaagtccgagaaaggaatctgaatccgaaagctgcgtgtctgaaaagaagggaggaagagaaggtgtcctcagagcctccccctctctccttggccggcccacaccctggaatgggagacgcatcgaatcacatgggacagatgtaaaagggtccaagttgccacattgcttcattaaaacaagagaccacttccttaacagctgtattatcttaaacccacataaacacttctccttaaccccca

SEQ ID NO: 86020 - protein, 625 aa, Artificial Sequence
  derived and/or modified sequence
MEEDSRDVEDRSSSGSWGNGGHPSPSRNYGDGTPYDHMTSRDLGSHDNLSPPFVNSRIQSKTERGSYSSYGRESNLQGCHQQSLLGGDMDMGNPGTLSPTKPGSQYYQYSSNNPRRRPLHSSAMEVQTKKVRKVPPGLPSSVYAPSASTADYNRDSPGYPSSKPATSTFPSSFFMQDGHHSSDPWSSSSGMNQPGYAGMLGNSSHIPQSSSYCSLHPHERLSYPSHSSADINSSLPPMSTFHRSGTNHYSTSSCTPPANGTDSIMANRGSGAAGSSQTGDALGKALASIYSPDHTNNSFSSNPSTPVGSPPSLSAGTAVWSRNGGQASSSPNYEGPLHSLQSRIEDRLERLDDAIHVLRNHAVGPSTAMPGGHGDMHGIIGPSHNGAMGGLGSGYGTGLLSANRHSLMVGTHREDGVALRGSHSLLPNQVPVPQLPVQSATSPDLNPPQDPYRGMPPGLQGQSVSSGSSEIKSDDEGDENLQDTKSSEDKKLDDDKKDIKSITSNNDDEDLTPEQKAEREKERRMANNARERLRVRDINEAFKELGRMVQLHLKSDKPQTKLLILHQAVAVILSLEQQVRERNLNPKAACLKRREEEKVSSEPPPLSLAGPHPGMGDASNHMGQM

SEQ ID NO: 86021 - DNA, 1878 bp, Artificial Sequence
  derived and/or modified sequence
atggaggaggacagcagagacgtggaggacagaagcagcagcggcagctggggcaacggcggccaccccagccccagcagaaactacggcgacggcaccccctacgaccacatgaccagcagagacctgggcagccacgacaacctgagcccccccttcgtgaacagcagaatccagagcaagaccgagagaggcagctacagcagctacggcagagagagcaacctgcagggctgccaccagcagagcctgctgggcggcgacatggacatgggcaaccccggcaccctgagccccaccaagcccggcagccagtactaccagtacagcagcaacaaccccagaagaagacccctgcacagcagcgccatggaggtgcagaccaagaaggtgagaaaggtgccccccggcctgcccagcagcgtgtacgcccccagcgccagcaccgccgactacaacagagacagccccggctaccccagcagcaagcccgccaccagcaccttccccagcagcttcttcatgcaggacggccaccacagcagcgacccctggagcagcagcagcggcatgaaccagcccggctacgccggcatgctgggcaacagcagccacatcccccagagcagcagctactgcagcctgcacccccacgagagactgagctaccccagccacagcagcgccgacatcaacagcagcctgccccccatgagcaccttccacagaagcggcaccaaccactacagcaccagcagctgcaccccccccgccaacggcaccgacagcatcatggccaacagaggcagcggcgccgccggcagcagccagaccggcgacgccctgggcaaggccctggccagcatctacagccccgaccacaccaacaacagcttcagcagcaaccccagcacccccgtgggcagcccccccagcctgagcgccggcaccgccgtgtggagcagaaacggcggccaggccagcagcagccccaactacgagggccccctgcacagcctgcagagcagaatcgaggacagactggagagactggacgacgccatccacgtgctgagaaaccacgccgtgggccccagcaccgccatgcccggcggccacggcgacatgcacggcatcatcggccccagccacaacggcgccatgggcggcctgggcagcggctacggcaccggcctgctgagcgccaacagacacagcctgatggtgggcacccacagagaggacggcgtggccctgagaggcagccacagcctgctgcccaaccaggtgcccgtgccccagctgcccgtgcagagcgccaccagccccgacctgaaccccccccaggacccctacagaggcatgccccccggcctgcagggccagagcgtgagcagcggcagcagcgagatcaagagcgacgacgagggcgacgagaacctgcaggacaccaagagcagcgaggacaagaagctggacgacgacaagaaggacatcaagagcatcaccagcaacaacgacgacgaggacctgacccccgagcagaaggccgagagagagaaggagagaagaatggccaacaacgccagagagagactgagagtgagagacatcaacgaggccttcaaggagctgggcagaatggtgcagctgcacctgaagagcgacaagccccagaccaagctgctgatcctgcaccaggccgtggccgtgatcctgagcctggagcagcaggtgagagagagaaacctgaaccccaaggccgcctgcctgaagagaagagaggaggagaaggtgagcagcgagcccccccccctgagcctggccggcccccaccccggcatgggcgacgccagcaaccacatgggccagatgtag

SEQ ID NO: 86022 - DNA, 1878 bp, Artificial Sequence
  derived and/or modified sequence
atggaagaggattctcgggacgtcgaagacagatctagttccggttcatgggggaatggaggccatccatcccccagccgtaattatggcgacgggaccccctatgaccacatgaccagccgggacttaggctctcatgataacctgtccccaccatttgtcaattcgcgaattcagtccaaaacagagcgggggtcttacagctcttacgggcgggagagtaacctgcaagggtgccaccagcagagcctgcttggtggagacatggacatgggtaacccggggacgctgagtccgacaaaacctggctcacagtactatcagtactcctcaaataatccaaggaggagacctttgcacagcagtgctatggaggtgcagacaaagaaggtcagaaaggtgccgccagggctaccaagctcagtgtacgcaccatccgccagcacagccgactataatagagactcgcccggatacccctccagcaaacctgccacttctacatttccatcctcgttcttcatgcaggatggacaccatagctctgacccttggagtagtagctctgggatgaatcagcccgggtatgctggcatgttgggcaatagctctcatatccctcagagtagcagctattgttcgctccacccccacgagagactttcctaccctagccactccagcgctgacattaactctagccttcctcccatgtccacctttcataggagcggcaccaaccactatagtacttctagttgcaccccgcccgccaacggcactgactcaattatggcgaaccgaggcagcggggctgcgggatcctcccagaccggagacgctctcggcaaagctctggccagcatttactctcccgaccacactaataactccttctcctcaaatccaagcaccccagtgggcagtccaccctctctgagcgccggaaccgcggtctggtcacgcaatggtgggcaggcttcatcaagtcccaattacgaggggcccctgcacagcctgcagtctcgtatagaagatcgactggaacggctggacgacgcaatccatgtgcttcgaaaccacgctgtgggccctagtactgccatgcccggagggcatggggacatgcacggtataataggacccagccataatggtgccatgggaggcctgggaagcggttacggaaccggccttctctcagccaatagacactccctaatggtgggcacacaccgtgaggatggcgtagctctcagggggtcgcattcactgctacccaatcaggtcccagtaccgcaattgcctgtccagagtgccactagccccgatcttaaccctcctcaggacccataccggggtatgcccccgggattacagggacagagcgtatcgtcagggtccagcgaaatcaagtctgacgatgagggagacgagaatctgcaggatacaaagtcgtccgaggacaaaaagctggatgatgataagaaggacataaaaagcataacaagtaacaatgatgacgaagacctgactcctgagcagaaggctgagagagagaaagaaaggaggatggccaacaatgcgagggaacgactacgcgtgcgggatattaacgaggcattcaaggagctaggccgcatggtgcagttacacctgaaatcagacaagccccagactaagctgctgattcttcaccaggccgtcgcggtgatcctatccctggagcagcaggtgagggaaaggaatcttaatccaaaggctgcctgtctgaagagaagagaggaggaaaaagtctcctccgagccaccacctctcagccttgctggaccacaccccgggatgggcgatgcgagtaatcacatgggacagatgtag

SEQ ID NO: 86023 - DNA, 1878 bp, Artificial Sequence
  derived and/or modified sequence
atggaggaggacagcagagatgtggaggacaggagcagcagcggctcctggggcaatggaggccaccccagccccagcagaaattatggagatggcaccccctatgaccacatgaccagccgggacctgggcagccatgacaacctgagccccccatttgtgaacagccgcatccagagcaagacagagcggggcagctacagcagctatggccgggagagcaacctgcagggctgccaccagcagagcctgctgggcggggacatggacatgggcaaccctggcaccctgagccccaccaagccaggcagccagtactaccagtacagcagcaacaacccccggcggcggcccctgcacagcagcgccatggaggtgcagaccaagaaggtgaggaaggtgcccccaggcctgcccagctctgtgtatgcccccagcgccagcacagctgactacaacagagacagccctggctaccccagcagcaagccagccaccagcaccttccccagcagcttcttcatgcaggacggccaccacagcagtgacccctggagcagcagcagcggcatgaaccagcccggctacgccggcatgctgggcaacagcagccacatcccccagagcagcagctactgcagcctgcacccccatgagcggctgagctaccccagccacagcagcgctgacatcaacagcagcctgccccccatgagcaccttccacaggagcggcaccaaccactacagcaccagcagctgcaccccaccagccaatggaacagacagcatcatggccaacagaggcagcggggctgctggcagcagccagacaggagatgccctgggcaaggccctggccagcatctacagcccagaccacaccaacaacagcttcagcagcaaccccagcacccctgtgggcagcccccccagcctgtctgctggaacagctgtgtggagcagaaatggaggccaggccagcagcagccccaactatgagggccccctgcacagcctgcagagcagaattgaagatcggctggagcggctggatgatgccatccacgtgctgagaaatcatgctgtgggccccagcacagccatgcctgggggccatggagacatgcacggcatcatcggccccagccacaatggagccatgggcggcctgggcagcggctatggaacaggcctgctgagcgccaacagacacagcctgatggtgggcacccaccgggaggatggagtggccctgcggggcagccacagcctgctgcccaaccaggtgcctgtgccccagctgcctgtgcagagcgccaccagcccagacctgaaccccccccaggacccctaccggggcatgcctcctggcctgcagggccagagcgtgagcagcggcagcagcgagatcaagagtgatgatgaaggagatgagaacctgcaggacaccaagagcagcgaggacaagaagctggatgatgacaagaaggacatcaagagcatcaccagcaacaatgatgatgaggacctgaccccagagcagaaggccgagcgggagaaggagaggaggatggccaacaatgcccgggagcggctgcgggtgcgggacatcaatgaggccttcaaggagctgggccgcatggtgcagctgcacctgaagagtgacaagccccagaccaagctgctgatcctgcaccaggccgtggccgtcatcctgagcctggagcagcaggtgcgggagaggaacctgaaccccaaggccgcctgcctgaagagaagagaggaggagaaggtgtcctctgagcccccacccctgagcctggccggcccccaccctggcatgggagatgccagcaaccacatgggccagatgtag

SEQ ID NO: 86024 - DNA, 1878 bp, Artificial Sequence
  derived and/or modified sequence
atggaggaggacagccgggacgtggaggaccggagcagcagcggcagctggggcaatggcggacaccctagtccgtccagaaattatggcgatggtacaccatacgatcatatgacgagcagggacctggggtctcacgataatcttagcccaccatttgttaactcgcgaattcaatctaaaaccgagcgcggctcttattcatcttatgggcgcgaaagcaacctccaaggatgccatcaacaaagtctgctaggaggagatatggacatgggaaacccagggaccctctcaccaaccaaaccgggatctcagtactaccaatatagtagtaacaaccctagaaggagacctctccatagctcagcgatggaggttcagaccaagaaggtacgcaaggtaccacccggattaccaagtagcgtctatgcaccctccgcaagtacagcggactataacagagattcacctggatatcctagctctaaacccgctacgtccacatttcccagcagtttcttcatgcaagatgggcaccactcatccgatccttggagcagttcctcgggtatgaaccagcctggctatgctggcatgctcgggaatagttctcatatcccgcaatccagctcctattgcagtttgcatccgcacgagcggttgagctatccttcccactctagcgccgacatcaattctagcctcccgcccatgtcaacatttcacaggtctggaactaatcattattcaacatcttcctgtacccctcctgctaatggaaccgacagtatcatggcgaatcgaggatcaggtgcagcaggaagctcccagactggtgacgctttggggaaggcccttgccagtatctattcgccggaccatacaaacaactcattcagctccaatccatctactcctgtggggagccccccaagcctatccgccggaaccgccgtgtggagtcggaatggtggacaggcctccagcagtcctaattacgagggaccattacattcattacagagtcgcatcgaggatcgtctggagcgattagatgacgcaatccacgttttgcggaaccacgccgtgggccctagtaccgctatgcccggaggccacggagacatgcatggcattattggccccagtcacaacggagccatgggcgggttggggagcggatacgggactggactgctgtctgccaatcgccattccctcatggtcggtacccatagggaggacggcgtcgcactcagagggagtcactccctgctcccgaatcaggttcccgttccacaattgccggtacagtctgcaacaagccccgaccttaacccaccccaggacccttacagagggatgccacccgggttgcagggccagtccgtctcatcaggtagctccgaaattaagagtgacgatgaaggcgacgagaatttacaggatacaaaaagcagcgaagataaaaaactcgatgacgataagaaagatatcaaatccatcaccagcaacaacgatgacgaggacttaactccagagcagaaagccgaacgtgaaaaagaacgtcggatggccaataatgcccgtgagaggcttagggtgcgcgacatcaatgaagcatttaaagaactgggccggatggtccagctacacctgaagtccgataagccccaaacaaaactactgatactgcatcaggccgtagcagtgattctgtcacttgagcaacaggtgcgagagcggaatttaaacccaaaagctgcctgcctgaagaggagggaggaggagaaggtgtcatctgagccacccccgctgtcactagccggcccccatcccggtatgggtgatgcaagcaaccacatgggtcagatgtag

SEQ ID NO: 86025 - DNA, 1878 bp, Artificial Sequence
  derived and/or modified sequence
atggaagaggatagccgggatgtggaggaccgttcttcctctggaagttggggcaacggcggacacccgagtccctcccggaactacggtgatggcactccgtatgatcacatgactagtcgggatctgggctcacacgataacctgtcaccaccgtttgtgaactctagaatccaatccaaaacggagcgaggttcctactcatcgtatggaagagaatcgaatctgcaaggctgtcatcagcagtcactcctggggggagatatggacatgggcaaccctggcaccctgagccctactaagcccggatcccagtactaccagtacagctcgaacaaccctaggcgaagacctttacacagtagcgccatggaagtccagacaaaaaaagttcgaaaagtcccacctggattgcctagcagtgtctacgctccgtctgcatcaacagcggattacaaccgcgatagccccggttacccctcatcaaagcccgcaacttctacgttcccgagttcattcttcatgcaggatggtcaccacagtagtgatccttggtcctcctccagcggtatgaatcagcccggatacgctggaatgctgggcaatagttctcatattccacagtcgagtagttattgtagcctgcatccccacgagaggctgagctacccatcccattcttcagctgacataaacagctcacttcctcccatgagcacatttcatagatctggtacaaatcactactctactagcagttgcactccacccgctaacggaaccgactctattatggccaatcggggatcaggggctgccggtagctcccagacaggcgacgccctcggcaaagcactggcatctatctattcccctgaccatacaaataattccttttcatctaatcctagcacccccgtggggtcacccccaagcctgagcgctggaaccgccgtgtggagccgcaatgggggtcaggcctcctccagccccaactatgaaggcccattacactctttgcaatcgagaattgaggaccgccttgagcgtctggacgacgccattcacgtactacgaaaccacgctgttgggccaagcacagcaatgcctggagggcacggcgatatgcatgggatcatcgggccaagtcacaatggagccatgggcggattgggcagcggctatgggacaggcctactgtctgcgaatagacacagcttgatggtgggaacccatcgggaggacggtgtggctttaagagggtctcattccctgctgccaaaccaggtacctgtgccgcaactgcccgtgcaatcagccacatcacctgatctcaaccccccacaagatccatatcgagggatgcccccagggttgcagggccagagcgtcagctccggatccagtgaaattaagtctgatgacgaaggtgacgagaatttgcaggacactaagtcttccgaggacaaaaaattagacgacgataagaaggatatcaaatcaattacctctaacaacgacgatgaggatctgacaccagaacagaaagctgaaagagagaaagagagacgcatggccaataacgctcgcgagcgcttgcgagtgagagacattaatgaggctttcaaggagttaggtcgcatggtacagctccacctgaagtcagataaaccccaaactaagctgcttatattgcatcaagcggtggctgtgatcctctccttggagcagcaagtgcgggagcggaatttaaatcctaaagctgcttgcctgaagcgcagggaggaggagaaggttagcagtgagcctccaccccttagtctggccggtccccatcccggaatgggtgatgcctcaaaccatatggggcagatgtag

SEQ ID NO: 86026 - DNA, 2396 bp, Artificial Sequence
  derived and/or modified sequence
attaactcatgttctgtttccatggagcacaggagagtaacaaggaaggccccttaaaagaaaggccttttaaagtggaggtctcagttcacaaactttaaaagtttacgaagtagtattttagaattttaatcaccagatatattgggggaatttattacttcctattcatatggaagaggacagcagagatgtagaagacagaagtagctcagggtcctgggggaatggaggacatccaagcccgtccaggaactatggagatgggactccctatgaccacatgaccagcagggaccttgggtcacatgacaatctctctccaccttttgtcaattccagaatacaaagtaaaacagaaaggggctcatactcatcttatgggagagaatcaaacttacagggttgccaccagcagagtctccttggaggtgacatggatatgggcaacccaggaaccctttcgcccaccaaacctggttcccagtactatcagtattctagcaataatccccgaaggaggcctcttcacagtagtgccatggaggtacagacaaagaaagttcgaaaagttcctccaggtttgccatcttcagtctatgctccatcagcaagcactgccgactacaatagggactcgccaggctatccttcctccaaaccagcaaccagcactttccctagctccttcttcatgcaagatggccatcacagcagtgacccttggagctcctccagtgggatgaatcagcctggctatgcaggaatgttgggcaactcttctcatattccacagtccagcagctactgtagcctgcatccacatgaacgtttgagctatccatcacactcctcagcagacatcaattccagtcttcctccgatgtccactttccatcgtagtggtacaaaccattacagcacctcttcctgtacgcctcctgccaacgggacagacagtataatggcaaatagaggaagcggggcagccggcagctcccagactggagatgctctggggaaagcacttgcttcgatctattctccagatcacactaacaacagcttttcatcaaacccttcaactcctgttggctctcctccatctctctcagcaggcacagctgtttggtctagaaatggaggacaggcctcatcgtctcctaattatgaaggacccttacactctttgcaaagccgaattgaagatcgtttagaaagactggatgatgctattcatgttctccggaaccatgcagtgggcccatccacagctatgcctggtggtcatggggacatgcatggaatcattggaccttctcataatggagccatgggtggtctgggctcagggtatggaaccggccttctttcagccaacagacattcactcatggtggggacccatcgtgaagatggcgtggccctgagaggcagccattctcttctgccaaaccaggttccggttccacagcttcctgtccagtctgcgacttcccctgacctgaacccaccccaggacccttacagaggcatgccaccaggactacaggggcagagtgtctcctctggcagctctgagatcaaatccgatgacgagggtgatgagaacctgcaagacacgaaatcttcggaggacaagaaattagatgacgacaagaaggatatcaaatcaattactagcaataatgacgatgaggacctgacaccagagcagaaggcagagcgtgagaaggagcggaggatggccaacaatgcccgagagcgtctgcgggtccgtgacatcaacgaggctttcaaagagctcggccgcatggtgcagctccacctcaagagtgacaagccccagaccaagctcctgatcctccaccaggcggtggccgtcatcctcagtctggagcagcaagtccgagaaaggaatctgaatccgaaagctgcgtgtctgaaaagaagggaggaagagaaggtgtcctcagagcctccccctctctccttggccggcccacaccctggaatgggagacgcatcgaatcacatgggacagatgtaaaagggtccaagttgccacattgcttcattaaaacaagagaccacttccttaacagctgtattatcttaaacccacataaacacttctccttaacccccatttttgtaatataagacaagtctgagtagttatgaatcgcagacgcaagaggtttcagcattcccaattatcaaaaaacagaaaaacaaaaaaaagaaagaaaaaagtgcaacttgagggacgactttctttaacatatcattcagaatgtgcaaagcagtatgtacaggctgagacacagcccagagactgaacggcaatctttccacactgtggaacaatgcatttgtgcctaaacttcttttgg

SEQ ID NO: 86027 - protein, 600 aa, Artificial Sequence
  derived and/or modified sequence
MKDIFFQFIIARVRKCYSLSCLHTLPVVPTLRKTERGSYSSYGRESNLQGCHQSLLGGDMDMGNPGTLSPTKPGSQYYQYSSNNPRRRPLHSSAMEVQTKKVRKVPPGLPSSVYAPSASTADYNRDSPGYPSSKPATSTFPSSFFMQDGHHSSDPWSSSSGMNQPGYAGMLGNSSHIPQSSSYCSLHPHERLSYPSHSSADINSSLPPMSTFHRSGTNHYSTSSCTPPANGTDSIMANRGSGAAGSSQTGDALGKALASIYSPDHTNNSFSSNPSTPVGSPPSLSAGTAVWSRNGGQASSSPNYEGPLHSLQSRIEDRLERLDDAIHVLRNHAVGPSTAMPGGHGDMHGIIGPSHNGAMGGLGSGYGTGLLSANRHSLMVGTHREDGVALRGSHSLLPNQVPVPQLPVQSATSPDLNPPQDPYRGMPPGLQGQSVSSGSSEIKSDDEGDENLQDTKSSEDKKLDDDKKDIKSITRSRSSNNDDEDLTPEQKAEREKERRMANNARERLRVRDINEAFKELGRMVQLHLKSDKPQTKLLILHQAVAVILSLEQQVRERNLNPKAACLKRREEEKVSSEPPPLSLAGPHPGMGDASNHMGQM

SEQ ID NO: 86028 - DNA, 1803 bp, Artificial Sequence
  derived and/or modified sequence
atgaaggacatcttcttccagttcatcatcgccagagtgagaaagtgctacagcctgagctgcctgcacaccctgcccgtggtgcccaccctgagaaagaccgagagaggcagctacagcagctacggcagagagagcaacctgcagggctgccaccagagcctgctgggcggcgacatggacatgggcaaccccggcaccctgagccccaccaagcccggcagccagtactaccagtacagcagcaacaaccccagaagaagacccctgcacagcagcgccatggaggtgcagaccaagaaggtgagaaaggtgccccccggcctgcccagcagcgtgtacgcccccagcgccagcaccgccgactacaacagagacagccccggctaccccagcagcaagcccgccaccagcaccttccccagcagcttcttcatgcaggacggccaccacagcagcgacccctggagcagcagcagcggcatgaaccagcccggctacgccggcatgctgggcaacagcagccacatcccccagagcagcagctactgcagcctgcacccccacgagagactgagctaccccagccacagcagcgccgacatcaacagcagcctgccccccatgagcaccttccacagaagcggcaccaaccactacagcaccagcagctgcaccccccccgccaacggcaccgacagcatcatggccaacagaggcagcggcgccgccggcagcagccagaccggcgacgccctgggcaaggccctggccagcatctacagccccgaccacaccaacaacagcttcagcagcaaccccagcacccccgtgggcagcccccccagcctgagcgccggcaccgccgtgtggagcagaaacggcggccaggccagcagcagccccaactacgagggccccctgcacagcctgcagagcagaatcgaggacagactggagagactggacgacgccatccacgtgctgagaaaccacgccgtgggccccagcaccgccatgcccggcggccacggcgacatgcacggcatcatcggccccagccacaacggcgccatgggcggcctgggcagcggctacggcaccggcctgctgagcgccaacagacacagcctgatggtgggcacccacagagaggacggcgtggccctgagaggcagccacagcctgctgcccaaccaggtgcccgtgccccagctgcccgtgcagagcgccaccagccccgacctgaaccccccccaggacccctacagaggcatgccccccggcctgcagggccagagcgtgagcagcggcagcagcgagatcaagagcgacgacgagggcgacgagaacctgcaggacaccaagagcagcgaggacaagaagctggacgacgacaagaaggacatcaagagcatcaccagaagcagaagcagcaacaacgacgacgaggacctgacccccgagcagaaggccgagagagagaaggagagaagaatggccaacaacgccagagagagactgagagtgagagacatcaacgaggccttcaaggagctgggcagaatggtgcagctgcacctgaagagcgacaagccccagaccaagctgctgatcctgcaccaggccgtggccgtgatcctgagcctggagcagcaggtgagagagagaaacctgaaccccaaggccgcctgcctgaagagaagagaggaggagaaggtgagcagcgagcccccccccctgagcctggccggcccccaccccggcatgggcgacgccagcaaccacatgggccagatgtag

SEQ ID NO: 86029 - DNA, 1803 bp, Artificial Sequence
  derived and/or modified sequence
atgaaagatatcttcttccagttcattatagccagagtgcgcaagtgctactccctctcatgtctacacactctgccagtcgttcctactctgcggaagacagagagaggatcatactctagctacggacgcgagtcaaaccttcagggttgtcaccagtcgctccttggcggagacatggacatgggcaaccctgggacattgtctcctacaaaaccaggatcacagtactaccagtactctagcaacaacccgcggcgccgccctctgcacagttccgccatggaggtgcagaccaaaaaggtgagaaaagttccaccgggtcttccaagttccgtgtatgctccaagcgcttcaaccgccgactataaccgtgactctcccggctacccatcttccaagcctgccacttccacgtttccaagtagtttcttcatgcaggacggtcatcattcgagtgatccttggagttcttccagcggcatgaatcaacctgggtacgccggaatgctgggaaattcctcccatattcctcaatcttccagctattgtagtttacaccctcatgagagactgagctacccctctcattcttccgctgatatcaactcctccctcccgcctatgtccacttttcaccgcagcggaacaaaccactattcaacctccagttgcaccccgcccgccaatggcacggatagtattatggcaaatcggggatccggtgccgccggatctagccagaccggagacgctttgggcaaggccttggcctcaatatattctcctgaccacactaataattctttttcttcaaacccctcaactcctgtcgggagcccgccatctctgtctgccgggacggccgtatggagtagaaacggcggccaagcctcatcctctcctaattatgaaggccccttgcattcactacagtcgaggatcgaagacaggttagagaggctggacgacgcaatccatgtcctgcggaaccatgcagtgggcccatcgacagcaatgccgggcggacacggtgatatgcatggcataattggcccgtctcacaacggggccatgggtggactcggatctggctacggtacaggactcctcagcgctaacaggcatagcctaatggtggggacacaccgcgaagatggagtagccttgagaggtagtcacagtttactccccaaccaagtgcctgtccctcagttgccagtccaatctgcgacatcccccgatcttaaccccccacaggacccataccgagggatgccaccgggcctacagggccagtccgtctctagcggctccagcgaaattaagtccgacgacgaaggagacgagaacttgcaggatacaaagagctccgaggataaaaaattggacgacgacaaaaaggatattaagtcaatcacacggtcccgaagctctaataatgacgacgaagatttgacccctgagcagaaagcagagcgggagaaggagcgccgcatggccaataatgcccgggagaggctgagggtgagggacattaacgaagccttcaaggaattgggccgcatggtccagctacacctgaagagcgataaacctcagaccaaactgctcatcctgcaccaggccgtggccgtgattctgtctctcgaacagcaggtcagggagaggaatcttaatcctaaggcagcctgtctgaagcgacgggaagaagagaaggtgtcttctgagccccctcctctgtccttagcagggccccaccctggaatgggagacgcctccaatcatatgggccagatgtag

SEQ ID NO: 86030 - DNA, 1803 bp, Artificial Sequence
  derived and/or modified sequence
atgaaggacatcttcttccagttcatcatcgcccgggtgaggaagtgctacagcctgagctgcctgcacaccctgcctgtggtgcccaccctgaggaagacagagcggggcagctacagcagctatggccgggagagcaacctgcagggctgccaccagagcctgctgggcggggacatggacatgggcaaccctggcaccctgagccccaccaagccaggcagccagtactaccagtacagcagcaacaaccccaggagaagacccctgcacagcagcgccatggaggtgcagaccaagaaggtgaggaaggtgcccccaggcctgcccagctctgtgtatgcccccagcgccagcacagctgactacaacagagacagccctggctaccccagcagcaagccagccaccagcaccttccccagcagcttcttcatgcaggacggccaccacagcagtgacccctggagcagcagcagcggcatgaaccagcccggctacgccggcatgctgggcaacagcagccacatcccccagagcagcagctactgcagcctgcacccccatgagcggctgagctaccccagccacagcagcgctgacatcaacagcagcctgccccccatgagcaccttccacaggagcggcaccaaccactacagcaccagcagctgcaccccaccagccaacggcacagacagcatcatggccaacagaggcagcggggccgccggcagcagccagacaggagatgccctgggcaaggccctggccagcatctacagcccagaccacaccaacaacagcttcagcagcaaccccagcacccctgtgggcagcccccccagcctgtctgctggaacagctgtgtggagcagaaatggaggccaggccagcagcagccccaactatgagggccccctgcacagcctgcagagcagaattgaggaccggctggagcggctggatgatgccatccacgtgctgaggaaccacgctgtgggccccagcacagccatgcctgggggccacggggacatgcacggcatcatcggccccagccacaacggggccatgggcggcctgggcagcggctacggcaccggcctgctgagcgccaacagacacagcctgatggtgggcacccacagagaagatggagtggccctgcggggcagccacagcctgctgcccaaccaggtgcctgtgccccagctgcctgtgcagagcgccaccagcccagacctgaaccccccccaggacccctaccggggcatgcctcctggcctgcagggccagagcgtgagcagcggcagcagcgagatcaagagtgatgatgaaggagatgagaacctgcaggacaccaagagcagcgaggacaagaagctggatgatgacaagaaggacatcaagagcatcaccaggagccgcagcagcaacaatgatgatgaggacctgaccccagagcagaaggccgagcgggagaaggagaggaggatggccaacaatgcccgggagcggctgcgggtgcgggacatcaatgaggccttcaaggagctgggccgcatggtgcagctgcacctgaagagtgacaagccccagaccaagctgctgatcctgcaccaggccgtggccgtcatcctgagcctggagcagcaggtgcgggagaggaacctgaaccccaaggccgcctgcctgaagaggcgggaggaggagaaggtgagcagcgagcccccacccctgagcctggccggcccccaccctggcatgggagatgccagcaaccacatgggccagatgtag

SEQ ID NO: 86031 - DNA, 1803 bp, Artificial Sequence
  derived and/or modified sequence
atgaaggacatcttcttccagttcatcatcgcccgggtgcggaagtgctatagtctaagctgcttacacacccttcctgtggtgccaacgttgcggaaaaccgagcgtgggtcatacagctcctacggccgagagagtaacctccaagggtgccaccagtcattgttgggtggtgatatggatatggggaaccccggaacactctcgccaacgaagcccggatctcagtattaccagtactcttctaacaatccgcgacgtcggcccctgcattcctccgctatggaggtacaaacaaagaaagtcagaaaggtccccccgggcctgccctcatctgtctacgccccttcagcatctacagcggattacaatagagactctcctggctatcctagctctaagcccgccacatctaccttccccagcagctttttcatgcaagacggccatcactcctcagacccttggagttctagctctgggatgaatcaacccggatatgcaggaatgcttggaaacagtagtcatattccccagtcttcctcgtattgtagccttcacccgcatgagcggctgtcgtaccccagccatagtagcgccgatatcaattcatcactgccaccaatgtcaacttttcacaggagtgggacaaatcactattccacaagcagttgcacccctccggcaaacggcaccgactccataatggctaacagaggctccggagctgcgggatcctcgcagacgggagatgccttaggaaaagccctagccagcatctactccccagatcacactaataatagcttttcgagtaacccatcaaccccagtgggttctccaccatctctgtcagcaggcaccgccgtgtggtccagaaatgggggccaggcttcaagcagtcctaactacgagggacccctgcacagccttcagtcccgcatcgaagaccgtctcgaaagactagacgacgccatccatgtgctgcgcaatcatgctgtcggcccgtcaacagcgatgcctggggggcatggagacatgcatggcataatcggtccttcacacaacggggctatgggtggattgggctccggttacggtacaggtctgctgtctgccaatcggcactcacttatggtgggcactcaccgggaagacggcgtggccctacgtgggtcccactccttgctgccaaatcaagtacccgtgccacagctgcctgtccagtcagcgacatccccagatctcaaccccccccaggatccctatcgaggcatgccccctgggctgcaaggtcagagtgtgtcctcggggtcatccgagatcaagtcagatgatgaaggggatgaaaatcttcaagacactaagtcttccgaagacaagaagctggacgacgataagaaggatattaagagcatcactagaagtcgtagtagcaataacgacgacgaggacctgactcccgagcagaaggcggaacgtgaaaaggaaaggaggatggccaataacgcaagggagcgacttcgtgtgcgggatattaacgaggcttttaaggagctgggacgcatggtgcagctgcatctcaaatccgataagccacagacgaagctgcttatcctgcatcaggccgtagcagtcatcttgagcctggaacagcaggtcagggagagaaatctgaatcccaaggcggcctgcctgaagagacgtgaggaggagaaagtcagttccgagccaccacccctgagcttggccggtccccaccctggaatgggtgatgcaagtaatcacatgggacagatgtag

SEQ ID NO: 86032 - DNA, 1803 bp, Artificial Sequence
  derived and/or modified sequence
atgaaagatattttctttcaattcattatcgcccgtgtgagaaagtgctatagcctgtcttgcctgcatacgctgcctgtggtgcctactttacggaaaaccgaacggggatcttattcaagctacggcagggagtctaacctacaggggtgtcaccaaagccttctgggaggcgatatggacatgggtaaccctggcactctcagcccaaccaagccaggcagtcaatactatcagtacagcagcaacaacccgagacggagacccctgcacagtagcgccatggaggtgcagacaaagaaagtgagaaaggtgcctccgggattaccctcaagcgtttacgctccctccgcttcgaccgcagattataatcgggactccccaggttacccgagctccaaacctgccacatccaccttcccctcaagctttttcatgcaggacgggcatcacagttcagatccctggtcaagcagcagcggcatgaaccaacccggatatgccggtatgctcggcaactcatcgcacatcccgcagagctcgagctactgcagtctgcaccctcatgagaggttgtcctaccccagccattcctccgcagatattaattcctcactgccgccaatgagcacctttcacagatcagggactaatcattactctacatcttcatgtacccctccagctaacggtaccgactcaataatggccaaccgaggtagtggtgctgcaggctctagccagaccggagacgcgcttggcaaagctctggcaagcatttattctcccgaccacacgaataactccttctcaagtaaccctagtaccccagtaggaagccctccatccttgtctgccggaactgcagtatggtcgcgtaatggcggtcaggccagctcctcacccaattacgagggacccctgcatagcctacagtcacgcattgaggatcgactggagcgacttgatgacgccatacatgtcctgcgcaatcacgccgtggggccatccacagcaatgcctggcggacatggagatatgcatgggattattggaccatcgcataacggtgccatgggtggcttagggagtgggtacggtactgggctcctctccgccaacaggcactcactgatggtggggacccaccgggaggatggggtcgccttaaggggctcgcattcactactccctaatcaagtgccagttccacagctgcccgtccagagtgccacatctcctgatcttaatccaccccaagatccttataggggcatgccacctggactccagggccaaagcgtttccagcggtagcagtgagataaagtccgatgatgagggcgacgaaaatctccaggatacaaaatctagtgaggacaagaaactggacgacgataagaaggatataaagtctattacacgcagtaggagctcaaacaacgatgatgaggatctgacaccggagcagaaagctgagagagagaaagaaaggcgaatggccaacaacgccagggagaggctgcgcgtcagggatataaacgaggctttcaaagaattgggacgcatggtacagttacacctcaagtcagataaacctcagacgaaacttctgatcctgcatcaggcagtcgcggttatactctctttggagcagcaggtgcgcgagaggaacctcaatccaaaggcagcctgcctcaaacggcgagaggaagaaaaggtgtcttcagagcccccacccctgtcactcgctggtcctcatcctgggatgggagatgctagtaatcacatggggcagatgtag

SEQ ID NO: 86033 - DNA, 2255 bp, Artificial Sequence
  derived and/or modified sequence
gactcagaattttgaatagtttctttgctaaattcaccatctggagagcctgtgattgattagttttggcctcactattaagtgtcaatataatcaatgggaattactaggctagggtcattacatagataatttgcctgctgtgtaaataaaaatgaaattgtttaaattttgtgcaagagaaagtgaaaataaggagttacgatttgtttgttagagaaagtggaggccattggaatgacagtttttggaagtgtggagcagtttggctaagaataggaatgaaggatatttttttccagtttatcatagccagagtgaggaagtgttattccctctcttgcttgcatacattgccagtagtgcctactttacgtaaaacagaaaggggctcatactcatcttatgggagagaatcaaacttacagggttgccaccagagtctccttggaggtgacatggatatgggcaacccaggaaccctttcgcccaccaaacctggttcccagtactatcagtattctagcaataatccccgaaggaggcctcttcacagtagtgccatggaggtacagacaaagaaagttcgaaaagttcctccaggtttgccatcttcagtctatgctccatcagcaagcactgccgactacaatagggactcgccaggctatccttcctccaaaccagcaaccagcactttccctagctccttcttcatgcaagatggccatcacagcagtgacccttggagctcctccagtgggatgaatcagcctggctatgcaggaatgttgggcaactcttctcatattccacagtccagcagctactgtagcctgcatccacatgaacgtttgagctatccatcacactcctcagcagacatcaattccagtcttcctccgatgtccactttccatcgtagtggtacaaaccattacagcacctcttcctgtacgcctcctgccaacgggacagacagtataatggcaaatagaggaagcggggcagccggcagctcccagactggagatgctctggggaaagcacttgcttcgatctattctccagatcacactaacaacagcttttcatcaaacccttcaactcctgttggctctcctccatctctctcagcaggcacagctgtttggtctagaaatggaggacaggcctcatcgtctcctaattatgaaggacccttacactctttgcaaagccgaattgaagatcgtttagaaagactggatgatgctattcatgttctccggaaccatgcagtgggcccatccacagctatgcctggtggtcatggggacatgcatggaatcattggaccttctcataatggagccatgggtggtctgggctcagggtatggaaccggccttctttcagccaacagacattcactcatggtggggacccatcgtgaagatggcgtggccctgagaggcagccattctcttctgccaaaccaggttccggttccacagcttcctgtccagtctgcgacttcccctgacctgaacccaccccaggacccttacagaggcatgccaccaggactacaggggcagagtgtctcctctggcagctctgagatcaaatccgatgacgagggtgatgagaacctgcaagacacgaaatcttcggaggacaagaaattagatgacgacaagaaggatatcaaatcaattactaggtcaagatctagcaataatgacgatgaggacctgacaccagagcagaaggcagagcgtgagaaggagcggaggatggccaacaatgcccgagagcgtctgcgggtccgtgacatcaacgaggctttcaaagagctcggccgcatggtgcagctccacctcaagagtgacaagccccagaccaagctcctgatcctccaccaggcggtggccgtcatcctcagtctggagcagcaagtccgagaaaggaatctgaatccgaaagctgcgtgtctgaaaagaagggaggaagagaaggtgtcctcagagcctccccctctctccttggccggcccacaccctggaatgggagacgcatcgaatcacatgggacagatgtaaaagggtccaagttgccacattgcttcattaaaacaagagaccacttccttaacagctgtattatcttaaacccacataaacacttctccttaacccccatttttgtaatataagacaagtctgagtagttatgaatcgcagacgcaagaggtttcagcattcccaattatc

SEQ ID NO: 86034 - protein, 511 aa, Artificial Sequence
  derived and/or modified sequence
MYCAYTIPGMGGNSLMYYYNGKAVYAPSASTADYNRDSPGYPSSKPATSTFPSSFFMQDGHHSSDPWSSSSGMNQPGYAGMLGNSSHIPQSSSYCSLHPHERLSYPSHSSADINSSLPPMSTFHRSGTNHYSTSSCTPPANGTDSIMANRGSGAAGSSQTGDALGKALASIYSPDHTNNSFSSNPSTPVGSPPSLSAGTAVWSRNGGQASSSPNYEGPLHSLQSRIEDRLERLDDAIHVLRNHAVGPSTAMPGGHGDMHGIIGPSHNGAMGGLGSGYGTGLLSANRHSLMVGTHREDGVALRGSHSLLPNQVPVPQLPVQSATSPDLNPPQDPYRGMPPGLQGQSVSSGSSEIKSDDEGDENLQDTKSSEDKKLDDDKKDIKSITRSRSSNNDDEDLTPEQKAEREKERRMANNARERLRVRDINEAFKELGRMVQLHLKSDKPQTKLLILHQAVAVILSLEQQVRERNLNPKAACLKRREEEKVSSEPPPLSLAGPHPGMGDASNHMGQM

SEQ ID NO: 86035 - DNA, 1536 bp, Artificial Sequence
  derived and/or modified sequence
atgtactgcgcctacaccatccccggcatgggcggcaacagcctgatgtactactacaacggcaaggccgtgtacgcccccagcgccagcaccgccgactacaacagagacagccccggctaccccagcagcaagcccgccaccagcaccttccccagcagcttcttcatgcaggacggccaccacagcagcgacccctggagcagcagcagcggcatgaaccagcccggctacgccggcatgctgggcaacagcagccacatcccccagagcagcagctactgcagcctgcacccccacgagagactgagctaccccagccacagcagcgccgacatcaacagcagcctgccccccatgagcaccttccacagaagcggcaccaaccactacagcaccagcagctgcaccccccccgccaacggcaccgacagcatcatggccaacagaggcagcggcgccgccggcagcagccagaccggcgacgccctgggcaaggccctggccagcatctacagccccgaccacaccaacaacagcttcagcagcaaccccagcacccccgtgggcagcccccccagcctgagcgccggcaccgccgtgtggagcagaaacggcggccaggccagcagcagccccaactacgagggccccctgcacagcctgcagagcagaatcgaggacagactggagagactggacgacgccatccacgtgctgagaaaccacgccgtgggccccagcaccgccatgcccggcggccacggcgacatgcacggcatcatcggccccagccacaacggcgccatgggcggcctgggcagcggctacggcaccggcctgctgagcgccaacagacacagcctgatggtgggcacccacagagaggacggcgtggccctgagaggcagccacagcctgctgcccaaccaggtgcccgtgccccagctgcccgtgcagagcgccaccagccccgacctgaaccccccccaggacccctacagaggcatgccccccggcctgcagggccagagcgtgagcagcggcagcagcgagatcaagagcgacgacgagggcgacgagaacctgcaggacaccaagagcagcgaggacaagaagctggacgacgacaagaaggacatcaagagcatcaccagaagcagaagcagcaacaacgacgacgaggacctgacccccgagcagaaggccgagagagagaaggagagaagaatggccaacaacgccagagagagactgagagtgagagacatcaacgaggccttcaaggagctgggcagaatggtgcagctgcacctgaagagcgacaagccccagaccaagctgctgatcctgcaccaggccgtggccgtgatcctgagcctggagcagcaggtgagagagagaaacctgaaccccaaggccgcctgcctgaagagaagagaggaggagaaggtgagcagcgagcccccccccctgagcctggccggcccccaccccggcatgggcgacgccagcaaccacatgggccagatgtag

SEQ ID NO: 86036 - DNA, 1536 bp, Artificial Sequence
  derived and/or modified sequence
atgtactgcgcctacaccatccctggcatgggaggaaatagcctaatgtactactataatggaaaggccgtctacgccccctccgcttctacagcagactataacagagattcaccggggtacccgtcctctaagccggctacttcaacttttcccagctcattcttcatgcaggatggacaccactcttctgatccgtggagttcatcgagcgggatgaatcagccggggtacgccgggatgctcgggaacagctcccatatcccccagagctcgagctactgcagtttgcatccacatgaaagattgtcttatcctagccacagttcagcagatattaatagtagccttcctccaatgagcacatttcaccggagcggcactaaccattatagtacttccagctgtaccccacctgccaacggcaccgattccatcatggctaatagagggagcggagccgcagggtccagccagacaggggacgcgctgggaaaagctctcgcttccatatactcccctgaccacactaataatagtttctcttcaaacccatccacaccagttggatccccaccaagcctatccgcaggaactgccgtttggtcaagaaatggggggcaggcgagtagctcacccaactacgagggtccactgcactccctgcaatctcgcattgaggatagactggaaaggctcgatgatgcgatccatgtcctgcgaaatcatgccgtggggccctccactgccatgccaggtggtcatggtgacatgcacgggatcataggacccagtcacaacggtgctatgggcggactgggaagtggttatggcaccggccttttatcagcgaacagacactctctcatggtcggcacacaccgagaagatggagttgctctacgaggttcgcactccctcctgcctaatcaggtaccagttccccagctacccgtacagagtgctactagccctgatttgaatccaccgcaggatccctatcgcggcatgcccccgggtctccagggacagtcagtatcaagtggaagttctgaaattaagtctgatgacgagggggacgagaatctgcaagacacgaaatcttctgaagacaaaaagctcgacgatgataaaaaggacataaagtcaattacaaggagtcgctcctcaaacaatgatgacgaagatctcacccctgagcaaaaggccgaaagggagaaagagaggcggatggccaataacgcaagggaaagacttcgagtgcgggatatcaatgaggccttcaaggagctgggccgcatggtccaactccacctgaaaagtgacaaaccacagacaaagcttcttattcttcaccaggccgtggccgttatcctgtctcttgaacagcaggtgcgggagaggaacctgaatccgaaggcagcatgccttaaaaggcgtgaggaagagaaggttagttccgaaccacccccactgtctctggccggcccacacccaggcatgggtgatgcttctaaccatatgggccaaatgtag

SEQ ID NO: 86037 - DNA, 1536 bp, Artificial Sequence
  derived and/or modified sequence
atgtactgtgcctacaccatccctggcatgggcggcaacagcctgatgtactactacaacgggaaggctgtgtatgcccccagcgccagcacagctgactacaacagagacagccctggctaccccagcagcaagccagccaccagcaccttccccagcagcttcttcatgcaggacggccaccacagcagtgacccctggagcagcagcagcggcatgaaccagcccggctacgccggcatgctgggcaacagcagccacatcccccagagcagcagctactgcagcctgcacccccatgagcggctgagctaccccagccacagcagcgctgacatcaacagcagcctgccccccatgagcaccttccacaggagcggcaccaaccactacagcaccagcagctgcaccccaccagccaatggaacagacagcatcatggccaacagaggcagcggggctgctggcagcagccagacaggagatgccctgggcaaggccctggccagcatctacagcccagaccacaccaacaacagcttcagcagcaaccccagcacccctgtgggcagcccccccagcctgtctgctggaacagctgtgtggagcagaaatggaggccaggccagcagcagccccaactatgagggccccctgcacagcctgcagagcagaattgaagatcggctggagcggctggatgatgccatccacgtgctgagaaatcatgctgtgggccccagcacagccatgcctgggggccatggagacatgcacggcatcatcggccccagccacaatggagccatgggcggcctgggcagcggctatggaacaggcctgctgagcgccaacagacacagcctgatggtgggcacccaccgggaggatggagtggccctgcggggcagccacagcctgctgcccaaccaggtgcctgtgccccagctgcctgtgcagagcgccaccagcccagacctgaaccccccccaggacccctaccggggcatgcctcctggcctgcagggccagagcgtgagcagcggcagcagcgagatcaagagtgatgatgaaggagatgagaacctgcaggacaccaagagcagcgaggacaagaagctggatgatgacaagaaggacatcaagagcatcaccaggagccgcagcagcaacaatgatgatgaggacctgaccccagagcagaaggccgagcgggagaaggagaggaggatggccaacaatgcccgggagcggctgcgggtgcgggacatcaatgaggccttcaaggagctgggccgcatggtgcagctgcacctgaagagtgacaagccccagaccaagctgctgatcctgcaccaggccgtggccgtcatcctgagcctggagcagcaggtgcgggagaggaacctgaaccccaaggccgcctgcctgaagagaagagaggaggagaaggtgtcctctgagcccccacccctgagcctggccggcccccaccctggcatgggagatgccagcaaccacatgggccagatgtag

SEQ ID NO: 86038 - DNA, 1536 bp, Artificial Sequence
  derived and/or modified sequence
atgtactgcgcctacaccatccccggcatgggcggcaacagcctgatgtactactataacggcaaagcggtatacgcaccaagtgcgtctacagctgattataatcgtgatagccctggctaccctagtagcaagcccgccacctcaacttttcccagtagcttcttcatgcaagacgggcatcactcaagcgacccatggagcagcagttccgggatgaatcaaccgggatacgctggaatgctgggtaacagctcacacatccctcagtctagctcctactgtagcctacatccacacgagagactgagctacccaagtcactcctcagccgatattaatagtagtcttccccccatgagtactttccatcgctccggcacaaatcattactccacctcctcttgcaccccacctgctaacgggacagactctatcatggccaaccggggctcaggagctgccggatcaagccagaccggggacgcgctggggaaggcactggcaagtatttactctcccgaccacaccaacaattctttctcctccaacccttcaacccctgtggggagcccgccctctctgagcgccggaactgccgtgtggtctcgcaatggaggccaggcttcgagctcaccaaattatgagggccccctccatagtcttcagagtagaatcgaagacaggcttgagaggctggacgatgccatccacgtgttaagaaaccacgctgtggggccgagtactgctatgcctggtggccatggtgatatgcatggaataattggaccatctcataacggggcaatgggcggactgggctctgggtatggtactgggcttttgtcagctaatagacacagtctgatggtgggtactcatagggaggatggcgtggctctgagggggtcccacagcctgttgcctaaccaagtcccggtgcctcagctgcccgtgcagtccgccactagcccagatctcaatcctccacaggatccgtatagaggtatgcccccaggcttgcaaggccagagcgtctcctccgggagcagtgaaatcaaaagtgacgatgagggtgacgagaacctccaggataccaagtcaagtgaagataagaagctggatgatgacaaaaaggatatcaaaagtatcacccggagcaggagctcaaacaatgatgacgaagacctcacacccgaacagaaggctgaacgcgaaaaggaaaggaggatggcaaacaatgcccgcgagaggctgagggtgagggatatcaatgaggcctttaaagagctgggcaggatggtgcagctccacctcaaaagcgacaaacctcagacgaaactcctaattcttcatcaagcggtagcggttatcctatcgctcgagcagcaagtccgggagaggaatctcaaccccaaagccgcctgccttaaaaggagagaggaggagaaagtaagctctgagcctcccccgctgagtctggcagggccacaccccgggatgggcgacgcttccaatcacatgggacagatgtag

SEQ ID NO: 86039 - DNA, 1536 bp, Artificial Sequence
  derived and/or modified sequence
atgtattgcgcctataccataccgggaatgggaggaaacagtctcatgtattactacaacggcaaggccgtgtatgctccctcagcctctaccgccgactataatagggactctcccggatatccaagctcaaagcccgcaacgtctaccttcccctcttcatttttcatgcaagacggacaccattccagcgatccgtggagttcaagcagcggcatgaaccagcccggttatgcgggaatgctgggcaattcatcccatatcccgcagtccagcagctactgctccctgcatccacatgagagactgagctacccaagccacagctccgccgatatcaactctagcctgccacccatgtcaaccttccatcggtcaggcacaaaccactattctacatcctcctgcaccccgccagccaacggcactgactcgataatggctaatagaggctcaggcgctgcgggaagcagccagaccggcgatgccctggggaaagctctggcaagtatctattcaccagatcatactaacaattcattttcctctaacccatccacccccgtgggctcaccccctagcctgtcagcagggacggcagtgtggtctaggaacggaggccaggcctcttcaagtcccaattatgagggacccctgcatagtctgcagtccagaatagaagatcgccttgaaaggttagatgacgccattcacgtgttgaggaaccacgccgtggggccatctacggctatgcctggcggtcatggtgacatgcacggaatcattggtccttctcacaacggggctatggggggacttggctctggatatggcactgggttgctgtcagcgaaccggcacagcttgatggttggcacacaccgggaggacggcgtagctctcaggggctcgcactcactgttgccaaaccaagtgcctgttccgcagctccccgtccagagtgctacctctcccgacctgaatcctccccaagacccttacagaggaatgccacctgggctgcaaggtcaaagcgtttctagcggctccagcgagatcaaatcggacgacgaaggtgatgaaaacctgcaagataccaagtcgtccgaagacaagaagctggatgacgacaaaaaggatatcaagagcatcaccaggtccagatcctccaacaacgatgacgaagacctcacacctgagcagaaggccgagagagagaaggagaggagaatggctaacaacgctagggagcggctcagagttcgggacattaatgaagccttcaaggagttgggaaggatggtccagcttcatctcaaatccgataagccgcagactaagttgctgatattgcaccaggccgtcgcagtgattctgtcactggagcaacaagtgcgagagaggaatctgaaccccaaagcagcctgcctcaagcggagggaagaggaaaaagtgtccagcgagcccccaccattaagcttagccggaccacacccgggaatgggcgatgcttctaatcatatgggccaaatgtag

SEQ ID NO: 86040 - DNA, 7240 bp, Artificial Sequence
  derived and/or modified sequence
atgtactgcgcatacacaatcccgggcatgggcggcaactctttgatgtactactataatgggaaagcggtctatgctccatcagcaagcactgccgactacaatagggactcgccaggctatccttcctccaaaccagcaaccagcactttccctagctccttcttcatgcaagatggccatcacagcagtgacccttggagctcctccagtgggatgaatcagcctggctatgcaggaatgttgggcaactcttctcatattccacagtccagcagctactgtagcctgcatccacatgaacgtttgagctatccatcacactcctcagcagacatcaattccagtcttcctccgatgtccactttccatcgtagtggtacaaaccattacagcacctcttcctgtacgcctcctgccaacgggacagacagtataatggcaaatagaggaagcggggcagccggcagctcccagactggagatgctctggggaaagcacttgcttcgatctattctccagatcacactaacaacagcttttcatcaaacccttcaactcctgttggctctcctccatctctctcagcaggcacagctgtttggtctagaaatggaggacaggcctcatcgtctcctaattatgaaggacccttacactctttgcaaagccgaattgaagatcgtttagaaagactggatgatgctattcatgttctccggaaccatgcagtgggcccatccacagctatgcctggtggtcatggggacatgcatggaatcattggaccttctcataatggagccatgggtggtctgggctcagggtatggaaccggccttctttcagccaacagacattcactcatggtggggacccatcgtgaagatggcgtggccctgagaggcagccattctcttctgccaaaccaggttccggttccacagcttcctgtccagtctgcgacttcccctgacctgaacccaccccaggacccttacagaggcatgccaccaggactacaggggcagagtgtctcctctggcagctctgagatcaaatccgatgacgagggtgatgagaacctgcaagacacgaaatcttcggaggacaagaaattagatgacgacaagaaggatatcaaatcaattactaggtcaagatctagcaataatgacgatgaggacctgacaccagagcagaaggcagagcgtgagaaggagcggaggatggccaacaatgcccgagagcgtctgcgggtccgtgacatcaacgaggctttcaaagagctcggccgcatggtgcagctccacctcaagagtgacaagccccagaccaagctcctgatcctccaccaggcggtggccgtcatcctcagtctggagcagcaagtccgagaaaggaatctgaatccgaaagctgcgtgtctgaaaagaagggaggaagagaaggtgtcctcagagcctccccctctctccttggccggcccacaccctggaatgggagacgcatcgaatcacatgggacagatgtaaaagggtccaagttgccacattgcttcattaaaacaagagaccacttccttaacagctgtattatcttaaacccacataaacacttctccttaacccccatttttgtaatataagacaagtctgagtagttatgaatcgcagacgcaagaggtttcagcattcccaattatcaaaaaacagaaaaacaaaaaaaagaaagaaaaaagtgcaacttgagggacgactttctttaacatatcattcagaatgtgcaaagcagtatgtacaggctgagacacagcccagagactgaacggcaatctttccacactgtggaacaatgcatttgtgcctaaacttcttttggaaaaaaaaaatataattaatttgtaagtctgaaaaaaaaatatttaatttaaaaaaaattgtaaacttgcaataatgaaaaagtgtacttctgaagaaaactacatgaacgtttttgttggtattcaagtcagctagtgtttataattactggatattgaattaggggaagctcggctgccctagtaacaaaaccagcaaacgtcctgatgacaacgaagtgatgacattagccattccttagggtaggaggaacagatggatcttatagacctatgacaaatatatatataaatatatatataaatatatattaaaaatttagtgactatggtaagcttttgttcatttgtttcagacttttttctcctgtaaaaaaatagtactgattaacttttttaaaagaaagattttactgtaaatatggatttttttttttttggtcttatttctgtccctttccctggtttgttatcgtaacctgtagtgccaactctgcttccagaggggtagtgcaggatgaaatgctgaccctgatgttgcttctcattcataaataagtagaaagttgtttctccagtcttttgggaacacaggacttaaaagtcacatcatgtgtagatattacaagcagcattaccaagacatggcaaaaagagtttgtctgaattgtaatgttgcgtttgtgaacctattctgggattttcagaggtacaaggttagaatgctacaatgttaccactgtgccttccaatgtttatatcatcggaaacataacataatcaaagtggctgtgatttaacaaaatgattaaagtgttacctacctgtgtagccgaagtagtgtgcagtgaggcgtttctgaatacatggtcagatttttggaaaaaaacaaaaacaaaaaaaacaagtaaagttcaaaaaccgtcaaatgagaaaattgcaagtagtgtgacagagctgattgattttgttgctttcttgattttttttttcaaaatgggtttactaaaatgtagatgacttaactgcctcctccttcgtctgaaaaatgccaatattcaatcatcatgcagcattataacaagccttataagtcctaaagcattaagttgcacttttttgaggaggggtagtgcagtatttctctggccagtatgaatgaagtttatacttaccatatttgatagaaacatagatcaagctatggcacagcgactcatcagatagctagctttgacgtctgggcacaattgaaccaacttccatcgtgaatctttataatgattgactttggtgtatagtgcagtaaacaaatagtgctcctagttaagtatttgtcagcatccttttgtctctaacttgtttctatttttacagccacacaattcttggcatgtattaagaaaaaaaaaaatccctgttcaagtagtttttccacctatcagcactgagtaaatgccataaatccattgaaatggtctaaatgttccatctgttctcctgttttgccagttatatagtaatgaaatacatttgtaaattttatgcaacaaatggcaaacgtatcattattttgaaattgtgtatgtaaaagttatatttttacatgtagactcttgttattatgtgttttaatacattgtatcagtttttgtttttttttaaaaactgtggtttaaaaagaagtctcatttaaatgaaatagctacaagaatcagaattttatgttcatttctgaaaatgtaagaacaaataagatagttaccacgtggtcatcttttacaaacccataaacattttgattagctgtgtgtgtgttgaaaaactgtaaatatgttcagtagcgataaaactaaaataactttgatttgttgataagttcctaaaatgtggaggtggattaaaaccttaggagaatagcagaaatcaaacttcatgaaaagttattttggggctttcctgtgaaatgtatgaacaaagaggctcagagaaggacatggaagacaataatgtatactctctcctcctccctgaataatgaaaaccatgtgtatttgttccctccgtatgttaaagatttccttttagtggtacattctgcactcattttgtatagtctaccaaggcgggtatccctaggaacaatattatataggaagcaggtatactctgatcacattcaggataagtgtacagaagaaaatacggtgtttactctttagggaactggaaacactccctgcattgatgtacattttaagaatggcacttttgatacatgttatcataaaggtgcttaatagagctgaattaaagtttttcaaatctgtaaacaaagcaaaaaagtaaattgtagtcatttgattattttttaaattggtgctttatattttgttctcactcagagtaaaagctgcaatttattgttcaccagctttgatgtattcattactcagtaatgcaatacctctattgttgaattccctttggaaataagtgaaaattctaacggccactgaaagctgctcgctaggttttgcttggtggagaaacataatctgcacctatccatattaattgggttgtatccccattaaaaaagaaaaaaagggaatgtggcctttttagtgtgttttttattgttgttgttttgtaattatcaaacccaggtaagatattggtatcctgcactggattttcaaatgaagttcagcagaagacagttaagattaaagtactatacaaaaatttcaaaagggtccatactacgctatctgtatgacgacacttaggctggggatctctttcagaaactcggactttaaaagcaacttggagcagttgatccacctccacattcaagtaatttatgaatatgcagaatagggatctgttcatctagaaatttttaccatttgtcttctgtgtagctgcaaggaacactaatgtttatacaactgtcagtccacccagtggtgcaactggttctgattcagtcttccgattcctttttatttttcactttttcctatttctgaatttttttttttatttgtgatcttgattttgatgaggggttggggagtggggagggagtcgaaccaagacttggagttaagaggattttcatcttttgcatccaacaggcagaatatgatctgtgtccaaaagtgaacttgagtcaggaatgaatcaatttcagcataaacaagcacaaaaatttagtctgctggctgactggaagcaaaaaagtcaagatggaatatgatgaattccaacacaatggggcaccaaggcctttaggcctctctttttattttgctttggttttgtttgtttttctttagagacatgctctttctcatgggacttgaagtggactcatctttgtgcagtgctggttttgccatactcatttcaagtattatagacatatgtaatggtgaaaatatatgaactgtggcctttttcattcttgttacttgtgatgcaattaagtgaagataagaaaaaaaaaaaaaaagcagagatttaccatgtatcagtgcctggctttttgttataaagctttgtttgtctagtgctcttttgctataaaatagactgtagtacaccctagtaggaaaaaaaaaaaactaaatttaaaaataaaaaatatatttggcttatttttcgcaggagcaatccttttataccatgaatattacaaaaaaattgtcagattctgaatatttcttctttgtagatttttggaatcattatgagtaaaagtttgttactttattttactatttaaaagatgttattttaccatgtgttaccaagatgaaactgtatgggtagcttttttgtttgttttttgttttgtttttgtttttgtttttgtttttagttgtaggtcgcagcggggaaattttttgcgactgtacacatagctgcagcattaaaaacttaaaaaaattgttaaaaaaaaaaaaagggaaaacatttcaaaaaaaaaaaaaaagataaacagttacaccttgttttcaatgtgtggctgagtgcctcgattttttcatgtttttggtgtatttctgatttgtagaagtgtccaaacaggttgtgtgctggagttccttcaagacaaaaacaaacccagcttggtcaaggccattacctgtttcccatctgtagttattcgatgaagtcatgtacatgaccgttctgtagcaataaatgtgccatttttataaactgtttctgacacttgtttcatttcattttgcattgtccatatagctatgattctcttctgtaagtaaaacgcatctatatttcattttccaagtgttggaggtattgacagcttaacaaacaaaacatacaaaaaaaatcacaaaaacaaattgaaaagcaaagcacatgattgatcaaggaagagatgcccttaatgaaaatggaacgggatgcatgcaaaacaaaaagaaaactgtctagaggattaactaattgaaggaatataattaatgtgtgtgtaacactgaagctatgcatttgaagagctctgaactgcaccagtgttttcggttgtgctgcaggttgctaagtcaagtcagccttaaccttttgcaccagttggtcggctgtttggcagaacattctcagatcttttcagtcaaaaatctaagatgatttattttgtatcactttgttaaaagctgaatattgttaactacagttaatattaacactgtatttatactttctcaaactacatccgccccaccacttctggttgcctctgttgactattaatccagatgtaaacaaccagatgtttttttctaacttgtacaaactgacgtgtgtcaactatcatggaaggaaaaaaatgtacagattaaaattattcagtgttatgtactgtaagttaatatttttgtagaatggacatcaatctactttgcaaaatttggaggctatttcaacattgcactgtagaaatgtaaagtaatgtatgcaatgtaaaggaaagcccgcggtagctgagcgcttcataacagaatgttctaatcaagtacgtggtatttggggatgtctccaatattgctcttgtattctttctaattgggtttagtgactagttgaaggaaaatgttataacgccatttggttcacatgtgaagtgccctccatagccaaatgttgggatttttttttttttcgtttttggttggactgtttgcagatatttaaattttatgaaatttccaaagattttggttgataacccccttttaccttctaaatgatttgagatgttcttatgttcttactgtgtgttttaaatatatataaaagagccacaagcattt

SEQ ID NO: 86041 - DNA, 744 bp, Artificial Sequence
  derived and/or modified sequence
atggtgacccagctgagatacgagagcttctgcctgcaccagttccaggagcaggacggcgagagcatccccgagaaccaggagctggccagcaagcaggagatcctgaaggagatggagcacctgggcgacagcaagctgcagagagacgtgagcctggacagcaagtacagagagacctgcaagagagacagcaaggccgagaagcagcaggcccacagcaccggcgagagaagacacagatgcaacgagtgcggcaagagcttcaccaagagcagcgtgctgatcgagcaccagagaatccacaccggcgagaagccctacgagtgcgaggagtgcggcaaggccttcagcagaagaagcagcctgaacgagcacagaagaagccacaccggcgagaagccctaccagtgcaaggagtgcggcaaggccttcagcgccagcaacggcctgaccagacacagaagaatccacaccggcgagaagccctacgagtgcaaggtgtgcggcaaggccttcctgctgagcagctgcctggtgcagcaccagagaatccacaccggcgagaagagataccagtgcagagagtgcggcaaggccttcatccagaacgccggcctgttccagcacctgagagtgcacaccggcgagaagccctaccagtgcagccagtgcagcaagctgttcagcaagagaaccctgctgaagaagcaccagaagatccacaccggcgagagaccctag

SEQ ID NO: 86042 - DNA, 744 bp, Artificial Sequence
  derived and/or modified sequence
atggtgacccagcttagatacgaatctttctgtctgcaccagttccaagaacaggacggcgagtctatccctgagaaccaggaactggcctccaagcaggagatcctcaaggagatggaacacctgggagatagtaagctccagcgggacgtcagtttggatagtaaataccgtgagacctgtaaacgcgacagcaaagcagagaagcagcaggcacacagtaccggcgagcgacggcaccggtgtaatgagtgcggcaagtccttcacaaagtcctctgtcctgattgagcatcagcggatacataccggggaaaagccctacgagtgcgaggagtgtggtaaagccttcagcaggaggagctcactcaatgaacaccgacgttctcacactggggagaagccgtatcagtgcaaagaatgtggtaaggcattttcagctagtaacgggctcactagacacagaaggatccacacaggcgaaaagccttatgagtgtaaagtttgcggaaaggcatttctgctgagttcctgtctggtacagcaccagcgaatccacaccggcgagaaaagataccagtgccgtgaatgtggtaaggctttcatccagaacgccgggctgtttcaacaccttcgagtacataccggcgaaaagccctatcaatgctcccaatgctctaagctgttttccaagcgaaccctgttaaagaagcatcagaaaatccatacgggtgaacggccttag

SEQ ID NO: 86043 - DNA, 744 bp, Artificial Sequence
  derived and/or modified sequence
atggtgacccagctgcgctatgagagcttctgcctgcaccagttccaggagcaggatggagagagcatccctgagaaccaggagctggccagcaagcaggagatcctgaaggagatggagcacctgggggacagcaagctgcagagagatgtgtccctggacagcaagtaccgggagacctgcaagagggacagcaaggccgagaagcagcaggcccacagcactggagagcggcggcaccgctgcaatgaatgtgggaagagcttcaccaagagctctgtgctgattgagcaccagaggatccacactggagagaagccctatgaatgtgaggagtgtgggaaggccttcagcagaagaagcagcctgaatgagcacagaagaagccacactggagagaagccctaccagtgcaaggaatgtgggaaggccttcagcgccagcaatggcctgaccaggcaccggcgcatccacactggagagaagccctatgagtgcaaggtgtgtgggaaggccttcctgctgagcagctgcctggtgcagcaccagaggatccacactggagagaagcgctaccagtgccgggagtgtgggaaggccttcatccagaatgccggcctcttccagcacctgcgggtgcacactggagagaagccctaccagtgcagccagtgcagcaagctgttcagcaagaggaccctgctgaagaagcaccagaagatccacactggagagcggccctag

SEQ ID NO: 86044 - DNA, 744 bp, Artificial Sequence
  derived and/or modified sequence
atggtgacccagctgcggtacgagagcttctgcctgcaccagttccaggagcaggatggggaaagcattccagagaatcaggagctcgcctcaaagcaggagattctcaaagagatggaacatctcggggactcaaaactgcagcgcgacgttagcttggatagtaaatacagggagacgtgcaaaagagattcaaaggctgagaagcagcaggcgcattcaactggcgaacggagacatcgctgcaacgagtgtggcaagagcttcactaagtcctcagtcctgattgagcaccagaggatccacacaggtgaaaagccctacgagtgcgaagaatgtggcaaagctttctccaggagatcctccctgaatgaacaccggcgctcgcacactggagagaagccttatcagtgcaaagaatgcgggaaggctttttctgcctcaaacgggctgacccgccaccggagaatccataccggggagaaaccgtacgaatgtaaggtgtgcgggaaggcatttctcttgagctcctgtctcgtccagcaccagcgcattcacacaggcgagaagaggtaccaatgcagagaatgtggtaaggcttttattcagaatgcaggcctcttccaacatctgcgggtgcacactggcgaaaagccataccagtgctcccagtgctcgaaactgtttagcaagaggactctactgaagaaacaccagaaaatacatacgggagaacgcccgtag

SEQ ID NO: 86045 - DNA, 744 bp, Artificial Sequence
  derived and/or modified sequence
atggtaacgcaactgagatacgagtccttctgccttcaccaatttcaggagcaggacggcgaaagcattcctgaaaatcaggagttggcgtctaaacaggagatcctgaaagagatggagcaccttggagactctaagttgcagcgagacgtgtccttggatagcaagtaccgagaaacgtgcaagcgggactctaaagctgaaaagcaacaggcgcacagtactggcgagaggaggcataggtgtaatgagtgcgggaaatcatttaccaagagcagcgttctaatcgagcaccagcgcattcacacaggcgaaaagccatacgagtgtgaagaatgcggaaaggcgttttcccgcagatcttcgttaaatgaacacagacggtcgcatactggcgagaagccctatcagtgcaaagaatgcggcaaggccttttctgcgagcaacggccttactcggcataggagaatccacacgggggagaagccttacgagtgtaaggtgtgtgggaaagcttttctactatccagctgcctggtgcagcatcagaggatccacacaggcgagaaacggtaccaatgtcgagagtgcggcaaagcattcattcagaatgcaggcctttttcagcatctacgtgtgcacaccggcgaaaagccgtaccaatgtagtcagtgctcaaagctctttagtaaacgaaccctcctgaaaaaacaccagaagatccatactggagagagaccttag

SEQ ID NO: 86046 - protein, 211 aa, Artificial Sequence
  derived and/or modified sequence
MKLPLLLALLFGAVSALHLRSETSTFETPLGAKTLPEDEETPEQEMEETPCRELEEEEEWGSGSEDASKKDGAVESISVPDMVDKNLTCPEEEDTVKVVGIPGCQTCRYLLFTCRRCYRGNLVSIHNFNINYRIQCSVSALNQGQVWIGGRITGSGRCRRFQWVDGSRWNFAYWAAHQPWSRGGHCVALCTRGGHWRRAHCLRRLPFICSY

SEQ ID NO: 86047 - DNA, 636 bp, Artificial Sequence
  derived and/or modified sequence
atgaaattgcccctcctgttggccctgctgttcggtgctgtgtcagccttgcacttgcggagcgaaacatccacctttgaaacccccttaggggccaagaccctgcccgaggacgaagaaactcccgaacaggaaatggaggagacaccctgccgtgaactggaagaggaagaggagtggggttctggctctgaggatgcctcaaaaaaagatggtgctgtggaatctatcagtgttccagatatggtggataaaaacctcacatgtcctgaggaggaggatactgtgaaggtggtgggaatcccaggctgtcagacctgtcgttatttgctctttacctgtaggcgatgctacagagggaatcttgtgagcatccataacttcaacatcaactataggatccagtgctcagtcagtgcactgaaccaaggccaggtatggatcggaggaagaatcactggatccggcagatgcaggagattccagtgggtggatggctcccggtggaacttcgcttattgggctgcacaccaaccctggtcgcgagggggccactgtgtcgctctctgcaccaggggcggtcactggcgccgcgcccactgtctgcgaagactcccatttatttgcagctactag

SEQ ID NO: 86048 - DNA, 636 bp, Artificial Sequence
  derived and/or modified sequence
atgaagctgcccctgctgctggccctgctgtttggagctgtgtctgccctgcacctgcggtctgagaccagcacctttgagacccccctgggcgccaagaccctgcctgaagatgaggagaccccagagcaggagatggaggagaccccctgccgggagctggaggaggaggaggagtggggcagcggctctgaagatgccagcaagaaggatggagctgtggagagcatctctgtgcctgacatggtggacaagaacctgacctgcccagaggaggaggacacagtgaaggtggtgggcatccctggctgccagacctgccgctacctgctcttcacctgccgccgctgctaccggggcaacctggtgtccatccacaacttcaacatcaactaccgcatccagtgcagcgtgtctgccctgaaccagggccaggtgtggattggaggccgcatcactggaagtggccgctgccgccgcttccagtgggtggatggcagccgctggaactttgcctactgggccgcccaccagccctggagcagaggaggccactgtgtggccctgtgcacccggggcggccactggaggcgggcccactgcctgcggcggctgcccttcatctgcagctactag

SEQ ID NO: 86049 - DNA, 636 bp, Artificial Sequence
  derived and/or modified sequence
atgaagctgcccctgctgctggccctgctgttcggcgccgtgagcgccctgcatttgcgctcagagacttccacatttgagacacccttgggtgccaaaactctgcccgaagacgaagagacgcctgagcaagaaatggaagaaacgccctgccgggagttggaagaggaggaagagtgggggagtggctcagaggatgcaagcaagaaggatggggcggttgagtctatctccgtcccagacatggttgataaaaatctgacttgtcccgaagaagaggatactgtgaaggttgtcggcattcccggctgccaaacctgccgctacctcctgttcacgtgtcgccgctgctatcgaggaaacctggtctctatccataatttcaatatcaattaccggatacagtgttccgtttcagcgcttaaccagggccaagtgtggatcggcggccggattactggatctggacggtgccgcagatttcagtgggtcgacggctcccgctggaactttgcttattgggccgcccaccagccctggtccaggggcggccattgcgtggcattatgtacacggggagggcactggaggagagcacactgcttacgcagactgccattcatttgttcatattag

SEQ ID NO: 86050 - DNA, 636 bp, Artificial Sequence
  derived and/or modified sequence
atgaagttacctttgctgctggcactgcttttcggagccgtttcagccctccatcttaggtccgagaccagtacctttgagacacccctgggagcaaagaccctgcctgaggatgaagagacacccgagcaggaaatggaagagaccccttgcagagagctcgaggaggaggaggaatgggggagcggttctgaagacgcatctaagaaggacggtgcagtggagagcatcagcgtgccagatatggtggacaaaaacctgacgtgcccagaggaggaagataccgtgaaggtggtgggcatcccaggttgccagacgtgccgatacctgctgtttacctgtcggagatgttacagaggtaaccttgtgagcattcacaatttcaacatcaactataggattcagtgttcagttagcgccctcaatcagggccaggtttggattggaggtaggataaccggttcaggtagatgccggaggttccaatgggttgatgggagtcgctggaattttgcatactgggccgcacatcagccttggtctcggggaggtcattgtgtggccttgtgtacccgagggggacattggcgaagagcccactgcttgcggaggttgccctttatttgctcatattag

SEQ ID NO: 86051 - DNA, 1350 bp, Artificial Sequence
  derived and/or modified sequence
ggctttgggaagatctaaagacccaggaaggtctctgggtgggataaagccaagatgaaactccccttacttctggctcttctatttggggcagtttctgctcttcatctaaggtctgagacttccacctttgagacccctttgggtgctaagacgctgcctgaggatgaggagacaccagagcaggagatggaggagaccccttgcagggagctggaggaagaggaggagtggggctctggaagtgaagatgcctccaagaaagatggggctgttgagtctatctcagtgccagatatggtggacaaaaaccttacgtgtcctgaggaagaggacacagtaaaagtggtgggcatccctgggtgccagacctgccgctacctcctgtttacttgccggaggtgctacaggggcaacctggtttccatccacaacttcaatattaattatcgaatccagtgttctgtcagcgcgctcaaccagggtcaagtctggattggaggcaggatcacaggctcgggtcgctgcagacgctttcagtgggttgacggcagccgctggaactttgcatactgggctgctcaccagccctggtcccgcggtggtcactgcgtggccctgtgtacccgaggaggccactggcgtcgagcccactgcctcagaagacttcctttcatctgttcctactgagctggtcccagccagcagttcagagctgccctctcctgggcagctgcctcccctcctctgcttgccatccctccctccacctccctgcaataaaatgggttttactgaaatggatttattttctcctctgatcgcggatccactctgcttagccctcattgaaacttcttccttatcatctctccccacaccacaactttcatagaagtgtcagaagctactactccttgaggaggaggatggagggtggagttgggtctatggagccttttggagatggaggaatgggctcagctagttctcttcatagaacacctgattactgggcacctgcatagtgctgccaggacctttcaaggttgtaggtagactcccaatggcccagtttgcatctctgtaaccaaaggccttttctctctctctctccaaccccagaactgtggttggttttatatgtaaggaagttaacatgtccctgggaacagtccacaacattcaggaatgaatgtataagtaccgcaatccccggcccctcaagtggaataaatctaacatgtattgggcaccatttcccagtggcctgctgtggtagttggccttattccatgcatttttatgggctgccttcccttcctcaactgcattctctgctccttccta

SEQ ID NO: 86052 - DNA, 636 bp, Artificial Sequence
  derived and/or modified sequence
atgaagctgcccctgctgctggccctgctgttcggcgccgtgagcgccctgcacctgagaagcgagaccagcaccttcgagacccccctgggcgccaagaccctgcccgaggacgaggagacccccgagcaggagatggaggagaccccctgcagagagctggaggaggaggaggagtggggcagcggcagcgaggacgccagcaagaaggacggcgccgtggagagcatcagcgtgcccgacatggtggacaagaacctgacctgccccgaggaggaggacaccgtgaaggtggtgggcatccccggctgccagacctgcagatacctgctgttcacctgcagaagatgctacagaggcaacctggtgagcatccacaacttcaacatcaactacagaatccagtgcagcgtgagcgccctgaaccagggccaggtgtggatcggcggcagaatcaccggcagcggcagatgcagaagattccagtgggtggacggcagcagatggaacttcgcctactgggccgcccaccagccctggagcagaggcggccactgcgtggccctgtgcaccagaggcggccactggagaagagcccactgcctgagaagactgcccttcatctgcagctactag

SEQ ID NO: 86053 - DNA, 2744 bp, Artificial Sequence
  derived and/or modified sequence
ccaccacccctgtcctcctcaggccccctccgcctccacccctgccctcctcaggccccctccgcctccacccctgccctactcaggccccctccgcctccacccctgccctcctcaggccccctccgcctccacccctgccctcctcaggccccctccgcctccacccctgccctcctcaggccccctccgcctccacccctgccctcctcaggccccctgcgtccccgcctcgtcctcctcaggccccctccgcctccggctccgtcctcctcaggccccctccgcctccggctccgtcctcctctggccccctccgcccccggccccggccccacggcgggatgcgggacaacaccagccccatcagcgtgattctggtgagctcggggagcaggggcaataagctgctgttcaggtaccccttccagagaagccaggagcacccggcgtcccagacaagtaagccgcgtagcagatacgctgccagcaacacgggcgaccatgctgatgagcaggacggcgattccaggccaacgcagacccgtcagtgataaactgtctgcataacctgtcccgtcgtatcgccaccgtgctgcagcacgaggagcgccgctgccagtacctcacccgggaggccaagctgatcctggcgctccaggatgaggtgtccgccatggctgatggaaatgaaggtcctcagtccccattccatcacatcctgcccaagtgcaagctggccagggacctcaaggaagcttatgacagcctgtgcacgtcgggcgtagttcggcttcacatcaacagctggctggaggtgagcttctgcctgccccacaagatccactatgcggcctccagtctgatccccccagaggccatcgaacggagcctgaaagccatccgcccctaccatgccctgctgctgctcagtgatgagaagtccttgctgggtgagcttcctattgactgctcccctgccctagtgcgggtgatcaagaccacatctgctgtgaagaacctgcagcagctagcccaagatgcggacctggccttgctgcaggttttccagcttgcagctcatctggtgtactggggcaaggccatcatcatctacccgctgtgtgagaacaacgtctacatgctgtctcccaatgccagcgtatgtctgtactccccgctggccgagcagttctcccaccagttcccatctcatgacctgccgtccgttcttgccaagttctccttgccggtctccttgtcagaatttaggaatcccctggcccccgctgtgcaggagacccagctcatccagatggtggtgtggatgctgcagcgccggcttctcatccagctgcacacctatgtctgcctgatggcctcacccagcgaggaggagccccgtccgcgagaggacgacgtccccttcactgcccgggtcggcggtcgcagcctcagcacgcccaacgccctcagctttggctccccaaccagcagcgatgacatgaccctcaccagccccagcatggacaactccagcgcagagctacttcccagcggggactcgccactgaaccagaggatgacggagaacctgggccagctgtcggagcatgaacgcgcagccatcctcagtgtacccgcagcccagaaccctgaggacctccgcatgtttgccaggctccttcactacttccgcggccgccaccacctggaggagattatgtacaacgagaacacgcggcgctcccagctgctcatgctgtttgacaagttccgcagcgtgctggtggtgaccacccacgaggaccctgtcattgccgtcttccaggctctgctcccctgagcccaggcggagggcggaaggctgctggggtgcgcaggtgggcgctcgcgtctccccaccccagggctccccccgtgctgaggctgagccctcttggccctgaggcctggcattgggtggatgcgggctggccgtggcccagtgaagcctgcagagccccgctgtccttgcccctggtggttccgctgtggggctgctgccctctgtgttcctacgcttccctccagtccttgccgcacgcgtaggcatctccacgctggaggggggcctgccaggactcctgtctctgggtgaggccgcatccttcaaggcccatgtgggctgtgcgtttctcagaccctccttctgtccctacacctgctccttggaccccccagtctgtggccaccctgaagaatgtgcagaaacacttgtgtggcctgtccctgtctctctgacagccttctatttgtgaagtgccctgtggccccctccccagcacctctgtctgccatgcgcttcttcctcccaggctaccctgagcctttcctggcccagtcctcaccacagtccacagaagccgcaaacaggctcatagccaagctgtgacctggtcctgaccatctggggcacgagggcctgggctggccctgctaggctggagaagccctgtcacctgtgcacatcttgctggtggaggcatggcccactgtgcaggaccccaccctcgggggctttcggctcccacactgatgattctccccagcatccacaccgggcctggcgctacgtactcaggcccccagctctcgtgtcctggaggaagagctagctccagacatgggttgatcacctagaggagctctggctaaggcacagttttctagaaataaaacatttattcggtttttaaacaatt

SEQ ID NO: 86054 - protein, 543 aa, Artificial Sequence
  derived and/or modified sequence
MRDNTSPISVILVSSGSRGNKLLFRYPFQRSQEHPASQTSKPRSRYAASNTGDHADEQDGDSRFSDVILATILATKSEMCGQKFELKIDNVRFVGHPTLLQHALGQANADPSVINCLHNLSRRIATVLQHEERRCQYLTREAKLILALQDEVSAMADGNEGPQSPFHHILPKCKLARDLKEAYDSLCTSGVVRLHINSWLEVSFCLPHKIHYAASSLIPPEAIERSLKAIRPYHALLLLSDEKSLLGELPIDCSPALVRVIKTTSAVKNLQQLAQDADLALLQVFQLAAHLVYWGKAIIIYPLCENNVYMLSPNASVCLYSPLAEQFSHQFPSHDLPSVLAKFSLPVSLSEFRNPLAPAVQETQLIQMVVWMLQRRLLIQLHTYVCLMASPSEEEPRPREDDVPFTARVGGRSLSTPNALSFGSPTSSDDMTLTSPSMDNSSAELLPSGDSPLNQRMTENLLASSEHERAAILSVPAAQNPEDLRMFARLLHYFRGRHHLEEIMYNENTRRSQLLMLFDKFRSVLVVTTHEDPVIAVFQALLP

SEQ ID NO: 86055 - protein, 389 aa, Artificial Sequence
  derived and/or modified sequence
MADGNEGPQSPFHHILPKCKLARDLKEAYDSLCTSGVVRLHINSWLEVSFCLPHKIHYAASSLIPPEAIERSLKAIRPYHALLLLSDEKSLLGELPIDCSPALVRVIKTTSAVKNLQQLAQDADLALLQVFQLAAHLVYWGKAIIIYPLCENNVYMLSPNASVCLYSPLAEQFSHQFPSHDLPSVLAKFSLPVSLSEFRNPLAPAVQETQLIQMVVWMLQRRLLIQLHTYVCLMASPSEEEPRPREDDVPFTARVGGRSLSTPNALSFGSPTSSDDMTLTSPSMDNSSAELLPSGDSPLNQRMTENLGQLSEHERAAILSVPAAQNPEDLRMFARLLHYFRGRHHLEEIMYNENTRRSQLLMLFDKFRSVLVVTTHEDPVIAVFQALLP

SEQ ID NO: 86056 - DNA, 1632 bp, Artificial Sequence
  derived and/or modified sequence
atgagagacaacaccagccccatcagcgtgatcctggtgagcagcggcagcagaggcaacaagctgctgttcagataccccttccagagaagccaggagcaccccgccagccagaccagcaagcccagaagcagatacgccgccagcaacaccggcgaccacgccgacgagcaggacggcgacagcagattcagcgacgtgatcctggccaccatcctggccaccaagagcgagatgtgcggccagaagttcgagctgaagatcgacaacgtgagattcgtgggccaccccaccctgctgcagcacgccctgggccaggccaacgccgaccccagcgtgatcaactgcctgcacaacctgagcagaagaatcgccaccgtgctgcagcacgaggagagaagatgccagtacctgaccagagaggccaagctgatcctggccctgcaggacgaggtgagcgccatggccgacggcaacgagggcccccagagccccttccaccacatcctgcccaagtgcaagctggccagagacctgaaggaggcctacgacagcctgtgcaccagcggcgtggtgagactgcacatcaacagctggctggaggtgagcttctgcctgccccacaagatccactacgccgccagcagcctgatcccccccgaggccatcgagagaagcctgaaggccatcagaccctaccacgccctgctgctgctgagcgacgagaagagcctgctgggcgagctgcccatcgactgcagccccgccctggtgagagtgatcaagaccaccagcgccgtgaagaacctgcagcagctggcccaggacgccgacctggccctgctgcaggtgttccagctggccgcccacctggtgtactggggcaaggccatcatcatctaccccctgtgcgagaacaacgtgtacatgctgagccccaacgccagcgtgtgcctgtacagccccctggccgagcagttcagccaccagttccccagccacgacctgcccagcgtgctggccaagttcagcctgcccgtgagcctgagcgagttcagaaaccccctggcccccgccgtgcaggagacccagctgatccagatggtggtgtggatgctgcagagaagactgctgatccagctgcacacctacgtgtgcctgatggccagccccagcgaggaggagcccagacccagagaggacgacgtgcccttcaccgccagagtgggcggcagaagcctgagcacccccaacgccctgagcttcggcagccccaccagcagcgacgacatgaccctgaccagccccagcatggacaacagcagcgccgagctgctgcccagcggcgacagccccctgaaccagagaatgaccgagaacctgctggccagcagcgagcacgagagagccgccatcctgagcgtgcccgccgcccagaaccccgaggacctgagaatgttcgccagactgctgcactacttcagaggcagacaccacctggaggagatcatgtacaacgagaacaccagaagaagccagctgctgatgctgttcgacaagttcagaagcgtgctggtggtgaccacccacgaggaccccgtgatcgccgtgttccaggccctgctgccctag

SEQ ID NO: 86057 - DNA, 210 bp, Artificial Sequence
  derived and/or modified sequence
atgagagacaacaccagccccatcagcgtgatcctggtgagcagcggcagcagaggcaacaagctgctgttcagataccccttccagagaagccaggagcaccccgccagccagaccagcaagcccagaagcagatacgccgccagcaacaccggcgaccacgccgacgagcaggacggcgacagcagacccacccagaccagacagtag

SEQ ID NO: 86058 - DNA, 1632 bp, Artificial Sequence
  derived and/or modified sequence
atgcgtgacaataccagccccatctctgtgatcctagttagctccggtagcaggggtaacaagctgctgtttaggtatccatttcagaggtcacaggagcacccggccagccagacctcaaaaccccgcagcaggtatgctgcttctaacactggagatcatgcagatgagcaggacggcgatagccgattttcagatgttatactcgccaccattctggctacaaaatctgagatgtgcgggcagaagttcgaacttaagatagataatgtgcggttcgtcgggcatcccacactgctgcagcacgcccttggacaggctaatgccgatcctagcgtgataaattgtttgcataacttgtctcgcagaattgccacagtgctgcagcatgaagagaggaggtgccaataccttactcgggaggccaagctgatcctggcacttcaggacgaggtcagcgccatggcagatggaaacgaaggcccccagtcacccttccaccatatccttcccaaatgcaaactcgcccgtgatctgaaagaggcctacgatagcctctgtacttccggagtggtgcggctgcatattaatagttggcttgaggtgagcttttgtctgccccacaagattcactacgctgcaagcagtctcatccccccagaggcaatcgagaggagtctaaaagctatccgcccttaccatgccctgctgctactgtcggatgaaaagagtctgttgggggagctgccaatagactgctctccagctcttgtgcgagtgataaaaacgacctctgccgtgaagaatttacagcagctggcccaggacgccgatctggctctcctgcaagtgtttcaactcgccgcccatctggtgtactggggcaaggccattatcatataccctctgtgcgagaacaacgtatatatgttgtcacctaatgcttcagtttgtctgtattcaccactagccgaacagttttcccatcaattccccagtcatgacctacctagcgtgttggccaagttcagccttccagtgtccctgagcgagttcaggaacccgctcgcccccgctgtgcaggaaacccaactcatacagatggtagtttggatgctacagcgaagactgctgatccaacttcatacatatgtatgcctcatggcgagtccaagtgaggaggagcctcgcccccgggaggatgacgtcccgttcaccgcccgggtgggaggaaggtccctctctactccgaacgccctatcattcggcagcccaacatctagtgacgacatgactctgacaagtccaagcatggataatagcagcgcagagcttttaccctctggtgacagccccctgaatcagagaatgactgagaacttgcttgccagtagtgaacatgagagggcagcgattcttagtgtcccggctgcccaaaaccctgaagacctcagaatgttcgcccgactcctccactattttcgtggccggcaccatctggaagaaatcatgtataatgaaaatacacggcgcagtcagctgttgatgttgttcgacaagtttagatcggtgctggtcgtcacgacccacgaggacccagtgatcgcagtgttccaagctctcctcccctag

SEQ ID NO: 86059 - DNA, 210 bp, Artificial Sequence
  derived and/or modified sequence
atgcgcgataatacttcacccatcagtgtcattctggtctcatcgggatctcgcggcaataagttgctgtttagatacccctttcagcgctcccaggaacacccagccagccaaacttccaaacctaggagccggtatgcagcttcaaatactggggatcatgccgatgaacaggacggcgactcccgcccaactcagaccaggcaatag

SEQ ID NO: 86060 - DNA, 1632 bp, Artificial Sequence
  derived and/or modified sequence
atgagggacaacaccagccccatcagcgtcatcctggtgagcagcggcagccggggcaacaagctgctcttccgctaccccttccagaggagccaggagcacccagccagccagaccagcaagcccaggagccgctatgctgccagcaacacaggagaccatgctgatgagcaggatggagacagccgcttcagtgatgtgatcctggccaccatcctggccaccaagtctgagatgtgtggccagaagtttgagctgaagattgacaacgtgcgctttgtgggccaccccaccctgctgcagcacgccctgggccaggccaatgctgaccccagcgtcatcaactgcctgcacaacctgagccgccgcatcgccaccgtgctgcagcacgaggagcggcgctgccagtacctgacccgggaggccaagctgatcctggccctgcaggatgaggtgtctgccatggctgatggaaatgaaggcccccagagccccttccaccacatcctgcccaagtgcaagctggcccgggacctgaaggaggcctatgacagcctgtgcaccagcggcgtggtgcggctgcacatcaacagctggctggaggtgtccttctgcctgccccacaagatccactatgctgccagcagcctcatccccccagaggccatcgagaggagcctgaaggccatccggccctaccacgccctgctgctgctgagtgatgagaagagcctgctgggggagctgcccatcgactgcagccctgccctggtgcgggtcatcaagaccaccagcgctgtgaagaacctgcagcagctggcccaggatgctgacctggccctgctgcaggtgttccagctggccgcccacctggtgtactggggcaaggccatcatcatctaccccctgtgtgaaaataatgtgtacatgctgagccccaatgcctctgtgtgcctgtacagccccctggccgagcagttcagccaccagttccccagccatgacctgcccagcgtgctggccaagttcagcctgcctgtgtccctgtctgagttcaggaaccccctggccccagctgtgcaggagacccagctgatccagatggtggtgtggatgctgcagaggcggctgctgatccagctgcacacctacgtgtgcctgatggccagccccagcgaggaggagccccggccccgggaggatgatgtgcccttcaccgcccgggtgggcggccgcagcctgagcaccccaaatgccctgagctttggcagccccaccagcagtgatgacatgaccctgaccagccccagcatggacaacagcagcgctgagctgctgcccagcggggacagccccctgaaccagaggatgacagagaacctgctggccagcagcgagcacgagcgggccgccatcctgtctgtgcctgctgcccagaaccctgaggacctgaggatgtttgcccggctgctgcactacttccggggccgccaccacctggaggagatcatgtacaatgaaaacacccggcgcagccagctgctgatgctgtttgacaagttccgctctgtgctggtggtgaccacccatgaagatcctgtgattgctgtgttccaggccctgctgccctag

SEQ ID NO: 86061 - DNA, 210 bp, Artificial Sequence
  derived and/or modified sequence
atgagggacaacaccagccccatcagcgtcatcctggtgagcagcggcagccggggcaacaagctgctcttccgctaccccttccagaggagccaggagcacccagccagccagaccagcaagcccaggagccgctatgctgccagcaacacaggagaccatgctgatgagcaggatggagacagccggcccacccagacccggcagtag

SEQ ID NO: 86062 - DNA, 1632 bp, Artificial Sequence
  derived and/or modified sequence
atgcgggacaacaccagccccatcagcgtgatcctggtgagcagcggatctcgagggaacaaactgttattccgctatccgtttcaaaggtcgcaggagcatccagcaagtcagacctcaaaacctcgcagccgctatgcagccagtaataccggcgatcacgcggacgaacaggacggcgatagccggttctctgacgtgattctggccaccattctggccacaaaatctgagatgtgtggccaaaagttcgagctcaagattgacaatgtgcggttcgtcggccatccaacattgctgcagcatgcgctaggccaagccaatgccgacccctccgtgatcaattgcctccataacctcagcagaagaatcgcaaccgtccttcagcatgaagaaagacgctgccaatacctcacgagggaagctaaactgatcctcgccctccaagacgaagtctccgctatggcagacggcaacgaggggcctcagtcacctttccaccatatcttgccaaaatgtaaactcgctcgtgatctcaaagaggcctatgacagcctttgcacctctggggtcgttcggctacatattaacagttggctcgaagtcagcttttgtcttcctcataagattcattacgccgcttcttctttgatacctccagaagctatcgaacggtccctgaaagccattaggccataccacgctctactgttactgagtgatgagaagagtttattaggtgagctcccaattgactgctcccccgctttggtgcgcgtcattaagactacatcagctgtcaagaaccttcagcagctggcacaagatgcagacctggcattgctccaagtttttcagctcgctgcccacctggtctattgggggaaggcaatcataatctatccactgtgcgagaataacgtctatatgctctccccaaacgcttccgtatgcctttactctcctctagcagagcagttcagtcaccaatttccatcacatgatctcccatcagtcctggccaagtttagtcttcccgtttctctcagtgagttcaggaatcccctcgccccagccgtgcaggagactcaactcatacagatggtagtctggatgttgcagaggcgactcttgatccagcttcatacatacgtctgtctgatggcaagcccctcagaagaggaaccacgccctcgcgaggacgacgtcccatttacagctcgtgtcggaggacgctcactgtccactccaaacgctctctcatttggaagccccacttcttctgatgacatgaccctcacgagcccgtccatggacaacagcagcgccgagcttctgccttctggcgactctccactgaatcagagaatgacagagaacctactggcttccagcgagcacgagcgcgcagccattttatcggtacccgccgcacagaatcccgaagatctgaggatgttcgcccggctcctccactatttcaggggcaggcaccacctggaggagattatgtataacgaaaataccaggcgctcccaacttctgatgctcttcgataaattcaggtctgttctggtggttacaacccatgaagaccctgttattgccgtgtttcaggcgttactaccttag

SEQ ID NO: 86063 - DNA, 210 bp, Artificial Sequence
  derived and/or modified sequence
atgcgggacaacaccagccccatcagcgtgatcctggtgagcagcggcagtcgggggaacaagttgctctttagatacccctttcagcggtcacaagaacaccccgcctcgcagactagcaagcctagatcacggtatgccgcttccaacacgggggatcatgccgacgagcaggatggggacagtcgaccgacacagactagacagtag

SEQ ID NO: 86064 - DNA, 2933 bp, Artificial Sequence
  derived and/or modified sequence
gtctcgcgagcccggagcgtggcacgtgggttggtaactgtggcgctgctccgcgtccaccaccacccctgtcctcctcaggccccctccgcctccacccctgccctcctcaggccccctccgcctccacccctgccctactcaggccccctccgcctccacccctgccctcctcaggccccctccgcctccacccctgccctcctcaggccccctccgcctccacccctgccctcctcaggccccctccgcctccacccctgccctcctcaggccccctgcgtccccgcctcgtcctcctcaggccccctccgcctccggctccgtcctcctcaggccccctccgcctccggctccgtcctcctctggccccctccgcccccggccccggccccacggcgggatgcgggacaacaccagccccatcagcgtgattctggtgagctcggggagcaggggcaataagctgctgttcaggtaccccttccagagaagccaggagcacccggcgtcccagacaagtaagccgcgtagcagatacgctgccagcaacacgggcgaccatgctgatgagcaggacggcgattccaggttttcagatgttattctggcaacaattttggcaaccaagtctgaaatgtgtggccaaaaatttgaactgaagattgataatgtgcgatttgttgggcacccaacactgctacagcatgctctggggcaggccaacgcagacccgtcagtgataaactgtctgcataacctgtcccgtcgtatcgccaccgtgctgcagcacgaggagcgccgctgccagtacctcacccgggaggccaagctgatcctggcgctccaggatgaggtgtccgccatggctgatggaaatgaaggtcctcagtccccattccatcacatcctgcccaagtgcaagctggccagggacctcaaggaagcttatgacagcctgtgcacgtcgggcgtagttcggcttcacatcaacagctggctggaggtgagcttctgcctgccccacaagatccactatgcggcctccagtctgatccccccagaggccatcgaacggagcctgaaagccatccgcccctaccatgccctgctgctgctcagtgatgagaagtccttgctgggtgagcttcctattgactgctcccctgccctagtgcgggtgatcaagaccacatctgctgtgaagaacctgcagcagctagcccaagatgcggacctggccttgctgcaggttttccagcttgcagctcatctggtgtactggggcaaggccatcatcatctacccgctgtgtgagaacaacgtctacatgctgtctcccaatgccagcgtatgtctgtactccccgctggccgagcagttctcccaccagttcccatctcatgacctgccgtccgttcttgccaagttctccttgccggtctccttgtcagaatttaggaatcccctggcccccgctgtgcaggagacccagctcatccagatggtggtgtggatgctgcagcgccggcttctcatccagctgcacacctatgtctgcctgatggcctcacccagcgaggaggagccccgtccgcgagaggacgacgtccccttcactgcccgggtcggcggtcgcagcctcagcacgcccaacgccctcagctttggctccccaaccagcagcgatgacatgaccctcaccagccccagcatggacaactccagcgcagagctacttcccagcggggactcgccactgaaccagaggatgacggagaacctgctggccagctcggagcatgaacgcgcagccatcctcagtgtacccgcagcccagaaccctgaggacctccgcatgtttgccaggctccttcactacttccgcggccgccaccacctggaggagattatgtacaacgagaacacgcggcgctcccagctgctcatgctgtttgacaagttccgcagcgtgctggtggtgaccacccacgaggaccctgtcattgccgtcttccaggctctgctcccctgagcccaggcggagggcggaaggctgctggggtgcgcaggtgggcgctcgcgtctccccaccccagggctccccccgtgctgaggctgagccctcttggccctgaggcctggcattgggtggatgcgggctggccgtggcccagtgaagcctgcagagccccgctgtccttgcccctggtggttccgctgtggggctgctgccctctgtgttcctacgcttccctccagtccttgccgcacgcgtaggcatctccacgctggaggggggcctgccaggactcctgtctctgggtgaggccgcatccttcaaggcccatgtgggctgtgcgtttctcagaccctccttctgtccctacacctgctccttggaccccccagtctgtggccaccctgaagaatgtgcagaaacacttgtgtggcctgtccctgtctctctgacagccttctatttgtgaagtgccctgtggccccctccccagcacctctgtctgccatgcgcttcttcctcccaggctaccctgagcctttcctggcccagtcctcaccacagtccacagaagccgcaaacaggctcatagccaagctgtgacctggtcctgaccatctggggcacgagggcctgggctggccctgctaggctggagaagccctgtcacctgtgcacatcttgctggtggaggcatggcccactgtgcaggaccccaccctcgggggctttcggctcccacactgatgattctccccagcatccacaccgggcctggcgctacgtactcaggcccccagctctcgtgtcctggaggaagagctagctccagacatgggttgatcacctagaggagctctggctaaggcacagttttctagaaataaaacatttattcggtttttaaacaatt

SEQ ID NO: 86065 - DNA, 1632 bp, Artificial Sequence
  derived and/or modified sequence
atgcgggacaacacaagcccaatttccgtgattctggtatcaagtggttcccgcggaaataaactgttattccgatacccctttcaaaggtcccaagaacaccccgcatcacagaccagtaagccacgttcgagatatgctgcatcaaatacgggcgatcacgccgacgagcaggacggagattctcgctttagtgacgtcatcctggctacaattctcgctaccaaaagcgagatgtgtggacagaagttcgaacttaaaatcgataatgtgagatttgtgggacacccaactctcttgcagcatgctctgggccaggcaaacgccgatcccagcgtgatcaactgcctacacaatctctcgaggcgcatcgctacagtcctccagcatgaggagagaagatgtcagtacctgactcgcgaagcgaagttgatcttggctttacaggacgaggtctctgccatggcagatggcaatgaaggccctcaaagccccttccaccatattctgcctaagtgcaaactggctcgggacttaaaagaggcttatgactcgttgtgtacctcaggcgtcgtcagattacacattaattcttggctggaggtaagcttttgcctgccccacaaaatccattatgccgcttcctccctgatcccccctgaggctatagagcgcagcctgaaagccattagaccttaccacgctctgcttcttctgagcgacgaaaaatcattactgggggagctccctatcgactgctctcccgctctcgtgagggtcatcaaaacgacctctgctgtgaaaaatctacagcagttagctcaggacgcagacttggctctgctccaggtgtttcaacttgccgctcatctggtctattggggcaaagctataatcatctacccactctgtgagaataacgtctatatgttgtcgccgaatgcttctgtttgtctatacagcccactggctgaacagttcagccatcagttcccaagtcacgatctccccagcgttctggcaaagttctcacttcccgtctctctgagcgaattcagaaatcctcttgctccggcagtgcaggaaacacagctgatccagatggtggtgtggatgttgcaaaggagactcctcattcagctgcacacctatgtgtgtctgatggcatcaccctcagaagaggaaccgcgacccagagaagatgacgtgccattcactgctcgtgtgggaggtaggagcttgagtaccccaaatgcattatcctttggatcacctacctcctcagacgatatgaccctgacgagcccatccatggataactcttccgccgaactcttaccgtctggcgacagccccctaaaccagcggatgaccgaaaatctgttagcttcctccgaacacgagagggccgctattctgagcgtccctgccgctcaaaatccagaggatttgaggatgttcgcacggctgctccactatttcagaggacgccaccaccttgaggagattatgtacaatgagaacactcggagatcacagctcctaatgctgtttgataagtttagaagcgtgctggtggtaactacacatgaggaccccgtgattgcagtgttccaagccctgttgccttag

SEQ ID NO: 86066 - DNA, 210 bp, Artificial Sequence
  derived and/or modified sequence
atgagggacaatacatcaccaatcagcgtgatccttgtcagctccgggtcccggggaaataagctgctttttcggtatccttttcagaggtcgcaagaacatcccgcatctcaaacatccaaacccagatccaggtacgccgcaagtaacactggcgaccatgcagatgagcaggatggcgatagtagacccacccagacccgacagtag

SEQ ID NO: 86067 - protein, 143 aa, Artificial Sequence
  derived and/or modified sequence
MGELQYDAGRDGFIDLMELKLMMEKLGAPQTHLGLKSMIKEVDEDFDGKLSFREFLLIFHKAAAGELQEDSGLMALAKLSEIDVALEGVKGAKNFFEAKVQALSSASKFEAELKAEQDERKREEEERRLRQAAFQKLKANFNT

SEQ ID NO: 86068 - DNA, 432 bp, Artificial Sequence
  derived and/or modified sequence
atgggggaactgcagtacgacgcagggagagacggctttattgatctgatggagctgaaattgatgatggagaaactcggcgctcctcaaactcatcttggcctaaagagcatgatcaaagaggtggacgaagattttgatgggaaattgagttttagagagttcctgcttatctttcataaggcagcggccggcgagctgcaggaggacagtggattgatggcactcgccaaattaagtgaaatcgatgtcgccctagaaggggtgaagggggctaaaaacttcttcgaggctaaagttcaagccctgagctctgcttcaaagtttgaagcagagttaaaagccgagcaggacgagagaaagcgcgaagaggaggaacggcggctcagacaggccgctttccagaaactgaaggccaacttcaacacatag

SEQ ID NO: 86069 - DNA, 432 bp, Artificial Sequence
  derived and/or modified sequence
atgggagagctgcagtatgatgctggaagagatggcttcatcgacctgatggagctgaagctgatgatggagaagctgggcgccccccagacccacctgggcctgaagtccatgatcaaggaggtggatgaggactttgatggcaagctgtccttccgggagttcctgctgatcttccacaaggctgctgctggggagctgcaggaggacagcggcctgatggccctggccaagctgtctgaaattgatgtggccctggagggcgtgaagggggccaagaacttctttgaggccaaggtgcaggccctgagcagcgccagcaagtttgaagctgagctgaaggccgagcaggatgagaggaagcgggaggaggaggagcggcggctgcggcaggccgccttccagaagctgaaggccaacttcaacacctag

SEQ ID NO: 86070 - DNA, 432 bp, Artificial Sequence
  derived and/or modified sequence
atgggcgagctgcagtacgacgccggccgggacggcttcatcgaccttatggaacttaaactgatgatggagaagctgggagctcctcagacgcatctgggactaaaatctatgattaaagaggtggacgaggatttcgatgggaaactgtctttccgcgagtttctgctgatttttcacaaagctgcggcaggtgaactgcaggaggacagcggtctgatggccttagccaagctgtcagagatcgacgtagccttggaaggggtgaaaggggccaaaaatttcttcgaagcaaaggttcaggcacttagtagtgcatctaagttcgaagctgagctgaaggccgaacaggatgagaggaaacgggaagaagaggagcgtcgcttacggcaggcagcatttcaaaaattgaaagctaatttcaatacatag

SEQ ID NO: 86071 - DNA, 432 bp, Artificial Sequence
  derived and/or modified sequence
atgggggagctccagtatgatgccggtcgggacgggttcatcgacctcatggaactgaagctaatgatggagaaactcggcgctccccagactcatctgggtctgaagtctatgattaaggaggttgacgaggacttcgatggcaagctgagctttagggagttcttattgatttttcacaaggccgcagccggagagttgcaggaggacagtggtctgatggcccttgccaagctgagtgaaattgatgtggctctggagggagtcaaaggcgcaaaaaactttttcgaggcaaaggtgcaggctttgtcgagcgcgtccaagttcgaggccgaactgaaggctgaacaagatgaacgcaagcgagaggaggaggagagacgtttgcgccaggcagctttccaaaagcttaaggcaaattttaacacctag

SEQ ID NO: 86072 - DNA, 432 bp, Artificial Sequence
  derived and/or modified sequence
atgggcgagctgcagtacgacgccggcagagacggcttcatcgacctgatggagctgaagctgatgatggagaagctgggcgccccccagacccacctgggcctgaagagcatgatcaaggaggtggacgaggacttcgacggcaagctgagcttcagagagttcctgctgatcttccacaaggccgccgccggcgagctgcaggaggacagcggcctgatggccctggccaagctgagcgagatcgacgtggccctggagggcgtgaagggcgccaagaacttcttcgaggccaaggtgcaggccctgagcagcgccagcaagttcgaggccgagctgaaggccgagcaggacgagagaaagagagaggaggaggagagaagactgagacaggccgccttccagaagctgaaggccaacttcaacacctag

SEQ ID NO: 86073 - DNA, 1156 bp, Artificial Sequence
  derived and/or modified sequence
gctaagtgcaggcggataccccggccttggcggctgcttgcctttctccgtactgtccctgtgaaggccaagatctgtaacgctgacagtccccagacatacgatgggagagttgcagtatgacgctgggcgggatggcttcatcgacctgatggagctgaagctgatgatggagaagctgggggccccccagacccacctgggcctgaagagcatgatcaaggaggtggatgaggacttcgatggcaagctcagcttccgggagttcctgctcattttccacaaggccgcggcaggggagctgcaggaggacagtgggctgatggcgctggcaaagctttctgagatcgatgtggccctggagggtgtcaaaggtgccaagaacttctttgaagccaaggtccaagccttgtcatcggccagtaagtttgaagcagagttgaaagctgagcaagatgagcggaagcgggaggaggaggagaggcggctccgccaggcagccttccagaaactcaaggccaacttcaatacatagtcctgctgaccttgccctctgcccacagctgtgcctcacagatgccccgagaagagatgactaggcatcttcatcactgctgtcggtcccctccctgagccagcatctccatccaccaccccgtgccagctcccgtgccagccttcattcctcccagtgtccaagcccctccaggagggtcctggggtgggccagatgcctgcccacctctgtctcctgcctctgctcctctgcccttcttatagccagaacttgtatcttctcagcaaccttcactttgtccttgtccctttaccattccccatcaaagagtagtctgctatatcaatttgtgtagatatgtctgtctttttgggtcctcagagaaaatgcccattttctcggagaattctctgcactcctctctgcttcacattcaacttccctgttctcatctttggtaggattctgccagttgcttttgcatcttctgttcctgggtaatggtgggtcttaatggaggctgggtggaccactgcccgtccactcttcaacaggaggaacagcatgccaccatagtaacacacattagagaaaggacagaggtctgctccttcctgccacctttctcctggcccctta

SEQ ID NO: 86074 - DNA, 1817 bp, Artificial Sequence
  derived and/or modified sequence
actctacagcgtgtatccgtggctgtaacgtgagctggtggagcagtcaaggttagacaggaaattttaattaccctggacttatctggaggcctctttcaaagggaggcaatgagggcagccacttaaaggcaggaccccaatgcaacatcttaaaatgcagccgcaaggtttttgcagcatactaaaagcttgtgttttaattccccaaagagagggtgggaagaggaacatttggctatgggaaagttgtctttttcttaagaatctgaaacggtgatgtcatggatgtcctgccagtgccagagtcccgcgttaccaagacaccagtgaaacccaaaaaggtatgacgctgggcgggatggcttcatcgacctgatggagctgaagctgatgatggagaagctgggggccccccagacccacctgggcctgaagagcatgatcaaggaggtggatgaggacttcgatggcaagctcagcttccgggagttcctgctcattttccacaaggccgcggcaggggagctgcaggaggacagtgggctgatggcgctggcaaagctttctgagatcgatgtggccctggagggtgtcaaaggtgccaagaacttctttgaagccaaggtccaagccttgtcatcggccagtaagtttgaagcagagttgaaagctgagcaagatgagcggaagcgggaggaggaggagaggcggctccgccaggcagccttccagaaactcaaggccaacttcaatacatagtcctgctgaccttgccctctgcccacagctgtgcctcacagatgccccgagaagagatgactaggcatcttcatcactgctgtcggtcccctccctgagccagcatctccatccaccaccccgtgccagctcccgtgccagccttcattcctcccagtgtccaagcccctccaggagggtcctggggtgggccagatgcctgcccacctctgtctcctgcctctgctcctctgcccttcttatagccagaacttgtatcttctcagcaaccttcactttgtccttgtccctttaccattccccatcaaagagtagtctgctatatcaatttgtgtagatatgtctgtctttttgggtcctcagagaaaatgcccattttctcggagaattctctgcactcctctctgcttcacattcaacttccctgttctcatctttggtaggattctgccagttgcttttgcatcttctgttcctgggtaatggtgggtcttaatggaggctgggtggaccactgcccgtccactcttcaacaggaggaacagcatgccaccatagtaacacacattagagaaaggacagaggtctgctccttcctgccacctttctcctggccccttagcattcccccagtccctccctcttcaccttgctccgtctatgtcttcccagctcagccttttccccactcttaaatactgtactacttcactgtaagaacgaaagaatagttaggataccaatgagtaaaagggttcctgttcactctgactctgtgcaaattgtattacagtagaccgctgacgttcccaagtgacagatccagggcctttcaaacatccccaaagtcatggccatactcaccattagccagtttctaacatctgtttcagggtatccagctgtagatgttcttatcccccatacttgtgagttcttggggttgctcacaaatactaggggtttttgttgtatttttaacaaatatatcctaatgtcatatttattctcttttgtaactgctgtctttacaataaagaaatcatctgcctttc

SEQ ID NO: 86075 - DNA, 1538 bp, Artificial Sequence
  derived and/or modified sequence
aggaattacatgtttcggagactaacgagtgtcctttcatcccggtcatgcattcctttgaccctgcaggtatgacgctgggcgggatggcttcatcgacctgatggagctgaagctgatgatggagaagctgggggccccccagacccacctgggcctgaagagcatgatcaaggaggtggatgaggacttcgatggcaagctcagcttccgggagttcctgctcattttccacaaggccgcggcaggggagctgcaggaggacagtgggctgatggcgctggcaaagctttctgagatcgatgtggccctggagggtgtcaaaggtgccaagaacttctttgaagccaaggtccaagccttgtcatcggccagtaagtttgaagcagagttgaaagctgagcaagatgagcggaagcgggaggaggaggagaggcggctccgccaggcagccttccagaaactcaaggccaacttcaatacatagtcctgctgaccttgccctctgcccacagctgtgcctcacagatgccccgagaagagatgactaggcatcttcatcactgctgtcggtcccctccctgagccagcatctccatccaccaccccgtgccagctcccgtgccagccttcattcctcccagtgtccaagcccctccaggagggtcctggggtgggccagatgcctgcccacctctgtctcctgcctctgctcctctgcccttcttatagccagaacttgtatcttctcagcaaccttcactttgtccttgtccctttaccattccccatcaaagagtagtctgctatatcaatttgtgtagatatgtctgtctttttgggtcctcagagaaaatgcccattttctcggagaattctctgcactcctctctgcttcacattcaacttccctgttctcatctttggtaggattctgccagttgcttttgcatcttctgttcctgggtaatggtgggtcttaatggaggctgggtggaccactgcccgtccactcttcaacaggaggaacagcatgccaccatagtaacacacattagagaaaggacagaggtctgctccttcctgccacctttctcctggccccttagcattcccccagtccctccctcttcaccttgctccgtctatgtcttcccagctcagccttttccccactcttaaatactgtactacttcactgtaagaacgaaagaatagttaggataccaatgagtaaaagggttcctgttcactctgactctgtgcaaattgtattacagtagaccgctgacgttcccaagtgacagatccagggcctttcaaacatccccaaagtcatggccatactcaccattagccagtttctaacatctgtttcagggtatccagctgtagatgttcttatcccccatacttgtgagttcttggggttgctcacaaatactaggggtttttgttgtatttttaacaaatatatcctaatgtcatatttattctcttttgtaactgctgtctttacaataaagaaatcatctgcc

SEQ ID NO: 86076 - protein, 419 aa, Artificial Sequence
  derived and/or modified sequence
MPPPGKVPRKENLWLQCEWGSCSFVCSTMEKFFEHVTQHLQQHLHGSGEEEEEEEEDDPLEEEFSCLWQECGFCSLDSSADLIRHVYFHCYHTKLKQWGLQALQSQADLGPCILDFQSRNVIPDIPDHFLCLWEHCENSFDNPEWFYRHVEAHSLCCEYEAVGKDNPVVLCGWKGCTCTFKDRSKLREHLRSHTQEKVVACPTCGGMFANNTKFLDHIRRQTSLDQQHFQCSHCSKRFATERLLRDHMRNHVNHYKCPLCDMTCPLPSSLRNHMRFRHSEDRPFKCDCCDYSCKNLIDLQKHLDTHSEEPAYRCDFENCTFSARSLCSIKSHYRKVHEGDSEPRYKCHVCDKCFTRGNNLTVHLRKKHQFKWPSGHPRFRLGHFCIPLPGFAALYAPTSPGTRNMKMAICGCSWFATRV

SEQ ID NO: 86077 - DNA, 1260 bp, Artificial Sequence
  derived and/or modified sequence
atgccaccaccagggaaggttccgcgaaaggagaacctctggttgcagtgcgagtggggctcgtgcagttttgtgtgctccacaatggaaaagttcttcgagcacgtgacgcagcacctgcaacaacaccttcacggcagtggagaggaagaggaagaagaggaggaagatgacccactcgaagaggaattctcctgtctttggcaggaatgcgggttttgtagcctcgattcaagtgcagacctcatccgtcatgtgtactttcattgttaccacactaagctgaagcagtggggcctgcaggctctgcaatctcaagccgacctgggcccctgcatcctggacttccaatcccgcaatgttatccccgacatccccgatcacttcctgtgcctctgggagcactgtgagaatagcttcgacaatcccgagtggttttatcggcacgttgaggcgcacagtttgtgctgcgagtacgaggcggtaggtaaggacaacccggttgtcctgtgtgggtggaagggttgcacatgtacatttaaggatcggtccaaactgcgggaacatttgagaagccatactcaagaaaaggtagttgcttgccccacatgcggaggaatgttcgcaaataacaccaagttcttggatcacatcagacggcagacctcgctggaccaacagcacttccagtgtagccattgttcaaagcgcttcgcaacagaacgccttcttcgagatcatatgcgaaaccacgtcaatcactataagtgtcccttgtgcgatatgacgtgtccccttcctagcagcctccggaaccacatgcgatttaggcacagcgaggatcgccctttcaaatgtgactgttgcgactattcctgtaaaaaccttattgatttacagaaacacctggacactcattctgaggaacccgcctaccgttgtgattttgaaaactgtacctttagtgccaggtccctctgctctatcaaaagtcattaccgcaaggtgcacgaaggcgacagtgaaccccggtacaagtgtcatgtctgcgacaaatgctttacacgtggtaacaacttaaccgtgcacctcagaaagaagcaccagttcaagtggccttccgggcatccgaggttccgcctcgggcacttttgcatcccgctccccgggttcgcagccctctacgcacccactagcccgggcacccggaacatgaagatggccatttgcggatgtagttggtttgctacgagggtgtag

SEQ ID NO: 86078 - DNA, 1260 bp, Artificial Sequence
  derived and/or modified sequence
atgcctcctcctgggaaggtgcccaggaaagaaaacctgtggctgcagtgtgagtggggcagctgcagctttgtgtgcagcaccatggagaagttctttgaacatgtgacccagcacctgcagcagcacctgcacggcagcggggaggaggaggaggaggaggaggaggatgaccccctggaggaggagttcagctgcctgtggcaggagtgtggcttctgcagcctggacagcagcgctgacctgatcagacatgtgtacttccactgctaccacaccaagctgaagcagtggggcctgcaggccctgcagagccaggccgacctgggcccctgcatcctggacttccagagcagaaatgtcatcccagacatcccagaccacttcctgtgcctgtgggagcactgtgaaaattcctttgacaaccctgagtggttctacagacatgtggaggcccacagcctgtgctgtgaatatgaagctgtgggcaaggacaaccctgtggtgctgtgtggctggaagggctgcacctgcaccttcaaggacaggagcaagctgcgggagcacctgcggagccacacccaggagaaggtggtggcctgccccacctgtggcggcatgtttgccaacaacaccaagttcctggaccacatccggcggcagaccagcctggaccagcagcacttccagtgcagccactgcagcaagagatttgccacagagcggctgctgcgggaccacatgagaaatcatgtgaaccactacaagtgccccctgtgtgacatgacctgccccctgcccagcagcctgaggaaccacatgaggttccgccacagcgaggaccggcccttcaagtgtgactgctgtgactacagctgcaagaacctgattgacctgcagaagcacctggacacccacagcgaggagcccgcctaccgctgtgactttgagaactgcaccttcagcgcccggagcctgtgcagcatcaagagccactacaggaaggtgcatgaaggagacagcgagccccgctacaagtgccacgtgtgtgacaagtgcttcacccggggcaacaacctgactgtgcacctgaggaagaagcaccagttcaagtggcccagcggccacccccgcttccggctgggccacttctgcatccccctgcccggctttgctgccctgtatgcccccaccagccctggcaccaggaacatgaagatggccatctgtggctgctcctggtttgccaccagggtgtag

SEQ ID NO: 86079 - DNA, 1260 bp, Artificial Sequence
  derived and/or modified sequence
atgcccccccccggcaaggtgccccggaaggagaacctgtggctgcagtgcgagtgggggagctgtagttttgtgtgctctaccatggagaagttcttcgagcacgtcacccagcatctgcagcagcatctgcacggatccggcgaagaagaggaagaagaagaggaggacgaccccctcgaagaggagttttcatgtttatggcaggaatgtggcttttgttccctggattcatctgcagatctgattcggcacgtttacttccattgctatcataccaaactgaaacagtgggggctccaggccttgcaatctcaagccgatctcggaccatgcatacttgattttcaaagtcggaacgttattccagacatccccgaccactttctatgcctttgggagcactgtgaaaatagcttcgataatccggagtggttctataggcatgttgaggcccacagcctgtgttgtgaatacgaagctgtgggtaaagataacccagtggtcctttgcggatggaaaggttgtacgtgtacgtttaaagataggagtaagctccgggagcatttgaggagccacacacaggaaaaggtggtggcttgtccaacctgcggtgggatgtttgccaacaacaccaaatttcttgaccatatacggagacaaactagccttgaccagcaacatttccaatgctcacactgctccaagcgttttgccaccgagcggttgctccgggaccacatgagaaatcatgtgaatcattacaagtgcccgctctgtgacatgacctgtcctctgccgagttcgctccgcaatcatatgagatttcgccattccgaagaccgccctttcaaatgtgactgctgtgactatagctgtaaaaatctcatagacttgcagaagcatttggacacgcatagtgaagagcctgcctacagatgcgattttgagaattgcaccttctcagctcgcagcctctgctctatcaaatcccactacaggaaagtgcatgaaggcgactcagagcccagatataaatgccacgtatgcgacaaatgcttcacacgcggcaacaacctcactgtacatctgcgtaaaaaacaccagttcaagtggcccagcggtcatcccagattcaggcttggtcacttctgtatcccattacccggatttgccgctctgtacgcacccacatctcctggcacgcgaaacatgaaaatggccatatgtggctgctcatggttcgctacccgggtatag

SEQ ID NO: 86080 - DNA, 1260 bp, Artificial Sequence
  derived and/or modified sequence
atgcctccgcctggcaaggtgccacgaaaagagaatctgtggctgcagtgtgaatggggctcatgttcattcgtttgctccacaatggagaaattttttgagcacgtgacacagcaccttcagcagcacctacacgggagtggcgaagaggaggaggaagaagaggaggatgatcctttggaagaggagttttcatgtctatggcaggaatgcgggttttgtagtctggattcttcagctgacctgattcgccatgtgtattttcattgctatcataccaaactgaaacagtgggggttacaggcactgcagtctcaggccgatctgggcccttgcatcctcgacttccaatctagaaatgtgatcccagacatccctgaccactttctgtgcctgtgggaacactgcgaaaatagctttgacaaccccgaatggttttacagacatgtcgaagcccatagcctttgctgcgagtacgaggccgttggcaaggataacccagtggtcttgtgtggatggaaaggctgcacttgtaccttcaaggaccgcagtaaactgagagaacatctcagaagtcatacacaggagaaagtggtggcctgcccaacctgcggcggtatgtttgctaacaacaccaaattcctggaccacattcgccgacagacatctttagaccagcagcattttcagtgcagccactgctccaaacgcttcgctactgaacgcctgctccgggaccacatgcggaatcatgtgaatcactataagtgcccgctctgcgacatgacctgtcctctgccgagctccctgcgcaaccacatgcgatttcgtcattccgaggaccgacccttcaagtgcgactgctgtgattattcttgcaagaacttaatcgatctgcagaaacatttggatacccactcagaggagcccgcttaccgctgtgattttgagaattgcacctttagcgcacgcagtctctgctccatcaagtcgcactacaggaaagttcacgagggcgactctgaaccgcgttataagtgtcacgtgtgcgacaagtgtttcacccgcggtaataatctcactgtacatctgcggaagaaacaccagttcaagtggcccagcgggcaccctcgcttcagattaggccacttttgtatccctttgccaggctttgctgctctgtacgcaccaactagccctggcacacggaatatgaagatggccatttgtgggtgctcctggttcgcgaccagggtctag

SEQ ID NO: 86081 - DNA, 1260 bp, Artificial Sequence
  derived and/or modified sequence
atgcccccccccggcaaggtgcccagaaaggagaacctgtggctgcagtgcgagtggggcagctgcagcttcgtgtgcagcaccatggagaagttcttcgagcacgtgacccagcacctgcagcagcacctgcacggcagcggcgaggaggaggaggaggaggaggaggacgaccccctggaggaggagttcagctgcctgtggcaggagtgcggcttctgcagcctggacagcagcgccgacctgatcagacacgtgtacttccactgctaccacaccaagctgaagcagtggggcctgcaggccctgcagagccaggccgacctgggcccctgcatcctggacttccagagcagaaacgtgatccccgacatccccgaccacttcctgtgcctgtgggagcactgcgagaacagcttcgacaaccccgagtggttctacagacacgtggaggcccacagcctgtgctgcgagtacgaggccgtgggcaaggacaaccccgtggtgctgtgcggctggaagggctgcacctgcaccttcaaggacagaagcaagctgagagagcacctgagaagccacacccaggagaaggtggtggcctgccccacctgcggcggcatgttcgccaacaacaccaagttcctggaccacatcagaagacagaccagcctggaccagcagcacttccagtgcagccactgcagcaagagattcgccaccgagagactgctgagagaccacatgagaaaccacgtgaaccactacaagtgccccctgtgcgacatgacctgccccctgcccagcagcctgagaaaccacatgagattcagacacagcgaggacagacccttcaagtgcgactgctgcgactacagctgcaagaacctgatcgacctgcagaagcacctggacacccacagcgaggagcccgcctacagatgcgacttcgagaactgcaccttcagcgccagaagcctgtgcagcatcaagagccactacagaaaggtgcacgagggcgacagcgagcccagatacaagtgccacgtgtgcgacaagtgcttcaccagaggcaacaacctgaccgtgcacctgagaaagaagcaccagttcaagtggcccagcggccaccccagattcagactgggccacttctgcatccccctgcccggcttcgccgccctgtacgcccccaccagccccggcaccagaaacatgaagatggccatctgcggctgcagctggttcgccaccagagtgtag

SEQ ID NO: 86082 - DNA, 1466 bp, Artificial Sequence
  derived and/or modified sequence
gaagagacctggagccgacagacgggtgaaggccatgccgcctcctgggaaagttccccgaaaggagaatctgtggctacagtgtgagtgggggtcctgctcctttgtgtgctcaaccatggaaaagttctttgagcatgtcactcagcacctgcagcagcacctgcatggctctggggaggaggaggaagaggaagaggaggatgacccacttgaggaagaattctcctgcttgtggcaggaatgtggcttttgttctctggacagttctgctgacctcatccgccatgtctacttccactgctaccacaccaagctgaaacagtgggggctgcaggccttgcaaagccaggctgaccttggcccctgcatcctggacttccagagccggaacgtcatccctgatatccctgaccacttcctgtgtctgtgggagcactgtgagaattccttcgacaatcctgagtggttttatcggcatgtggaagcacacagtctgtgctgtgaatacgaagcagtcggcaaggacaacccggtggtgctgtgtggctggaaaggctgtacctgcaccttcaaggaccgcagtaaacttcgagagcacctccgcagccatacccaggagaaagtggtagcctgccccacctgtgggggcatgtttgccaacaataccaagttcttagatcacatccgtcgccagacctcattggatcagcagcacttccagtgttctcactgttccaagagatttgccacagagcggctattgcgggaccacatgcgcaaccatgtgaatcactataagtgccctctgtgtgacatgacctgcccgctgccttcctccctccgcaaccacatgcgctttcgtcacagtgaggaccggccctttaaatgtgactgttgtgactacagctgcaagaatcttattgacctccagaagcacctggatacccacagcgaggagccagcctacaggtgtgattttgagaactgcaccttcagtgcccgatccctctgctctatcaagtcccattaccgcaaagtacatgaaggagactctgagccaaggtacaaatgtcatgtgtgtgacaaatgcttcacacggggcaacaacctcaccgtgcaccttcgcaagaagcaccagttcaagtggccctcagggcatccccgttttcgcctcggccatttctgtatccccctgcctgggtttgctgccctttatgctcctacctcaccaggtacaaggaacatgaagatggctatatgcggctgcagctggttcgctacgagagtgtagagctgacacagcaactgctgcggcaaccacaagagggatcgggcctgggaacgtcgctgaacgagagcagcctgcagggcattattctagaaacagtgccaggggagccaggacgtaaggaagaggaagaggagggcaagggtagcgaagggacagccctctcagcctctca

SEQ ID NO: 86083 - protein, 186 aa, Artificial Sequence
  derived and/or modified sequence
MHQTYSRHCRPEESTFSAAMTTMQGMEQAMPGAGPGVPQLGNMAVIHSHLWKGLQEKFLKGEPKVLGVVQILTALMSLSMGITMMCMASNTYGSNPISVYIGYTIWGSVMFIISGSLSIAAGIRTTKGLGLDGMVLLLSVLEFCIAVSLSAFGCKVLCCTPGGVVLILPSHSHMAETASPTPLNEV

SEQ ID NO: 86084 - DNA, 207 bp, Artificial Sequence
  derived and/or modified sequence
atgcatcagacatactcgcgccactgccggcctgaggaacggtggtcccaggagggttggaatatccccgcaaacgggttcaatatttgcagatgcctgaatataggtatgaaactgcggttatggaataacctcaacaagagtaatatacttggggcccttaaaatcaagaggcgggagattcgggctccttttttactcccctag

SEQ ID NO: 86085 - DNA, 561 bp, Artificial Sequence
  derived and/or modified sequence
atgcatcagacctactctcggcattgtaggcccgaggagtcgaccttttcagcagctatgacaactatgcaagggatggagcaggctatgcctggggccggacctggggtcccccaattgggcaacatggctgtcatccacagccacttatggaagggtctgcaagagaaatttctgaaaggcgaacctaaagtgttgggagtggttcagattctgaccgccctgatgtcactctccatgggcattaccatgatgtgcatggcttcaaacacctatggctcaaatcccatatcagtgtacatcggctacaccatttggggctctgtcatgttcattatctctgggtctctttctatagccgccggcatccggacaacaaagggcctagggctggacgggatggttctgctcctgagcgtgctagaattttgcatcgccgtgagtctttcggcctttggctgcaaagtgctctgctgcacgcctggcggcgtcgtgctcatcctccctagccactctcatatggccgagacagccagtccaactccactgaatgaagtttag

SEQ ID NO: 86086 - DNA, 207 bp, Artificial Sequence
  derived and/or modified sequence
atgcaccagacctacagccgccactgcaggcctgaggagcgctggagccaggagggctggaacatcccagccaacggcttcaacatctgccgctgcctgaacatcggcatgaagctgcggctgtggaacaacctgaacaagagcaacatcctgggcgccctgaagatcaagaggcgggagatccgggcccccttcctgctgccctag

SEQ ID NO: 86087 - DNA, 561 bp, Artificial Sequence
  derived and/or modified sequence
atgcaccagacctacagccgccactgcaggcctgaggagagcaccttctctgctgccatgaccaccatgcagggcatggagcaggccatgcctggagctggccctggggtgccccagctgggcaacatggccgtcatccacagccacctgtggaagggcctgcaggagaagttcctgaagggggagcccaaggtgctgggcgtggtgcagatcctgacagccctgatgagcctgtccatgggcatcaccatgatgtgcatggccagcaacacctacggcagcaaccccatctctgtgtacatcggctacaccatctggggctctgtgatgttcatcatcagcggcagcctgagcattgctgctggcatccgcaccaccaagggcctgggcctggatggcatggtgctgctgctgtctgtgctggagttctgcatcgctgtgtccctgagcgccttcggctgcaaggtgctgtgctgcaccccaggaggagtggtgctgatcctgcccagccacagccacatggccgagacagccagccccacccccctgaatgaggtgtag

SEQ ID NO: 86088 - DNA, 698 bp, Artificial Sequence
  derived and/or modified sequence
attctcagcacagcctttaaggttccaaacatctgctagaagaggaatgcagatttaaactgagtgaggtgtggagtgggggaagttgattgggtctagaccaaagaactttgaggaacttgcccagagccctgcatgcatcagacctacagcagacattgcaggcctgaagaaagcaccttttctgctgccatgacaaccatgcaaggaatggaacaggccatgccaggggctggccctggtgtgccccagctgggaaacatggctgtcatacattcacatctgtggaaaggattgcaagagaagttcttgaagggagaacccaaagtccttggggttgtgcagattctgactgccctgatgagccttagcatgggaataacaatgatgtgtatggcatctaatacttatggaagtaaccctatttccgtgtatatcgggtacacaatttgggggtcagtaatgtttattatttcaggatccttgtcaattgcagcaggaattagaactacaaaaggcctgggtctggatggcatggtgctcctcctaagtgtgctggaattctgcattgctgtgtccctctctgcctttggatgtaaagtgctctgttgtacccctggtggggttgtgttaattctgccatcacattctcacatggcagaaacagcatctcccacaccacttaatgaggtttgagg

SEQ ID NO: 86089 - DNA, 207 bp, Artificial Sequence
  derived and/or modified sequence
atgcaccagacctacagccggcactgccggcccgaggagcggtggtcgcaggaggggtggaatatccctgctaacgggttcaacatttgtcgatgtttgaacattgggatgaaactgcgactctggaataatctgaacaaaagcaacatcctgggggccctgaaaatcaagagacgggaaatcagggccccgttcctgttgccgtag

SEQ ID NO: 86090 - DNA, 561 bp, Artificial Sequence
  derived and/or modified sequence
atgcaccagacctacagccggcactgccggcccgaggagagcaccttctctgccgcaatgacgacgatgcaaggaatggaacaggcaatgccgggggcagggcccggcgtgcctcagctaggcaatatggctgtgattcattcacatttatggaaaggcttgcaagaaaaattcttgaagggagagcccaaagtgctgggcgtggttcaaattctgacagccctgatgtcactgagcatggggatcaccatgatgtgcatggccagcaacacatacggctccaatcctattagcgtgtatatcggatacactatttggggttctgtcatgttcattatttccgggtccctctcgattgccgctggcatccggacaactaagggcctcggacttgatggtatggtcttactgctgagcgtgttagagttctgcatcgcggtctccctatctgcgttcgggtgcaaggtgctgtgctgcactccgggaggggtagtgttaatactgccatcccactctcacatggccgaaactgcctctccaacgcccctaaatgaggtgtag

SEQ ID NO: 86091 - DNA, 207 bp, Artificial Sequence
  derived and/or modified sequence
atgcaccaaacgtactccagacattgccgtcctgaagaaaggtggagccaggaggggtggaacataccagccaatggtttcaacatctgccgctgcctcaacattggtatgaaactgagactctggaataacctgaacaagtcgaacatcttaggggctcttaaaattaaaaggagagagatacgtgccccattcctcctgccgtag

SEQ ID NO: 86092 - DNA, 561 bp, Artificial Sequence
  derived and/or modified sequence
atgcaccagacatactcgcgacactgtagaccagaagaatccacgttctcggcagccatgaccaccatgcaagggatggagcaggccatgcccggtgccggtccgggagtgccacagctgggcaacatggcggtcatccacagccacctgtggaagggattgcaggagaaatttcttaaaggcgaacctaaagtcctgggggttgtgcaaattctgactgcactgatgagcctgagtatggggattacaatgatgtgtatggcgtccaacacctacggaagcaaccccatctcggtgtacattgggtatacaatctggggctcagttatgtttataatctctggaagtctgagcatcgccgctggcatacgaacaactaaggggttggggctggatggtatggtgcttctgttgtccgtcctggaattttgtattgctgtctccctgagcgcatttgggtgcaaggtcttgtgttgcacacccggaggggtcgtgctgattctcccaagtcattcccacatggcggagactgcctccccaacacccctgaatgaagtgtag

SEQ ID NO: 86093 - DNA, 207 bp, Artificial Sequence
  derived and/or modified sequence
atgcaccagacctacagcagacactgcagacccgaggagagatggagccaggagggctggaacatccccgccaacggcttcaacatctgcagatgcctgaacatcggcatgaagctgagactgtggaacaacctgaacaagagcaacatcctgggcgccctgaagatcaagagaagagagatcagagcccccttcctgctgccctag

SEQ ID NO: 86094 - DNA, 561 bp, Artificial Sequence
  derived and/or modified sequence
atgcaccagacctacagcagacactgcagacccgaggagagcaccttcagcgccgccatgaccaccatgcagggcatggagcaggccatgcccggcgccggccccggcgtgccccagctgggcaacatggccgtgatccacagccacctgtggaagggcctgcaggagaagttcctgaagggcgagcccaaggtgctgggcgtggtgcagatcctgaccgccctgatgagcctgagcatgggcatcaccatgatgtgcatggccagcaacacctacggcagcaaccccatcagcgtgtacatcggctacaccatctggggcagcgtgatgttcatcatcagcggcagcctgagcatcgccgccggcatcagaaccaccaagggcctgggcctggacggcatggtgctgctgctgagcgtgctggagttctgcatcgccgtgagcctgagcgccttcggctgcaaggtgctgtgctgcacccccggcggcgtggtgctgatcctgcccagccacagccacatggccgagaccgccagccccacccccctgaacgaggtgtag

SEQ ID NO: 86095 - protein, 1100 aa, Artificial Sequence
  derived and/or modified sequence
MASSWKLMLFLSVTMCLSEYSKSLPGLSTSYAALLRIKKSSSSSLFGSKTRPRYSSPSLGTLSASSPSWLGAAQNYYSPINLYHSSDAFKQDESVDYGPVFVQEPDDIIFPTDSDEKKVALNCEVRGNPVPSYRWLRNGTEIDLESDYRYSLIDGTFIISNPSEAKDSGHYQCLATNTVGSILSREATLQFAYLGNFSGRTRSAVSVREGQGVVLMCSPPPHSPEIIYSWVFNEFPSFVAEDSRRFISQETGNLYISKVQTSDVGSYICLVKNTVTNARVLSPPTPLTLRNDGVMGEYEPKIEVHFPFTVTAAKGTTVKMECFALGNPVPTITWMKVNGYIPSKARLRKSQAVLEIPNVQLDDAGIYECRAENSRGKNSFRGQLQVYTYPHWVEKLNDTQLDSGSPLRWECKATGKPRPTYRWLKNGVPLSPQSRVEMVNGVLMIHNVNQSDAGMYQCLAENKYGAIYASAELKILASAPTFALNQLKKTIIVTKDQEVVIECKPQGSPKPTISWKKGDRAVRENKRIAILPDGSLRILNASKSDEGKYVCRGENVFGSAEIIASLSVKEPTRIELTPKRTELTVGESIVLNCKAIHDASLDVTFYWTLKGQPIDFEEEGGHFESIRAQASSADLMIRNILLMHAGRYGCRVQTTADSVSDEAELLVRGPPGPPGIVIVEEITESTATLSWSPAADNHSPISSYNLQARSPFSLGWQTVKTVPEIITGDMESAMAVDLNPWVEYEFRVVATNPIGTGDPSTPSRMIRTNEAVPKTAPTNVSGRSGRRHELVIAWEPVSEEFQNGEGFGYIVAFRPNGTRGWKEKMVTSSEASKFIYRDESVPPLTPFEVKVGVYNNKGDGPFSQIVVICSAEGEPSAAPTDVKATSVSVSEILVAWKHIKESLGRPQGFEVGYWKDMEQEDTAETVKTRGNESFVILTGLEGNTLYHFTVRAYNGAGYGPPSSEVSATTKKSPPSQAPSNLRWEQQGSQVSLGWEPVIPLANESEVVGYKVFYRQEGHSNSQVIETQKLQAVVPLPDAGVYIIEVRAYSEGGDGTASSQIRVPSYSGGKITSAQSTLHSLSTSSSSVTLLLALMIPSTSW

SEQ ID NO: 86096 - DNA, 3303 bp, Artificial Sequence
  derived and/or modified sequence
atggccagtagttggaaactcatgctcttcctgagcgtaacgatgtgcctgagtgagtattccaagtccctcccgggactcagtacttcttatgcagccttgcttcgaatcaaaaagtcgtcttcctcaagcctgtttggctccaagacccgcccccgttactcctcaccctccctgggaaccctgtcagcatccagcccttcatggcttggagcagcacaaaattactactctccaatcaacctttatcacagctccgacgcctttaaacaggacgagagcgttgactacggccccgtcttcgtgcaggagcctgacgacatcatatttcctactgacagtgatgaaaagaaagtcgccttgaattgtgaagtccgcggaaatcccgttccgtcttatcggtggttgcggaacgggaccgaaattgacctggagtccgactaccgttacagccttatcgatggcacgtttattatttctaatccgtctgaggcaaaggattccggacactaccaatgccttgctactaacacagtgggttccattttgagcagagaagctactctgcagtttgcctatctgggaaatttctccggacgtacaaggtctgcagtctcagtgagggaaggccaaggggtggtcctgatgtgttccccacccccccactctcctgagatcatctattcctgggtattcaacgaattccctagctttgttgcagaggacagccgacggtttattagtcaagaaacagggaacctctacattagtaaggttcagacctctgatgtcgggtcctatatctgtttggtgaagaacaccgttacgaatgctagagtgctgagtccaccaactcctctgaccctcagaaatgacggcgtcatgggcgaatatgaaccgaagattgaagtgcattttccattcacagtgacagctgcaaagggcactacagtgaaaatggaatgttttgccctgggcaaccctgtgccaaccattacatggatgaaggtcaatggttacataccctcaaaagcccgcctcagaaaatcccaggctgtgctggagatcccaaacgtccagctcgacgatgctgggatctacgaatgtagggctgaaaactcgcggggcaaaaacagctttcgtggacagttgcaggtctacacatacccacattgggtggagaaactgaacgacactcaacttgactcgggatcccccctcagatgggagtgcaaggcgactggcaaacccagacccacatacaggtggttgaagaacggcgtgcccttatcaccacagagccgggttgagatggttaatggtgtccttatgatacataatgtaaaccagtctgatgcaggaatgtatcagtgcctggccgaaaataaatatggggccatctatgcatccgccgagctcaagatcctcgcctcagcaccaaccttcgcactcaatcagcttaagaagactatcatcgtgacgaaagaccaggaagtggtaatcgagtgcaaaccccagggaagcccaaagccaaccattagttggaagaaaggagatcgggcagtcagagagaacaagcggatagctattctcccggacggcagcctcaggatcctcaatgcaagtaagtctgatgaagggaaatacgtttgccggggcgagaacgtgtttggctccgccgagatcatagcatctctgagtgtgaaggaacccacaagaattgagttaactcctaagagaactgaactgaccgtgggtgagagtattgttctgaattgcaaggcgatccacgatgctagtctagatgtgacattttactggacccttaaagggcagccgatcgatttcgaggaagaaggaggccattttgaatctatcagagcgcaagccagcagcgctgatcttatgattagaaacattctcctcatgcacgctggcagatatggttgtcgggtgcagaccacggcagactccgtctccgacgaagcagaacttctggttaggggccctcccggtcctcctggtatagtcatcgtggaggagataacggagtccaccgctaccctgagttggagtcccgccgccgacaaccacagcccaatctcctcttataacctccaggcacgctctccgttctctctcggctggcagacggtcaagacagtccctgagattatcactggagacatggagtcagctatggccgtcgatttaaatccatgggtggaatatgaattccgcgtcgtagcgactaatcctatcggcactggggatccaagcactccttcccgtatgatcagaaccaacgaggccgtgcctaaaactgcccccaccaatgttagtgggaggagcggccgcagacacgagttggtgattgcctgggagcctgtgagtgaagagttccagaacggcgaaggcttcggatatattgtggcctttcggcccaatgggacacgtggttggaaggaaaaaatggtgacttcctccgaggccagcaagttcatttaccgagatgagtctgtcccccctcttacccccttcgaggtgaaggtcggcgtctataacaataagggcgacggcccctttagtcagatcgtggtaatctgctccgccgaaggagagccatctgccgcccccacggacgttaaagccacttcagtttccgttagcgagatcctagttgcctggaaacacatcaaggagagtttgggccggccacagggattcgaagtggggtattggaaagacatggagcaggaagacaccgccgaaacggtgaagactagaggcaatgaatccttcgtaatccttaccggcctggagggtaatacactttaccattttacagtgcgggcatacaatggcgcagggtatgggcccccttcatcagaagtcagtgccaccacgaaaaagagcccaccctctcaagctccctccaacctccgctgggaacagcaggggtcccaggtgtcactgggctgggaacccgtgataccactggccaacgagtccgaagtcgtcggctacaaggtgttttaccggcaggaagggcattccaatagtcaggtgatcgagacacagaagcttcaggctgtggtgcctctcccagatgccggtgtttatatcattgaagtgagagcctactccgaaggcggcgacggaacagcaagctcccagattagggttccttcatactcaggcggcaagatcacatcagctcagagtactttacacagcttgagcacatcttcctcaagcgtgactctcctactcgccctcatgataccatcgacttcatggtag

SEQ ID NO: 86097 - DNA, 3303 bp, Artificial Sequence
  derived and/or modified sequence
atggcctcatcctggaaactgatgctcttccttagcgttactatgtgtctgtccgaatatagcaagagcctgcctggtctgagcacttcctacgcagccctgctcaggatcaagaaatcgtctagctccagtctgtttgggagtaagacgcgaccccggtacagcagcccatctctggggaccctgagcgcctcctccccctcttggctgggagccgcacaaaactactattcccccatcaacctttatcattcatctgacgcttttaagcaagatgagtcggtggattatggacctgtgttcgtgcaagaaccggacgacataatatttcccacagacagtgacgagaaaaaagttgcactgaactgcgaggtgaggggcaatcccgtgccatcatacaggtggttgcgtaacggcacggaaatcgacttggagagtgactaccgatatagcctgatcgatggtacgtttataatctcaaatccctcagaggccaaagattcaggacattatcagtgtctagccaccaatacagttgggtccatactgagccgagaggctaccttacagttcgcttacctgggaaatttcagtgggcgcactcgcagtgcggtaagcgtgcgggagggtcagggagtcgtcctcatgtgctcacctcctccccactctcccgaaataatctacagttgggtgtttaacgaattcccttcatttgtggctgaggattcccggcgcttcattagccaggaaactggaaacctgtatatttctaaggtacagacctcagacgtgggcagctacatctgtcttgtgaagaacaccgtcactaatgcccgcgtcctgtctccgcccacgcccctcactttaagaaatgacggagttatgggcgagtacgaacccaagatcgaggtacactttcctttcaccgtgacggccgccaagggcaccaccgtgaaaatggagtgctttgccctcgggaatccggttccaactataacctggatgaaagtgaatggatatattccttccaaggcgaggctacggaagagccaggcagttctggaaattccaaacgtgcagttggatgacgctggcatctacgagtgccgggccgagaactccagaggcaaaaacagtttccgcggccagcttcaggtatatacatacccccattgggttgaaaagctgaatgatactcagctcgactccggcagccccctgaggtgggagtgcaaagctacaggaaaaccccgaccaacatatcgctggctcaagaatggggttcctctgtcaccacagtcacgggtggaaatggttaatggcgtcctaatgattcacaatgtgaaccaatccgacgctggtatgtaccagtgcctagcagaaaataagtatggagctatctacgccagcgccgaattgaagatcctggcttcagctcccacttttgctcttaatcagcttaagaaaaccatcattgtcacgaaagaccaggaggttgttattgaatgtaaaccccagggctctcctaagcccaccatcagttggaagaaaggcgatagagccgtacgcgaaaacaaacgcattgcaatcctgccagacggaagcctccgtatcctcaacgcctccaaaagcgacgaggggaaatacgtttgtcggggggagaatgtctttggaagcgccgagataattgcatctttatcagtgaaggaacccacccgaatcgaactcaccccaaaaaggaccgagcttaccgtgggcgagtcaatcgtgttgaattgtaaagcgatacacgacgccagcctagatgtcaccttctattggactctcaagggccaacccatagacttcgaagaagaaggtggtcactttgaatcgattcgggctcaggcctcttccgctgacctcatgatccgaaacatcctgctgatgcacgctgggcgatatggctgccgggtgcagaccacagcggatagcgtcagtgacgaagccgagctactagtaaggggaccccccggcccgcctggcattgtgattgttgaagagatcactgagtccactgctactctttcctggtcccccgccgcggacaaccattccccaatttcttcctataatttgcaggcccggagccccttttctctgggatggcagacagtgaaaaccgtcccagaaatcatcactggtgatatggagtcggcgatggctgtagacctaaacccatgggtggagtatgagtttcgagtggtggctacaaacccaatcggtactggtgacccgtcgaccccatcaagaatgatacgtacgaatgaagcggtgcccaagaccgccccgaccaacgtctctggaagatccggtaggaggcatgagttagtcatagcctgggagccagtgtccgaggaattccagaacggggagggcttcggctatatagtggccttccgccctaacggaactcgggggtggaaagagaaaatggtgacttcttccgaagcgtcaaaatttatctacagggatgaatccgtgccacccctgaccccatttgaagtcaaagtgggcgtgtataataataaaggcgacggcccattcagccagattgttgtcatctgctccgctgagggtgagcctagcgctgcacccactgatgttaaagctaccagtgtgtcagtcagtgaaattctggtggcctggaagcatatcaaggagtctctggggaggcctcagggcttcgaggttggatattggaaggatatggagcaggaagacaccgcagagactgtgaagacccgtgggaatgagtccttcgtgatactgacggggttggaaggcaacactctgtaccatttcactgtcagagcatacaacggtgctggctacggaccacccagttccgaggtctccgcaactactaaaaagagcccaccctcacaggcacctagcaatctccgttgggaacaacagggctcccaagtgagtctcggatgggaaccagtgatacctctcgctaatgaatctgaagtggtaggatataaagtgttttacagacaggagggtcactcaaactcacaggtgatcgaaacgcagaaattgcaggctgtagtccctcttcccgatgccggcgtgtacattattgaagtgagagcttatagcgagggcggagacgggaccgcaagctcacagatccgggtgccatcgtatagcgggggaaagattacttccgcacagtctaccttacactctctgtcaacctcaagctccagtgtgaccctgttactggctctgatgatcccttcgacaagctggtag

SEQ ID NO: 86098 - DNA, 3303 bp, Artificial Sequence
  derived and/or modified sequence
atggcctcatcgtggaaactgatgctttttctctccgtaaccatgtgcctgagtgaatactctaagtctctgccaggcctctcaactagctacgcggcgttactgaggattaaaaaatctagttcttccagtctgttcggaagcaagacccgcccccggtactcctccccctcattggggacactgtcagcaagctccccttcttggctgggtgccgcccagaactattatagcccaatcaacttgtaccattccagcgatgctttcaagcaagatgaatccgtggattacggtcccgtttttgtgcaggagcctgatgacatcatctttccaactgatagcgacgaaaagaaagtggcactcaactgcgaagtgcggggaaaccccgtgcccagctatcgctggttacggaatggcaccgagatcgaccttgagtccgactacagatatagtctgattgacggcacttttatcatttccaaccccagcgaagcgaaggattccggacactaccaatgtttggctaccaataccgtcggctctatcctgtctcgggaggcaaccctccagttcgcctatctcggaaactttagtgggcgcacacgctccgctgttagcgtgcgcgaaggccagggagtagtgctgatgtgttctcctcccccgcattctcccgagatcatctactcatgggtttttaatgagttcccttcttttgtcgctgaagacagccgccgctttatttcccaagagaccggaaatctttatatcagcaaagtgcagacttcagatgtggggtcctacatctgtctcgtaaagaacactgtaacaaacgcaagagttttgagccctccaactccgctcaccctgcgaaacgacggcgtgatgggcgagtatgagcccaagatagaggtccacttcccatttaccgtcacagcagccaagggtaccaccgtgaagatggagtgcttcgcactcgggaacccggtgcccactatcacctggatgaaggtgaacggatatatcccgtccaaagcccggctgagaaagagtcaggccgtgctggaaattccgaatgttcagcttgatgacgctggcatatacgaatgtagggccgagaactcacgggggaagaattcatttagaggccaactgcaagtgtatacctacccacactgggtggagaagctcaacgatactcagctggatagcggatcgcccctgcgctgggaatgtaaggctactggtaaaccaagacccacatataggtggctgaagaacggggtgcctctgtctcctcagtcccgggtggaaatggtgaatggcgtccttatgatccacaacgtgaatcagtctgatgccgggatgtaccaatgtcttgcggagaacaaatacggcgcaatatacgcgtccgctgagctgaaaattcttgcctccgccccaacctttgctctgaaccaactgaagaagaccattattgttacgaaagaccaggaggtggtaattgagtgcaagccacagggtagtcctaaacccaccatttcttggaaaaaaggcgaccgggctgttagagagaacaagcgtatcgccattctgcctgatggctccctgaggatattgaatgcctccaagtctgatgagggcaaatatgtgtgcaggggcgagaacgtgttcgggagcgctgaaatcattgcctcactgtccgttaaggagccaacccgcatcgagctgacacccaaaagaactgagctgactgtgggggaatctatagtgctgaattgtaaagccatccacgatgcctcgctggacgtgacgttttactggaccctgaaaggccagccgatcgactttgaggaggaagggggccacttcgagtccatccgcgctcaggcatcaagtgccgatctcatgatccgtaacattcttctgatgcatgccggtagatacggatgcagggtccagaccacagccgattcggtcagcgacgaggccgaactgctggtccgcggccctcctggcccccctgggatagtgatcgtagaagagattaccgagtccacagctacgctttcatggtccccggccgcagacaatcatagtccaatatcttcctacaatctgcaggccaggtcccctttctctctgggttggcagacggtgaaaacagtgccagagattatcacaggggatatggaatctgccatggctgtcgacctgaacccttgggtggaatatgagtttagagttgtggccaccaacccaatcggtacaggcgacccgtctaccccatctcggatgattcgaactaacgaggcagtccccaagactgcgcctacaaacgtgtccggcaggtcagggcggaggcatgagctggtgattgcgtgggagcctgtctccgaggagttccagaatggcgaggggttcggatacatagtggcctttaggccgaacggtaccaggggctggaaagagaagatggtgaccagttccgaggcgagcaaatttatatacagggacgagagcgtccctcctctgaccccttttgaggtgaaagtgggggtttacaataacaaaggtgacggccccttttcccagatcgtcgtgatctgttccgcagagggtgagccatccgcagcccccaccgacgtgaaagccaccagcgtgtcagtgagtgagattctggtggcttggaagcatattaaagaaagtctggggcggcctcaggggttcgaggtgggctactggaaggacatggagcaagaagatactgccgaaaccgttaaaactcgcggcaatgagagctttgtgattctgaccggcttggagggcaacaccctgtatcactttacagttagggcctacaacggtgcaggttacggccctcccagcagtgaggtaagtgcgacaactaagaaatcaccaccatcccaagcgccgtccaatctgcgctgggagcagcagggttcacaggtttcactcggatgggagcccgtgatcccactcgctaatgaaagcgaagtcgtcggctataaggtgttctatcggcaagaggggcatagtaactcccaggtcattgagacccaaaagctgcaagcagtggtacccctgcccgacgctggcgtgtacattatcgaagtaagagcgtactccgaaggaggggatgggacagcctcatctcaaatcagagtgccatcctacagcggagggaagatcacatctgcccagtctaccttgcactctctttctacatctagttcgtctgtaacactcctgttggccctgatgatcccgtccacatcttggtag

SEQ ID NO: 86099 - DNA, 3303 bp, Artificial Sequence
  derived and/or modified sequence
atggccagctcctggaagctgatgctgttcctgtctgtgaccatgtgcctgtctgagtacagcaagagcctgcccggcctgagcaccagctatgctgccctgctgcgcatcaagaagagcagcagcagcagcctgtttggcagcaagacccggccccgctacagcagccccagcctgggcaccctgagcgccagcagccccagctggctgggcgccgcccagaactactacagccccatcaacctgtaccacagcagtgatgccttcaagcaggatgagagcgtggactatggccctgtgtttgtgcaggagccagatgacatcatcttccccacagacagtgatgagaagaaggtggccctgaactgtgaggtgcggggcaaccctgtgcccagctaccgctggctgagaaatggaacagaaattgacctggagagtgactaccgctacagcctgattgatggcaccttcatcatcagcaaccccagcgaggccaaggacagcggccactaccagtgcctggccaccaacacagtgggcagcatcctgagccgggaggccaccctgcagtttgcctacctgggcaacttcagcggccgcaccaggtctgctgtgtctgtgcgggagggccagggcgtggtgctgatgtgcagccccccaccccacagccctgagatcatctacagctgggtgttcaatgagttccccagctttgtggccgaggacagccgccgcttcatcagccaggagactggaaacctgtacatcagcaaggtgcagaccagtgatgtgggcagctacatctgcctggtgaagaacacagtgaccaatgcccgggtgctgagcccccccacccccctgaccctgagaaatgatggagtgatgggagaatatgagcccaagattgaggtgcacttccccttcaccgtgacagctgccaagggcaccaccgtgaagatggagtgctttgccctgggcaaccctgtgcccaccatcacctggatgaaggtgaatggctacatccccagcaaggcccggctgaggaagagccaggccgtgctggagatccccaacgtgcagctggatgatgctggcatctatgagtgcagagctgagaacagccggggcaagaacagcttccggggccagctgcaggtgtacacctacccccactgggtggagaagctgaatgacacccagctggacagcggcagccccctgcgctgggagtgcaaggccaccgggaagccccggcccacctaccgctggctgaagaatggagtgcccctgagcccccagagccgggtggagatggtgaatggagtgctgatgatccacaacgtgaaccagagtgatgctggcatgtaccagtgcctggccgagaacaagtacggggccatctatgccagcgctgagctgaagatcctggccagcgcccccacctttgccctgaaccagctgaagaagaccatcatcgtgaccaaggaccaggaggtggtgattgagtgcaagccccagggcagccccaagcccaccatctcctggaagaagggggacagagctgtgcgggagaacaagagaattgccatcctgcctgatggcagcctgcgcatcctgaatgccagcaagagtgatgagggcaagtatgtgtgccgcggggagaatgtgtttggatctgctgagatcatcgccagcctgtctgtgaaggagcccacccgcatcgagctgacccccaagaggacagagctgactgtgggggagagcatcgtgctgaactgcaaggccatccatgatgccagcctggatgtgaccttctactggaccctgaagggccagcccatcgactttgaggaggagggcggccactttgagagcatccgggcccaggccagcagcgctgacctgatgatccggaacatcctgctgatgcatgctggccgctatggctgccgggtgcagaccacagctgacagcgtgtctgatgaagctgagctgctggtgcggggccccccaggccccccaggcatcgtcatcgtggaggagatcacagagagcacagccaccctgtcctggagccctgctgctgacaaccacagccccatcagcagctacaacctgcaggcccggagccccttcagcctgggctggcagacagtgaagacagtgcctgagatcatcactggagacatggagagcgccatggctgtggacctgaacccctgggtggagtatgagttccgggtggtggccaccaaccccatcggcaccggggaccccagcacccccagcaggatgatccgcaccaatgaagctgtgcccaagacagcccccaccaacgtgtctggccgcagcggcagaagacatgagctggtgattgcctgggagcctgtgtctgaggagttccagaatggagagggcttcggctacatcgtggccttccggcccaacggcacccggggctggaaggagaagatggtgaccagcagcgaggccagcaagttcatctacagagatgagagcgtgccccccctgaccccatttgaggtgaaggtgggcgtgtacaacaacaagggagatggccccttcagccagatcgtggtgatctgcagcgctgagggggagcccagcgctgcccccacagatgtgaaggccacctctgtgtctgtgtctgagatcctggtggcctggaagcacatcaaggagagcctgggccggccccagggctttgaggtgggctactggaaggacatggagcaggaggacacagctgagaccgtgaagaccagaggaaatgaaagctttgtgatcctgaccggcctggagggcaacaccctgtaccacttcaccgtgcgggcctacaacggggccggctacggcccccccagcagcgaggtgtctgccaccaccaagaagagcccccccagccaggcccccagcaacctgcgctgggagcagcagggcagccaggtgtccctgggctgggagcccgtcatccccctggccaatgaaagtgaggtggtgggctacaaggtgttctaccggcaggagggccacagcaacagccaggtgattgagacccagaagctgcaggccgtggtgcccctgcctgatgctggggtgtacatcatcgaggtgcgggcctacagcgagggcggagatggaacagccagcagccagatccgggtgcccagctacagcggcggcaagatcaccagcgcccagagcaccctgcacagcctgagcaccagcagcagctctgtgaccctgctgctggccctgatgatccccagcacctcctggtag

SEQ ID NO: 86100 - DNA, 3303 bp, Artificial Sequence
  derived and/or modified sequence
atggccagcagctggaagctgatgctgttcctgagcgtgaccatgtgtctttcggagtattctaagagcttaccagggttgtcaacatcgtacgccgctctcctgaggatcaaaaagagcagtagctcttctctatttggctctaagacccgaccgcggtatagcagccctagtttaggcacgctgagcgcgtcttctccctcttggcttggagcggctcaaaattactacagcccgatcaatctgtaccactcctctgatgcgtttaagcaggatgaatcagtcgactacggacccgtgttcgttcaggagcccgatgatatcatctttccgaccgattccgatgaaaaaaaggtggcacttaactgcgaggttcgcggcaacccagtgcccagttacaggtggctcagaaatggcacggagatagatctcgagagcgactatcgatatagcttaatagatggaacttttatcatctctaacccctcagaggctaaggatagcggccactaccagtgcctggctacgaacacagtcggtagcattttatcaagagaggctaccctccaatttgcatatctggggaacttctctggcagaacgagatccgctgtgtccgtgcgcgaaggacagggggttgttttgatgtgctcacctccacctcactcccctgagattatctactcttgggtgtttaatgaatttccttcattcgtggcagaggatagtcggaggttcattagccaggagacaggcaatctgtacatcagtaaggtgcagacaagtgatgtgggctcctatatctgtctggtgaagaataccgtaaccaacgcccgcgtcctgagcccacctaccccactgaccctaaggaacgatggcgtcatgggcgaatatgaaccgaaaatcgaggtccatttcccctttacagttaccgcagccaaaggcactactgttaaaatggagtgtttcgctttgggtaatccggtgcccaccattacatggatgaaagttaacgggtatattccctcaaaagcacgtctgagaaagagccaggctgtacttgagattcctaatgtacagctggacgatgctgggatatatgagtgcagggccgagaattcacgggggaaaaactcgtttcgaggacagctacaggtctacacctaccctcattgggtggagaagctgaacgacactcagctcgacagcggctcccccctgcgttgggagtgcaaagccacaggtaagcctagaccgacatacagatggctgaaaaatggcgtcccactgtccccccaatcccgcgttgagatggtgaacggggtgctcatgatccacaacgtcaaccagtcagatgccggtatgtaccagtgcctcgccgagaacaaatatggagccatctacgcatctgctgaactgaagattctcgcgagtgctcccaccttcgccctgaaccaactcaagaaaactattattgtaactaaggatcaagaggtggtgattgagtgtaaacctcaaggttccccaaagccaaccatttcctggaaaaagggagatagggccgtgcgggaaaataagcgaatcgcaatactgcccgatggatccctcaggatactgaatgcatcgaagagcgacgaggggaagtatgtatgtaggggcgagaatgtcttcggcagtgccgagataattgctagtttgtcagttaaggaacccacgcggatcgagcttacaccaaagaggacggagctgaccgtgggcgaaagcattgtgttgaattgcaaagcgattcatgacgcgtctctggacgttaccttctactggacgctcaagggccagcctatcgacttcgaggaagaaggcgggcactttgagagtatcagagctcaggcctcgagcgctgatctcatgatccgtaacatcctgctgatgcacgcagggcggtacggttgcagggtgcagactaccgccgattcagtgtccgacgaagcagaattgctggtcagggggccacctggtcctccaggcatcgtgattgtggaagagattacggagtcaacagcgaccctaagctggtcaccagcagcggacaaccacagccccatcagctcctataacctccaggccaggagccctttttcactcggctggcagactgtgaaaacagttccggaaataataaccggcgatatggagtccgctatggcggtggacctgaatccctgggtcgaatacgaattcagggtcgtggcgaccaatcctatcgggacaggggacccttctactccctcccgcatgatcaggacaaatgaagccgtgcctaagacagctcccacaaatgtctccggaaggtcagggaggcgccatgagctagtcattgcttgggagccggtgagtgaggaattccagaatggcgaagggttcggttacattgtggcgtttcggcccaacgggacccgcgggtggaaggaaaaaatggtgacgtcctcggaggcaagcaagttcatttatagggatgaatccgtcccccctctgaccccatttgaggtcaaggtcggagtgtataacaacaaaggcgacggacccttttcgcaaatagtggtcatctgcagtgccgaaggcgaaccatctgccgcccctactgacgtgaaagcaacctccgtcagtgtgagtgagattctggtagcttggaagcatatcaaagagagccttggcagacctcaaggattcgaggtgggttactggaaggatatggagcaggaagacacagcggaaaccgttaaaacacgtggaaacgagtcattcgtgatactaacaggtctagaaggaaataccctgtaccacttcactgtcagggcctacaacggcgcaggatacggtcctcccagttctgaagtctctgcgaccacaaagaaatcccccccctcccaggcaccctcaaatctgcgctgggagcagcagggtagtcaggtctcactgggctgggaacccgttataccccttgcgaatgaatctgaggttgtgggatataaggtgttctacaggcaggagggccacagcaattctcaggtcatcgaaacacagaaactacaagcagtggtaccactccctgacgcaggggtgtatattatagaagtcagggcttatagtgagggcggcgacggaacagcaagtagccagattcgggttccctcctactcaggtggaaaaatcacatccgcacaatctacactccactccctaagcacctcgtcaagctctgtcacactgcttctggccttgatgatcccgtccacttcatggtag

SEQ ID NO: 86101 - DNA, 3303 bp, Artificial Sequence
  derived and/or modified sequence
atggccagcagctggaagctgatgctgttcctgagcgtgaccatgtgcctgtcagagtatagtaagtctctgccaggcctgtccacttcttacgctgctttgctgcggattaagaagtcctcgtcctcctccctttttggcagcaagacacgtccaaggtacagcagccccagcctaggcacacttagcgctagctctccgtcatggttgggcgctgcgcagaattattattcaccaatcaatctataccattcctccgacgcctttaagcaggacgagtcagtggattacgggccggtgttcgttcaggagcctgacgatatcatatttcccacagactcagacgagaaaaaggtggcactgaactgcgaggtgcgcggaaacccggtcccatcatatcgttggctaaggaacgggaccgaaattgacctggagagtgactaccgttatagtttgatcgacggaacttttatcatcagtaatcccagcgaggctaaggactctgggcattaccaatgtcttgccacgaataccgtaggaagcatcctgagccgtgaagccacactgcagttcgcgtacctagggaatttttccggcagaacgaggagcgccgtcagcgtaagggagggccagggcgtagtgctaatgtgctctcctcccccgcattcccctgaaatcatatatagttgggtgttcaatgagttcccctcctttgtggctgaagatagtaggcggtttatcagccaagagaccgggaatctgtatatttcaaaagtgcagacctctgatgttggcagttatatttgcctcgtgaagaacaccgtgaccaacgctcgggttctctctcctccaactcctctgaccctccggaatgacggggtcatgggcgagtacgagcctaaaatagaggtccactttccattcaccgtgacagctgcgaagggaaccaccgtgaagatggaatgctttgcgctgggaaacccagtgccaaccattacatggatgaaagttaatgggtatataccttcgaaggcaaggttgcggaaatcacaagccgtgctagagattccaaatgtacagctggatgacgcgggcatctacgaatgccgggctgaaaattctcgaggcaagaattcgtttagaggacaactgcaagtgtacacgtatccacactgggtggaaaagctgaatgacacacagcttgatagtggttctccgctgaggtgggagtgtaaggcaacaggcaagccaagaccgacgtacagatggctgaaaaatggagtgcctctctctccccagagccgggtggagatggtgaatggagtgctgatgatccacaacgtaaatcagtcagacgctggtatgtaccagtgtctggcagagaacaagtacggtgccatctatgcatctgcagagttgaagatccttgcctccgcaccaacatttgccctgaatcagttgaagaagacaatcatcgtcaccaaagatcaggaggtggttattgagtgtaaacctcaggggtccccaaaaccaacgattagctggaaaaagggcgatagggctgtgcgcgagaacaagagaatagccattctgcccgacggttccctgagaatcctgaatgcttcaaaaagcgacgagggaaagtacgtgtgtcggggagaaaatgtgtttggatctgctgaaattatcgctagtctgtccgtcaaagaacctacaagaattgagctgacgccaaagaggaccgaactcactgttggagaatccatcgtcctgaattgcaaggcaattcatgatgcttctctggacgtgacattttattggacactgaagggacagcctatcgatttcgaggaggaaggcgggcacttcgagtctatcagagcacaggcttcatctgccgatcttatgattcgcaatattctgctgatgcatgcaggtagatatgggtgtcgtgtgcaaacaacagccgattcagtgtctgacgaggcggagctcttggtgaggggacctcctggccctccaggcatagtaatcgtcgaggagatcacagagtcaaccgccaccttatcttggagccctgcagccgacaatcacagccccatcagcagctataacctgcaggccagaagccccttctccctgggttggcaaaccgtgaagaccgtgcccgagatcattaccggggacatggaatccgcgatggctgttgacttaaacccatgggtcgaatatgagtttagggttgtggccacgaaccctattggcaccggggatcctagcacaccttctcgtatgatacgcacaaacgaagcagtgcctaaaacagctcccaccaacgtgtccggacgcagcggtcggcgccacgaactcgtgattgcctgggagccggtgagcgaggagtttcaaaatggggagggcttcggctacatcgtagcgttccgaccaaacgggacacggggatggaaagagaagatggtgactagcagcgaagccagtaagtttatttaccgtgacgaaagcgtccctccgctgacgccctttgaagtgaaagtcggggtgtacaacaataagggagacggacccttctctcagatcgtggttatctgttccgctgaaggcgaaccctcagccgcacctaccgacgtcaaggctacctctgtgagcgtcagcgagatattggtcgcttggaagcatattaaggagtcactggggcgtccacaggggttcgaagtcgggtactggaaggacatggagcaggaggatacagccgagacagtgaaaacccgggggaatgagagctttgtgattctgacagggctggaagggaacaccctgtaccatttcaccgtgcgggcctacaacggtgccggctatggtcctccttcttccgaagtgtccgccaccaccaaaaagagccccccttcccaagctccttcaaaccttcgctgggagcagcaaggctcgcaggtctctctcggatgggagcctgtgatacctctcgctaacgagtctgaagttgtgggctataaagtattttataggcaggagggtcacagcaacagccaagtgattgaaacacagaaactgcaggcagtcgtgccgcttcctgacgctggtgtctacattatcgaagtgcgcgcatatagcgaaggtggggacggaacagcttcttcccagattcgcgtgcccagttactctggggggaaaataacatcagcgcagtcgactcttcactctttaagcacctctagcagctcagtgacactgcttttggccctgatgatcccaagcaccagctggtag

SEQ ID NO: 86102 - DNA, 3303 bp, Artificial Sequence
  derived and/or modified sequence
atggccagcagctggaagctgatgctgttcctgagcgtgaccatgtgtctctccgaatacagtaagtccctgcccggattgtctacctcctacgccgctctgctccgcatcaagaagtcttcaagcagcagtctcttcggatccaagactaggcccaggtatagctcaccctccctgggtaccctgtctgcgtcttccccatcctggctgggcgcagcccagaattactactcccctatcaatctctaccatagcagcgatgcctttaagcaagacgagtcagtggattacggtcctgtatttgtgcaggaaccagacgacattattttccccaccgattcagacgaaaagaaggttgcccttaattgtgaggttagaggaaaccccgtgcccagttacaggtggctgcgaaacgggacagaaatcgacctggagagtgattatcgttattcactgatagacggcacgtttatcatctcaaatccgtccgaggcaaaagattcaggacattatcagtgccttgccaccaacacagtgggaagcattttaagccgcgaggccacactccagtttgcatatctggggaactttagcgggcggactcgtagcgccgtatcagttcgtgagggacagggcgtggttttgatgtgcagcccccctccccattccccagagattatctactcctgggtattcaacgagttcccctcatttgtcgcagaagactcccgaaggttcatctctcaggagactggaaacctgtacatctccaaggtgcagacaagtgacgtggggtcctatatttgtctagttaaaaatactgttacaaacgctcgcgttcttagcccccccacgccactcaccctgagaaacgacggagtgatgggcgagtatgagcctaaaatcgaggtgcatttcccgtttactgtgactgctgccaaaggaactactgtcaagatggaatgtttcgctctcggaaatcccgtgcctaccattacatggatgaaggtcaacgggtacattccatcaaaagcccgcttgcgcaaatcacaggctgtcctggaaatccccaacgttcagctggatgatgccgggatttacgagtgcagggccgagaactcccggggaaaaaacagcttcagaggtcaactccaggtctacacctatcctcattgggtggaaaaactcaacgacacacagcttgacagtggcagtcccttgcgctgggagtgcaaggctactgggaaacccagaccgacgtaccggtggctgaagaatggggtaccattgtctccgcagtctcgcgtggagatggtgaatggcgtgctcatgattcataatgtgaatcagtcggatgcgggcatgtatcaatgcctggctgaaaacaaatacggcgcaatctatgcatctgccgagctgaagatcctagcttccgctccaaccttcgccttgaaccagctgaagaaaacgattatagtcacgaaggaccaggaggtggtaattgaatgcaagccacagggaagcccgaagccaaccatttcatggaagaagggcgaccgtgccgtgagagagaacaaaagaatcgccatactacccgatggcagcctgcgcattttaaacgcctctaagtccgacgaaggcaagtacgtttgcagaggggagaacgtgtttggatccgcagagattatcgcatctctcagtgtcaaagagccaacccgcatcgaactaacaccaaagcggactgagctgacagtgggagagtccattgtgctgaattgtaaggcaatccatgacgcaagcctcgacgtgactttttattggacgcttaaaggccagcctatcgactttgaggaagaggggggtcacttcgagtctatccgggcccaagcatctagtgcagacctgatgatcaggaacatacttttgatgcacgccggccgctacggttgccgcgttcagacaacagctgactccgtaagcgacgaagctgaactgctggtgcgagggccccccggcccacctggcatcgtgatagttgaggaaatcaccgaatctacagctacactcagctggtcgcctgccgctgataatcactccccaataagtagctataaccttcaggccagatccccattctcattaggttggcagaccgtgaagaccgtgcctgaaattatcacaggagatatggagtctgctatggccgtggacctaaatccttgggtggagtacgagtttagagtggtcgccactaacccaattggcaccggcgaccctagcaccccaagtagaatgattcgaacgaacgaagctgtccctaagactgccccgacgaacgtgtctggccggtctggccggaggcatgaactggtgatcgcctgggagcccgtctccgaggagttccagaatggcgagggctttggctatattgtggccttccggcctaatggcaccagaggctggaaggaaaaaatggtgactagctcagaggccagtaagttcatctatcgcgacgagtccgtgcccccactgacaccgttcgaggtcaaggttggcgtgtacaataacaagggagatggcccattctcccaaatcgtcgttatctgctctgcagaaggagaaccatctgccgccccgactgacgtaaaggcaacctcagtttctgtctccgagattctcgtggcctggaaacatataaaagagagcctcggacgaccccaggggttcgaggtgggctactggaaggacatggagcaggaagataccgccgagacagtaaagactcgggggaacgagagtttcgtgatcctaacagggctggaaggcaatactctctatcacttcaccgtgagggcttacaacggagccggctatgggccgccctctagcgaggtttcggctaccaccaagaagagtccccccagtcaagcaccgtcaaacctcagatgggaacagcaggggagtcaggtcagtcttggatgggagcctgtgatcccgctggctaacgagtctgaagtcgtgggttacaaagtattctaccggcaagaaggccatagcaactcccaagtcatagagacacagaagctccaggccgtggtgccactccccgacgccggcgtgtacatcatcgaagtccgggcttactcagaggggggggacggtactgctagttcccagataagggtgccgtcttacagcggaggcaaaattactagtgcccagtccaccttacactccctgtccacctcaagttcttccgtcaccctgctccttgcactgatgatcccatccacctcatggtag

SEQ ID NO: 86103 - DNA, 3303 bp, Artificial Sequence
  derived and/or modified sequence
atggcctcatcatggaagctgatgctgttcctttctgtcaccatgtgcctgtctgaatactcgaagtctctgccgggattaagcacatcctatgcagcgctacttaggatcaagaaaagctcttcatctagtctcttcggatccaaaacacgacctagatactcttcacccagcctgggcacactctctgcctcttcccccagctggctaggcgctgcgcaaaactactatagccccatcaatctctaccattcgagcgacgcctttaaacaggacgaatccgttgactatggacccgtgtttgtgcaggagcccgatgacattatctttccaactgactccgacgaaaaaaaggtggccctgaactgtgaagttcgcggaaaccctgtcccatcttatcgctggttacgcaacggaacagagatcgacctggaatccgactatcgctattctttgatagacggcaccttcattatctcaaacccgtccgaagctaaggattccggacactaccagtgcctggcgaccaacacagtggggtccatcttgagccgtgaggcaaccttacaatttgcctacctgggcaacttttctggtagaacaagatccgccgtcagtgttagggaaggacagggcgttgttttgatgtgttctccccctccacactccccagagataatttattcatgggtcttcaatgagttcccatccttcgttgctgaggattctaggagatttatctcacaggagactggcaatctgtatatcagcaaagtgcaaacttctgatgtgggttcttatatctgcctggtgaagaacaccgtgaccaacgcgagagtcttgtccccccctaccccgctaacactacgcaatgacggcgttatgggggagtatgaacccaaaattgaagtgcacttcccctttacggtcaccgccgcaaagggaactaccgtgaagatggagtgcttcgccttgggcaacccggtgcctaccatcacatggatgaaggtcaacggttatattccgtctaaggccagactgcgcaaatcccaggccgtgctggagatcccaaacgtgcagctggacgatgcgggaatttacgagtgccgggctgagaactcacgagggaagaacagttttcgcggtcagttacaggtctacacctacccgcattgggttgaaaaactcaacgacacccagcttgactcaggctcccccttgcgatgggaatgtaaagctaccggcaaaccacgaccgacttacaggtggcttaagaacggtgttccacttagcccacagagccgcgtggagatggtcaacggagtgttaatgatccacaatgtgaaccagtccgatgccggaatgtatcaatgccttgccgagaacaagtatggcgctatttatgcatcagctgagctcaagatcctggctagtgctccaacgtttgcccttaaccagttgaagaaaactatcatcgtgactaaagaccaggaggtggtgattgagtgtaagccgcagggctcacccaagcctactatttcctggaagaagggcgacagagcggtgcgtgagaataaaagaatcgccatcctacccgatggatccctgaggatcctgaacgcatctaagagcgatgagggcaagtacgtgtgccgcggagagaatgtgttcggatcagccgagattattgctagtctgagcgtaaaggaacccacacgtatagaactgactcccaagcgaacggagctgactgtgggggagagcatcgtcctgaactgtaaggctatccacgatgctagtctggacgtaacattctattggaccctgaagggtcagccgattgactttgaggaggagggaggccattttgagtccattcgagctcaggcctcctcagccgatctgatgataaggaacattctgctcatgcacgctggcaggtatggatgcagggtccaaactaccgctgactctgtatctgacgaagctgagctactggtccgcggacccccaggcccaccgggtattgttatcgtggaagagattaccgaatccactgcaaccctgtcctggtctcctgcagctgataatcactcccccatttcctcatacaacctacaggctcggtcccctttcagcctaggatggcaaaccgtgaagacagtccctgaaatcatcacaggagacatggagagtgcgatggcagttgatctgaatccgtgggttgagtatgagtttcgcgtggtcgcaaccaatccaatcggaacaggagacccttctactccatcccgcatgattcgcactaatgaagcagttccgaagacggctcctactaacgtaagtggccgatccggcaggaggcacgaattggttatagcctgggaacccgtgagtgaagaatttcagaatggtgagggatttggatacattgtagccttcagacccaacggcacccggggatggaaggagaagatggtgacctcctccgaagcaagtaaattcatctaccgcgatgagagtgttccacctctcaccccatttgaagtaaaagtcggggtttacaacaacaagggcgatggccctttctctcagatagtggtgatctgttccgccgagggcgagccatccgccgctcctactgatgtgaaggccacatcggtgtctgtgagcgaaatcttggtggcctggaagcacataaaagagtcgttgggccgtccccagggcttcgaggttggttactggaaagacatggaacaagaagatacagccgagactgtgaaaactcgaggcaatgaaagtttcgtaatcctgacaggactggagggcaacacgttgtaccactttacagtcagagcttacaatggggcaggctatggtcctcccagctccgaagtgtcagccaccactaagaaatcccccccaagtcaggctccatcaaatctgcggtgggagcaacagggcagccaagtgagtctggggtgggaacccgttatccctctggccaacgaatccgaagtcgtcggatataaggttttctatcggcaggaagggcactcaaactcacaagtgattgagacgcagaagctgcaggccgtggtgcctctgcccgatgcaggagtatacattattgaggtacgggcttactcggaggggggagatggaacggcttcttcgcagatccgcgtgccctcctattccggcggaaaaatcacttcggcacagagcacactgcacagcctctctacaagcagctctagtgtgactctcctgctggccctgatgatccccagcacatcctggtag

SEQ ID NO: 86104 - DNA, 3303 bp, Artificial Sequence
  derived and/or modified sequence
atggcctcatcctggaaacttatgctatttctctctgtgaccatgtgtctttctgaatactcaaagagcctccccggtctgagcacaagctacgcagctctgctgcgaatcaagaaatcttctagctcaagcttatttggtagcaagaccaggccacgctattcttccccctcacttggaacactctcagcctcatcccctagttggttaggggctgctcaaaattattattctccgattaacttataccactctagcgacgccttcaaacaggatgagtcagtcgactacggacccgtgttcgtccaggagcccgatgacattatttttcccacagacagcgacgagaaaaaggtggcgctcaattgtgaagtgcggggtaaccccgttcccagctatcgctggctccgcaatgggacagaaattgatctggaatcagattatagatattcactgattgatgggaccttcatcatctccaatccttccgaggctaaagattccggtcactaccaatgtttggcaactaacaccgtgggctctattctttcccgggaagcaacactccaattcgcctatctcgggaatttctccggcagaacacgatcagctgtgagtgtgcgcgaaggacagggcgtcgtgttaatgtgctcaccacctcctcactcccccgaaatcatctactcatgggtgttcaacgaattcccaagtttcgtggccgaggattcaaggcgcttcatatcccaggagactgggaatctctacatttccaaagtgcagacttccgatgttggcagttacatctgcctggtgaaaaatactgttactaatgcccgagtgctgagtccaccaactccgcttactctccggaatgacggtgtaatgggagagtacgagccaaagattgaggtacacttcccattcactgtgaccgctgccaaggggacaacagtgaaaatggagtgtttcgccttaggcaatcccgtgccaacaatcacttggatgaaagtcaacggctacataccctccaaggccagattgcggaagtcacaggccgtcctcgaaatcccaaacgtgcaattggatgacgcgggtatctacgagtgtcgagccgaaaattcacgaggcaaaaactcctttcgagggcaattgcaagtctatacctacccccattgggtggagaagcttaacgacacacaattagactcaggctcgccactgaggtgggagtgcaaagccaccgggaaaccacgcccaacttacagatggctcaagaacggtgttcccctttctccccagtctcgggtcgaaatggtgaatggggttctgatgattcacaacgttaaccagagcgacgcaggcatgtaccagtgtcttgctgagaacaagtatggcgctatttacgcatctgcagaacttaagatactcgcatccgccccaacctttgcactgaaccagcttaagaaaacaataattgttaccaaggatcaagaagtggtaatcgagtgtaagccacagggctcgcctaaaccaacaatatcatggaaaaagggtgatcgcgcagtgcgggaaaacaaacggatagcaattttgccagatggatccctgcgcattctgaatgcttctaagtccgatgaaggaaaatatgtttgcaggggtgagaatgtgtttgggtcggctgagatcatcgcctctcttagtgtaaaagaacccacaaggatcgagcttaccccgaaacggactgaactgaccgtcggggagtcaatcgtgctgaactgcaaggctatccacgatgctagcctcgacgtcacattctattggactctgaaagggcaaccaatcgactttgaagaggaaggcggacacttcgagtctattcgcgctcaggcatcttctgccgatctcatgattaggaacatcctgttaatgcacgcgggacgctatgggtgccgggtgcagaccactgctgactcagtgagtgatgaggccgagttactggtgcgtggtcctcctggtccgcctggtattgttattgtagaggagatcacagagtccactgccacactaagttggtctccagcagccgataatcacagcccaatcagttcctataatctgcaggcccgtagccctttctcattgggatggcaaactgtaaagaccgtccctgagatcatcaccggggatatggaatccgctatggccgtcgatctgaacccatgggtggagtacgagttccgtgtggtcgccactaacccaataggtacaggggacccaagtacaccgagccggatgataaggactaacgaggccgtccctaagaccgccccaaccaatgtctcggggagatctgggcgacggcacgagttagtgattgcatgggagcctgtatctgaagaattccagaacggcgagggatttggctacatagttgcattcagaccaaatgggacaagggggtggaaggagaagatggtgaccagtagcgaggcaagcaagtttatttatcgcgacgagagtgtgcccccattgaccccgtttgaagtgaaagtcggcgtgtataacaataagggcgatggcccattttctcaaatagtggttatatgctccgctgagggtgagccttctgccgctcccactgacgtcaaagctacatccgtaagcgtatcggagatcctggtagcttggaagcacatcaaagagtctttgggtcgccctcagggcttcgaggtcggctattggaaggatatggaacaggaagatacagccgaaaccgtgaagactcggggtaatgagagtttcgtgattctgactggactggaggggaacacactgtaccactttactgttagggcctacaacggcgctgggtatggccctccgtcctccgaggtctcggccacaacgaaaaagtccccacctagccaggctccgtctaatctccggtgggaacaacagggttcccaggtgtcgctcggttgggagccagtgattcctctggcaaatgaatctgaagtcgtgggctataaagttttttataggcaggaggggcatagtaattcgcaggtcattgagactcagaaactgcaggccgtggtcccacttcccgatgccggagtttacattatagaggttcgagcttatagtgaaggcggtgacggcaccgctagttctcagattagggtgccgtcttacagtgggggaaaaatcacatctgcacagagcacgcttcactcactgtctacatccagctcaagcgtcactctcctcctcgcacttatgataccgtcaacaagctggtag

SEQ ID NO: 86105 - DNA, 3303 bp, Artificial Sequence
  derived and/or modified sequence
atggcttcctcttggaagcttatgttgtttttgtctgtgactatgtgtctgtctgagtacagcaagagccttccaggtctgtccactagctacgccgctctgctgagaattaaaaagtccagctctagtagccttttcggtagcaaaaccagaccacgctattcctccccgtcacttggaaccctaagtgcctcctccccctcctggctgggtgctgctcagaactactattctcccataaacttatatcactcctcagatgcctttaagcaggatgaatccgtggactacggaccagtgttcgtgcaggagccagatgatattattttccctaccgattccgatgagaagaaggtagccctaaattgtgaagtccgcggaaatcccgtaccaagctatcgatggcttagaaacggaacagaaatagatttagagtctgactacagatattcattgatcgatggcacatttatcatctcgaatccgagtgaagccaaggattccggtcactaccagtgtttagcgaccaacaccgtgggctccattctgagtcgtgaagccactctccagttcgcatacttgggaaatttttctggccgaacacgcagcgccgtctccgtgagagaaggccagggggtggtcttgatgtgttccccaccccctcacagcccggaaataatctactcctgggtgttcaacgaatttccctcatttgtcgctgaggactctagacgctttatctctcaggagactggaaacctgtatatatccaaggtgcaaacatcggatgtcgggagctacatttgtttagtgaaaaatacggtcaccaacgcaagagtactttcgccacctacaccccttactctgcgcaatgatggagtcatgggagaatatgaacccaaaatagaagtccactttcccttcacagtcaccgccgctaaaggaaccaccgtgaagatggaatgttttgcactcggaaatcccgtacctactattacatggatgaaggtgaatggatatatccccagcaaggctcgtttgagaaagagccaggcggtgctcgaaatccccaatgtgcaactcgacgatgcaggaatttacgaatgcagggcagaaaattcacggggaaaaaattcattcagaggccagcttcaggtttacacgtacccgcactgggtggaaaagctgaatgacacccagctggattcgggctccccactgagatgggaatgcaaagccaccggtaaaccgcgaccaacttataggtggcttaagaatggcgtgcccctgtccccccagtctagagtggaaatggtgaacggagttctcatgatacacaacgtaaatcaatctgacgccggaatgtaccagtgcttggcagagaacaaatatggcgctatatatgcctcagctgaactgaagatccttgcgtccgctccgaccttcgctctcaatcagctcaagaaaaccattatcgttacgaaagaccaggaggtggtcattgagtgcaagccccagggctctcccaagccaaccatttcctggaaaaagggcgaccgggcagtgagggagaacaagcgcatcgccatcctgccagatggatctttacgcatcctcaacgcgtccaaatccgatgagggcaaatacgtttgcaggggagaaaacgtctttggttcggccgagatcatcgctagcctgtccgtcaaggaacccacccggatcgaactgacacctaagagaactgagctcactgtgggcgagagtatagtgctaaattgtaaggccatccatgacgccagcctagacgttacgttttactggaccttaaaaggccagccaattgacttcgaagaggagggagggcatttcgagagcatccgggcacaggccagttctgccgatcttatgattaggaacattttgctaatgcacgctggcaggtatggatgtcgggtccagacaacggccgattccgtgagcgacgaagccgaactccttgttcgtggacctccaggacctccgggtattgttattgtggaggagattaccgagtcgactgccacgttgtcatggtctcctgccgctgataaccactcaccgatatcatcttacaatctgcaagcgaggagcccttttagtctgggatggcagacagtaaagaccgtgccggaaatcattacgggtgatatggagtctgcaatggctgtggacctgaacccttgggtcgagtacgagtttagggtcgtcgccactaaccccattggtacgggagacccatctacaccttcccggatgattcggacaaatgaggctgtgcccaagactgcaccgactaatgtcagcggaaggtcggggcgtcgccacgaactggtgatcgcgtgggagcccgtgtcagaagagtttcaaaacggcgaaggctttggatatattgttgctttccgccctaatgggacacggggttggaaggagaagatggtcacgagctccgaggctagcaagtttatctacagggacgagtccgtcccgccacttactccgtttgaggtgaaggttggggtttataataataagggggacggccctttttcacagatcgtggttatatgctccgcagagggcgagcctagcgccgctccgactgatgtcaaagctaccagcgtgtcagtgagcgaaatcctggtggcctggaagcacataaaggagtcactggggagacctcagggttttgaagtcggttattggaaggatatggaacaggaggatactgcggagacagtgaagacaaggggaaatgaaagctttgtgatcctcaccggcctcgaaggcaatactctctaccattttaccgtgcgggcatataacggggctggttatggaccaccatccagtgaggttagcgccacaaccaaaaagtcaccccctagtcaggccccttctaatctgcggtgggagcagcagggcagtcaggtgagtcttggctgggaacctgtgatacctctggccaatgagtccgaagtggtgggctacaaggttttttatcgccaggagggtcactccaacagccaggtgatcgaaactcagaaattacaggccgttgtaccgcttcctgatgccggtgtttacattattgaggtgagagcatactctgagggaggagacggcaccgcctcttcacagatccgggtgccgtcctacagcggagggaagattactagcgcacagtccacgctgcactcactgagcacctcctcctcatcagtgacactcttgctggctctcatgatcccatcaacaagctggtag

SEQ ID NO: 86106 - DNA, 3303 bp, Artificial Sequence
  derived and/or modified sequence
atggcttcctcttggaaactaatgctgtttctgtcagtcaccatgtgtctttcagagtattcaaaatctcttcctggtctctccacttcatatgctgctttgttaagaattaagaagagttcatcttcatctctctttggttccaaaaccagaccacgatacagcagcccttcattaggaacactgagtgcttcttcacccagctggctaggggcagctcagaattattattcccccatcaatctttatcattcctcagatgccttcaaacaagatgaaagtgtggactatgggccagtttttgtgcaagaaccagatgatattatttttccaactgattctgatgaaaagaaggtagcattgaattgtgaagttcgtggcaatccagttcccagttacagatggcttcgaaatggaacagaaatagatctggaaagtgattatcgctacagtttgatagatggcaccttcattataagcaatccaagtgaagcaaaggattctggtcattatcagtgtttagcaaccaacactgtggggagtattcttagtagagaagctacactgcagtttgcctatctgggaaattttagtggccggacaagaagtgcagtctctgtgagggaaggccagggtgtcgttctgatgtgctctcctccgccacattcaccagagatcatctatagctgggtatttaatgagttcccttcctttgtggcggaagacagccggcggttcatctcccaggagacaggcaacctttatatttctaaagtccaaacatcagatgttggcagctatatttgtctggtgaaaaacacagtgacgaatgctagagtccttagtcctccaacgccactcactctgcgtaatgatggtgtgatgggagaatatgagccgaaaattgaggtccattttcctttcacggttacagctgctaaaggaacaactgttaagatggaatgctttgcacttggcaaccccgttccaacaatcacatggatgaaggttaatggttatattcctagtaaggcacgtctgcggaaatctcaggcggtgctggaaataccgaatgtacagctggatgatgcaggcatttatgagtgcagagctgaaaactcacgtggaaaaaattcctttcgtggacaattacaagtatacacctacccacactgggtagaaaaactgaatgatactcagttagacagtgggagccctctccgatgggaatgtaaggctactggaaaacccagacccacgtatcgttggctgaagaatggagtacccctctcacctcagagtagggttgagatggttaatggagtattgatgatccacaatgtgaatcaatcagatgctggaatgtatcagtgtttggctgaaaataagtatggagccatttacgctagtgctgagctgaagattctagcttcagctcccacttttgcactgaatcaactgaagaaaacaataattgttaccaaagaccaagaagttgtcatagagtgcaaaccccaaggctctccaaaaccaaccatctcttggaagaaaggagacagagcagttagagaaaacaaaagaatagctattcttccagacgggagtctacggatcctaaatgcttccaaatcagacgagggaaagtacgtttgccgaggggaaaacgtctttggttctgctgaaattatagcttcgctatctgtaaaagaacctacaaggatagaacttactcctaaaagaacagaattgacagtgggagaaagcattgtccttaattgcaaagcaattcacgatgctagtttggatgtcactttctactggactctgaaaggacagcctattgatttcgaggaagagggtggacattttgaaagcatcagggcccaagcatcctctgcagatttaatgatcaggaacatccttctgatgcatgctgggagatatggctgcagggtacagaccacagcagacagtgtgtcagatgaggcagaacttcttgttaggggacccccaggcccacctgggatagtaattgttgaggaaataaccgaaagtacggccacactgtcctggagcccagcagctgacaaccacagcccaatctcctcctacaaccttcaagctcgcagcccattttccctgggctggcaaacagtaaagacagtcccagaaatcataacaggggacatggagtcagccatggctgtggacctaaatccctgggtggaatatgaatttcgagtggtagccaccaaccctattgggacaggagatccaagcaccccatctcgaatgatccgcacaaatgaagcagttccgaagacagcacccaccaatgtaagcggaagaagtggaagaaggcatgagttagtcattgcctgggagccagtatctgaagagtttcagaatggggaaggcttcggctatattgtggctttcagacccaatggaacacgtggctggaaggaaaaaatggtgacatcctctgaagcttccaaattcatttatcgagatgaaagtgtccctcctcttactccctttgaagtgaaagttggcgtttataacaataaaggagatgggccttttagtcaaattgtggtcatctgttcagctgaaggagaacccagtgctgctcccacagatgtcaaggcgacaagtgtgtctgtgtcagagattcttgttgcatggaaacacattaaagagagtctaggaagaccacagggatttgaggttggttactggaaagacatggaacaggaagatacagcagaaacagtcaaaactagagggaatgagtctttcgtcatcctaacaggattagaaggaaatacgttatatcacttcacagtgagggcttacaatggagctggatatgggccacctagcagtgaagtgagtgcaaccaccaagaaatcccctcctagtcaagcacctagcaacctcaggtgggagcagcaaggctctcaggtttctctgggctgggaacccgtcataccattagccaacgaatctgaagttgtgggttacaaggttttttataggcaagagggtcacagcaacagccaagttattgaaacacagaaacttcaagcagtagtaccactcccagatgctggagtctatattattgaagttcgagcatatagtgaaggaggagatggaacagctagttctcaaattagggtaccatcatattcaggtggaaaaatcacaagtgcacagtcgacccttcactctctctccacatcttcgtcatcagtcaccttgctcttggcattgatgattccttcaacttcctggtga

SEQ ID NO: 86107 - DNA, 6258 bp, Artificial Sequence
  derived and/or modified sequence
gaactgtgctgatgggcaggaggatgggagacaggaattgagagtcacagaggaaggacagtggagtctggcatcttattggtgtctttaaaggattgccatttaatgccattcaagatctactaagcatcatttttgcatgactactgcaaaaggattactttacagataccagttcctttgtcaagagcatactttggaccctgttttcagaaagcagggcactctttaatgaagaaacaccagagctgttaaacacattgagacacagaagattctagtgactgaggatggcttcctcttggaaactaatgctgtttctgtcagtcaccatgtgtctttcagagtattcaaaatctcttcctggtctctccacttcatatgctgctttgttaagaattaagaagagttcatcttcatctctctttggttccaaaaccagaccacgatacagcagcccttcattaggaacactgagtgcttcttcacccagctggctaggggcagctcagaattattattcccccatcaatctttatcattcctcagatgccttcaaacaagatgaaagtgtggactatgggccagtttttgtgcaagaaccagatgatattatttttccaactgattctgatgaaaagaaggtagcattgaattgtgaagttcgtggcaatccagttcccagttacagatggcttcgaaatggaacagaaatagatctggaaagtgattatcgctacagtttgatagatggcaccttcattataagcaatccaagtgaagcaaaggattctggtcattatcagtgtttagcaaccaacactgtggggagtattcttagtagagaagctacactgcagtttgcctatctgggaaattttagtggccggacaagaagtgcagtctctgtgagggaaggccagggtgtcgttctgatgtgctctcctccgccacattcaccagagatcatctatagctgggtatttaatgagttcccttcctttgtggcggaagacagccggcggttcatctcccaggagacaggcaacctttatatttctaaagtccaaacatcagatgttggcagctatatttgtctggtgaaaaacacagtgacgaatgctagagtccttagtcctccaacgccactcactctgcgtaatgatggtgtgatgggagaatatgagccgaaaattgaggtccattttcctttcacggttacagctgctaaaggaacaactgttaagatggaatgctttgcacttggcaaccccgttccaacaatcacatggatgaaggttaatggttatattcctagtaaggcacgtctgcggaaatctcaggcggtgctggaaataccgaatgtacagctggatgatgcaggcatttatgagtgcagagctgaaaactcacgtggaaaaaattcctttcgtggacaattacaagtatacacctacccacactgggtagaaaaactgaatgatactcagttagacagtgggagccctctccgatgggaatgtaaggctactggaaaacccagacccacgtatcgttggctgaagaatggagtacccctctcacctcagagtagggttgagatggttaatggagtattgatgatccacaatgtgaatcaatcagatgctggaatgtatcagtgtttggctgaaaataagtatggagccatttacgctagtgctgagctgaagattctagcttcagctcccacttttgcactgaatcaactgaagaaaacaataattgttaccaaagaccaagaagttgtcatagagtgcaaaccccaaggctctccaaaaccaaccatctcttggaagaaaggagacagagcagttagagaaaacaaaagaatagctattcttccagacgggagtctacggatcctaaatgcttccaaatcagacgagggaaagtacgtttgccgaggggaaaacgtctttggttctgctgaaattatagcttcgctatctgtaaaagaacctacaaggatagaacttactcctaaaagaacagaattgacagtgggagaaagcattgtccttaattgcaaagcaattcacgatgctagtttggatgtcactttctactggactctgaaaggacagcctattgatttcgaggaagagggtggacattttgaaagcatcagggcccaagcatcctctgcagatttaatgatcaggaacatccttctgatgcatgctgggagatatggctgcagggtacagaccacagcagacagtgtgtcagatgaggcagaacttcttgttaggggacccccaggcccacctgggatagtaattgttgaggaaataaccgaaagtacggccacactgtcctggagcccagcagctgacaaccacagcccaatctcctcctacaaccttcaagctcgcagcccattttccctgggctggcaaacagtaaagacagtcccagaaatcataacaggggacatggagtcagccatggctgtggacctaaatccctgggtggaatatgaatttcgagtggtagccaccaaccctattgggacaggagatccaagcaccccatctcgaatgatccgcacaaatgaagcagttccgaagacagcacccaccaatgtaagcggaagaagtggaagaaggcatgagttagtcattgcctgggagccagtatctgaagagtttcagaatggggaaggcttcggctatattgtggctttcagacccaatggaacacgtggctggaaggaaaaaatggtgacatcctctgaagcttccaaattcatttatcgagatgaaagtgtccctcctcttactccctttgaagtgaaagttggcgtttataacaataaaggagatgggccttttagtcaaattgtggtcatctgttcagctgaaggagaacccagtgctgctcccacagatgtcaaggcgacaagtgtgtctgtgtcagagattcttgttgcatggaaacacattaaagagagtctaggaagaccacagggatttgaggttggttactggaaagacatggaacaggaagatacagcagaaacagtcaaaactagagggaatgagtctttcgtcatcctaacaggattagaaggaaatacgttatatcacttcacagtgagggcttacaatggagctggatatgggccacctagcagtgaagtgagtgcaaccaccaagaaatcccctcctagtcaagcacctagcaacctcaggtgggagcagcaaggctctcaggtttctctgggctgggaacccgtcataccattagccaacgaatctgaagttgtgggttacaaggttttttataggcaagagggtcacagcaacagccaagttattgaaacacagaaacttcaagcagtagtaccactcccagatgctggagtctatattattgaagttcgagcatatagtgaaggaggagatggaacagctagttctcaaattagggtaccatcatattcaggtggaaaaatcacaagtgcacagtcgacccttcactctctctccacatcttcgtcatcagtcaccttgctcttggcattgatgattccttcaacttcctggtgaaaactgctgacttaatttgcttttgtttgctttagcttggtaacagcggtgaatagagtgtagtgtaagtggagaaccaggatcctgagatgagcttgagctttaaaaacttgggactatacatggtgaacttacaggaggttaggggggaaatattacttatccatcaggtttctctttggtttttgtaaacggagaggacagttcttagtccagtaaaaatatgcagattgtatgtaatgaatttttgtaaacaaaggtaatttctgtcaaatgtattctttacttttttaatatgttgggattttattttatatctgatgactccgagtgtgtgccatccatttgttaagtaactggcctttagcagatctgtttcaaaaacaaatacaaaaatgagaatgaaaagtttgcttaagactaagtccagtgtttttcattttccctttggctgaatatttcaattgacaaaccagcaggacatatgaaaaatgcttcagtgatgtggtccattataagataagtacacaaaaattttcttgaaaaatattgtatgattgcatagtgaaatagcaagatttgtcaatatgctattctatatgcacccctagagcaagtcattagggtagggaataagccatttacattagtgcaagatagaaagcgagtccagatgaatttcagtgctatagtttttcataaagtactatgttatctagcagcaaatataataaatatttatttttaataacaaaagatggtttaacatcaccaaaaaatatgatcactaaaaactgcagacatgctggcatgggtgctaacttaaaaatgagatgaatatgggacagagcgtttccatttctttacctactgccaaaacagatgttgaattaggtccaaggttttcttctaattgcaaaattttgcaaaaattttaagggcaatgaaaatttgttgtgcaaataattatgcatagtctgtagattaaaatggttcaagtataacaaataagttttgatttttaaaaacagttccatgcatcacataccactgataaaatcaactagtaaaataaagacagtctttcttggataaattgaatttttaattaagctgtggaaacatggcatcagtacagggattcagctagtctagccagctatgcactgtttgattctgtggcttgggaagtaatccttatttgctatttcaaagagtcatcttgagcctgagagatcctagagagttgttggaaaatgagatgaaaattttctacttgatgatatcttaaagaagttctaacaagcacaagaatgtgccagagttggcatcatacccatgaagatgcgtgaaaggatagttattgcaaagtcatatgccagagaagagcctggagaaactatggttttataggcgatgttaacaagagaacaaaaattggttttataattttatataatttaaacttgttaactgtatttgcttcattaataacaagcaaaatgaaacaatatggagctcaaattgctagctctcaaggttaatccttgtagaatcagagaagtgattgaagtttctgttctgaacatcctgaaagaatagtttcagagccacagtaaaagtctgtatgtaggttacatattctctttggggaaatgatgtaagacaccctaaacaaacaagaaattagttaaaagactcactcaatgatattatagtaaatactacagatggtaagtatttaagcctgtaagtaagtaattatgaccaagtggcctttcttgaacgcctcctttaaagtgggagaggctggactttgcaaaaacagggatgctaattgtttagctggcaaaacatgagctctcccaagtatagtttacctttatgaattgtgcatctgaataaaagacagaaagaatatttttaatgcaaaataattttacgtatttcatgaatcaagccattttcttcattttccatggtggtgtacaccagatttagtgaaggactttaagaatcaacttcttacttacactctcagaaagcaaagcccagtaaaatattaaacaaataaaatggcaaatttaaattaaccaatatttttaattagctgatggatggtacgtatctgacagagtatttacacatatagaatgtctgatgtattcttacaggaatcagagatatggaatgtttttacttaacatacacagaatatgtattttgcatcataaacctatttaaaaaacaggttttcaatgtttatgtacttatgtgctgcatatctgttactttgtagaaaccagaagagcattcttatcaaggtacattatttttcagctacagtactgagttttttctgctatgggatagtaaccacagtcttaaatcactaaagagactgtatttttgtataatgtccattgaatatgaagaaagcaacagtccttataattagaaatttcatgaaagcaaaagttttgcatacccaaatgaaggtactgtggaccccatgtcaaactgttaaatatattgtgtacgatctgtatatatactatatataaggcatataccgtgtggaaggcacagtcaaataatagttctgtgtactgttcttgtaacattagatctttttaataaataattctctttttattgactttta

SEQ ID NO: 86108 - DNA, 3800 bp, Artificial Sequence
  derived and/or modified sequence
gaactgtgctgatgggcaggaggatgggagacaggaattgagagtcacagaggaaggacagtggagtctggcatcttattgggcactctttaatgaagaaacaccagagctgttaaacacattgagacacagaagattctagtgactgaggatggcttcctcttggaaactaatgctgtttctgtcagtcaccatgtgtctttcagagtattcaaaatctcttcctggtctctccacttcatatgctgctttgttaagaattaagaagagttcatcttcatctctctttggttccaaaaccagaccacgatacagcagcccttcattaggaacactgagtgcttcttcacccagctggctaggggcagctcagaattattattcccccatcaatctttatcattcctcagatgccttcaaacaagatgaaagtgtggactatgggccagtttttgtgcaagaaccagatgatattatttttccaactgattctgatgaaaagaaggtagcattgaattgtgaagttcgtggcaatccagttcccagttacagatggcttcgaaatggaacagaaatagatctggaaagtgattatcgctacagtttgatagatggcaccttcattataagcaatccaagtgaagcaaaggattctggtcattatcagtgtttagcaaccaacactgtggggagtattcttagtagagaagctacactgcagtttgcctatctgggaaattttagtggccggacaagaagtgcagtctctgtgagggaaggccagggtgtcgttctgatgtgctctcctccgccacattcaccagagatcatctatagctgggtatttaatgagttcccttcctttgtggcggaagacagccggcggttcatctcccaggagacaggcaacctttatatttctaaagtccaaacatcagatgttggcagctatatttgtctggtgaaaaacacagtgacgaatgctagagtccttagtcctccaacgccactcactctgcgtaatgatggtgtgatgggagaatatgagccgaaaattgaggtccattttcctttcacggttacagctgctaaaggaacaactgttaagatggaatgctttgcacttggcaaccccgttccaacaatcacatggatgaaggttaatggttatattcctagtaaggcacgtctgcggaaatctcaggcggtgctggaaataccgaatgtacagctggatgatgcaggcatttatgagtgcagagctgaaaactcacgtggaaaaaattcctttcgtggacaattacaagtatacacctacccacactgggtagaaaaactgaatgatactcagttagacagtgggagccctctccgatgggaatgtaaggctactggaaaacccagacccacgtatcgttggctgaagaatggagtacccctctcacctcagagtagggttgagatggttaatggagtattgatgatccacaatgtgaatcaatcagatgctggaatgtatcagtgtttggctgaaaataagtatggagccatttacgctagtgctgagctgaagattctagcttcagctcccacttttgcactgaatcaactgaagaaaacaataattgttaccaaagaccaagaagttgtcatagagtgcaaaccccaaggctctccaaaaccaaccatctcttggaagaaaggagacagagcagttagagaaaacaaaagaatagctattcttccagacgggagtctacggatcctaaatgcttccaaatcagacgagggaaagtacgtttgccgaggggaaaacgtctttggttctgctgaaattatagcttcgctatctgtaaaagaacctacaaggatagaacttactcctaaaagaacagaattgacagtgggagaaagcattgtccttaattgcaaagcaattcacgatgctagtttggatgtcactttctactggactctgaaaggacagcctattgatttcgaggaagagggtggacattttgaaagcatcagggcccaagcatcctctgcagatttaatgatcaggaacatccttctgatgcatgctgggagatatggctgcagggtacagaccacagcagacagtgtgtcagatgaggcagaacttcttgttaggggacccccaggcccacctgggatagtaattgttgaggaaataaccgaaagtacggccacactgtcctggagcccagcagctgacaaccacagcccaatctcctcctacaaccttcaagctcgcagcccattttccctgggctggcaaacagtaaagacagtcccagaaatcataacaggggacatggagtcagccatggctgtggacctaaatccctgggtggaatatgaatttcgagtggtagccaccaaccctattgggacaggagatccaagcaccccatctcgaatgatccgcacaaatgaagcagttccgaagacagcacccaccaatgtaagcggaagaagtggaagaaggcatgagttagtcattgcctgggagccagtatctgaagagtttcagaatggggaaggcttcggctatattgtggctttcagacccaatggaacacgtggctggaaggaaaaaatggtgacatcctctgaagcttccaaattcatttatcgagatgaaagtgtccctcctcttactccctttgaagtgaaagttggcgtttataacaataaaggagatgggccttttagtcaaattgtggtcatctgttcagctgaaggagaacccagtgctgctcccacagatgtcaaggcgacaagtgtgtctgtgtcagagattcttgttgcatggaaacacattaaagagagtctaggaagaccacagggatttgaggttggttactggaaagacatggaacaggaagatacagcagaaacagtcaaaactagagggaatgagtctttcgtcatcctaacaggattagaaggaaatacgttatatcacttcacagtgagggcttacaatggagctggatatgggccacctagcagtgaagtgagtgcaaccaccaagaaatcccctcctagtcaagcacctagcaacctcaggtgggagcagcaaggctctcaggtttctctgggctgggaacccgtcataccattagccaacgaatctgaagttgtgggttacaaggttttttataggcaagagggtcacagcaacagccaagttattgaaacacagaaacttcaagcagtagtaccactcccagatgctggagtctatattattgaagttcgagcatatagtgaaggaggagatggaacagctagttctcaaattagggtaccatcatattcaggtggaaaaatcacaagtgcacagtcgacccttcactctctctccacatcttcgtcatcagtcaccttgctcttggcattgatgattccttcaacttcctggtgaaaactgctgacttaatttgcttttgtttgctttagcttggtaacagcggtgaatagagtgtagtgtaagtggagaaccaggatcctgagatgagcttgagctttaaaaacttgggactatacatggtgaacttacaggaggttaggggggaaatattacttatccatcaggtttctctttggtttttgtaaacggagaggacagttcttagtccagtaaaaatatgcagattgtatgtaatgaatttttgtaaacaaaggtaatttctgtcaaatgtattctttacttttttaatatgttgggattttattttatatctgatgactccgagtgtgtgccatccatt

SEQ ID NO: 86109 - DNA, 3303 bp, Artificial Sequence
  derived and/or modified sequence
atggccagcagctggaagctgatgctgttcctgagcgtgaccatgtgcctgagcgagtacagcaagagcctgcccggcctgagcaccagctacgccgccctgctgagaatcaagaagagcagcagcagcagcctgttcggcagcaagaccagacccagatacagcagccccagcctgggcaccctgagcgccagcagccccagctggctgggcgccgcccagaactactacagccccatcaacctgtaccacagcagcgacgccttcaagcaggacgagagcgtggactacggccccgtgttcgtgcaggagcccgacgacatcatcttccccaccgacagcgacgagaagaaggtggccctgaactgcgaggtgagaggcaaccccgtgcccagctacagatggctgagaaacggcaccgagatcgacctggagagcgactacagatacagcctgatcgacggcaccttcatcatcagcaaccccagcgaggccaaggacagcggccactaccagtgcctggccaccaacaccgtgggcagcatcctgagcagagaggccaccctgcagttcgcctacctgggcaacttcagcggcagaaccagaagcgccgtgagcgtgagagagggccagggcgtggtgctgatgtgcagcccccccccccacagccccgagatcatctacagctgggtgttcaacgagttccccagcttcgtggccgaggacagcagaagattcatcagccaggagaccggcaacctgtacatcagcaaggtgcagaccagcgacgtgggcagctacatctgcctggtgaagaacaccgtgaccaacgccagagtgctgagcccccccacccccctgaccctgagaaacgacggcgtgatgggcgagtacgagcccaagatcgaggtgcacttccccttcaccgtgaccgccgccaagggcaccaccgtgaagatggagtgcttcgccctgggcaaccccgtgcccaccatcacctggatgaaggtgaacggctacatccccagcaaggccagactgagaaagagccaggccgtgctggagatccccaacgtgcagctggacgacgccggcatctacgagtgcagagccgagaacagcagaggcaagaacagcttcagaggccagctgcaggtgtacacctacccccactgggtggagaagctgaacgacacccagctggacagcggcagccccctgagatgggagtgcaaggccaccggcaagcccagacccacctacagatggctgaagaacggcgtgcccctgagcccccagagcagagtggagatggtgaacggcgtgctgatgatccacaacgtgaaccagagcgacgccggcatgtaccagtgcctggccgagaacaagtacggcgccatctacgccagcgccgagctgaagatcctggccagcgcccccaccttcgccctgaaccagctgaagaagaccatcatcgtgaccaaggaccaggaggtggtgatcgagtgcaagccccagggcagccccaagcccaccatcagctggaagaagggcgacagagccgtgagagagaacaagagaatcgccatcctgcccgacggcagcctgagaatcctgaacgccagcaagagcgacgagggcaagtacgtgtgcagaggcgagaacgtgttcggcagcgccgagatcatcgccagcctgagcgtgaaggagcccaccagaatcgagctgacccccaagagaaccgagctgaccgtgggcgagagcatcgtgctgaactgcaaggccatccacgacgccagcctggacgtgaccttctactggaccctgaagggccagcccatcgacttcgaggaggagggcggccacttcgagagcatcagagcccaggccagcagcgccgacctgatgatcagaaacatcctgctgatgcacgccggcagatacggctgcagagtgcagaccaccgccgacagcgtgagcgacgaggccgagctgctggtgagaggcccccccggcccccccggcatcgtgatcgtggaggagatcaccgagagcaccgccaccctgagctggagccccgccgccgacaaccacagccccatcagcagctacaacctgcaggccagaagccccttcagcctgggctggcagaccgtgaagaccgtgcccgagatcatcaccggcgacatggagagcgccatggccgtggacctgaacccctgggtggagtacgagttcagagtggtggccaccaaccccatcggcaccggcgaccccagcacccccagcagaatgatcagaaccaacgaggccgtgcccaagaccgcccccaccaacgtgagcggcagaagcggcagaagacacgagctggtgatcgcctgggagcccgtgagcgaggagttccagaacggcgagggcttcggctacatcgtggccttcagacccaacggcaccagaggctggaaggagaagatggtgaccagcagcgaggccagcaagttcatctacagagacgagagcgtgccccccctgacccccttcgaggtgaaggtgggcgtgtacaacaacaagggcgacggccccttcagccagatcgtggtgatctgcagcgccgagggcgagcccagcgccgcccccaccgacgtgaaggccaccagcgtgagcgtgagcgagatcctggtggcctggaagcacatcaaggagagcctgggcagaccccagggcttcgaggtgggctactggaaggacatggagcaggaggacaccgccgagaccgtgaagaccagaggcaacgagagcttcgtgatcctgaccggcctggagggcaacaccctgtaccacttcaccgtgagagcctacaacggcgccggctacggcccccccagcagcgaggtgagcgccaccaccaagaagagcccccccagccaggcccccagcaacctgagatgggagcagcagggcagccaggtgagcctgggctgggagcccgtgatccccctggccaacgagagcgaggtggtgggctacaaggtgttctacagacaggagggccacagcaacagccaggtgatcgagacccagaagctgcaggccgtggtgcccctgcccgacgccggcgtgtacatcatcgaggtgagagcctacagcgagggcggcgacggcaccgccagcagccagatcagagtgcccagctacagcggcggcaagatcaccagcgcccagagcaccctgcacagcctgagcaccagcagcagcagcgtgaccctgctgctggccctgatgatccccagcaccagctggtag

SEQ ID NO: 86110 - protein, 911 aa, Artificial Sequence
  derived and/or modified sequence
MASSWKLMLFLSVTMCLSEYSKSLPGLSTSYAALLRIKKSSSSSLFGSKTRPRYSSPSLGTLSASSPSWLGAAQNYYSPINLYHSSDAFKQDESVDYGPVFVQEPDDIIFPTDSDEKKVALNCEVRGNPVPSYRWLRNGTEIDLESDYRYSLIDGTFIISNPSEAKDSGHYQCLATNTVGSILSREATLQFAYLGNFSGRTRSAVSVREGQGVVLMCSPPPHSPEIIYSWVFNEFPSFVAEDSRRFISQETGNLYISKVQTSDVGSYICLVKNTVTNARVLSPPTPLTLRNDGVMGEYEPKIEVHFPFTVTAAKGTTVKMECFALGNPVPTITWMKVNGYIPSKARLRKSQAVLEIPNVQLDDAGIYECRAENSRGKNSFRGQLQVYTYPHWVEKLNDTQLDSGSPLRWECKATGKPRPTYRWLKNGVPLSPQSRVEMVNGVLMIHNVNQSDAGMYQCLAENKYGAIYASAELKILASAPTFALNQLKKTIIVTKDQEVVIECKPQGSPKPTISWKKGDRAVRENKRIAILPDGSLRILNASKSDEGKYVCRGENVFGSAEIIASLSVKEPTRIELTPKRTELTVGESIVLNCKAIHDASLDVTFYWTLKGQPIDFEEEGGHFESIRAQASSADLMIRNILLMHAGRYGCRVQTTADSVSDEAELLVRGPPGPPGIVIVEEITESTATLSWSPAADNHSPISSYNLQARSPFSLGWQTVKTVPEIITGDMESAMAVDLNPWVEYEFRVVATNPIGTGDPSTPSRMIRTNEAVPKTAPTNVSGRSGRRHELVIAWEPVSEEFQNGEGFGYIVAFRPNGTRGWKEKMVTSSEASKFIYRDESVPPLTPFEVKVGVYNNKGDGPFSQIVVICSAEGEPSAAPTDVKATSVSVSEILVAWKHIKESLGRPQGFEV

SEQ ID NO: 86111 - DNA, 2736 bp, Artificial Sequence
  derived and/or modified sequence
atggcgtcctcctggaagctgatgctctttttatctgtcaccatgtgcctgagtgagtacagcaagtctttgcctggcctatccacatcatacgccgcgctgctgaggattaagaagtcaagcagcagctctctgtttggatcaaaaactaggcctaggtactcatctccatccctgggcaccctgtccgcctcttctccctcctggctcggtgccgcccagaactactactcccctatcaacctctaccacagttccgatgctttcaaacaggacgagagcgtagattacggacctgttttcgtccaggagccggacgatattatattcccaacggacagcgatgagaaaaaagtcgccctcaactgtgaggtgcgcggtaaccctgttcccagctataggtggctcagaaacggcaccgagatagatctggaatctgactaccgttactccttaatcgacggcacctttatcattagtaacccttcagaagcaaaagactccggtcattatcagtgtttggcaaccaacacagttgggtcgattctctcgagggaggcgaccctccaatttgcctacctcggcaatttcagtggccggaccaggtcagctgtgagtgttagggaggggcagggggtggtgctgatgtgtagcccacctcctcatagcccagaaattatctactcatgggtcttcaacgaatttccaagcttcgtcgccgaggactctcgccggtttatttcacaagagaccgggaatctctatatctccaaggtccaaacaagcgacgtgggttcatatatctgcctcgtcaaaaatacagtcaccaatgccagggtcttaagccccccaacccctttgacactgcgcaacgacggtgtcatgggcgagtacgagcctaaaatcgaagtccattttcctttcacggtgacggctgctaaagggacgacggtgaagatggagtgttttgccctggggaacccagtgcctacaataacctggatgaaagttaatggttacataccgtccaaggcaagacttagaaagagtcaggccgtccttgagatacccaacgtccaactggacgacgctgggatttacgaatgtcgtgccgagaatagccggggcaagaactcgttccgcgggcagctgcaagtctatacctacccacattgggtcgagaaactgaacgatacccaactggattccggcagcccgctccgttgggaatgtaaggcaaccggtaagccaaggccaacgtacaggtggctaaagaacggcgtgcctctctccccacagtctcgtgtggagatggtcaatggagtactgatgatccacaatgtaaaccagagcgacgcaggtatgtaccagtgcctggcagagaacaagtatggagccatctatgcatctgcagagctgaagatcttggctagcgcgcccactttcgcactgaaccagctgaagaaaacaataattgtcactaaggaccaggaagtggtgatcgagtgcaaaccccagggcagtcctaagcccacaatctcctggaagaaaggagaccgcgcagtgagagaaaataaaagaatcgccatactacctgacggctctttgaggatcttgaacgctagcaagtccgatgagggtaagtatgtctgtcgaggcgaaaatgtttttgggtcagcagagattatcgcttcactgtccgtcaaggaaccaacacgcatagagctcacacctaaacgcacggagctgactgttggagagagtatagtcctgaactgcaaagcaattcatgacgcttccctggacgtgacattttactggacactgaaaggccagccaattgactttgaagaggagggagggcatttcgagagtattcgggcccaggcatcgtcagccgacctaatgatccggaatatcctgctgatgcacgctggacggtacgggtgtcgagttcaaacaacagctgatagcgtctctgatgaggccgaactgctggtacgaggccctcccggaccaccaggcatagtgatcgtggaggagatcactgagagtacagctacactgagctggagccctgcggcggacaaccacagccctatctcatcttacaatttgcaggctcggagtccattctctcttggctggcaaacagtaaagaccgtgcccgagattatcacgggtgacatggaaagcgcgatggctgtcgatctgaatccctgggtggagtacgagtttcgggttgtggccacaaaccccattggaacgggtgatccaagtactccttcgcggatgatccgcaccaacgaggcagttcccaagaccgctccgacaaacgtgtctgggcggagcggtcgacggcatgaattggttatcgcctgggagcccgtcagcgaagaattccagaatggtgagggcttcggatacatcgtcgcgttccgccctaacgggacccgcggctggaaagagaaaatggtaacttcttccgaggccagtaaattcatctatcgtgatgaaagcgtaccgccccttacaccttttgaggtcaaggtcggtgtttataataacaagggagacggccctttttcccagatcgtcgttatctgctccgcagagggtgagccttcagccgccccgaccgacgtcaaagcaacttccgtcagtgtgtccgaaattcttgtcgcctggaaacacatcaaggaatctctgggcaggccacagggatttgaagtttag

SEQ ID NO: 86112 - DNA, 2736 bp, Artificial Sequence
  derived and/or modified sequence
atggccagctcctggaagctgatgctgttcctgtctgtgaccatgtgcctgtctgagtacagcaagagcctgcccggcctgagcaccagctatgctgccctgctgcgcatcaagaagagcagcagcagcagcctgtttggcagcaagacccggccccgctacagcagccccagcctgggcaccctgagcgccagcagccccagctggctgggcgccgcccagaactactacagccccatcaacctgtaccacagcagtgatgccttcaagcaggatgagagcgtggactatggccctgtgtttgtgcaggagccagatgacatcatcttccccacagacagtgatgagaagaaggtggccctgaactgtgaggtgcggggcaaccctgtgcccagctaccgctggctgagaaatggaacagaaattgacctggagagtgactaccgctacagcctgattgatggcaccttcatcatcagcaaccccagcgaggccaaggacagcggccactaccagtgcctggccaccaacacagtgggcagcatcctgagccgggaggccaccctgcagtttgcctacctgggcaacttcagcggccgcaccaggtctgctgtgtctgtgcgggagggccagggcgtggtgctgatgtgcagccccccaccccacagccctgagatcatctacagctgggtgttcaatgagttccccagctttgtggccgaggacagccgccgcttcatcagccaggagactggaaacctgtacatcagcaaggtgcagaccagtgatgtgggcagctacatctgcctggtgaagaacacagtgaccaatgcccgggtgctgagcccccccacccccctgaccctgagaaatgatggagtgatgggagaatatgagcccaagattgaggtgcacttccccttcaccgtgacagctgccaagggcaccaccgtgaagatggagtgctttgccctgggcaaccctgtgcccaccatcacctggatgaaggtgaatggctacatccccagcaaggcccggctgaggaagagccaggccgtgctggagatccccaacgtgcagctggatgatgctggcatctatgagtgcagagctgagaacagccggggcaagaacagcttccggggccagctgcaggtgtacacctacccccactgggtggagaagctgaatgacacccagctggacagcggcagccccctgcgctgggagtgcaaggccaccgggaagccccggcccacctaccgctggctgaagaatggagtgcccctgagcccccagagccgggtggagatggtgaatggagtgctgatgatccacaacgtgaaccagagtgatgctggcatgtaccagtgcctggccgagaacaagtacggggccatctatgccagcgctgagctgaagatcctggccagcgcccccacctttgccctgaaccagctgaagaagaccatcatcgtgaccaaggaccaggaggtggtgattgagtgcaagccccagggcagccccaagcccaccatctcctggaagaagggggacagagctgtgcgggagaacaagagaattgccatcctgcctgatggcagcctgcgcatcctgaatgccagcaagagtgatgagggcaagtatgtgtgccgcggggagaatgtgtttggatctgctgagatcatcgccagcctgtctgtgaaggagcccacccgcatcgagctgacccccaagaggacagagctgactgtgggggagagcatcgtgctgaactgcaaggccatccatgatgccagcctggatgtgaccttctactggaccctgaagggccagcccatcgactttgaggaggagggcggccactttgagagcatccgggcccaggccagcagcgctgacctgatgatccggaacatcctgctgatgcatgctggccgctatggctgccgggtgcagaccacagctgacagcgtgtctgatgaagctgagctgctggtgcggggccccccaggccccccaggcatcgtcatcgtggaggagatcacagagagcacagccaccctgtcctggagccctgctgctgacaaccacagccccatcagcagctacaacctgcaggcccggagccccttcagcctgggctggcagacagtgaagacagtgcctgagatcatcactggagacatggagagcgccatggctgtggacctgaacccctgggtggagtatgagttccgggtggtggccaccaaccccatcggcaccggggaccccagcacccccagcaggatgatccgcaccaatgaagctgtgcccaagacagcccccaccaacgtgtctggccgcagcggcagaagacatgagctggtgattgcctgggagcctgtgtctgaggagttccagaatggagagggcttcggctacatcgtggccttccggcccaacggcacccggggctggaaggagaagatggtgaccagcagcgaggccagcaagttcatctacagagatgagagcgtgccccccctgaccccatttgaggtgaaggtgggcgtgtacaacaacaagggagatggccccttcagccagatcgtggtgatctgcagcgctgagggggagcccagcgctgcccccacagatgtgaaggccacctctgtgtctgtgtctgagatcctggtggcctggaagcacatcaaggagagcctgggccggccccagggctttgaggtgtag

SEQ ID NO: 86113 - DNA, 2736 bp, Artificial Sequence
  derived and/or modified sequence
atggccagcagctggaagctgatgctgttcctgagcgtgaccatgtgtctgtccgaatactctaagagtctccctggcctcagtacatcctatgcagcgcttctgcgcatcaagaaatcctcgtcgagctcacttttcggtagtaaaactcggccgcgctattcaagcccctctctcggtacattatcagcttcgagcccatcatggttgggcgctgcccagaactattatagcccaatcaatctttaccactccagtgatgctttcaagcaggacgagtcagttgattacgggcccgtatttgttcaggagccagatgacatcatctttcccacggactccgacgagaagaaagtggctcttaactgcgaagtgaggggcaacccggtcccgtcgtacagatggctgcgaaacggcactgagattgatctggaaagtgactatagatactctcttattgacggcacattcatcatttctaaccccagcgaggccaaagattccggccactaccagtgcttggccactaatactgtcgggagtattctaagcagggaggccaccctacagtttgcctacctgggcaattttagcgggcgaacacgcagcgccgtctctgtgcgcgagggtcagggcgtagtgcttatgtgcagtcctcctccacatagccctgagattatctattcttgggtcttcaacgagttcccctcattcgttgccgaggactccaggcgcttcatttcccaggaaactgggaatttatatattagcaaagtgcagacctcggatgttgggtcctacatctgtttggtgaaaaacaccgtgaccaacgcccgcgtactgtctcctccaaccccgcttacccttcgtaatgacggcgtaatgggcgagtacgaaccaaaaattgaagtacatttcccctttacggttacggctgccaagggaacgaccgtgaaaatggagtgttttgctcttggaaaccccgtgcctacgattacctggatgaaggtgaatggatacataccctctaaggcaaggctgcgaaagtcccaggctgttctggaaattcctaatgtccagctcgacgatgcaggcatatacgaatgccgcgcagaaaactctcggggcaaaaattcatttaggggccaactgcaagtttatacctaccctcactgggtagagaaactcaacgacactcaactagactcaggaagcccactcaggtgggaatgtaaagccaccggtaaaccaaggcccacatatagatggctcaagaacggggtgcctctcagcccccagtctagagtggagatggtaaacggcgtcctgatgattcataacgtaaaccagagtgatgccggcatgtatcagtgcctggctgaaaacaagtacggtgcaatttatgcgtccgcagagctaaagatactggcgagcgcaccaacattcgcgctgaatcagctgaagaaaaccatcattgttaccaaagaccaggaggtggtgatcgagtgtaagcctcagggctcccctaagcccactatcagctggaaaaaaggcgatcgggctgttcgggagaacaagcggatagccatactgccagacggctctctgcgcattctgaacgcttccaagagcgacgagggaaaatatgtgtgccgcggagaaaacgtctttggcagcgccgaaatcattgcctcactgtccgtgaaagagcccacacgcattgaactgacccccaaaaggactgaactcacggtgggcgagtccatcgtcctgaactgcaaggcaatccatgatgcttcgctggacgtgactttctattggactctgaaagggcagcccattgattttgaggaagaaggaggccattttgagagcattcgcgctcaggccagctccgctgatctgatgattcgcaatatcctgctcatgcacgcgggccgctatggctgccgcgtgcagacaaccgccgactctgttagcgacgaggccgagttgctggtgcggggcccaccaggacctcccggcatcgttatagttgaggagattacagagagcaccgctaccttgagctggagccctgcggctgataaccattcacccatttcttcttacaacctgcaggctcgctcacctttctcactcggctggcaaactgttaaaacagtacccgaaattatcaccggtgacatggagtccgccatggcagttgatcttaacccatgggtcgaatatgagtttagggtcgtcgcaacaaatccgattgggacgggtgacccctcaacccccagccgcatgatacgtacaaatgaggccgtaccgaagacagcgcctacaaatgtatccggaaggagcgggcgccggcacgagctggtgatagcctgggaaccagtttctgaagaatttcaaaacggagaagggtttggctatatcgtggctttcaggccaaatggaactcgcgggtggaaagaaaagatggtgacgtcatcagaagcttcgaagttcatttatcgcgatgagagtgtccctccactgaccccgtttgaggtgaaagttggagtgtataacaacaagggggacggtccatttagccaaatcgtagtcatctgctcagccgaaggggaaccgtccgcagcccccacagatgttaaggctacttcagttagtgtcagcgagatcttagtggcctggaaacacatcaaagagagtctgggtcggccacaagggttcgaagtgtag

SEQ ID NO: 86114 - DNA, 2736 bp, Artificial Sequence
  derived and/or modified sequence
atggcttcaagctggaagcttatgctgttcctctctgtcactatgtgcctgagcgagtactctaaaagcctccctggtctgagtacatcctacgccgcactgctgagaataaagaaaagctccagcagttcactgtttggatccaaaacaagacctcgctactcaagcccatcgctgggaacactgtccgcctcgagcccatcatggttgggggcagcccagaattattactcaccaattaatctgtatcatagtagcgacgcgttcaagcaggatgaaagcgttgattacggaccggtgttcgtgcaggagcctgatgatatcatctttcctactgacagcgatgagaaaaaagtggctctgaactgtgaagtgaggggcaatcccgtgccttcttatcgctggctgaggaacggaactgagattgaccttgaatctgactatagatactccctgatcgatggtacctttatcatctcaaatccctccgaggctaaggactcagggcactatcagtgtttggctacaaacacagttgggagtatcctctctcgagaggcgacgctccagttcgcatatctgggtaatttttctggaagaacccgcagtgcggtctctgtgcgcgaggggcagggagtggttctcatgtgctctcccccaccacactcaccagagatcatttattcttgggtcttcaatgagttcccgtccttcgtggcagaggattctaggagattcatttcacaggagacaggcaacctgtacatcagcaaagtccaaactagcgacgttggctcatatatatgtctggtgaagaatacggtgacaaacgcgagggtgttgagccctcccacacctctgaccctccgaaatgacggggttatgggcgagtatgaacccaaaatcgaggtgcacttccctttcactgtgactgcggctaaaggcaccactgtaaaaatggagtgtttcgcccttgggaacccagtgcccaccatcacatggatgaaggttaacggctacatcccaagcaaggctcgtcttcgaaagtcccaggctgttctggagattccaaatgtacagttggatgatgctggaatctatgagtgccgtgcagagaactcacgcggaaaaaactctttccgagggcagctccaagtgtacacatatcctcactgggtggagaaactgaatgacacacagctcgatagcggtagcccgcttcgatgggaatgcaaggcgaccggtaaacctaggcccacctaccgatggctgaagaacggcgtcccactctcccctcagtccagagtggagatggtgaacggtgtgctgatgatccacaacgtgaaccagtcagatgcgggaatgtatcaatgccttgctgagaacaaatatggtgctatttacgcctccgctgaactgaagatcctagcttctgctccgacttttgccctcaaccagctcaaaaagactatcatagtgacaaaagaccaggaggtggtgatagagtgcaaaccacagggctcacccaagccaaccatatcttggaagaagggggatagggccgtgagagagaacaagagaatagcgatcctacctgacgggagcctcagaatactgaatgcttctaagtccgacgaaggaaaatacgtctgtaggggggagaatgtgtttggctcagcagagattatcgcatcactgagtgttaaagagcccactaggatcgagctgacccccaaacgtaccgagctcactgttggggagtctatagtcctgaattgtaaggccatccatgatgcatcccttgatgtgactttctattggaccctgaaaggccagcccatagacttcgaggaagaaggcggacacttcgaatcaatcagagcacaggcctccagcgcggacctgatgattcgcaatatcctcctaatgcatgccggtcggtacggatgcagagttcaaactaccgcagatagtgtctctgatgaggctgagttgttggttcgcggacctccaggtcccccaggtattgtgatagtggaggagattaccgagagcaccgcaacactgtcctggagccccgcagctgataatcacagtccaatttcatcttacaacctccaggccagatctcctttctctctggggtggcagaccgttaagacggtgccagagatcatcacgggagacatggaaagcgccatggccgtggatctcaacccttgggtggaatacgagttccgcgttgtggcaaccaatcctatcggtacaggtgacccaagcaccccttcccgcatgatcaggactaatgaggccgtgcccaaaacggcaccaacgaacgtatcgggcaggagcggtcgccgtcatgaattagtgatcgcttgggaacccgtgagcgaagagtttcagaacggcgaaggtttcggatacatcgtggcgtttcgtccaaacggcacgagggggtggaaagagaagatggttacttctagtgaggcatcaaagttcatctacagagacgaaagtgtgcctcctcttaccccattcgaagtaaaggtgggggtgtataataataaaggcgacggacctttcagccagattgtcgtcatttgttcagcggagggcgagcccagcgcagcgccaacagacgtaaaagccacttcagtgagcgtgagcgaaatcctcgttgcatggaaacatatcaaggagagccttgggaggccacagggcttcgaggtgtag

SEQ ID NO: 86115 - DNA, 4303 bp, Artificial Sequence
  derived and/or modified sequence
aattcgcctctgccacaggctgcaaaggacccgaggaaccgctctctctgaactgtgctgatgggcaggaggatgggagacaggaattgagagtcacagaggaaggacagtggagtctggcatcttattggtgtctttaaaggattgccatttaatgccattcaagatctactaagcatcatttttgcatgactactgcaaaaggattactttacagataccagttcctttgtcaagagcatactttggaccctgttttcagaaagcagggcactctttaatgaagaaacaccagagctgttaaacacattgagacacagaagattctagtgactgaggatggcttcctcttggaaactaatgctgtttctgtcagtcaccatgtgtctttcagagtattcaaaatctcttcctggtctctccacttcatatgctgctttgttaagaattaagaagagttcatcttcatctctctttggttccaaaaccagaccacgatacagcagcccttcattaggaacactgagtgcttcttcacccagctggctaggggcagctcagaattattattcccccatcaatctttatcattcctcagatgccttcaaacaagatgaaagtgtggactatgggccagtttttgtgcaagaaccagatgatattatttttccaactgattctgatgaaaagaaggtagcattgaattgtgaagttcgtggcaatccagttcccagttacagatggcttcgaaatggaacagaaatagatctggaaagtgattatcgctacagtttgatagatggcaccttcattataagcaatccaagtgaagcaaaggattctggtcattatcagtgtttagcaaccaacactgtggggagtattcttagtagagaagctacactgcagtttgcctatctgggaaattttagtggccggacaagaagtgcagtctctgtgagggaaggccagggtgtcgttctgatgtgctctcctccgccacattcaccagagatcatctatagctgggtatttaatgagttcccttcctttgtggcggaagacagccggcggttcatctcccaggagacaggcaacctttatatttctaaagtccaaacatcagatgttggcagctatatttgtctggtgaaaaacacagtgacgaatgctagagtccttagtcctccaacgccactcactctgcgtaatgatggtgtgatgggagaatatgagccgaaaattgaggtccattttcctttcacggttacagctgctaaaggaacaactgttaagatggaatgctttgcacttggcaaccccgttccaacaatcacatggatgaaggttaatggttatattcctagtaaggcacgtctgcggaaatctcaggcggtgctggaaataccgaatgtacagctggatgatgcaggcatttatgagtgcagagctgaaaactcacgtggaaaaaattcctttcgtggacaattacaagtatacacctacccacactgggtagaaaaactgaatgatactcagttagacagtgggagccctctccgatgggaatgtaaggctactggaaaacccagacccacgtatcgttggctgaagaatggagtacccctctcacctcagagtagggttgagatggttaatggagtattgatgatccacaatgtgaatcaatcagatgctggaatgtatcagtgtttggctgaaaataagtatggagccatttacgctagtgctgagctgaagattctagcttcagctcccacttttgcactgaatcaactgaagaaaacaataattgttaccaaagaccaagaagttgtcatagagtgcaaaccccaaggctctccaaaaccaaccatctcttggaagaaaggagacagagcagttagagaaaacaaaagaatagctattcttccagacgggagtctacggatcctaaatgcttccaaatcagacgagggaaagtacgtttgccgaggggaaaacgtctttggttctgctgaaattatagcttcgctatctgtaaaagaacctacaaggatagaacttactcctaaaagaacagaattgacagtgggagaaagcattgtccttaattgcaaagcaattcacgatgctagtttggatgtcactttctactggactctgaaaggacagcctattgatttcgaggaagagggtggacattttgaaagcatcagggcccaagcatcctctgcagatttaatgatcaggaacatccttctgatgcatgctgggagatatggctgcagggtacagaccacagcagacagtgtgtcagatgaggcagaacttcttgttaggggacccccaggcccacctgggatagtaattgttgaggaaataaccgaaagtacggccacactgtcctggagcccagcagctgacaaccacagcccaatctcctcctacaaccttcaagctcgcagcccattttccctgggctggcaaacagtaaagacagtcccagaaatcataacaggggacatggagtcagccatggctgtggacctaaatccctgggtggaatatgaatttcgagtggtagccaccaaccctattgggacaggagatccaagcaccccatctcgaatgatccgcacaaatgaagcagttccgaagacagcacccaccaatgtaagcggaagaagtggaagaaggcatgagttagtcattgcctgggagccagtatctgaagagtttcagaatggggaaggcttcggctatattgtggctttcagacccaatggaacacgtggctggaaggaaaaaatggtgacatcctctgaagcttccaaattcatttatcgagatgaaagtgtccctcctcttactccctttgaagtgaaagttggcgtttataacaataaaggagatgggccttttagtcaaattgtggtcatctgttcagctgaaggagaacccagtgctgctcccacagatgtcaaggcgacaagtgtgtctgtgtcagagattcttgttgcatggaaacacattaaagagagtctaggaagaccacagggatttgaggtatgaacagaatgattgaaaataagccttattgtttcttctgacatcacattctcctaaagagaggttttggtgacacctcagaatttcaacagaatttcttagaaattttgctctatgttaaagaaactaagaaatactattttactgggatgtgttatgttgctcattaactggtttatttttcagtacagtagcttccgtagcactatgcaaagatgtttttaaaagatgaaatagagttttagacaaaagcaggagctacaggtagatatttaattgtatccaatttactggtcattttaaaagtttttgtgtcttcctttctaataatttaatgtataaatacaagttttccttttgtactttattggtatctcttaccctcagtgctgaattatcaaattttgcttggaatttaatgatctgtattgtatctatgtattcagatagtttttttggtcccttaaatgttgctatttttaaacatagttattccagccttataatggtgaacatttcatatcaaatgaataacatcaatgaaattttagcctccgcagagaatagcagattgtgagtagtctgtgaacatgaatattttatgataacaaggtttggcttctcacacagctcttgttcttgttcttgccttgcttggccagtcatggagaggaattagggggataatgtctaaaagaaaaaaagaattagcatctgacccaagactttagttgcatttaaaaaaatttattcttacttttcctctgcttcagttcccattaagagaaaatcatcttgtgtcttgaacaatgatcaagtataggacttgtatactaacatggtttccaggctgaaacatatttttaattctatttgagttttcaaataatgcccaacaattatttgattaacatacagctggcattaaataatgatttctatgataaaaaaatttatacaatctttctaagagttacagcaagaacaatttatgggaaaccattacctacttatacaatatcatggacttatttctacaatcttgcttcaattaattatttggaatgataatttagtatctcattatgattgcatgtttaatgtgatgaatatttctgtttctcccaatccatgcttcagggaccatgtttgttcatcattaaatctcagcaaatgataatatatatatttggcccataactgaccacaataaatatgttgaatgaataaa

SEQ ID NO: 86116 - DNA, 2736 bp, Artificial Sequence
  derived and/or modified sequence
atggccagcagctggaagctgatgctgttcctgagcgtgaccatgtgcctgagcgagtacagcaagagcctgcccggcctgagcaccagctacgccgccctgctgagaatcaagaagagcagcagcagcagcctgttcggcagcaagaccagacccagatacagcagccccagcctgggcaccctgagcgccagcagccccagctggctgggcgccgcccagaactactacagccccatcaacctgtaccacagcagcgacgccttcaagcaggacgagagcgtggactacggccccgtgttcgtgcaggagcccgacgacatcatcttccccaccgacagcgacgagaagaaggtggccctgaactgcgaggtgagaggcaaccccgtgcccagctacagatggctgagaaacggcaccgagatcgacctggagagcgactacagatacagcctgatcgacggcaccttcatcatcagcaaccccagcgaggccaaggacagcggccactaccagtgcctggccaccaacaccgtgggcagcatcctgagcagagaggccaccctgcagttcgcctacctgggcaacttcagcggcagaaccagaagcgccgtgagcgtgagagagggccagggcgtggtgctgatgtgcagcccccccccccacagccccgagatcatctacagctgggtgttcaacgagttccccagcttcgtggccgaggacagcagaagattcatcagccaggagaccggcaacctgtacatcagcaaggtgcagaccagcgacgtgggcagctacatctgcctggtgaagaacaccgtgaccaacgccagagtgctgagcccccccacccccctgaccctgagaaacgacggcgtgatgggcgagtacgagcccaagatcgaggtgcacttccccttcaccgtgaccgccgccaagggcaccaccgtgaagatggagtgcttcgccctgggcaaccccgtgcccaccatcacctggatgaaggtgaacggctacatccccagcaaggccagactgagaaagagccaggccgtgctggagatccccaacgtgcagctggacgacgccggcatctacgagtgcagagccgagaacagcagaggcaagaacagcttcagaggccagctgcaggtgtacacctacccccactgggtggagaagctgaacgacacccagctggacagcggcagccccctgagatgggagtgcaaggccaccggcaagcccagacccacctacagatggctgaagaacggcgtgcccctgagcccccagagcagagtggagatggtgaacggcgtgctgatgatccacaacgtgaaccagagcgacgccggcatgtaccagtgcctggccgagaacaagtacggcgccatctacgccagcgccgagctgaagatcctggccagcgcccccaccttcgccctgaaccagctgaagaagaccatcatcgtgaccaaggaccaggaggtggtgatcgagtgcaagccccagggcagccccaagcccaccatcagctggaagaagggcgacagagccgtgagagagaacaagagaatcgccatcctgcccgacggcagcctgagaatcctgaacgccagcaagagcgacgagggcaagtacgtgtgcagaggcgagaacgtgttcggcagcgccgagatcatcgccagcctgagcgtgaaggagcccaccagaatcgagctgacccccaagagaaccgagctgaccgtgggcgagagcatcgtgctgaactgcaaggccatccacgacgccagcctggacgtgaccttctactggaccctgaagggccagcccatcgacttcgaggaggagggcggccacttcgagagcatcagagcccaggccagcagcgccgacctgatgatcagaaacatcctgctgatgcacgccggcagatacggctgcagagtgcagaccaccgccgacagcgtgagcgacgaggccgagctgctggtgagaggcccccccggcccccccggcatcgtgatcgtggaggagatcaccgagagcaccgccaccctgagctggagccccgccgccgacaaccacagccccatcagcagctacaacctgcaggccagaagccccttcagcctgggctggcagaccgtgaagaccgtgcccgagatcatcaccggcgacatggagagcgccatggccgtggacctgaacccctgggtggagtacgagttcagagtggtggccaccaaccccatcggcaccggcgaccccagcacccccagcagaatgatcagaaccaacgaggccgtgcccaagaccgcccccaccaacgtgagcggcagaagcggcagaagacacgagctggtgatcgcctgggagcccgtgagcgaggagttccagaacggcgagggcttcggctacatcgtggccttcagacccaacggcaccagaggctggaaggagaagatggtgaccagcagcgaggccagcaagttcatctacagagacgagagcgtgccccccctgacccccttcgaggtgaaggtgggcgtgtacaacaacaagggcgacggccccttcagccagatcgtggtgatctgcagcgccgagggcgagcccagcgccgcccccaccgacgtgaaggccaccagcgtgagcgtgagcgagatcctggtggcctggaagcacatcaaggagagcctgggcagaccccagggcttcgaggtgtag

SEQ ID NO: 86117 - protein, 570 aa, Artificial Sequence
  derived and/or modified sequence
MESKGASSCRLLFCLLISATVFRPGLGWYTVNSAYGDTIIIPCRLDVPQNLMFGKWKYEKPDGSPVFIAFRSSTKKSVQYDDVPEYKDRLNLSENYTLSISNARISDEKRFVCMLVTEDNVFEAPTIVKVFKQPSKPEIVSKALFLETEQLKKLGDCISEDSYPDGNITWYRNGKVLHPLEGAVVIIFKKEMDPVTQLYTMTSTLEYKTTKADIQMPFTCSVTYYGPSGQKTIHSEQAVFDIYYPTEQVTIQVLPPKNAIKEGDNITLKCLGNGNPPPEEFLFYLPGQPEGIRSSNTYTLTDVRRNATGDYKCSLIDKKSMIASTAITVHYLDLSLNPSGEVTRQIGDALPVSCTISASRNATVVWMKDNIRLRSSPSFSSLHYQDAGNYVCETALQEVEGLKKRESLTLIVEGKPQIKMTKKTDPSGLSKTIICHVEGFPKPAIQWTITGSGSVINQTEESPYINGRYYSKIIISPEENVTLTCTAENQLERTVNSLNVSANENREKVNDQAKLIVGIVVGLLLAALVAGVVYWLYMKKSKTASKHVNKDLGNMEENKKLEENNHKTEA

SEQ ID NO: 86118 - DNA, 1713 bp, Artificial Sequence
  derived and/or modified sequence
atggaaagcaagggagcgagcagctgcagactcttgttttgcctcctgatatcagcgacggtattcaggcccggactgggatggtacaccgttaactcagcgtatggcgatacaatcatcataccctgcaggctggatgtgccccagaatttgatgtttgggaagtggaaatacgagaaacctgatgggagccctgtatttatcgcttttaggagcagtacaaaaaaatccgttcagtacgatgatgtacccgagtataaggatcgtctgaacctgagtgagaattacacactgtccatcagcaatgctaggatatccgatgagaaacgattcgtctgcatgcttgtgacagaagataacgtgttcgaagcccctaccatcgtgaaggtattcaagcagccatctaagccggaaatagtgagcaaggcccttttcttggaaaccgagcagctgaaaaagctgggagattgtatatctgaagatagctatcctgacggaaatattacttggtaccgcaacggcaaagtccttcacccgctagaaggggccgtggttattatctttaaaaaggagatggacccagtaacccagctttataccatgacatcgaccctcgagtacaagaccactaaggcggacatccaaatgccatttacatgttccgtgacttactacggtccaagtgggcaaaaaacaattcacagcgagcaagcggtgtttgatatctattaccccactgagcaagtgacgattcaagtacttcctcccaagaacgctattaaggaaggcgataacattacgcttaagtgcctgggaaacggcaacccgcctcccgaagagtttcttttttatcttccaggacaacctgaagggattcggtctagtaacacgtataccctcaccgacgttcgccgaaacgccaccggcgattataaatgtagccttattgacaaaaagtcaatgattgctagcactgctattactgttcattacttggatctctcattgaatcccagcggagaggttacgcgccagatcggagacgccctgccagttagctgtacaatttccgcctcacgaaacgcaacagtggtctggatgaaagacaacatcaggctgcgaagcagcccaagcttctcttccctgcattatcaagacgccggcaattatgtctgcgaaacagccctccaggaggtcgaggggctgaagaagagagaaagtctgaccctgatcgtcgagggaaaaccccaaataaaaatgactaagaagaccgacccaagtggcctctctaaaactatcatatgtcatgtggaagggttccctaaacctgccattcaatggacaataactggatccggcagtgttatcaatcagacagaggagtcgccatacataaatggtagatactactcaaagattatcatcagtccagaggaaaacgtaaccctcacttgcacagctgagaaccagctagaaagaaccgtcaacagccttaacgtctcagcaaacgaaaaccgcgagaaagtgaacgaccaggctaaactgattgtgggcattgttgtcggactgctccttgccgccctcgtggcaggcgtggtgtattggctctatatgaaaaagtcaaaaaccgcttcaaaacatgtgaataaggatcttggaaatatggaggaaaataagaaacttgaggaaaacaatcataagacagaggcctag

SEQ ID NO: 86119 - DNA, 1713 bp, Artificial Sequence
  derived and/or modified sequence
atggagagcaagggggccagcagctgccgcctgctcttctgcctgctgatcagcgccaccgtcttccggcccggcctgggctggtacacagtgaacagcgcctatggagacaccatcatcatcccctgccgcctggatgtgccccagaacctgatgtttgggaagtggaagtatgagaagccagatggcagccctgtgttcatcgccttccgcagcagcaccaagaagtctgtgcagtatgatgatgtgcctgagtacaaggaccggctgaacctgtctgagaactacaccctgagcatcagcaatgcccgcatcagtgatgagaagagatttgtgtgcatgctggtgacagaggacaacgtgtttgaggcccccaccatcgtgaaggtgttcaagcagcccagcaagccagaaattgtgtccaaggccctcttcctggagacagagcagctgaagaagctgggggactgcatcagcgaggacagctacccagatggcaacatcacctggtacagaaatggcaaggtgctgcaccccctggagggcgctgtggtgatcatcttcaagaaggagatggaccctgtgacccagctgtacaccatgaccagcaccctggagtacaagaccaccaaggctgacatccagatgcccttcacctgcagcgtgacctactacggccccagcggccagaagaccatccacagcgagcaggccgtgtttgacatctactaccccacagagcaggtgaccatccaggtgctgccccccaagaatgccatcaaggagggggacaacatcaccctgaagtgcctgggcaatggaaaccccccacctgaggagttcctgttctacctgcccggccagcctgagggcatccgcagcagcaacacctacaccctgacagatgtgagaagaaatgccaccggggactacaagtgcagcctgattgacaagaagtccatgattgccagcacagccatcaccgtgcactacctggacctgagcctgaaccccagcggggaggtgacccggcagattggagatgccctgcctgtgtcctgcaccatcagcgccagcagaaatgccaccgtggtgtggatgaaggacaacatccggctgcggagcagccccagcttcagcagcctgcactaccaggatgctggcaactacgtgtgtgaaacagccctgcaggaggtggagggcctgaagaagcgggagagcctgaccctgattgtggagggcaagccccagatcaagatgaccaagaagacagaccccagcggcctgagcaagaccatcatctgccacgtggagggcttccccaagccagccatccagtggaccatcaccggcagcggcagcgtcatcaaccagacagaggagagcccctacatcaatggccgctactacagcaagatcatcatcagcccagaagaaaatgtgaccctgacctgcacagctgagaaccagctggagaggacagtgaacagcctgaatgtgtctgccaatgaaaatcgggagaaggtgaatgaccaggccaagctgattgtgggcatcgtggtgggcctgctgctggccgccctggtggccggcgtggtgtactggctgtacatgaagaagagcaagacagccagcaagcacgtgaacaaggacctgggcaacatggaggagaacaagaagctggaggagaacaaccacaagacagaggcctag

SEQ ID NO: 86120 - DNA, 1713 bp, Artificial Sequence
  derived and/or modified sequence
atggagagcaagggcgccagcagctgccggctgctgttctgcctgcttatttctgctacagttttccgccctgggctcgggtggtacactgtgaactccgcctacggcgatactatcatcatcccttgccgactggatgtcccccagaacttgatgtttggcaaatggaaatatgaaaagccagacggctccccagtttttattgcttttcgctcaagcactaagaaaagcgtccagtacgatgacgtcccagagtacaaagaccggctgaatctgtcagaaaactacactttgagcattagcaacgcgcgcatcagcgacgaaaagagattcgtgtgtatgctcgtgacggaagacaacgttttcgaggcacccaccatcgttaaggtgttcaagcagccgtccaaacccgaaattgtaagtaaagctctgtttctggaaaccgagcagctaaagaagctgggggactgtatcagcgaagacagttacccagacggcaatatcacgtggtacaggaatggcaaggtcttgcaccccctggagggcgctgttgtaattatttttaaaaaggaaatggaccccgttacccagctttacaccatgacaagcactctggaatataagaccacgaaagccgatattcagatgccgtttacctgctccgtgacatactatgggccaagcggccagaaaaccattcattcagagcaggccgtgtttgacatctactatccaacagagcaggtgaccatccaggtactgcccccaaagaatgctattaaggagggagataacattacccttaaatgcctgggaaacgggaaccctcccccagaggaattcttgttctacctgccaggtcagccagagggaattcggtcatcaaacacttacactttaacagatgtgcgtcgcaacgctacaggagattataaatgcagcctcattgacaaaaaatcaatgatcgcgagcacagccattaccgtgcactatctcgatctgtccctgaacccctcgggtgaagtgaccagacagattggcgatgcccttccagtcagctgtacaataagcgcttcccgtaatgctaccgtggtgtggatgaaagacaatatccgcctgcggtcgtcgccatccttctcatcactgcactatcaggatgctgggaattacgtctgtgaaacggctttacaagaagttgagggtttgaaaaagcgcgaatcattgaccttgatagttgaaggcaagccacagatcaagatgacaaagaagaccgacccctctggcctgtctaaaaccatcatctgccatgtcgaaggatttcctaagccagccattcaatggactatcactggcagcgggtctgtcatcaatcagacagaggagtccccatatattaatggtaggtattacagcaagatcataattagtccagaagaaaacgtaactctcacctgcaccgccgagaaccagctggaacgcacagtcaattcattgaacgtgtctgcgaacgagaatagagagaaagttaatgaccaggctaaactgattgtgggaattgttgtggggctgctcctcgccgccttggttgcgggagtcgtctactggctctacatgaaaaagtctaaaacagcaagtaagcacgtcaacaaagacctgggcaacatggaggaaaacaaaaagcttgaggagaacaatcacaaaaccgaagcatag

SEQ ID NO: 86121 - DNA, 1713 bp, Artificial Sequence
  derived and/or modified sequence
atggaaagcaaaggcgcttcatcgtgtcgactgttgttctgtttgctcatatccgcaacagtctttcgacccggtctgggctggtatacagtgaatagcgcctatggcgatacaataatcatcccatgtagactagacgtccctcagaacctcatgtttggcaagtggaaatacgaaaagccggatggaagtccagtgttcatagcctttcgctccagcactaaaaagtctgtgcaatacgacgacgtccccgagtataaagatcgcttaaacctctctgagaactacactctttcaatttctaacgctaggatctctgacgaaaagagattcgtttgtatgcttgttaccgaggataacgtgtttgaggcaccaaccatagtgaaggtgttcaaacagcccagcaaaccggagattgtctccaaagccctctttctcgaaaccgagcagcttaagaaactgggcgattgcatttctgaggactcctacccagatgggaatattacctggtacagaaacggtaaggttctgcatcctctggagggtgccgtggtgatcatcttcaagaaggagatggatcctgttacacaactctatactatgacctccactttggaatataagaccaccaaggccgacatccagatgccgtttacctgctccgtcacctactacggtccttcagggcaaaaaaccattcacagcgagcaagctgtcttcgacatctactacccaaccgaacaggtgaccatccaggtgttaccccctaagaatgctataaaggaaggagacaatatcacgttgaagtgcttaggcaacggaaatcccccacctgaagagtttttgttttacttacctggtcaacccgaaggcatcaggtcttcaaatacttacacgcttactgatgtgcggaggaatgccactggcgattataagtgctctctaattgacaaaaagtctatgatcgcgagcaccgcgatcactgttcattacttggacctctcacttaatccctcaggagaggtgacacggcagattggcgacgcactgcccgtcagctgcactattagcgctagtcggaacgctacagtcgtttggatgaaagataacatcagactccgcagtagcccctctttcagttccctccattaccaggatgccggaaactatgtgtgtgaaaccgcgcttcaagaggtcgagggattgaagaagcgtgaaagtctgaccctcatagttgagggaaaaccccaaatcaaaatgacgaaaaagactgacccatccggactgtcaaagacaatcatatgccacgtggagggattcccgaagcccgctattcagtggaccataaccggttccggttccgtgattaatcagacagaggagagtccttatattaatggtcgctactactctaagattatcatctccccagaagagaatgttaccctcacatgtaccgcagaaaatcagttagagaggacagtcaactccctgaacgtgtcagctaatgaaaatcgggaaaaagttaacgatcaggcaaaactcatcgtgggcattgtcgtcggactcctcttggctgctcttgtcgccggagtggtgtattggctgtatatgaaaaaatctaagaccgcttccaagcacgtgaataaagatctgggcaacatggaggaaaataaaaaacttgaagagaataaccacaagactgaagcttag

SEQ ID NO: 86122 - DNA, 4189 bp, Artificial Sequence
  derived and/or modified sequence
gcccgggacgacgccccctcctgcggcgtggactccgtcagtggcccaccaagaaggaggaggaatatggaatccaagggggccagttcctgccgtctgctcttctgcctcttgatctccgccaccgtcttcaggccaggccttggatggtatactgtaaattcagcatatggagataccattatcataccttgccgacttgacgtacctcagaatctcatgtttggcaaatggaaatatgaaaagcccgatggctccccagtatttattgccttcagatcctctacaaagaaaagtgtgcagtacgacgatgtaccagaatacaaagacagattgaacctctcagaaaactacactttgtctatcagtaatgcaaggatcagtgatgaaaagagatttgtgtgcatgctagtaactgaggacaacgtgtttgaggcacctacaatagtcaaggtgttcaagcaaccatctaaacctgaaattgtaagcaaagcactgtttctcgaaacagagcagctaaaaaagttgggtgactgcatttcagaagacagttatccagatggcaatatcacatggtacaggaatggaaaagtgctacatccccttgaaggagcggtggtcataatttttaaaaaggaaatggacccagtgactcagctctataccatgacttccaccctggagtacaagacaaccaaggctgacatacaaatgccattcacctgctcggtgacatattatggaccatctggccagaaaacaattcattctgaacaggcagtatttgatatttactatcctacagagcaggtgacaatacaagtgctgccaccaaaaaatgccatcaaagaaggggataacatcactcttaaatgcttagggaatggcaaccctcccccagaggaatttttgttttacttaccaggacagcccgaaggaataagaagctcaaatacttacacactgacggatgtgaggcgcaatgcaacaggagactacaagtgttccctgatagacaaaaaaagcatgattgcttcaacagctatcacagttcactatttggatttgtccttaaacccaagtggagaagtgactagacagattggtgatgccctacccgtgtcatgcacaatatctgctagcaggaatgcaactgtggtatggatgaaagataacatcaggcttcgatctagcccgtcattttctagtcttcattatcaggatgctggaaactatgtctgcgaaactgctctgcaggaggttgaaggactaaagaaaagagagtcattgactctcattgtagaaggcaaacctcaaataaaaatgacaaagaaaactgatcccagtggactatctaaaacaataatctgccatgtggaaggttttccaaagccagccattcaatggacaattactggcagtggaagcgtcataaaccaaacagaggaatctccttatattaatggcaggtattatagtaaaattatcatttcccctgaagagaatgttacattaacttgcacagcagaaaaccaactggagagaacagtaaactccttgaatgtctctgctaatgaaaacagagaaaaggtgaatgaccaggcaaaactaattgtgggaatcgttgttggtctcctccttgctgcccttgttgctggtgtcgtctactggctgtacatgaagaagtcaaagactgcatcaaaacatgtaaacaaggacctcggtaatatggaagaaaacaaaaagttagaagaaaacaatcacaaaactgaagcctaagagagaaactgtcctagttgtccagagataaaaatcatatagaccaattgaagcatgaacgtggattgtatttaagacataaacaaagacattgacagcaattcatggttcaagtattaagcagttcattctaccaagctgtcacaggttttcagagaattatctcaagtaaaacaaatgaaatttaattacaaacaataagaacaagttttggcagccatgataataggtcatatgttgtgtttggttcaattttttttccgtaaatgtctgcactgaggatttctttttggtttgccttttatgtaaattttttacgtagctatttttatacactgtaagctttgttctgggagttgctgttaatctgatgtataatgtaatgtttttatttcaattgtttatatggataatctgagcaggtacatttctgattctgattgctatcagcaatgccccaaactttctcataagcacctaaaacccaaaggtggcagcttgtgaagattggggacactcatattgccctaattaaaaactgtgatttttatcacaagggaggggaggccgagagtcagactgatagacaccataggagccgactctttgatatgccaccagcgaactctcagaaataaatcacagatgcatatagacacacatacataatggtactcccaaactgacaattttacctattctgaaaaagacataaaacagaatttggtagcacttacctctacagacacctgctaataaattattttctgtcaaaagaaaaaacacaagcatgtgtgagagacagtttggaaaaatcatggtcaacattcccattttcatagatcacaatgtaaatcactataattacaaattggtgttaaatcctttgggttatccactgccttaaaattatacctatttcatgtttaaaaagatatcaatcagaattggagtttttaacagtggtcattatcaaagctgtgttattttccacagaatatagaatatatatttttttcgtgtgtgtttttgttaactaccctacagatattgaatgcaccttgagataatttagtgtttttaactgatacataatttatcaagcagtacatgaaagtgtaataataaaatgtctatgtatctttagttacattcaaatttgtaactttataaacatgttttatgcttgaggaaatttttaaggtggtagtataaatggaaactttttgaagtagaccagatatgggctacttgtgactagacttttaaactttgctctttcaagcagaagcctggtttctgggagaacactgcacagcgatttctttcccaggatttacacaactttaaagggaagataaatgaacatcagatttctaggtatagaactatgttattgaaaggaaaaggaaaactggtgtttgtttcttagactcatgaaataaaaaattatgaaggcaatgaaaaataaattgaaaattaaagtcagatgagaataggaataatactttgccacttctgcattatttagaaacatacgttattgtacatttgtaaaccatttactgtctgggcaatagtgactccgtttaataaaagcttccgtagtgcattggtatggattaaatgcataaaatattcttagactcgatgctgtataaaatattatgggaaaaaaagaaaatacgttattttgcctctaaacttttattgaagttttatttggcaggaaaaaaaattgaatcttggtcaacatttaaaccaaagtaaaaggggaaaaaccaaagttatttgttttgcatggctaagccattctgttatctctgtaaatactgtgatttcttttttattttctctttagaattttgttaaagaaattctaaaatttttaaacacctgctctccacaataaatcacaaacactaaaataaaattacttccatataaatattattttctcttttggtgtgggagatcaaaggtttaaagtctaacttctaagatatatttgcagaaagaagcaacatgacaatagagagagttatgctacaattatttcttggtttccacttgcaatggttaattaagtccaaaaacagctgtcagaacctcgagagcagaacatgagaaactcagagctctggaccgaaagcagaaagtttgccgggaaaaaaaaagacaacattattaccatcgattcagtgcctggataaagaggaaagcttacttgtttaatggcagccacatgcacgaagatgctaagaagaaaaagaattccaaatcctcaacttttgaggtttcggctctccaatttaactctttggcaacaggaaacaggttttgcaagttcaaggttcactccctatatgtgattataggaattgtttgtggaaatggattaacatacccg

SEQ ID NO: 86123 - DNA, 1713 bp, Artificial Sequence
  derived and/or modified sequence
atggagagcaagggcgccagcagctgcagactgctgttctgcctgctgatcagcgccaccgtgttcagacccggcctgggctggtacaccgtgaacagcgcctacggcgacaccatcatcatcccctgcagactggacgtgccccagaacctgatgttcggcaagtggaagtacgagaagcccgacggcagccccgtgttcatcgccttcagaagcagcaccaagaagagcgtgcagtacgacgacgtgcccgagtacaaggacagactgaacctgagcgagaactacaccctgagcatcagcaacgccagaatcagcgacgagaagagattcgtgtgcatgctggtgaccgaggacaacgtgttcgaggcccccaccatcgtgaaggtgttcaagcagcccagcaagcccgagatcgtgagcaaggccctgttcctggagaccgagcagctgaagaagctgggcgactgcatcagcgaggacagctaccccgacggcaacatcacctggtacagaaacggcaaggtgctgcaccccctggagggcgccgtggtgatcatcttcaagaaggagatggaccccgtgacccagctgtacaccatgaccagcaccctggagtacaagaccaccaaggccgacatccagatgcccttcacctgcagcgtgacctactacggccccagcggccagaagaccatccacagcgagcaggccgtgttcgacatctactaccccaccgagcaggtgaccatccaggtgctgccccccaagaacgccatcaaggagggcgacaacatcaccctgaagtgcctgggcaacggcaaccccccccccgaggagttcctgttctacctgcccggccagcccgagggcatcagaagcagcaacacctacaccctgaccgacgtgagaagaaacgccaccggcgactacaagtgcagcctgatcgacaagaagagcatgatcgccagcaccgccatcaccgtgcactacctggacctgagcctgaaccccagcggcgaggtgaccagacagatcggcgacgccctgcccgtgagctgcaccatcagcgccagcagaaacgccaccgtggtgtggatgaaggacaacatcagactgagaagcagccccagcttcagcagcctgcactaccaggacgccggcaactacgtgtgcgagaccgccctgcaggaggtggagggcctgaagaagagagagagcctgaccctgatcgtggagggcaagccccagatcaagatgaccaagaagaccgaccccagcggcctgagcaagaccatcatctgccacgtggagggcttccccaagcccgccatccagtggaccatcaccggcagcggcagcgtgatcaaccagaccgaggagagcccctacatcaacggcagatactacagcaagatcatcatcagccccgaggagaacgtgaccctgacctgcaccgccgagaaccagctggagagaaccgtgaacagcctgaacgtgagcgccaacgagaacagagagaaggtgaacgaccaggccaagctgatcgtgggcatcgtggtgggcctgctgctggccgccctggtggccggcgtggtgtactggctgtacatgaagaagagcaagaccgccagcaagcacgtgaacaaggacctgggcaacatggaggagaacaagaagctggaggagaacaaccacaagaccgaggcctag

SEQ ID NO: 86124 - protein, 366 aa, Artificial Sequence
  derived and/or modified sequence
MARTLRPSPLCPGGGKAQLSSASLLGAGLLLQPPTPPPLLLLLFPLLLFSRLCGALAGPIIVEPHVTAVWGKNVSLKCLIEVNETITQISWEKIHGKSSQTVAVHHPQYGFSVQGEYQGRVLFKNYSLNDATITLHNIGFSDSGKYICKAVTFPLGNAQSSTTVTVLVEPTVSLIKGPDSLIDGGNETVAAICIAATGKPVAHIDWEGDLGEMESTTTSFPNETATIISQYKLFPTRFARGRRITCVVKHPALEKDIRYSFILDIQYAPEVSVTGYDGNWFVGRKGVNLKCNADANPPPFKSVWSRLDGQWPDGLLASDNTLHFVHPLTFNYSGVYICKVTNSLGQRSDQKVIYISAYNSVASLNC

SEQ ID NO: 86125 - DNA, 1101 bp, Artificial Sequence
  derived and/or modified sequence
atggctaggaccttgcgaccatcccccctctgcccaggggggggcaaggcccagctctcaagcgcctcccttttgggggctgggctgctactgcagccccccacaccccccccgttactgctgctgctcttcccacttctgctgttctccaggctgtgtggagcactagccggacccatcatcgtagaaccccacgtgaccgccgtgtggggcaagaatgtgtcactgaagtgtctgatagaggtgaacgagaccatcactcagatcagctgggagaaaatccacggaaaatcttctcagacggtcgctgtccaccatccacagtatggtttttcggttcagggagaatatcagggtcgagtgctgttcaaaaattatagcctgaacgatgctaccataactttgcataacatcggattttcggacagcggtaagtacatctgcaaggctgttactttcccactcggaaacgctcagtcttctactacagtgacagtgttggtcgagccaactgtaagcttgatcaaggggcctgactcactcatagacggtggtaatgagacagtagctgctatttgtatcgccgctaccggaaagccagtggcgcatatagactgggagggtgacttgggagaaatggagagcacaactacctccttccccaacgagactgccaccataatcagccagtacaagctgttccccacaaggttcgcgagaggtcggcggataacatgcgtcgtgaagcatcctgccctggaaaaagatattcgctattctttcatcctggacatacagtatgcccctgaggtgtcggtgactggatatgacggcaattggtttgtggggcgcaaaggagtgaatttaaaatgtaatgccgatgccaatccccctccttttaagagtgtgtggtcccgcctggatggtcagtggccggatggacttcttgcctccgacaacaccctccactttgttcatcccctgacgttcaactatagcggagtgtacatttgtaaggttaccaatagtctgggccagaggtctgaccagaaagttatctacatttccgcatacaatagtgtggcaagtctgaactgttag

SEQ ID NO: 86126 - DNA, 1101 bp, Artificial Sequence
  derived and/or modified sequence
atggcccggaccctgcggcccagccccctgtgccctgggggcggcaaggcccagctgagcagcgccagcctgctgggcgccggcctgctgctgcagccccccaccccaccacccctgctgctgctgctcttccccctgctgctcttcagccggctgtgtggggccctggccggccccatcatcgtggagccccacgtgacagctgtgtggggcaagaatgtgtccctgaagtgcctgattgaggtgaatgagaccatcacccagatctcctgggagaagatccacggcaagagcagccagacagtggccgtgcaccacccccagtatggcttctctgtgcagggcgagtaccagggccgggtgctcttcaagaactacagcctgaatgatgccaccatcaccctgcacaacatcggcttcagtgacagcggcaagtacatctgcaaggctgtgaccttccccctgggcaatgcccagagcagcaccaccgtgacagtgctggtggagcccaccgtgtccctcatcaagggccctgacagcctgattgatggcggcaatgagaccgtggccgccatctgcatcgccgccaccgggaagcctgtggcccacatcgactgggagggggacctgggggagatggagagcaccaccaccagcttccccaatgaaacagccaccatcatcagccagtacaagctgttccccaccaggtttgcccggggccgccgcatcacctgtgtggtgaagcacccagccctggagaaggacatccgctacagcttcatcctggacatccagtatgcccctgaggtgtctgtgacaggctatgatggcaactggtttgtgggcaggaaaggagtgaacctgaagtgcaatgctgatgccaaccccccacccttcaagtctgtgtggagccggctggatggccagtggccagatggcctgctggccagtgacaacaccctgcactttgtgcaccccctgaccttcaactacagcggcgtgtacatctgcaaggtgaccaacagcctgggccagaggagtgaccagaaggtgatctacatcagcgcctacaacagcgtggccagcctgaactgctag

SEQ ID NO: 86127 - DNA, 1101 bp, Artificial Sequence
  derived and/or modified sequence
atggcccggaccctgcggcccagccccctgtgccccggcggcggcaaagcgcagctctcatccgcttccctgcttggcgctggattgctcctgcagcctccgactcctcctcctcttctgcttcttctgtttcctctgcttttgttctcccgactgtgtggcgccctggccggcccaatcattgtcgagccacatgtgaccgcagtttggggaaagaacgttagcttaaagtgcttgatcgaggtgaacgagactattacacagatatcctgggagaagatccatggcaagtcttcccagacagtggccgtgcatcacccacagtacgggttcagcgtgcagggcgaataccagggccgggtgctgttcaagaattattctctcaacgacgccacaatcacactgcacaatatcggcttctccgattccggtaagtatatctgtaaggcagtgacgtttcctctgggcaacgctcaaagcagcactaccgtgacggtattagtggagcctacagtttctcttattaaagggcctgattccctcatcgacggagggaatgaaactgtcgcggcgatttgtatcgccgctacagggaagccggtcgcccatattgactgggagggtgatctaggagagatggagtcaactacaacctctttcccaaatgagacggccacaatcatttcccagtacaagctcttccccacgcgatttgccagaggccgaaggatcacctgcgtagtgaaacatcccgctctcgagaaagatatacggtattcgttcatactagatattcaatacgccccagaggttagcgtgactggttacgacggcaattggttcgtaggaagaaagggtgtgaatttgaagtgcaacgcagacgccaatccacctcctttcaaaagcgtgtggagtcggctggacggacagtggcctgatggtctcctggcctccgataatacgcttcactttgtccaccccctgacatttaactactcaggggtatacatctgtaaggttaccaattcccttggtcagcgcagtgaccagaaggtgatttacatcagcgcgtataactccgtcgctagccttaactgctag

SEQ ID NO: 86128 - DNA, 1549 bp, Artificial Sequence
  derived and/or modified sequence
ggccaagtgtcagccggcagcgacggcgctagagctgggagctggggacgcgcgcgccggaccttccacagcctccgcccagagcctgaggcgccggggccgggggagccggggggcgggcgggcgagcgggccggggggagggtgggggatggcgcggaccctgcggccgtccccgctgtgtcctggaggcggcaaagcacaactttcctccgcttctctcctcggagccgggctcctgctgcagcccccgacgccacctccgctgctgctgctgctcttcccgctgctgctcttctccaggctctgtggtgccttagctggaccaattattgtggagccacatgtcacagcagtatggggaaagaatgtttcattaaagtgtttaattgaagtaaatgaaaccataacacagatttcatgggagaagatacatggcaaaagttcacagactgttgcagttcaccatccccaatatggattctctgttcaaggagaatatcagggaagagtcttgtttaaaaattactcacttaatgatgcaacaattactctgcataacataggattctctgattctggaaaatacatctgcaaagctgttacattcccgcttggaaatgcccagtcctctacaactgtaactgtgttagttgaacccactgtgagcctgataaaagggccagattctttaattgatggaggaaatgaaacagtagcagccatttgcatcgcagccactggaaaacccgttgcacatattgactgggaaggtgatcttggtgaaatggaatccactacaacttcttttccaaatgaaacggcaacgattatcagccagtacaagctatttccaaccagatttgctagaggaaggcgaattacttgtgttgtaaaacatccagccttggaaaaggacatccgatactctttcatattagacatacagtatgctcctgaagtttcggtaacaggatatgatggaaattggtttgtaggaagaaaaggtgttaatctcaaatgtaatgctgatgcaaatccaccacccttcaaatctgtgtggagcaggttggatggacaatggcctgatggtttattggcttcagacaatactcttcattttgtccatccattgactttcaattattctggtgtttatatctgtaaagtgaccaattcccttggtcaaagaagtgaccaaaaagtcatctacatttcagcctacaattcagtggcatccctcaactgctgacatcgaggatctagcaacagaacctaaaaaattgcccttcccattgtcaactttggcaacaattaaggatgacacaattgccacgatcattgctagtgtagtgggtggggctctcttcatagtacttgtaagtgttttggctggaatattctgctataggagaagacggacgtttcgtggagactactttgccaagaactacattccaccatcagatatgcaaaaagaatcacaaatagatgttcttcaacaagatgagcttgattcttacccagacagtgtaaaaaaagaaaacaaa

SEQ ID NO: 86129 - DNA, 1101 bp, Artificial Sequence
  derived and/or modified sequence
atggcaagaacactgcggccatccccactgtgtccgggtggaggcaaggctcaactgagtagcgcctcactgctgggagccggattacttctgcaacctcctacaccgcctcctttactgctgctcctatttccgttactgttgttctcgaggctatgcggcgctttggccggtccaatcatcgtagagccccacgttaccgccgtgtgggggaagaacgtcagcctgaagtgcttaattgaggtgaatgaaactataactcagatatcctgggaaaaaattcacggtaagtccagccagactgtcgcagtccaccacccgcagtatggattttccgtacagggcgaataccagggcagagtgttgtttaagaattactcacttaatgacgccacaattactctgcacaacatcggtttttctgattccgggaagtacatttgtaaagccgtcacattccccctgggaaacgcccagagctccacaaccgtgaccgtgttggtcgaaccgactgtgagcctgattaagggccctgactctctgattgatggcggtaatgagacggtagctgcaatctgcatcgcagccacgggcaagccagttgctcacattgactgggagggtgacttaggcgagatggaaagcacgactacttcattcccaaacgaaactgcgaccattatatcccaatataagctgtttccaacacgttttgctagggggagaaggatcacttgtgtagtcaagcatcccgctctcgagaaggatatccgatatagtttcatactggatatacagtacgctccagaggtctccgttacagggtatgatgggaattggttcgtaggacggaagggcgtgaatctgaagtgtaatgcagatgctaatccccctccgtttaagagtgtgtggtctaggctggacggacagtggccggacggacttctcgcttctgataacacactccattttgtgcatcccttgaccttcaattattcaggggtttatatttgtaaggtgactaattctctgggtcaacgctcggaccagaaagtgatctacataagtgcctacaactctgtcgcctcccttaactgctag

SEQ ID NO: 86130 - DNA, 1101 bp, Artificial Sequence
  derived and/or modified sequence
atggccagaaccctgagacccagccccctgtgccccggcggcggcaaggcccagctgagcagcgccagcctgctgggcgccggcctgctgctgcagccccccacccccccccccctgctgctgctgctgttccccctgctgctgttcagcagactgtgcggcgccctggccggccccatcatcgtggagccccacgtgaccgccgtgtggggcaagaacgtgagcctgaagtgcctgatcgaggtgaacgagaccatcacccagatcagctgggagaagatccacggcaagagcagccagaccgtggccgtgcaccacccccagtacggcttcagcgtgcagggcgagtaccagggcagagtgctgttcaagaactacagcctgaacgacgccaccatcaccctgcacaacatcggcttcagcgacagcggcaagtacatctgcaaggccgtgaccttccccctgggcaacgcccagagcagcaccaccgtgaccgtgctggtggagcccaccgtgagcctgatcaagggccccgacagcctgatcgacggcggcaacgagaccgtggccgccatctgcatcgccgccaccggcaagcccgtggcccacatcgactgggagggcgacctgggcgagatggagagcaccaccaccagcttccccaacgagaccgccaccatcatcagccagtacaagctgttccccaccagattcgccagaggcagaagaatcacctgcgtggtgaagcaccccgccctggagaaggacatcagatacagcttcatcctggacatccagtacgcccccgaggtgagcgtgaccggctacgacggcaactggttcgtgggcagaaagggcgtgaacctgaagtgcaacgccgacgccaaccccccccccttcaagagcgtgtggagcagactggacggccagtggcccgacggcctgctggccagcgacaacaccctgcacttcgtgcaccccctgaccttcaactacagcggcgtgtacatctgcaaggtgaccaacagcctgggccagagaagcgaccagaaggtgatctacatcagcgcctacaacagcgtggccagcctgaactgctag

SEQ ID NO: 86131 - DNA, 1464 bp, Artificial Sequence
  derived and/or modified sequence
atggcggagggatggagatggtgtttcgtcagaagaacaccagggttattaagagggccactcctccctaggtctttctccggaaatcctcgcgcactggctgggccaattatcgttgaaccccatgtcaccgctgtgtggggtaaaaatgtgtctctgaagtgcctgattgaggtgaacgagactatcacccagatatcctgggaaaagattcatggcaaatcctcccagaccgtggccgtccatcatccccagtacggcttttctgtgcagggtgagtaccagggccgagttctgtttaaaaattattcactaaatgacgcgacgatcaccctgcacaacatcgggttctccgacagtgggaaatacatctgcaaggccgtgacattcccgcttgggaacgcccagagcagtacgactgtcactgtgctcgtagagcctactgtgagtctgattaaaggtcctgattcgctgattgacggtggcaatgagacagtcgccgcaatttgcatcgcggcaacaggcaaaccagtggcacacatagattgggagggcgacctgggcgagatggagagcaccactacatccttccccaacgagactgctacgataatatcgcagtacaagctgtttcctacacggttcgcacgggggcgtcggatcacatgcgttgtaaaacatcccgccctggaaaaggacatccgatactctttcatccttgatattcagtacgctcctgaagtgtcagtcacagggtacgacggtaactggttcgtgggcaggaaaggtgtgaacttgaagtgcaatgctgacgcaaatccgccacccttcaagagcgtgtggtcgaggttggacggacagtggcccgatggcctgcttgccagcgataacaccctgcacttcgtgcatcctcttacctttaactactctggcgtgtacatctgcaaggtgacaaactctctcggacagcggtctgatcagaaagtgatctatatttccgacgtgcccttcaaacaaacaagcagcatagcggttgccggggccgtaatcggtgctgtactcgcactttttatcatagctatctttgtgaccgtcttgctcacaccgaggaagaagaggccttcatatttagataaggtgattgatctgccccccacccacaaaccacctccgctatacgaggaacgcagtccacctttaccacagaaggacttgtttcagcctgagcatttgcctctgcagacccagttcaaggagcgcgaagtcggcaacttgcagcattccaatggcctcaattcccggtccttcgactatgaagacgaaaaccccgtgggagaggatggaatccaacagatgtatcctctctataaccagatgtgttatcaagatcggagtcccggtaagcaccaccagaataacgatcccaagagggtgtatattgatcccagagaacactacgtgtag

SEQ ID NO: 86132 - DNA, 1464 bp, Artificial Sequence
  derived and/or modified sequence
atggccgagggctggcgctggtgctttgtgcggaggaccccaggcctgctgcggggccccctgctgcccaggagcttcagcggcaacccccgggccctggccggccccatcatcgtggagccccacgtgacagctgtgtggggcaagaatgtgtccctgaagtgcctgattgaggtgaatgagaccatcacccagatctcctgggagaagatccacggcaagagcagccagacagtggccgtgcaccacccccagtatggcttctctgtgcagggcgagtaccagggccgggtgctcttcaagaactacagcctgaatgatgccaccatcaccctgcacaacatcggcttcagtgacagcggcaagtacatctgcaaggctgtgaccttccccctgggcaatgcccagagcagcaccaccgtgacagtgctggtggagcccaccgtgtccctcatcaagggccctgacagcctgattgatggcggcaatgaaacagtggccgccatctgcatcgccgccaccgggaagcctgtggcccacatcgactgggagggggacctgggggagatggagagcaccaccaccagcttccccaatgaaacagccaccatcatcagccagtacaagctgttccccaccaggtttgcccggggccgccgcatcacctgtgtggtgaagcacccagccctggagaaggacatccgctacagcttcatcctggacatccagtatgcccctgaggtgtctgtgacaggctatgatggcaactggtttgtgggcaggaagggcgtgaacctgaagtgcaatgctgatgccaaccccccacccttcaagtctgtgtggagccggctggatggccagtggccagatggcctgctggccagtgacaacaccctgcactttgtgcaccccctgaccttcaactacagcggcgtgtacatctgcaaggtgaccaacagcctgggccagaggagtgaccagaaggtgatctacatcagtgatgtgcccttcaagcagaccagcagcattgctgtggccggggccgtcatcggggctgtgctggccctcttcatcatcgccatctttgtgacagtgctgctgacccccaggaagaagaggcccagctacctggacaaggtgattgacctgccccccacccacaagcccccacccctgtatgaggagaggagcccccccctgccccagaaggacctcttccagcctgagcacctgcccctgcagacccagttcaaggagcgggaggtgggcaacctgcagcacagcaatggcctgaacagccgcagctttgattatgaagatgaaaatcctgtgggggaggatggcatccagcagatgtaccccctgtacaaccagatgtgctaccaggacaggagccctgggaagcaccaccagaacaatgaccccaagagggtgtacatcgacccccgggagcactacgtgtag

SEQ ID NO: 86133 - DNA, 1464 bp, Artificial Sequence
  derived and/or modified sequence
atggccgagggctggcggtggtgcttcgtgcggcggacccccggcctgctaagaggccctctgctgccacggagttttagcgggaacccccgcgccttagcaggccctatcatcgtggaacctcatgtgacagcggtttggggcaagaatgtttccttgaagtgcctgattgaagtgaatgagactatcacccagatctcatgggaaaaaattcatggaaaaagtagtcagactgtggcggtccatcatcctcagtatggattttctgtacagggcgagtaccagggccgggtcctgtttaaaaactacagcctaaacgacgccactatcactctccacaacatcgggttttcagacagcggaaaatacatatgcaaggccgtgacattcccgctcggcaacgctcaaagcagtaccacggtcactgtcttggttgaacccactgtttcactcataaaaggccctgatagcctgatagacgggggaaatgaaaccgtcgccgccatttgtatcgctgccacagggaaacccgtggcccacatagactgggaaggggacctgggagagatggagtccaccactactagtttccccaacgagacagctaccattatctcgcaatacaagctgttcccaacacgcttcgcgcgtggccgaaggatcacatgtgtggtcaagcaccccgcacttgaaaaggatataagatattctttcattctggacatacagtacgcaccggaggtgtccgttaccggttacgatgggaattggttcgtggggaggaaaggagtcaatttgaagtgcaatgcggatgctaacccgccccccttcaaatccgtgtggagcaggctggacggacagtggccagatggactgctggctagcgacaatactctgcattttgtacaccctctcacctttaactattcgggtgtttacatttgtaaggtcactaattcactcggccagcgcagtgaccaaaaggtcatttatatctcagatgtcccattcaagcagacatcctcaatcgcagtggcaggggctgtaatcggcgctgtcctagctcttttcattatcgcgatcttcgttacagtgctcctcacccccagaaaaaagcggccaagctacctcgacaaagttatcgacctgccgccaacccataaaccccctccactgtacgaagaacgcagcccgccccttccacaaaaagacctctttcagccagagcacctcccattacaaacacagttcaaagagagggaggtgggcaatctgcagcacagcaacggacttaactctagaagcttcgattatgaggatgaaaatcccgtgggcgaggacggaatacagcagatgtatcccctatacaaccagatgtgctatcaggaccggtccccaggcaagcaccatcagaacaacgacccaaagcgagtctatatcgaccctagggagcattatgtctag

SEQ ID NO: 86134 - DNA, 1876 bp, Artificial Sequence
  derived and/or modified sequence
aggctctgtggtaggtgaacctcggcggccggcgtgggctgagggagccgccactgagggtgcgggcgccgcggccggctctgccagccgttctctggagcagcgaggcggttggttgtgcgagcgagtgccgaggactttggctggaaacttttcgccgcgcccggggcgaggccctggaagggccaggccagcgaatgctgagccggcggcccgctgccctcccccgcggccgcgcgggtcgccgtgcggatggccgagggttggcgatggtgcttcgtgcgccgaactccgggtttgctccggggaccgttacttcctcgctcattctctgggaaccctcgtgccttagctggaccaattattgtggagccacatgtcacagcagtatggggaaagaatgtttcattaaagtgtttaattgaagtaaatgaaaccataacacagatttcatgggagaagatacatggcaaaagttcacagactgttgcagttcaccatccccaatatggattctctgttcaaggagaatatcagggaagagtcttgtttaaaaattactcacttaatgatgcaacaattactctgcataacataggattctctgattctggaaaatacatctgcaaagctgttacattcccgcttggaaatgcccagtcctctacaactgtaactgtgttagttgaacccactgtgagcctgataaaagggccagattctttaattgatggaggaaatgaaacagtagcagccatttgcatcgcagccactggaaaacccgttgcacatattgactgggaaggtgatcttggtgaaatggaatccactacaacttcttttccaaatgaaacggcaacgattatcagccagtacaagctatttccaaccagatttgctagaggaaggcgaattacttgtgttgtaaaacatccagccttggaaaaggacatccgatactctttcatattagacatacagtatgctcctgaagtttcggtaacaggatatgatggaaattggtttgtaggaagaaaaggtgttaatctcaaatgtaatgctgatgcaaatccaccacccttcaaatctgtgtggagcaggttggatggacaatggcctgatggtttattggcttcagacaatactcttcattttgtccatccattgactttcaattattctggtgtttatatctgtaaagtgaccaattcccttggtcaaagaagtgaccaaaaagtcatctacatttcagatgttccatttaagcagacctcttccatagctgtagctggagcggtaattggagctgttcttgcccttttcatcattgctatctttgtgactgtgctgctgactcctcgaaaaaaaagaccatcctatcttgacaaagtgattgaccttccacccacacataaaccacctcctctgtatgaagaacgatccccacctttgcctcagaaagacctatttcagcctgaacacttgcctttgcagactcagttcaaagaaagagaagttggcaatcttcagcactctaatggactaaatagcaggagttttgactatgaagatgagaatccagttggggaagatggcattcagcagatgtaccccctttacaatcaaatgtgctaccaagaccggagccctggcaaacatcatcaaaataacgaccctaagagagtctacatcgacccacgagaacattatgtgtgatttttctctttttccaatgggcgttctaacaaatgtttattcttagattggggagagaagctaaggccaatagttattttactgtctctcatataagaacagtcccactctaagggtattggaagtcttaatgaatgacgtaaagccaatagcaaatttc

SEQ ID NO: 86135 - DNA, 1464 bp, Artificial Sequence
  derived and/or modified sequence
atggcagaaggctggcgttggtgttttgtgagaaggacgcccggactgttaagaggacccctgcttcctcgtagcttttcaggcaatccgagagccctcgcagggcctatcatcgtggaaccccacgtaactgctgtttgggggaagaacgtgtctcttaagtgtctgatcgaggttaacgaaacaatcactcagatatcttgggagaaaatccacgggaagagctcgcagacagttgccgtgcaccacccgcaatacggattttctgtccaaggtgagtatcagggcagggttctgtttaaaaattattccctcaacgatgcaactataacgctgcacaatataggtttttcagacagcggaaagtatatctgcaaagctgtaacttttccccttggcaatgcacaatccagcactacagtcactgtgcttgttgaacctacggtaagccttatcaagggacctgactcgctgattgatgggggaaacgagacagtagccgctatttgtatcgctgcaaccggaaaaccggtggcccacattgactgggaaggcgacctcggcgaaatggaaagcactacaacatcattccccaacgaaaccgcaacaatcatctcccagtataagttgtttcccacccgattcgctagggggagaaggattacgtgcgtggtgaaacaccccgctctcgagaaggatattagatactccttcatcttggatattcagtatgccccagaggtgtccgtgacagggtatgacggaaattggtttgtaggcaggaagggggtgaacctcaaatgtaatgcagacgctaatccaccaccgtttaaatcagtctggagccgactggacggacaatggccagatggcttgttagcatccgacaacacactgcattttgtgcaccctcttacctttaattattctggagtttatatttgtaaggtaaccaattcactaggccagaggtctgatcagaaagtgatttatattagcgatgtgccgttcaaacagacaagtagcatcgctgttgccggagcagtgatcggagcggtcctagctcttttcattatcgcaatttttgtgaccgttctgctgactccaagaaagaagcgcccaagttacttggacaaagtgattgacttgcctccaacccataagcctcctcctttgtacgaagagagatccccaccacttccccagaaagacttgtttcagcctgagcacctgccccttcagactcagtttaaggagcgggaagtgggcaatttacagcacagcaacggcctgaacagccggtctttcgattacgaagacgagaacccagtgggcgaggacggcatccaacagatgtacccgctctataatcagatgtgctatcaggacagatcacctggcaaacatcaccagaacaacgacccaaagcgagtgtacatcgaccctcgcgagcactacgtgtag

SEQ ID NO: 86136 - DNA, 1464 bp, Artificial Sequence
  derived and/or modified sequence
atggccgagggctggagatggtgcttcgtgagaagaacccccggcctgctgagaggccccctgctgcccagaagcttcagcggcaaccccagagccctggccggccccatcatcgtggagccccacgtgaccgccgtgtggggcaagaacgtgagcctgaagtgcctgatcgaggtgaacgagaccatcacccagatcagctgggagaagatccacggcaagagcagccagaccgtggccgtgcaccacccccagtacggcttcagcgtgcagggcgagtaccagggcagagtgctgttcaagaactacagcctgaacgacgccaccatcaccctgcacaacatcggcttcagcgacagcggcaagtacatctgcaaggccgtgaccttccccctgggcaacgcccagagcagcaccaccgtgaccgtgctggtggagcccaccgtgagcctgatcaagggccccgacagcctgatcgacggcggcaacgagaccgtggccgccatctgcatcgccgccaccggcaagcccgtggcccacatcgactgggagggcgacctgggcgagatggagagcaccaccaccagcttccccaacgagaccgccaccatcatcagccagtacaagctgttccccaccagattcgccagaggcagaagaatcacctgcgtggtgaagcaccccgccctggagaaggacatcagatacagcttcatcctggacatccagtacgcccccgaggtgagcgtgaccggctacgacggcaactggttcgtgggcagaaagggcgtgaacctgaagtgcaacgccgacgccaaccccccccccttcaagagcgtgtggagcagactggacggccagtggcccgacggcctgctggccagcgacaacaccctgcacttcgtgcaccccctgaccttcaactacagcggcgtgtacatctgcaaggtgaccaacagcctgggccagagaagcgaccagaaggtgatctacatcagcgacgtgcccttcaagcagaccagcagcatcgccgtggccggcgccgtgatcggcgccgtgctggccctgttcatcatcgccatcttcgtgaccgtgctgctgacccccagaaagaagagacccagctacctggacaaggtgatcgacctgccccccacccacaagcccccccccctgtacgaggagagaagcccccccctgccccagaaggacctgttccagcccgagcacctgcccctgcagacccagttcaaggagagagaggtgggcaacctgcagcacagcaacggcctgaacagcagaagcttcgactacgaggacgagaaccccgtgggcgaggacggcatccagcagatgtaccccctgtacaaccagatgtgctaccaggacagaagccccggcaagcaccaccagaacaacgaccccaagagagtgtacatcgaccccagagagcactacgtgtag

SEQ ID NO: 86137 - protein, 761 aa, Artificial Sequence
  derived and/or modified sequence
MLRAPGELPRQAARCSLCRLGPGRGRAFFKWRCLPASVDRGNPLWALAANAGTGFAVAEPQIAMFCGKLNMHVNIQTGKWEPDPTGTKSCFETKEEVLQYCQEMYPELQITNVMEANQRVSIDNWCRRDKKQCKSRFVTPFKCLVGEFVSDVLLVPEKCQFFHKERMEVCENHQHWHTVVKEACLTQGMTLYSYGMLLPCGVDQFHGTEYVCCPQTKIIGSVSKEEEEEDEEEEEEEDEEEDYDVYKSEFPTEADLEDFTEAAVDEDDEDEEEGEEVVEDRDYYYDTFKGDDYNEENPTEPGSDGTMSDKEITHDVKAVCSQEAMTGPCRAVMPRWYFDLSKGKCVRFIYGGCGGNRNNFESEDYCMAVCKAMIPPTPLPTNDVDVYFETSADDNEHARFQKAKEQLEIRHRNRMDRVKKEWEEAELQAKNLPKAERQTLIQHFQAMVKALEKEAASEKQQLVETHLARVEAMLNDRRRMALENYLAALQSDPPRPHRILQALRRYVRAENKDRLHTIRHYQHVLAVDPEKAAQMKSQVMTHLHVIEERRNQSLSLLYKVPYVAQEIQEEIDELLQEQRADMDQFTASISETPVDVRVSSEESEEIPPFHPFHPFPALPENEGSGVGEQDGGLIGAEEKVINSKNKVDENMVIDETLDVKEMIFNAERVGGLEEERESVGPLREDFSLSSSALIGLLVIAVAIATVIVISLVMLRKRQYGTISHGIVEVDPMLTPEERHLNKMQNHGYENPTYKYLEQMQI

SEQ ID NO: 86138 - DNA, 2286 bp, Artificial Sequence
  derived and/or modified sequence
atgctgagggctccaggagaattgcccaggcaggcagctcgctgtagcctgtgccggctcggaccagggcggggacgcgctttcttcaagtggcgttgcctccccgcaagtgtagatcgtggaaaccccttgtgggcacttgccgccaacgctggaactggattcgcagttgccgaaccacagatcgctatgttttgcggcaaactcaacatgcatgtcaatatccagaccggcaagtgggagccagatcccaccggcacgaagtcctgctttgagacaaaggaggaggtgctgcagtactgccaagaaatgtaccccgagctgcaaatcacaaacgtcatggaagccaaccaaagagtgtctatcgataattggtgcaggagagataagaagcaatgcaagagcaggttcgtgacgccctttaagtgcctcgtcggtgagtttgtttccgacgtactcctggttcctgagaagtgtcagttcttccacaaagagcgaatggaggtttgcgaaaatcatcagcattggcataccgtggtaaaggaggcctgcctgacccaggggatgacgctatattcatacgggatgctgctgccgtgtggtgttgaccagttccacggcaccgagtacgtatgttgtccccagacaaagattattgggtctgtgtctaaagaagaggaagaagaggacgaggaagaggaggaggaagaggacgaggaagaagattatgatgtttacaagagcgaatttcctacagaggccgatctcgaggactttaccgaagcagctgtggatgaggacgacgaagacgaagaagagggggaagaagtagttgaggatcgggactattactatgatacttttaagggagacgactataacgaagagaaccccaccgagcctggtagcgatggaaccatgtctgacaaggagatcacccatgatgtgaaagcggtctgcagtcaggaggcgatgaccgggccttgcagggccgttatgcctcgctggtatttcgacctgagcaaaggaaaatgcgtgaggtttatatacggaggatgcggcggaaatcggaacaatttcgaaagcgaagactattgcatggcagtatgtaaagctatgatcccccccacaccacttcctacaaacgatgtagacgtttatttcgaaaccagcgcagatgacaacgaacacgcaagattccaaaaagctaaagagcagcttgagattcgccatagaaatagaatggacagagtaaaaaaagagtgggaggaagccgagttgcaggcgaagaatttgccaaaggccgagcgtcagaccctcattcagcacttccaagccatggtgaaagcccttgagaaagaagctgcctctgagaagcagcagttagtggaaacccacctggcccgggtcgaggctatgttaaacgaccgtcggcgtatggctctggagaattacttggccgccctgcagtctgaccctcctaggccccataggatcctccaggcacttaggagatacgtgagggccgagaataaggataggttacatactatcaggcactaccagcatgttcttgcagttgatcccgagaaagccgcgcagatgaaatcgcaagtgatgactcacctgcatgtaatcgaggagaggcgaaaccaaagtttaagcctcttgtacaaagttccgtatgtcgcccaagaaatacaggaggagattgatgagctgctgcaagaacagagagctgacatggaccagttcacggccagcatttctgagaccccagttgatgtgcgtgtgtcgtccgaagaatcagaggaaattccccctttccatccttttcatccctttcccgcactcccagagaacgagggcagtggtgtgggagagcaggatggtggactcatcggcgccgaggaaaaagtaatcaacagcaaaaacaaggttgatgagaacatggtcattgatgaaaccctggacgtcaaagagatgatctttaatgctgagcgcgtcggaggacttgaggaggagcgagagagcgttggacccctcagagaagacttctccctcagctcttccgccctcatagggctgctcgtgattgcagttgccattgccacggtgatcgtcatctccttggtgatgctgcgaaagaggcagtacggaaccatcagccacggtatagtggaggtagacccaatgctgacacccgaggagagacacttaaacaagatgcagaaccatggctatgaaaacccaacttacaagtacctggagcagatgcagatttag

SEQ ID NO: 86139 - DNA, 2286 bp, Artificial Sequence
  derived and/or modified sequence
atgctgcgggcccctggagagctgccccggcaggccgcccgctgcagcctgtgccgcctgggccctggccggggccgggccttcttcaagtggcgctgcctgcctgcctctgtggaccggggcaaccccctgtgggccctggccgccaatgccggcactggatttgctgtggccgagccccagatcgccatgttctgtgggaagctgaacatgcacgtgaacatccagacaggcaagtgggagccagaccccaccggcaccaagagctgctttgagaccaaggaggaggtgctgcagtactgccaggagatgtacccagagctgcagatcaccaacgtgatggaggccaaccagagggtgtccattgacaactggtgcagaagagacaagaagcagtgcaagagcagatttgtgacccccttcaagtgcctggtgggggagtttgtgtctgatgtgctgctggtgcctgagaagtgccagttcttccacaaggagaggatggaggtgtgtgagaaccaccagcactggcacacagtggtgaaggaggcctgcctgacccagggcatgaccctgtacagctatggcatgctgctgccctgtggggtggaccagttccacggcacagaatatgtgtgctgcccccagaccaagatcatcggctctgtgtccaaggaggaggaggaggaggatgaggaggaggaggaggaggaggatgaggaggaggactatgatgtgtacaagtctgagttccccacagaggccgacctggaggacttcacagaggccgctgtggatgaagatgatgaagatgaggaggagggggaggaggtggtggaggaccgggactactactatgacaccttcaagggagatgactacaatgaggagaaccccacagagcccggcagtgatggcaccatgtctgacaaggagatcacccatgatgtgaaggctgtgtgcagccaggaggccatgacaggcccctgcagagctgtgatgccccgctggtactttgacctgagcaagggcaaatgtgtgcgcttcatctacggcggctgcggcggcaacagaaacaactttgaaagtgaggactactgcatggctgtgtgcaaggccatgatcccccccacccccctgcccaccaatgatgtggatgtgtactttgagaccagcgcagatgacaatgaacatgcccgcttccagaaggccaaggagcagctggagatccgccacaggaacaggatggacagagtgaagaaggagtgggaggaggccgagctgcaggccaagaacctgcccaaggccgagcggcagaccctcatccagcacttccaggccatggtgaaggccctggagaaggaggccgccagcgagaagcagcagctggtggagacccacctggcccgggtggaggccatgctgaatgacagaagaaggatggccctggagaactacctggccgccctgcagagcgaccccccccggccccaccgcatcctgcaggccctgcggcgctacgtgcgggcagagaacaaggaccggctgcacaccatccgccactaccagcacgtgctggccgtggaccctgagaaggccgcccagatgaagagccaggtgatgacccacctgcacgtgattgaggagaggaggaaccagagcctgagcctgctgtacaaggtgccctacgtggcccaggagatccaggaggagattgatgagctgctgcaggagcagagagctgacatggaccagttcaccgccagcatcagcgagacccctgtggatgtgcgggtgagcagcgaggagagcgaggagatcccccccttccaccccttccaccccttccctgccctgcctgaaaatgaaggcagcggcgtgggggagcaggacggcggcctcatcggggctgaggagaaggtgatcaacagcaagaacaaggtggatgagaacatggtgattgatgagaccctggatgtgaaggagatgatcttcaatgctgagcgggtgggcggcctggaggaggagcgggagagcgtgggccccctgcgggaggacttcagcctgagcagcagcgccctgattggcctgctggtgattgctgtggccatcgccaccgtgattgtcatcagcctggtgatgctgaggaagaggcagtatggcaccatcagccacggcatcgtggaggtggaccccatgctgaccccagaggagcggcacctgaacaagatgcagaaccacggctatgagaaccccacctacaagtacctggagcagatgcagatctag

SEQ ID NO: 86140 - DNA, 2286 bp, Artificial Sequence
  derived and/or modified sequence
atgctgcgggcccccggcgagctgccccggcaggccgcccggtgcagtctctgtcgcctcgggccgggccgaggtagggctttcttcaagtggagatgtctcccagcgtctgttgataggggtaatcccctgtgggccctggccgccaacgccggaacagggttcgcggtggctgaacctcagatcgccatgttctgcgggaagctcaatatgcacgtgaatattcagacagggaagtgggagccggatccaacaggcactaaatcctgttttgagacaaaagaggaggtgctccagtactgccaggagatgtacccggaactacagattacaaatgtcatggaggcaaaccaaagggtttctatagacaattggtgccgacgagacaaaaagcagtgcaaaagccggttcgtcactcctttcaagtgtcttgtcggagaatttgtgtctgacgttctgctggtacccgagaaatgccagttcttccacaaagagaggatggaagtttgtgagaatcaccagcactggcacactgtagttaaggaagcctgcttaacacagggcatgacattgtattcatacggcatgctactgccatgtggagttgatcaattccatggaactgaatatgtctgctgtcctcagacaaagattataggatcggtaagtaaggaggaggaggaagaagacgaggaggaggaagaggaggaggatgaagaagaggattacgatgtctataaatcagaattcccaaccgaagccgatctggaggacttcactgaggccgcagtggatgaggacgatgaggacgaggaagaaggcgaagaggtggtcgaagaccgcgattactactacgacacatttaaaggtgacgattataatgaagagaaccccaccgagcctgggagtgatggcactatgtctgacaaagaaatcactcacgacgtcaaggcggtctgctctcaagaagcgatgactgggccttgtagggctgtgatgccacggtggtattttgacctgtccaaaggaaagtgcgttcgcttcatttatggcgggtgcggtggaaacaggaataatttcgagtcggaggattactgcatggccgtgtgtaaggccatgatcccccctacccctctccctactaacgacgttgatgtgtactttgagactagcgccgatgataatgagcatgctcgtttccaaaaggcaaaggaacagctggagattcgccataggaatagaatggaccgcgtcaagaaggagtgggaagaagcagaactccaggccaaaaacctccccaaagctgaaagacagaccttgatccaacacttccaggctatggtgaaagcactggagaaagaagcagcgtcggaaaaacagcagctagtggaaacacatcttgcacgggtagaggctatgctgaacgatcgcagacgcatggccttagagaactatctggcggctctgcagagcgatcccccccgcccccatcgaatccttcaagcccttaggcgatacgtccgagctgagaataaagacagattgcatacaataaggcattatcagcacgtactagcagtagatcccgaaaaggccgcccaaatgaaaagccaggtgatgacccatctgcatgttatcgaggagaggaggaatcagtctctgagtctcctgtacaaagtaccttatgtagcccaagaaattcaggaggagatagacgagctgttacaggagcagcgcgcagatatggaccagttcaccgcttccatttctgagacgcctgtggacgtgcgcgtatctagtgaagaatcagaggaaattcctcccttccacccattccatccattccccgcacttccagaaaatgagggcagcggagtcggtgaacaggatggcggcctgattggggctgaagaaaaggtaatcaacagtaagaacaaggtggacgagaacatggtgatcgacgagacactagacgtgaaggaaatgatctttaacgcggagcgagtcggaggactcgaagaggagcgcgagagcgtgggcccattaagggaggatttttccctgtcctcttctgccctaatcggcctgctcgtgattgcggtcgctatagccaccgtcatcgtcatctcgctcgtaatgcttcgcaaacggcagtatggcaccatttcacacggcattgtggaagtggatcccatgctgacccccgaagagaggcacttaaataagatgcagaatcacggatatgaaaatccgacatataaatatctcgagcaaatgcagatctag

SEQ ID NO: 86141 - DNA, 3687 bp, Artificial Sequence
  derived and/or modified sequence
tttgttgccaggtggacgcggccccggccttcgcgcgcggcagggatgctgcgagccccgggggagctcccgcgccaggccgcccgctgctccctctgccgcctggggccgggtcgcggacgcgcattttttaagtggcgctgtttgcctgcgtccgtagaccgaggaaacccgctctgggctcttgcagccaatgccggaacaggatttgctgttgctgagcctcaaatcgcaatgttttgtgggaagttaaatatgcatgtgaacattcagactgggaaatgggaacctgatccaacaggcaccaagagctgctttgaaacaaaagaagaagttcttcagtactgtcaggagatgtatccagagctacagatcacaaatgtgatggaggcaaaccagcgggttagtattgacaactggtgccggagggacaaaaagcaatgcaagagtcgctttgttacacctttcaagtgtctcgtgggtgaatttgtaagtgatgtcctgctagttccagaaaagtgccagtttttccacaaagagcggatggaggtgtgtgagaatcaccagcactggcacacggtagtcaaagaggcatgtctgactcagggaatgaccttatatagctacggcatgctgctcccatgtggggtagaccagttccatggcactgaatatgtgtgctgccctcagacaaagattattggatctgtgtcaaaagaagaggaagaggaagatgaagaggaagaggaagaggaagatgaagaggaagactatgatgtttataaaagtgaatttcctactgaagcagatctggaagacttcacagaagcagctgtggatgaggatgatgaggatgaggaagaaggggaggaagtggtggaggaccgagattactactatgacaccttcaaaggagatgactacaatgaggagaatcctactgaacccggcagcgacggcaccatgtcagacaaggaaattactcatgatgtcaaagctgtctgctcccaggaggcgatgacggggccctgccgggccgtgatgcctcgttggtacttcgacctctccaagggaaagtgcgtgcgctttatatatggtggctgcggcggcaacaggaacaattttgagtctgaggattattgtatggctgtgtgtaaagcgatgattcctccaactcctctgccaaccaatgatgttgatgtgtatttcgagacctctgcagatgataatgagcatgctcgcttccagaaggctaaggagcagctggagattcggcaccgcaaccgaatggacagggtaaagaaggaatgggaagaggcagagcttcaagctaagaacctccccaaagcagagaggcagactctgattcagcacttccaagccatggttaaagctttagagaaggaagcagccagtgagaagcagcagctggtggagacccacctggcccgagtggaagctatgctgaatgaccgccgtcggatggctctggagaactacctggctgccttgcagtctgacccgccacggcctcatcgcattctccaggccttacggcgttatgtccgtgctgagaacaaagatcgcttacataccatccgtcattaccagcatgtgttggctgttgacccagaaaaggcggcccagatgaaatcccaggtgatgacacatctccacgtgattgaagaaaggaggaaccaaagcctctctctgctctacaaagtaccttatgtagcccaagaaattcaagaggaaattgatgagctccttcaggagcagcgtgcagatatggaccagttcactgcctcaatctcagagacccctgtggacgtccgggtgagctctgaggagagtgaggagatcccaccgttccaccccttccaccccttcccagccctacctgagaacgaaggatctggagtgggagagcaggatgggggactgatcggtgccgaagagaaagtgattaacagtaagaataaagtggatgaaaacatggtcattgacgagactctggatgttaaggaaatgattttcaatgccgagagagttggaggcctcgaggaagagcgggaatccgtgggcccactgcgggaggacttcagtctgagtagcagtgctctcattggcctgctggtcatcgcagtggccattgccacggtcatcgtcatcagcctggtgatgctgaggaagaggcagtatggcaccatcagccacgggatcgtggaggttgatccaatgctcaccccagaagagcgtcacctgaacaagatgcagaaccatggctatgagaaccccacctacaaatacctggagcagatgcagatttaggtggcagggagcgcggcagccctggcggagggatgcaggtgggccggaagatcccacgattccgatcgactgccaagcagcagccgctgccaggggctgcgtctgacatcctgacctcctggactgtaggactatataaagtactactgtagaactgcaatttccattcttttaaatgggtgaaaaatggtaatataacaatatatgatatataaaccttaaatgaaaaaaatgatctattgcagatatttgatgtagttttcttttttaaattaatcagaaaccccacttccattgtattgtctgacacatgctctcaatatataataaatgggaaatgtcgattttcaataatagacttatatgcaggctgtcgttccggttatgttgtgtaagtcaactcttcagcctcattcactgtcctggcttttatttaaagaaaaaaaaggcagtattccctttttaaatgagctttcaggaagttgctgagaaatggggtggaatagggaactgtaatggccactgaagcacgtgagagaccctcgcaaaatgatgtgaaaggaccagtttcttgaagtccagtgtttccacggctggatacctgtgtgtctccataaaagtcctgtcaccaaggacgttaaaggcattttattccagcgtcttctagagagcttagtgtatacagatgagggtgtccgctgctgctttccttcggaatccagtgcttccacagagattagcctgtagcttatatttgacattcttcactgtctgttgtttacctaccgtagctttttaccgttcacttccccttccaactatgtccagatgtgcaggctcctcctctctggactttctccaaaggcactgaccctcggcctctactttgtcccctcacctccaccccctcctgtcaccggccttgtgacattcactcagagaagaccacaccaaggaggcggccgctggcccaggagagaacacggggaggtttgtttgtgtgaaaggaaagtagtccaggctgtccctgaaactgagtctgtggacactgtggaaagctttgaacaattgtgttttcgtcacaggagtctttgtaatgcttgtacagttgatgtcgatgctcactgcttctgctttttctttctttttattttaaatctgaaggttctggtaacctgtggtgtatttttattttcctgtgactgtttttgttttgtttttttcctttttcctcccctttgaccctattcatgtctctacccactatgcacagattaaacttcacctacaaactccttaatatgatctgtggagaatgtacacagtttaaacacatcaataaatactttaacttcc

SEQ ID NO: 86142 - DNA, 2286 bp, Artificial Sequence
  derived and/or modified sequence
atgctgcgggctcctggcgaactccccaggcaggctgcaaggtgtagcctctgccgcctggggcctggcagaggcagagccttctttaaatggcgctgcctgccggcaagtgtggacagaggcaaccccctgtgggccctagccgctaacgctggcacaggattcgccgtagccgaaccccagatcgccatgttttgcggaaaactgaacatgcacgtgaatatccagacgggcaaatgggagcctgacccgaccggcaccaagagctgttttgagacaaaagaggaggtgctacagtattgccaggaaatgtatcccgagcttcaaattaccaacgtcatggaggctaaccagagggtttcaattgataactggtgtaggcgggacaagaaacagtgcaagagcaggtttgtcacacctttcaaatgcctggtgggcgaattcgtgtcagacgtgctattagtgcccgaaaaatgtcagttttttcacaaggaaagaatggaggtctgcgagaatcatcagcattggcacactgtggtcaaggaggcatgcctgacccagggcatgaccctctacagttatggaatgctcctgccttgtggtgtggatcagttccatggcaccgagtacgtgtgctgccctcagaccaagataatcggctccgtttcgaaggaggaagaggaagaggatgaagaggaggaggaggaggaagatgaggaggaggattacgacgtctataagtccgagttcccaactgaggctgatctggaagacttcaccgaagctgccgtggacgaggatgatgaagacgaagaagaaggcgaagaagttgttgaagaccgcgactattattatgacacgtttaagggagacgactataacgaggaaaaccctaccgagcctggctcagacgggactatgtcagataaggagattacgcatgatgtgaaagcagtgtgttcacaggaggccatgacaggtccttgtagagcagttatgcctcggtggtattttgacttgagtaaaggaaagtgtgtgcgctttatatatgggggatgcgggggtaaccgcaacaactttgaaagtgaggactactgcatggcggtgtgtaaggcaatgataccgccaaccccactaccaaccaatgacgtcgacgtctactttgagacgtccgctgacgacaatgagcacgcacggttccagaaggctaaggaacaactggaaatcagacatagaaatcgtatggacagggttaaaaaggagtgggaagaggccgagttacaggccaagaacttgcctaaagccgaaagacagactctgattcagcacttccaggccatggtcaaggccctggaaaaggaagccgcatccgagaagcagcaactggtggaaacccatctagcccgagtagaggcaatgctgaacgacagaagacggatggcgcttgagaattatctcgctgccttgcagagcgatcctcccagaccacacagaattctgcaggccctccggagatacgtccgggcagaaaataaagaccggttgcataccattaggcattaccagcacgtgctcgctgttgatccggaaaaagcagcccagatgaagagccaggttatgacacatctgcatgtgatagaggaacggagaaatcagtcgctgagcctgctttataaggtgccatacgtggcacaggagatccaggaggagatcgatgagctcttacaggagcaacgcgcagatatggatcagttcacagcttccatttcagaaactcccgtggacgtgcgtgtcagcagcgaagagagcgaggagatacccccttttcatccgtttcacccttttccagcactacccgaaaatgaagggtcgggggttggggagcaggatgggggtctgataggcgcagaggagaaagtgataaattctaagaacaaagtggacgagaacatggtcatcgatgaaacactggacgtcaaagagatgatctttaatgccgagagggtgggtggcctggaagaggaacgagaaagtgtgggacccttgcgggaagactttagcctgtcttcttcggccctgatcggtttgttagtgatcgccgtcgctatagcaaccgtgatcgtgatatcgttggtgatgttgaggaaaaggcagtatggtactatttcccacggaatcgtagaggttgatcccatgttgacgccagaggagagacatttgaataagatgcagaaccacggctacgagaaccctacctataaataccttgaacagatgcaaatttag

SEQ ID NO: 86143 - DNA, 2286 bp, Artificial Sequence
  derived and/or modified sequence
atgctgagagcccccggcgagctgcccagacaggccgccagatgcagcctgtgcagactgggccccggcagaggcagagccttcttcaagtggagatgcctgcccgccagcgtggacagaggcaaccccctgtgggccctggccgccaacgccggcaccggcttcgccgtggccgagccccagatcgccatgttctgcggcaagctgaacatgcacgtgaacatccagaccggcaagtgggagcccgaccccaccggcaccaagagctgcttcgagaccaaggaggaggtgctgcagtactgccaggagatgtaccccgagctgcagatcaccaacgtgatggaggccaaccagagagtgagcatcgacaactggtgcagaagagacaagaagcagtgcaagagcagattcgtgacccccttcaagtgcctggtgggcgagttcgtgagcgacgtgctgctggtgcccgagaagtgccagttcttccacaaggagagaatggaggtgtgcgagaaccaccagcactggcacaccgtggtgaaggaggcctgcctgacccagggcatgaccctgtacagctacggcatgctgctgccctgcggcgtggaccagttccacggcaccgagtacgtgtgctgcccccagaccaagatcatcggcagcgtgagcaaggaggaggaggaggaggacgaggaggaggaggaggaggaggacgaggaggaggactacgacgtgtacaagagcgagttccccaccgaggccgacctggaggacttcaccgaggccgccgtggacgaggacgacgaggacgaggaggagggcgaggaggtggtggaggacagagactactactacgacaccttcaagggcgacgactacaacgaggagaaccccaccgagcccggcagcgacggcaccatgagcgacaaggagatcacccacgacgtgaaggccgtgtgcagccaggaggccatgaccggcccctgcagagccgtgatgcccagatggtacttcgacctgagcaagggcaagtgcgtgagattcatctacggcggctgcggcggcaacagaaacaacttcgagagcgaggactactgcatggccgtgtgcaaggccatgatcccccccacccccctgcccaccaacgacgtggacgtgtacttcgagaccagcgccgacgacaacgagcacgccagattccagaaggccaaggagcagctggagatcagacacagaaacagaatggacagagtgaagaaggagtgggaggaggccgagctgcaggccaagaacctgcccaaggccgagagacagaccctgatccagcacttccaggccatggtgaaggccctggagaaggaggccgccagcgagaagcagcagctggtggagacccacctggccagagtggaggccatgctgaacgacagaagaagaatggccctggagaactacctggccgccctgcagagcgacccccccagaccccacagaatcctgcaggccctgagaagatacgtgagagccgagaacaaggacagactgcacaccatcagacactaccagcacgtgctggccgtggaccccgagaaggccgcccagatgaagagccaggtgatgacccacctgcacgtgatcgaggagagaagaaaccagagcctgagcctgctgtacaaggtgccctacgtggcccaggagatccaggaggagatcgacgagctgctgcaggagcagagagccgacatggaccagttcaccgccagcatcagcgagacccccgtggacgtgagagtgagcagcgaggagagcgaggagatcccccccttccaccccttccaccccttccccgccctgcccgagaacgagggcagcggcgtgggcgagcaggacggcggcctgatcggcgccgaggagaaggtgatcaacagcaagaacaaggtggacgagaacatggtgatcgacgagaccctggacgtgaaggagatgatcttcaacgccgagagagtgggcggcctggaggaggagagagagagcgtgggccccctgagagaggacttcagcctgagcagcagcgccctgatcggcctgctggtgatcgccgtggccatcgccaccgtgatcgtgatcagcctggtgatgctgagaaagagacagtacggcaccatcagccacggcatcgtggaggtggaccccatgctgacccccgaggagagacacctgaacaagatgcagaaccacggctacgagaaccccacctacaagtacctggagcagatgcagatctag

SEQ ID NO: 86144 - protein, 227 aa, Artificial Sequence
  derived and/or modified sequence
MRRISLTSSPVRLLLFLLLLLIALEIMYNSDNNMVKPLGLLGKKVYATSTWGELTQTLGEVGRDLRMLLCDIKPQIKTSDPSTLQVEMFCQREAERCTGASWQFATNGEKSLLFDAMNMTWTVINHEASKIKETWKKDRGLEKYFRKLSKGDCDHWLREFLGHWEAMPEPTVSPVNASDIHWSSSSLPDRWIILGAFILLVLMGIVLICVWWQNGEWQAGLWPLRTS

SEQ ID NO: 86145 - DNA, 684 bp, Artificial Sequence
  derived and/or modified sequence
atgagaagaatcagcctgaccagcagccccgtgagactgctgctgttcctgctgctgctgctgatcgccctggagatcatgtacaacagcgacaacaacatggtgaagcccctgggcctgctgggcaagaaggtgtacgccaccagcacctggggcgagctgacccagaccctgggcgaggtgggcagagacctgagaatgctgctgtgcgacatcaagccccagatcaagaccagcgaccccagcaccctgcaggtggagatgttctgccagagagaggccgagagatgcaccggcgccagctggcagttcgccaccaacggcgagaagagcctgctgttcgacgccatgaacatgacctggaccgtgatcaaccacgaggccagcaagatcaaggagacctggaagaaggacagaggcctggagaagtacttcagaaagctgagcaagggcgactgcgaccactggctgagagagttcctgggccactgggaggccatgcccgagcccaccgtgagccccgtgaacgccagcgacatccactggagcagcagcagcctgcccgacagatggatcatcctgggcgccttcatcctgctggtgctgatgggcatcgtgctgatctgcgtgtggtggcagaacggcgagtggcaggccggcctgtggcccctgagaaccagctag

SEQ ID NO: 86146 - DNA, 684 bp, Artificial Sequence
  derived and/or modified sequence
atgagacgcatctctctgacctcatcccccgttcggctgctgctgttcctgctgttgctgctcatcgccctcgaaataatgtataatagcgacaataacatggtgaagccgctggggctcctgggcaaaaaggtctacgccacgtcgacatggggagaacttacacaaacattaggggaggtgggtcgcgacctacggatgctcctgtgcgatatcaagccacagataaaaactagcgatccgtccacgctccaagtggaaatgttctgccaacgggaggcagaaagatgcaccggagccagctggcaatttgcgacaaatggtgaaaaatcactgctgtttgatgctatgaatatgacctggacagtcattaaccatgaagccagcaagattaaagaaacatggaagaaagatcgcgggctcgaaaagtacttccgcaagctgagcaaaggggattgcgatcattggcttcgcgagttcctcggccactgggaggccatgccagaaccaacagtgagcccagtaaacgcatctgatatccactggagtagttcctcactgccagacaggtggattattctgggcgctttcatactgttggtacttatgggtattgtgcttatatgcgtttggtggcaaaacggggagtggcaggcgggcctatggcccctgcgaacatcatag

SEQ ID NO: 86147 - DNA, 684 bp, Artificial Sequence
  derived and/or modified sequence
atgaggcgcatcagcctgaccagcagccctgtgcggctgctgctcttcctgctgctgctgctgattgccctggagatcatgtacaacagcgacaacaacatggtgaagcccctgggcctgctgggcaagaaggtgtatgccaccagcacctggggcgagctgacccagaccctgggggaggtgggccgggacctgaggatgctgctgtgtgacatcaagccccagatcaagaccagtgaccccagcaccctgcaggtggagatgttctgccagcgggaggccgagcgctgcaccggggcctcctggcagtttgccaccaatggagagaagagcctgctgtttgatgccatgaacatgacctggacagtcatcaaccacgaggccagcaagatcaaggagacctggaagaaggaccggggcctggagaagtacttcaggaagctgagcaagggggactgtgaccactggctgcgggagttcctgggccactgggaggccatgcctgagcccaccgtgtcccctgtgaatgccagtgacatccactggagcagcagcagcctgcctgaccgctggatcatcctgggcgccttcatcctgctggtgctgatgggcatcgtgctgatctgtgtgtggtggcagaatggagagtggcaggccggcctgtggcccctgcggaccagctag

SEQ ID NO: 86148 - DNA, 684 bp, Artificial Sequence
  derived and/or modified sequence
atgcggcggatcagcctgaccagcagccccgtgcggctgctgctgttcctgctcctgctgttgattgctctggaaatcatgtacaactctgacaacaacatggtgaaacctcttggactgcttggaaagaaggtctacgcaacgtctacgtggggggaactcacgcagaccctcggcgaagtcggaagggatcttcgcatgttgctgtgcgatataaaacctcaaatcaagacttcggacccttcaaccctgcaggtggagatgttctgtcaacgagaggccgaaaggtgcactggggcctcctggcagtttgcaacaaacggggagaaatctctgctgttcgatgcaatgaatatgacatggacggtgatcaaccatgaagcctccaagatcaaagagacatggaagaaagataggggcctcgagaagtattttagaaaactgtctaagggagattgcgaccactggcttcgtgagttcttggggcactgggaagcaatgcctgaacccacggtgagtcctgtgaacgcgagtgatatacactggtcttctagtagcctacccgaccgatggatcatccttggcgcctttattctgttggttttgatgggtattgtgctgatatgcgtgtggtggcagaatggggagtggcaagctggcttatggcctctccgcacctcatag

SEQ ID NO: 86149 - DNA, 684 bp, Artificial Sequence
  derived and/or modified sequence
atgagacggatttccttgacatcttccccagtgcgattactgctctttttgctcctgctgctgattgctctggagattatgtacaacagtgataacaatatggttaaaccgctgggcctgctgggcaaaaaagtgtacgccacttcaacctggggtgaattaacacagactctgggtgaggtgggtagagatctgaggatgttactctgtgatattaagccacagataaagacaagtgacccatctacgctccaggtagagatgttctgccagcgggaggcagagcgctgtacgggagcaagctggcagtttgcaaccaatggcgaaaaatctctgctctttgatgccatgaatatgacttggacagtgattaatcacgaagcctcaaaaatcaaagaaacatggaagaaggatagaggactcgagaagtattttagaaagctgagcaaaggagattgtgaccattggctgagggaattccttggccattgggaagccatgcccgagcctacagttagtccagtgaatgcttctgacatccattggagctcctcctccctgcctgataggtggatcatcttgggagcttttattctgctcgtgctgatgggtattgtgctcatctgtgtgtggtggcagaacggcgagtggcaggcaggcctgtggcctttgaggacttcctag

SEQ ID NO: 86150 - DNA, 817 bp, Artificial Sequence
  derived and/or modified sequence
gcctgacctcagttgttccagggtaaagaatttgggcagtgcccacacccacgctgttggataacatttcttcaccataccagtgagggtgaatgtgtacacgcccagcttcctgcctgttactctccacagtatgcgaagaatatccctgacttctagccctgtgcgccttcttttgtttctgctgttgctactaatagccttggagatcatgtacaacagtgacaacaacatggtcaaacctctgggcctcctggggaagaaggtatatgccaccagcacttggggagaattgacccaaacgctgggagaagtggggcgagacctcaggatgctcctttgtgacatcaaaccccagataaagaccagtgatccttccactctgcaagtcgagatgttttgtcaacgtgaagcagaacggtgcactggtgcatcctggcagttcgccaccaatggagagaaatccctcctctttgacgcaatgaacatgacctggacagtaattaatcatgaagccagtaagatcaaggagacatggaagaaagacagagggctggaaaagtatttcaggaagctctcaaagggagactgcgatcactggctcagggaattcttagggcactgggaggcaatgccagaaccgacagtgtcaccagtaaatgcttcagatatccactggtcttcttctagtctaccagatagatggatcatcctgggggcattcatcctgttagttttaatgggaattgttctcatctgtgtctggtggcaaaatggtgagtggcaggctggtctctggcccttgaggacgtcttag

SEQ ID NO: 86151 - DNA, 743 bp, Artificial Sequence
  derived and/or modified sequence
gcccagcttcctgcctgttactctccacagtatgcgaagaatatccctgacttctagccctgtgcgccttcttttgtttctgctgttgctactaatagccttggagatcatggttggtggtcactctctttgcttcaacttcactataaaatcattgtccagacctggacagccctggtgtgaagcgcaggtcttcttgaataaaaatcttttccttcagtacaacagtgacaacaacatggtcaaacctctgggcctcctggggaagaagatccttccactctgcaagtcgagatgttttgtcaacgtgaagcagaacggtgcactggtgcatcctggcagttcgccaccaatggagagaaatccctcctctttgacgcaatgaacatgacctggacagtaattaatcatgaagccagtaagatcaaggagacatggaagaaagacagagggctggaaaagtatttcaggaagctctcaaagggagactgcgatcactggctcagggaattcttagggcactgggaggcaatgccagaaccgacagtgtcaccagtaaatgcttcagatatccactggtcttcttctagtctaccagatagatggatcatcctgggggcattcatcctgttagttttaatgggaattgttctcatctgtgtctggtggcaaaatggtgagtggcaggctggtctctggcccttgaggacgtcttagtctggtaaggactcaagagaggtgaa

SEQ ID NO: 86152 - protein, 209 aa, Artificial Sequence
  derived and/or modified sequence
MRRISLTSSPVRLLLFLLLLLIALEIMVGGHSLCFNFTIKSLSRPGQPWCEAQVFLNKNLFLQYNSDNNMVKPLGLLGKKVYATSTWGELTQTLGEVGRDLRMLLCDIKPQIKTSDPSTLQVEMFCQREAERCTGASWQFATNGEKSLLFDAMNMTWTVINHEASKIKETWKKDRGLEKYFRKLSKGDCDHWLREFLGHWEAMPEPTGN

SEQ ID NO: 86153 - DNA, 354 bp, Artificial Sequence
  derived and/or modified sequence
atgagaagaatcagcctgaccagcagccccgtgagactgctgctgttcctgctgctgctgctgatcgccctggagatcatggtgggcggccacagcctgtgcttcaacttcaccatcaagagcctgagcagacccggccagccctggtgcgaggcccaggtgttcctgaacaagaacctgttcctgcagtacaacagcgacaacaacatggtgaagcccctgggcctgctgggcaagaagatcctgcccctgtgcaagagcagatgcttcgtgaacgtgaagcagaacggcgccctggtgcaccccggcagcagcccccccatggagagaaaccccagcagcctgacccagtag

SEQ ID NO: 86154 - DNA, 630 bp, Artificial Sequence
  derived and/or modified sequence
atgagaagaatcagcctgaccagcagccccgtgagactgctgctgttcctgctgctgctgctgatcgccctggagatcatggtgggcggccacagcctgtgcttcaacttcaccatcaagagcctgagcagacccggccagccctggtgcgaggcccaggtgttcctgaacaagaacctgttcctgcagtacaacagcgacaacaacatggtgaagcccctgggcctgctgggcaagaaggtgtacgccaccagcacctggggcgagctgacccagaccctgggcgaggtgggcagagacctgagaatgctgctgtgcgacatcaagccccagatcaagaccagcgaccccagcaccctgcaggtggagatgttctgccagagagaggccgagagatgcaccggcgccagctggcagttcgccaccaacggcgagaagagcctgctgttcgacgccatgaacatgacctggaccgtgatcaaccacgaggccagcaagatcaaggagacctggaagaaggacagaggcctggagaagtacttcagaaagctgagcaagggcgactgcgaccactggctgagagagttcctgggccactgggaggccatgcccgagcccaccggcaactag

SEQ ID NO: 86155 - DNA, 243 bp, Artificial Sequence
  derived and/or modified sequence
atgagaagaatcagcctgaccagcagccccgtgagactgctgctgttcctgctgctgctgctgatcgccctggagatcatggtgggcggccacagcctgtgcttcaacttcaccatcaagagcctgagcagacccggccagccctggtgcgaggcccaggtgttcctgaacaagaacctgttcctgcagtacaacagcgacaacaacatggtgaagcccctgggcctgctgggcaagaagtag

SEQ ID NO: 86156 - DNA, 354 bp, Artificial Sequence
  derived and/or modified sequence
atgagaagaataagcttaacgtctagccctgtgcggctgttgcttttcctgctcctcctcctgatcgctctagagattatggtggggggccattccttatgttttaacttcacaatcaaatccctgagccgcccaggccagccatggtgtgaggcccaggtgttcttaaacaaaaaccttttcctgcagtataatagtgacaataacatggtgaagcccctgggccttctcggcaagaaaatcctgccattgtgtaagtctagatgttttgtcaatgtgaagcagaatggtgccttagtgcatcctgggtctagccctccaatggagcgaaatccctccagtctcacacagtag

SEQ ID NO: 86157 - DNA, 630 bp, Artificial Sequence
  derived and/or modified sequence
atgcgccgtatctcccttacaagcagccccgttcggctgttactcttcctgctgctattgcttatcgccttagagatcatggtgggcggccacagtctctgcttcaactttacaattaaatcactcagccggccggggcagccttggtgcgaagcgcaagtatttctgaacaaaaacctgttccttcagtacaacagcgacaacaacatggtgaagccgctggggctgttggggaaaaaggtctatgctacttctacgtggggagaactcacgcagaccctaggagaggtgggacgcgacctgcgcatgctcctttgcgacatcaaaccacagattaaaaccagcgacccctctaccctacaggtagagatgttttgccaacgggaagctgaacggtgtaccggcgccagctggcaatttgccactaacggggaaaagagcctcctgtttgatgcaatgaatatgacctggacagtaattaatcatgaggcgagcaagatcaaagaaacatggaaaaaggatcgggggctggaaaagtacttcaggaaattgtccaagggagactgcgaccactggttacgagagtttctgggccactgggaggcaatgccagaacccacaggcaattag

SEQ ID NO: 86158 - DNA, 243 bp, Artificial Sequence
  derived and/or modified sequence
atgcggaggatcagtctcacatcctcccccgtgcgtctcctgcttttcctgctgctgctgctcattgcattagaaattatggtgggtggtcactcactatgcttcaactttacaatcaaaagcctgtcaaggccaggtcagccttggtgtgaggcacaagtatttctcaacaaaaacctgtttctgcagtacaatagcgacaacaatatggtcaagccgctgggcctcttagggaagaagtag

SEQ ID NO: 86159 - DNA, 354 bp, Artificial Sequence
  derived and/or modified sequence
atgaggcgcatcagcctgaccagcagccctgtgcggctgctgctcttcctgctgctgctgctgattgccctggagatcatggtgggcggccacagcctgtgcttcaacttcaccatcaagagcctgagcaggcctggccagccctggtgtgaggcccaggtgttcctgaacaagaacctcttcctgcagtacaacagcgacaacaacatggtgaagcccctgggcctgctgggcaagaagatcctgcccctgtgcaagagccgctgctttgtgaatgtgaagcagaatggagccctggtgcaccctggcagcagcccccccatggagaggaaccccagcagcctgacccagtag

SEQ ID NO: 86160 - DNA, 630 bp, Artificial Sequence
  derived and/or modified sequence
atgaggcgcatcagcctgaccagcagccctgtgcggctgctgctcttcctgctgctgctgctgattgccctggagatcatggtgggcggccacagcctgtgcttcaacttcaccatcaagagcctgagcaggcctggccagccctggtgtgaggcccaggtgttcctgaacaagaacctcttcctgcagtacaacagcgacaacaacatggtgaagcccctgggcctgctgggcaagaaggtgtatgccaccagcacctggggcgagctgacccagaccctgggggaggtgggccgggacctgaggatgctgctgtgtgacatcaagccccagatcaagaccagtgaccccagcaccctgcaggtggagatgttctgccagcgggaggccgagcgctgcaccggggcctcctggcagtttgccaccaatggagagaagagcctgctgtttgatgccatgaacatgacctggacagtcatcaaccacgaggccagcaagatcaaggagacctggaagaaggaccggggcctggagaagtacttcaggaagctgagcaagggggactgtgaccactggctgcgggagttcctgggccactgggaggccatgcctgagcccactggaaattag

SEQ ID NO: 86161 - DNA, 243 bp, Artificial Sequence
  derived and/or modified sequence
atgaggcgcatcagcctgaccagcagccctgtgcggctgctgctcttcctgctgctgctgctgattgccctggagatcatggtgggcggccacagcctgtgcttcaacttcaccatcaagagcctgagcaggcctggccagccctggtgtgaggcccaggtgttcctgaacaagaacctcttcctgcagtacaacagcgacaacaacatggtgaagcccctgggcctgctgggcaagaagtag

SEQ ID NO: 86162 - DNA, 354 bp, Artificial Sequence
  derived and/or modified sequence
atgcggcggatcagcctgaccagcagccccgtgcggctgctgctgttcctgcttctgctgctgattgctctggagattatggtaggaggtcattcactgtgcttcaatttcacgattaagtcattgagccgccctggccagccgtggtgcgaggcccaggttttccttaacaaaaatcttttcctccagtacaactcagacaacaacatggttaaaccactcggcctgctcggcaagaaaatactgcccctgtgcaagtcacgctgcttcgtaaatgtaaaacagaacggtgcactggtgcaccccggctcctcccccccaatggagcgaaacccttcttccctgacccaatag

SEQ ID NO: 86163 - DNA, 630 bp, Artificial Sequence
  derived and/or modified sequence
atgcggcggatcagcctgaccagcagccccgtgcggctgctgctgttccttctgctactgctcatcgctctagaaatcatggtgggcggacacagcctctgtttcaacttcacgattaagtccctaagccgccccgggcagccttggtgcgaagcccaggtattcctgaataagaatcttttcttgcagtataattcagacaacaacatggtcaagcctctgggcttgctgggtaagaaggtgtatgctacaagcacatggggggagctgacacagactttgggcgaagtagggagggacctgcgcatgctcctatgcgacatcaaaccccaaataaagacgtccgatccaagcaccctgcaggtcgagatgttttgtcagcgcgaggccgagaggtgtaccggtgcaagttggcagtttgctacgaacggtgaaaagtccttgctattcgacgccatgaacatgacatggactgtcataaaccatgaggccagcaaaattaaggagacttggaaaaaggaccgcggcctggagaagtatttcaggaaattgagcaaaggagactgcgaccattggttgcgagaattcttggggcactgggaggccatgccagaaccaacgggtaattag

SEQ ID NO: 86164 - DNA, 243 bp, Artificial Sequence
  derived and/or modified sequence
atgcggcggatcagcctgaccagcagccccgtgcggctgctgctgttcttgctgctgctgctgatcgctctggaaatcatggtgggggggcacagcctatgcttcaatttcactattaagtccctgtcccgccctgggcaaccatggtgcgaggcccaagtctttcttaataaaaatctgttcctccaatataattctgataataacatggtgaaacccctcggcctcctcggtaaaaagtag

SEQ ID NO: 86165 - DNA, 354 bp, Artificial Sequence
  derived and/or modified sequence
atgaggcgaataagtcttacgtcctcccctgtgcgactgttattatttttactgcttttgcttatcgcacttgagattatggtggggggacatagtctgtgtttcaactttaccattaagtcgcttagtcggccagggcagccctggtgcgaagcacaggtgttccttaacaagaacctgttcctccagtataactccgataataacatggtgaaacctttaggcctgctcgggaagaagatcctgcccttgtgtaagtcacgttgttttgtaaacgtgaaacaaaatggggcattagtgcatccaggatcgtctcctcctatggagcgcaaccccagcagcttaacccagtag

SEQ ID NO: 86166 - DNA, 630 bp, Artificial Sequence
  derived and/or modified sequence
atgcggaggatttctctgacatcgagccctgtcaggttactgctcttcctgctcctccttttaatagcactggagattatggtaggcggtcactctttgtgcttcaactttacaattaaatccctttccagacctgggcagccctggtgcgaggcacaggtgtttctcaataaaaacctgttcctccagtataatagtgacaacaatatggtgaaacctctgggcctccttggcaaaaaggtctacgctacttccacttggggcgagttgacccagactctgggcgaggttgggcgagatctgcgcatgcttctgtgcgacatcaaaccccagataaagacatcagacccttctactctccaggttgagatgttctgtcagcgggaggcggagcggtgtaccggcgctagctggcagttcgcaactaatggggagaagtcgctgttgtttgatgccatgaatatgacttggacggttattaaccatgaggcaagcaaaatcaaggagacgtggaaaaaagatcggggactcgagaagtacttccgaaagctgagtaagggagactgcgatcattggctgagagaattcttggggcattgggaggctatgcccgagcccacagggaattag

SEQ ID NO: 86167 - DNA, 243 bp, Artificial Sequence
  derived and/or modified sequence
atgcgtcgtatctctcttacaagttctcccgtcaggttgttactatttcttctcctgttactcatcgctctggagatcatggttgggggtcattctctgtgtttcaactttaccatcaagagcctttctagaccgggtcagccttggtgcgaagctcaagtcttcttgaacaaaaacctgttcctccagtataatagcgataataatatggtgaaaccgctgggtctcctgggaaaaaagtag

SEQ ID NO: 86168 - DNA, 875 bp, Artificial Sequence
  derived and/or modified sequence
atgcgaagaatatccctgacttctagccctgtgcgccttcttttgtttctgctgttgctactaatagccttggagatcatggttggtggtcactctctttgcttcaacttcactataaaatcattgtccagacctggacagccctggtgtgaagcgcaggtcttcttgaataaaaatcttttccttcagtacaacagtgacaacaacatggtcaaacctctgggcctcctggggaagaaggtatatgccaccagcacttggggagaattgacccaaacgctgggagaagtggggcgagacctcaggatgctcctttgtgacatcaaaccccagataaagaccagtgatccttccactctgcaagtcgagatgttttgtcaacgtgaagcagaacggtgcactggtgcatcctggcagttcgccaccaatggagagaaatccctcctctttgacgcaatgaacatgacctggacagtaattaatcatgaagccagtaagatcaaggagacatggaagaaagacagagggctggaaaagtatttcaggaagctctcaaagggagactgcgatcactggctcagggaattcttagggcactgggaggcaatgccagaaccgacaggtaactgagctgggtgggagaatgtggcagctccctttaaaggtcaaaagccttccctgtgtgggtgtcagtgtgtgtgtgcgatagaaaatttgattgacttctccgtgggcttcctgtctggagagtcagtgatggctataaggatttcccaccatcctccctttcccatcccacctcccactgtttcttcctcagtgtagaaaccccttcccattaaccaatgatccagtcacaatgacccactgctaaa

SEQ ID NO: 86169 - DNA, 643 bp, Artificial Sequence
  derived and/or modified sequence
acagagactctgaggaagcagtcacctcaggcctctccatcctagagacggcagaaggacaaacatctcctgctggcacaaggaagtcataactcatgtgagtggagccatgtgggattaagaagtgataggagagcttgctgtctgtctctgctctccactgtgtgaggatacaacaggaagacagccatctggtgaggaagagagggccctcgccagataccggacctgctgacaccttgatcttggacttcccatcttccaggaaggcctgacctcagttgttccagggtaaagaatttgggcagtgcccacacccacgctgttggataacatttcttcaccataccagtgagggtgaatgtgtacacgcccagcttcctgcctgttactctccacagtatgcgaagaatatccctgacttctagccctgtgcgccttcttttgtttctgctgttgctactaatagccttggagatcatggttggtggtcactctctttgcttcaacttcactataaaatcattgtccagacctggacagccctggtgtgaagcgcaggtcttcttgaataaaaatcttttccttcagtacaacagtgacaacaacatggtcaaacctctgggcctcctggggaagaagg

SEQ ID NO: 86170 - protein, 879 aa, Artificial Sequence
  derived and/or modified sequence
MGTPRAQHPPPPQLLFLILLSCPWIQGSDRDPTLATPPAGQTLAVPSLPRATEPGTGPLTTAVTPNGVRGAGPTAPELLTPPPGTTAPPPPSPASPGPPLGPEGGEEETTTTIITTTTVTTTVTSPVLCNNNISEGEGYVESPDLGSPVSRTLGLLDCTYSIHVYPGYGIEIQVQTLNLSQEEELLVLAGGGSPGLAPRLLANSSMLGEGQVLRSPTNRLLLHFQSPRVPRGGGFRIHYQAYLLSCGFPPRPAHGDVSVTDLHPGGTATFHCDSGYQLQGEETLICLNGTRPSWNGETPSCMASCGGTIHNATLGRIVSPEPGGAVGPNLTCRWVIEAAEGRRLHLHFERVSLDEDNDRLMVRSGGSPLSPVIYDSDMDDVPERGLISDAQSLYVELLSETPANPLLLSLRFEAFEEDRCFAPFLAHGNVTTTDPEYRPGALATFSCLPGYALEPPGPPNAIECVDPTEPHWNDTEPACKAMCGGELSEPAGVVLSPDWPQSYSPGQDCVWGVHVQEEKRILLQVEILNVREGDMLTLFDGDGPSARVLAQLRGPQPRRRLLSSGPDLTLQFQAPPGPPNPGLGQGFVLHFKEVPRNDTCPELPPPEWGWRTASHGDLIRGTVLTYQCEPGYELLGSDILTCQWDLSWSAAPPACQKIMTCADPGEIANGHRTASDAGFPVGSHVQYRCLPGYSLEGAAMLTCYSRDTGTPKWSDRVPKCALKYEPCLNPGVPENGYQTLYKHHYQAGESLRFFCYEGFELIGEVTITCVPGHPSQWTSQPPLCKVAYEELLDNRKLEVTQTTDPSRQLEGGNLALAILLPLGLVIVLGSGVYIYYTKLQGKSLFGFSGSHSYSPITVESDFSNPLYEAGDTREYEVSI

SEQ ID NO: 86171 - DNA, 2640 bp, Artificial Sequence
  derived and/or modified sequence
atgggcacccccagagcccagcaccccccccccccccagctgctgttcctgatcctgctgagctgcccctggatccagggcagcgacagagaccccaccctggccaccccccccgccggccagaccctggccgtgcccagcctgcccagagccaccgagcccggcaccggccccctgaccaccgccgtgacccccaacggcgtgagaggcgccggccccaccgcccccgagctgctgacccccccccccggcaccaccgccccccccccccccagccccgccagccccggcccccccctgggccccgagggcggcgaggaggagaccaccaccaccatcatcaccaccaccaccgtgaccaccaccgtgaccagccccgtgctgtgcaacaacaacatcagcgagggcgagggctacgtggagagccccgacctgggcagccccgtgagcagaaccctgggcctgctggactgcacctacagcatccacgtgtaccccggctacggcatcgagatccaggtgcagaccctgaacctgagccaggaggaggagctgctggtgctggccggcggcggcagccccggcctggcccccagactgctggccaacagcagcatgctgggcgagggccaggtgctgagaagccccaccaacagactgctgctgcacttccagagccccagagtgcccagaggcggcggcttcagaatccactaccaggcctacctgctgagctgcggcttcccccccagacccgcccacggcgacgtgagcgtgaccgacctgcaccccggcggcaccgccaccttccactgcgacagcggctaccagctgcagggcgaggagaccctgatctgcctgaacggcaccagacccagctggaacggcgagacccccagctgcatggccagctgcggcggcaccatccacaacgccaccctgggcagaatcgtgagccccgagcccggcggcgccgtgggccccaacctgacctgcagatgggtgatcgaggccgccgagggcagaagactgcacctgcacttcgagagagtgagcctggacgaggacaacgacagactgatggtgagaagcggcggcagccccctgagccccgtgatctacgacagcgacatggacgacgtgcccgagagaggcctgatcagcgacgcccagagcctgtacgtggagctgctgagcgagacccccgccaaccccctgctgctgagcctgagattcgaggccttcgaggaggacagatgcttcgcccccttcctggcccacggcaacgtgaccaccaccgaccccgagtacagacccggcgccctggccaccttcagctgcctgcccggctacgccctggagccccccggcccccccaacgccatcgagtgcgtggaccccaccgagccccactggaacgacaccgagcccgcctgcaaggccatgtgcggcggcgagctgagcgagcccgccggcgtggtgctgagccccgactggccccagagctacagccccggccaggactgcgtgtggggcgtgcacgtgcaggaggagaagagaatcctgctgcaggtggagatcctgaacgtgagagagggcgacatgctgaccctgttcgacggcgacggccccagcgccagagtgctggcccagctgagaggcccccagcccagaagaagactgctgagcagcggccccgacctgaccctgcagttccaggccccccccggcccccccaaccccggcctgggccagggcttcgtgctgcacttcaaggaggtgcccagaaacgacacctgccccgagctgcccccccccgagtggggctggagaaccgccagccacggcgacctgatcagaggcaccgtgctgacctaccagtgcgagcccggctacgagctgctgggcagcgacatcctgacctgccagtgggacctgagctggagcgccgccccccccgcctgccagaagatcatgacctgcgccgaccccggcgagatcgccaacggccacagaaccgccagcgacgccggcttccccgtgggcagccacgtgcagtacagatgcctgcccggctacagcctggagggcgccgccatgctgacctgctacagcagagacaccggcacccccaagtggagcgacagagtgcccaagtgcgccctgaagtacgagccctgcctgaaccccggcgtgcccgagaacggctaccagaccctgtacaagcaccactaccaggccggcgagagcctgagattcttctgctacgagggcttcgagctgatcggcgaggtgaccatcacctgcgtgcccggccaccccagccagtggaccagccagccccccctgtgcaaggtggcctacgaggagctgctggacaacagaaagctggaggtgacccagaccaccgaccccagcagacagctggagggcggcaacctggccctggccatcctgctgcccctgggcctggtgatcgtgctgggcagcggcgtgtacatctactacaccaagctgcagggcaagagcctgttcggcttcagcggcagccacagctacagccccatcaccgtggagagcgacttcagcaaccccctgtacgaggccggcgacaccagagagtacgaggtgagcatctag

SEQ ID NO: 86172 - DNA, 2640 bp, Artificial Sequence
  derived and/or modified sequence
atggggacaccacgggcccagcacccacctcccccacaattgctgtttttaattctgctgtcttgcccctggatccagggatcagaccgtgacccgacgttggccacgccacctgccgggcagactcttgcagttccttcactcccgagagcgaccgaacctggcacaggacccttgaccacagccgttacccctaacggcgtccgcggtgctgggccgaccgccccagagctcctgacccccccccctggtactacagccccacctccaccgtctcccgctagtccaggtcctccgctggggcctgaaggcggcgaggaggagacaacaacgacaatcatcactacgactaccgtgactaccaccgttacatctccagtcctctgcaacaacaatataagtgagggcgagggatacgtagagtctcctgaccttggcagcccagtgagcaggactttgggccttctcgattgtacctactctatccacgtttatcccgggtacggcattgaaatccaagtgcagacactcaatctcagtcaggaggaggagttgctggtccttgccggcggaggatctcccggcctggcgccgagactgttagctaatagctcaatgctcggagagggccaggtcctgagatcacctactaacaggcttctgttgcacttccagtccccgagggtgccaagaggaggggggtttagaattcactatcaggcttaccttttgagttgcgggttcccaccgcgaccggcccacggcgacgtgagtgttacagatttacatccagggggaaccgccacgtttcattgtgactctggttaccagctgcagggtgaagagactttgatctgcctgaacggcacccggccgtcttggaatggtgaaaccccctcatgcatggccagttgtgggggtacaatacacaatgcaactctggggagaatcgtgagtcctgagccgggcggagccgtcggaccaaacctgacctgtagatgggtgatagaagccgcagaaggtagaagacttcacctccattttgagagagtcagcctggacgaggataacgatagactgatggtaaggtcagggggcagccctctgtcacctgtcatatacgactctgatatggacgatgttcccgagcgtggtcttatatcagatgcccagagtctttatgtcgaactgttgtctgagacccccgcaaaccctctgctactcagcttgcggtttgaggctttcgaggaagaccgctgtttcgctcccttcctggcccatgggaatgtgacaaccaccgatcctgagtacaggcctggagcgctggctacgttcagctgtctacctggttacgcgttggaaccgcctggcccccccaacgctatagagtgcgttgacccaacagagcctcactggaacgatactgagcccgcctgcaaggcgatgtgcggcggggaactatcagagcccgctggtgttgttttaagccctgactggcctcagtcatatagtccgggccaagactgtgtgtggggggtacatgtccaggaggagaagagaatcttgttgcaggtggaaatcttgaatgttagagagggagacatgctgaccctcttcgatggcgacggtccctcagcaagagtgcttgcacaactgagggggcctcaacctcggaggcgcctcttgagctcgggtcctgacttgactctgcaattccaggcacctccagggccgcccaacccgggacttgggcaaggcttcgtcctccacttcaaggaggtcccaaggaacgacacctgccccgagctcccacctccggagtgggggtggcgcaccgctagccatggagaccttatcagaggcacggtgcttacctatcagtgtgaacccggctacgaactcctgggctccgatatactcacgtgtcagtgggacctttcatggtctgcagcacctcctgcgtgtcagaaaatcatgacatgtgctgacccgggcgaaatagccaatggacaccgaaccgctagcgacgccgggttccctgtaggctctcatgtgcagtacaggtgtctgcccgggtacagcttggagggtgctgctatgctgacctgttactctagggacaccgggactccgaagtggagcgatcgcgttcccaaatgtgctctgaaatacgaaccgtgtctaaatccaggagtgccagagaatggctaccaaactctgtacaagcatcattatcaagctggggagtcgcttcgctttttctgctacgaaggctttgaactgatcggcgaagtaaccataacctgcgtccccggccacccaagccagtggactagccagcctcccctatgtaaagtagcatacgaggagctgttggataacaggaagctggaggttacccagactactgatccctcccggcagctggaaggcggaaatttggctcttgcaatactgctgccactgggcctcgttatagtactcgggtctggcgtttacatttactacactaaactccagggaaaaagtctttttggcttttcggggtcccatagttactcccccattactgtggagtctgattttagcaatccattgtacgaggcaggcgatacacgggaatatgaggtttctatctag

SEQ ID NO: 86173 - DNA, 2640 bp, Artificial Sequence
  derived and/or modified sequence
atgggcaccccccgggcccagcaccccccaccaccccagctgctcttcctgatcctgctgagctgcccctggatccagggcagtgaccgggaccccaccctggccaccccacctgctggccagaccctggccgtgcccagcctgccccgggccacagagcccggcaccggccccctgaccacagctgtgacccccaacggggtgagaggagctggccccacagcccctgagctgctgaccccacctcctggcaccacagcccctcctccacccagccctgccagccctggcccccccctgggccctgagggcggggaggaggagaccaccaccaccatcatcaccaccaccaccgtgaccaccaccgtgaccagccctgtgctgtgcaacaacaacatcagcgagggggagggctacgtggagagcccagacctgggcagccctgtgtccaggaccctgggcctgctggactgcacctacagcatccacgtgtacccaggctacggcatcgagatccaggtgcagaccctgaacctgagccaggaggaggagctgctggtgctggccggcggcggcagccctggcctggccccccggctgctggccaacagctccatgctgggggagggccaggtgctgcggagccccaccaaccggctgctgctgcacttccagagcccccgggtgccccggggcggcggcttccgcatccactaccaggcctacctgctgagctgtggcttcccccccaggcctgcccatggagatgtgtctgtgacagacctgcaccctgggggcacagccaccttccactgtgacagcggctaccagctgcagggcgaggagaccctcatctgcctgaatggcacccggcccagctggaatggagagacccccagctgcatggccagctgtggcggcaccatccacaatgccaccctgggcagaattgtgtccccagagcccggcggcgctgtgggccccaacctgacctgccgctgggtgattgaggccgctgagggccggcggctgcacctgcactttgagcgggtgtccctggatgaagataatgaccggctgatggtgcgcagcggcggcagccccctgagccctgtgatctatgacagcgacatggatgatgtgcctgagcggggcctcatcagtgatgcccagagcctgtatgtggagctgctgtctgagaccccagccaaccccctgctgctgagcctgcgctttgaggcctttgaagaagatcgctgctttgcccccttcctggcccatggaaatgtgaccaccacagatcctgagtacagacctggggccctggccaccttcagctgcctgcccggctacgccctggagcccccaggccccccaaatgccattgaatgtgtggaccccacagagccccactggaatgacacagagcccgcctgcaaggccatgtgtggcggggagctgtctgagcctgctggggtggtgctgagcccagactggccccagagctacagccctggccaggactgtgtgtggggcgtgcacgtgcaggaggagaagaggatcctgctgcaggtggagatcctgaatgtgcgggagggggacatgctgaccctgtttgatggagatggccccagcgcccgggtgctggcccagctgcggggcccccagccccggcggcggctgctgagcagcggccctgacctgaccctgcagttccaggcccctcctggcccccccaaccctggcctgggccagggctttgtgctgcacttcaaggaggtgcccagaaatgacacctgcccagagctgcccccacctgagtggggctggaggacagccagccatggagacctgatccggggcaccgtgctgacctaccagtgtgagcccggctatgagctgctgggcagtgacatcctgacctgccagtgggacctgtcctggagcgctgcccccccagcctgccagaagatcatgacctgtgccgaccccggggagatcgccaacggccacaggacagccagtgatgctggcttccctgtgggcagccacgtgcagtaccgctgcctgcccggctacagcctggagggcgccgccatgctgacctgctacagccgggacaccggcacccccaagtggagcgacagagtgcccaagtgtgccctgaagtatgagccctgcctgaaccctggggtgcctgaaaatggctaccagaccctgtacaagcaccactaccaggccggggagagcctgcgcttcttctgctatgagggctttgagctgattggagaggtgaccatcacctgtgtgcccggccaccccagccagtggaccagccagccccccctgtgcaaggtggcctatgaggagctgctggacaacaggaagctggaggtgacccagaccacagaccccagccggcagctggagggcggcaacctggccctggccatcctgctgcccctgggcctggtgattgtgctgggcagcggcgtgtacatctactacaccaagctgcagggcaagagcctgtttggcttcagcggcagccacagctacagccccatcaccgtggagagtgacttcagcaaccccctgtatgaagctggggacacccgggagtatgaggtgtccatctag

SEQ ID NO: 86174 - DNA, 2640 bp, Artificial Sequence
  derived and/or modified sequence
atgggcaccccccgggcccagcaccccccccccccccagctgctgttcctcatactgctctcctgtccctggatacaggggtcggatagagaccccacactagccactccccctgcggggcagaccttggcagtgccttctttaccaagagctacagagccggggacaggccccctgactacggcagtgacccctaacggcgtccgtggggctggaccaacagctcctgaattgcttacgcccccaccgggaactaccgcaccgcctcccccttcacccgcaagtcccgggcccccactcggtcccgaagggggggaagaggagaccactaccactataatcacgacgacaacagtgaccacaaccgttactagcccagtgctgtgtaataacaacatctctgagggggaaggctacgtggaatctccagatctgggatcgcctgtatccagaactctcggcctccttgattgcacctatagtattcatgtataccctggctacgggatagaaatacaggttcagaccttaaacctgagtcaggaggaagagttgttagtgctggctgggggcggttcgcccggcctggctcctaggctactcgccaattcttccatgcttggggaaggccaggttctcaggtcacctacgaaccggctcctgctccacttccaatcaccgcgggtgcccagaggtggggggttcagaatccattaccaagcttatctgttaagctgtggctttccacctaggccagcgcatggggatgtgtcagtgaccgacctgcacccaggcggtacagcaacatttcattgtgattcggggtaccagttacaaggggaggaaaccctgatatgcctaaacggcactaggccatcctggaacggcgaaacacccagctgcatggcgagctgcggggggaccattcataacgctacactcggtaggattgtttcacccgagccaggcggggcagtgggacctaacctgacatgccggtgggtaatagaggcggctgagggcaggagactgcatcttcactttgaaagggtctcgcttgacgaagataacgatcggctgatggttcgttcggggggctctcctctgtctcctgtgatctacgatagcgacatggatgatgtgccagagcggggactcatctccgatgcccagagtctctacgtcgaactgctcagtgagacccccgccaaccccctcctgctgagtctgcgatttgaggcgttcgaagaggaccggtgttttgcaccttttctggcccatggaaacgtgactacaacagacccagagtaccgtcccggggcacttgccaccttcagctgtctccccggctacgctttggagccccctggcccaccaaatgcaatcgagtgcgttgacccaactgagccacattggaatgataccgaacccgcatgcaaagccatgtgcgggggcgagttgtccgagcccgccggggtggttttaagccctgactggcctcaatcgtactctcctggtcaggactgcgtgtggggcgtgcatgtgcaggaagaaaagaggatcctgttacaggtcgagatcctcaatgtgcgcgagggcgacatgcttactctgtttgacggcgacggtccaagtgccagagtacttgcgcagttaagaggcccacagccacggcggaggctgctgtcttccgggcccgacctaactctgcaattccaggcacccccagggccgccgaatcctggtctgggtcagggtttcgtgctccacttcaaagaggtacctaggaatgacacctgcccagagctgccaccacccgagtgggggtggagaacggccagccacggagacttgatccggggaactgtgcttacctaccagtgcgagccaggatatgagctcctgggctcagacatcctgacctgccaatgggacctgtcctggtcggcagcccccccagcttgccagaaaatcatgacctgcgccgaccctggagaaatcgccaacggtcatcgaacagccagcgatgccggattcccagtcgggtctcacgttcagtatcgctgcctgccgggttacagcctcgaaggggctgccatgttgacttgttactccagagacactggaacccccaagtggagcgaccgggttcccaaatgtgcccttaaatatgaaccatgtcttaatccaggagtgcctgagaacggctatcagacactgtacaagcatcactaccaagctggcgaatccctgcgctttttctgttacgaaggattcgagcttataggcgaagttaccattacatgtgtacctgggcaccccagccaatggacctcccagccccctttatgcaaagtggcctatgaggagctccttgacaatcgcaaactggaggtaacccaaacaacagatccaagtcggcagttggaagggggaaatctcgcacttgccattttactgccactgggcctggtcattgtgcttggttccggcgtatacatctattacactaagctgcagggtaaaagcctcttcgggtttagtggctcccactcatatagccccatcaccgtagagagcgatttctctaacccattatatgaggccggggacacccgcgagtatgaggtgagcatctag

SEQ ID NO: 86175 - DNA, 2640 bp, Artificial Sequence
  derived and/or modified sequence
atgggtacccccagggctcagcatccacctcctccacagctgcttttcctgatcctcttaagttgtccctggatacaaggatccgacagggatccgactttggcaaccccacccgctggccagactctggccgtgccaagtctgccccgtgctacagaacctggcacgggtcccctcacgacagctgtcactccaaacggggtccgcggagctggcccaacagctcctgagctgcttactccccctcctggaactaccgcaccaccgccaccctcccctgcgtcacccggtcccccactgggacctgaaggcggtgaggaggaaacaacgaccacgatcattaccactacgaccgtaaccacaactgtcacaagccctgtgctatgtaacaataatatttctgagggagaagggtatgtggaaagcccagatctcgggagcccagttagtcggactctgggactcttggactgcacgtactccattcatgtgtaccctggctatggtattgagattcaagtccagacactgaatttatcccaagaagaagagctgcttgtgctggccggtggcggtagtcccggattggctcctaggctgttagccaatagcagcatgctgggtgaggggcaggtcttaagaagcccaactaatcgcctacttctccacttccagtccccacgtgtcccaagagggggtggttttaggatccactaccaggcttacctgctgagctgcggcttccccccaaggcctgcccacggagatgtcagcgttaccgatcttcaccccggtgggaccgccactttccactgcgactctggctatcaacttcagggggaagaaaccttaatctgtttaaacggcacccgtccttcctggaatggtgagacgccctcatgtatggcttcttgcggcggtaccattcataacgcaacattaggaaggatcgtgtcccctgagccaggcggtgccgtaggccctaacctcacttgccggtgggtaatagaggccgctgagggtcggagactccaccttcacttcgagcgggtctcactggacgaggacaacgaccgtcttatggtgcggtctggaggatctcctctttcccccgtgatctatgacagcgatatggatgatgtgccagaacgaggactcatctctgatgctcaaagtttatatgtggagctattatcggaaactcctgccaacccgctgctgctttctcttagatttgaggccttcgaagaagacagatgctttgcccctttcctggctcacggtaatgtgactacaaccgaccccgagtacaggcccggagcgctcgccactttttcatgcttgcccggatacgcactcgaaccccctggccctcccaatgctatcgagtgtgtagacccaacagagccccactggaatgacactgaaccggcttgcaaggcaatgtgtggcggagagctgagcgaaccagcaggcgtggtcttgtcgcctgactggccccaatcctattccccgggacaggactgcgtctggggcgtgcatgtgcaggaagaaaagcgcattctcttgcaagtggaaatactcaatgtgagggaaggagatatgctgacgctcttcgatggagacggaccgtccgccagagtcctggcccaactgaggggccctcagcctcgtaggcgcctgctgagcagcggccctgatcttacactgcagttccaggcacctcccggaccaccgaatcctgggctcgggcagggtttcgtgctgcattttaaggaggtcccaaggaacgacacatgcccagagttgccgccacccgaatggggctggcgcaccgcaagccatggagatctgatccgaggaactgtgttaacataccagtgcgagcctgggtacgaattgctgggctctgatatattgacctgtcagtgggacttgagctggtcggctgcccctcctgcgtgtcagaaaatcatgacttgcgcagacccaggagaaatcgccaatggacacagaacagcaagcgatgctgggtttccagtcggcagccacgtccagtaccgctgtctccccggatattccctggaaggggcagccatgcttacctgttattcacgcgacactggaaccccaaagtggtctgatcgcgttcctaagtgcgcactgaagtatgagccttgtctgaacccaggcgtccctgaaaacggctatcagacactgtacaaacaccactatcaggcaggagaaagcctacggttcttctgttacgagggctttgagttgattggtgaagttactattacttgtgtacccggacatccctcccagtggacctcacagccacccctttgtaaggtagcatacgaagaactgctagacaacaggaagcttgaggtgacccagactaccgacccctcccgtcagctggagggtgggaacttggcactggctattttgctgcccctgggtcttgtgattgtgctcggcagtggggtgtacatctattacaccaaattacagggaaaatctctgtttggctttagtggatctcatagttacagcccaatcactgtggagtccgacttcagcaatccactatatgaagctggtgacacgcgggagtacgaggtgtcgatatag

SEQ ID NO: 86176 - DNA, 2919 bp, Artificial Sequence
  derived and/or modified sequence
aattaaagggaaagataaacggagacggaggaaaggtggcagccagattacttagagaggcacagaggagagagatcggggtgagtcgccatggggactcccagggcccagcacccgccgcctccccagctgctgttcctaattctgctgagctgtccctggatccagggatctgatcgggaccccacgctagccacccctccggccggccagactctcgcagtgccctccctgccacgggccactgagccggggacagggcctctgacaacagccgtcacccctaacggggtcaggggggcaggccccactgcgccagaactgctgaccccgcccccaggaaccacagccccacccccacccagccctgcctccccagggcctccccttgggcctgagggaggagaggaggagacgacgaccaccatcatcaccacgacaactgttaccactacggtgaccagcccagttctgtgtaataacaacatctccgagggcgaagggtatgtggagtctccagatctggggagccccgtcagccgcaccctggggctcctggactgcacttacagcatccatgtctaccctggctacggcattgagatccaggtgcagacgctgaacctgtcacaggaagaggagctcctggtgctggctggtgggggatccccaggcctggccccccgactcctggccaactcatccatgcttggagaaggacaagtccttcggagcccaaccaaccggctgcttctgcacttccagagcccacgggtcccaaggggcggtggcttcaggatccactatcaggcctacctcctgagctgtggcttccctccccggccggcccatggggacgtgagtgtgacggacctgcaccctgggggcactgccacctttcactgtgattcgggctaccagctgcagggagaggagaccctcatctgcctcaatggcacccggccatcctggaacggtgaaacccccagctgcatggcatcctgtggtggcaccatccacaatgccaccctgggccgcatcgtgtccccagagcctgggggagccgtagggcccaacctcacctgccgttgggtcattgaagcagctgaggggcgccggctgcacctgcactttgaaagggtctcgctggatgaggacaatgaccggctgatggtgcgctcagggggcagccccctatcccccgtgatctatgattcggacatggacgatgtccccgagcggggtctcatcagtgacgcccagtccctctacgtggagctgctgtcagagacacctgccaatcccctgctgttaagccttcgatttgaagcctttgaggaggatcgctgcttcgcccccttcctggcacatggaaatgtcactaccacggaccctgagtatcgcccaggggcactggcaaccttctcgtgcctcccaggatatgccctggagccccctgggccccccaatgccatcgaatgtgtggatcccacagaaccccactggaacgacacagagccggcctgcaaagccatgtgtggaggggagctgtcggaaccagctggcgtggtcctctctcccgactggccccagagctatagcccgggccaagactgcgtgtggggcgtgcacgtccaggaagagaagcgcatcttgctccaagttgagatattgaatgtgcgggaaggggacatgctgacgctgttcgacggggacggtcccagcgcccgagtcttggcccagctgcggggacctcagccgcgccgccgccttctctcctctgggcccgacctcacactgcagtttcaggcaccgcccgggcccccaaatccaggcctgggccagggcttcgtattgcacttcaaagaggtcccgaggaacgacacgtgccccgagctgccacctccggagtggggctggagaacggcatcccacggggacctgatccggggcacggtgctcacctaccagtgcgagcctggctacgagctgctaggctccgacattctcacttgccagtgggacctgtcttggagcgccgcgccgcccgcctgccaaaagatcatgacttgtgctgaccctggcgagattgccaacgggcaccgcaccgcctcggacgccggcttccccgttggctcccacgtccagtaccgctgcctgccagggtacagcctcgagggggcagccatgctcacctgctacagccgggacacaggcacacccaagtggagcgatagggtccccaaatgcgccttgaagtacgagccgtgcctgaacccgggggttcccgagaatggctaccagacgctgtacaagcaccactaccaggcgggcgagtctctgcgcttcttctgctatgagggctttgagcttatcggcgaggtcaccatcacctgtgtgcccggccacccctcccagtggaccagccagcccccactctgcaaagttgcctatgaggagctcctggacaaccgaaaactggaagtgacccagaccacagatccatcacggcagctggaaggggggaacctggccctggccatcctgctgcctctaggcttggtcattgtcctcggcagtggcgtttacatctactacaccaagcttcagggaaagtcccttttcggcttctcgggctcccactcctacagccccatcaccgtggagtcggacttcagcaacccgctgtatgaagctggggatacgcgggagtatgaagtttccatctgaaccccaagactacagctgcaggacccaggacgcccctcccctcctcattcgggcagagggaaatacgggacccggtctctgcctcctggctgccctcctccctggctgtgtaaatagtctccctatcccacgagggggctttgatggccctggagatcctacagtaaataaaccagcatcctgccgccc

SEQ ID NO: 86177 - protein, 1030 aa, Artificial Sequence
  derived and/or modified sequence
MAEPGGAAGRSHPEDGSASEGEKEGNNESHMVSPPEKDDGQKGEEAVGSTEHPEEVTTQAEAAIEEGEVETEGEAAVEGEEEAVSYGDAESEEEYYYTETSSPEGQISAADTTYPYFSPPQELPGEEAYDSVSGEAGLQGFQQEATGPPESRERRVTSPEPSHGVLGPSEQMGQVTSGPAVGRLTGSTEEPQGQVLPMGVQHRFRLSHGSDIESSDLEEFVSQEPVIPPGVPDAHPREGDLPVFQDQIQQPSTEEGAMAERVESEGSDEEAEDEGSQLVVLDPDHPLMVRFQAALKNYLNRQIEKLKLDLQELVVATKQSRAQRQELGVNLYEVQQHLVHLQKLLEKSHDRHAMASSERRQKEEELQAARALYTKTCAAANEERKKLAALQTEMENLALHLFYMQNIDQDMRDDIRVMTQVVKKAETERIRAEIEKKKQDLYVDQLTTRAQQLEEDIALFEAQYLAQAEDTRILRKAVSEACTEIDAISVEKRRIMQQWASSLVGMKHRDEAHRAVLEALRGCQHQAKSTDGEIEAYKKSIMKEEEKNEKLASILNRTETEATLLQKLTTQCLTKQVALQSQFNTYRLTLQDTEDALSQDQLEQMILTEELQAIRQAIQGELELRRKTDAAIREKLQEHMTSNKTTKYFNQLILRLQKEKTNMMTHLSKINGDIAQTTLDITHTSSRLDAHQKTLVELDQDVKKVNELITNSQSEISRRTILIERKQGLINFLNKQLERMVSELGGEEVGPLELEIKRLSKLIDEHDGKAVQAQVTWLRLQQEMVKVTQEQEEQLASLDASKKELHIMEQKKLRVESKIEQEKKEQKEIEHHMKDLDNDLKKLNMLMNKNRCSSEELEQNNRVTENEFVRSLKASERETIKMQDKLNQLSEEKATLLNQLVEAEHQIMLWEKKIQLAKEMRSSVDSEIGQTEIRAMKGEIHRMKKYCRTTQDAHRHVHEQHGTHAGTCTKNTGRAQARARTTRDARGHVHEQHGTRAGTCTNNTGRAQARARTRDARRHVHEHRTHTARA

SEQ ID NO: 86178 - DNA, 3093 bp, Artificial Sequence
  derived and/or modified sequence
atggctgagcctggaggggcagcaggacgctcccaccccgaagacggctcagcgtcagagggagaaaaagagggcaataacgagagccatatggtgtcgccacccgaaaaggatgacggccagaagggagaagaggccgtggggtccacagaacacccagaggaggtgaccacccaagccgaggccgctatagaggagggagaagtggagaccgagggcgaagcagctgttgagggtgaggaggaggccgtcagctacggagatgctgagtctgaggaagaatattactacactgaaacctcctctcccgaagggcagatatccgccgccgataccacatatccgtacttctctccgccccaggaattgccaggtgaagaagcttatgattctgtgtcgggagaggcagggctgcagggcttccagcaagaagccaccggtccaccggagtccagggagagacgggtgaccagtcccgagccgtctcacggggttctcggcccttccgagcagatgggccaggtcacaagtggaccggctgtcgggaggctcaccggctctaccgaagagccccagggtcaggtcctccctatgggggttcagcacagattcagactcagccacgggagcgacatagaatcctcggacctggaggagttcgttagtcaggagccagtcattcccccaggggtccccgacgctcatccacgggaaggagatcttcctgtgtttcaggatcagatacagcagccatctactgaggagggagccatggcagagagagtcgagtcagagggttctgacgaagaagcggaagacgaaggatctcaactggtggtgctggatcccgaccaccccctcatggttaggttccaagccgccttgaagaattacttgaacaggcaaatagagaaactgaaactcgacctacaggagctagtcgtagcaacgaaacagtctagggcccagagacaggagctgggcgtgaacctctatgaagtccagcagcatctggttcatttacaaaagctgctggaaaagagccacgaccggcacgcaatggcctctagtgaacgccggcaaaaagaagaggagctgcaggcggcccgcgccctatacaccaagacctgtgccgcagccaatgaagaaagaaagaaattggccgctctgcaaactgagatggagaacctggcgcttcacttgttttatatgcagaacattgaccaggacatgagagatgatattagagtgatgactcaagttgttaaaaaggccgagactgagaggataagggctgagattgagaagaaaaaacaggatttatatgtagaccagcttaccacaagagcacagcagttagaagaggacatcgcgctcttcgaggcacagtacctggcacaggcggaggacaccagaattttaaggaaggccgtttctgaggcctgcaccgagatcgacgccatttcagttgaaaagcggcgtataatgcagcagtgggcaagcagtcttgttggcatgaaacatagggatgaagcgcatcgtgcggtcctcgaagcacttagagggtgccagcatcaggccaaaagtaccgatggcgaaatcgaagcatacaagaagtcaatcatgaaagaggaggagaaaaatgagaagctcgcatctatcctgaaccgcactgaaaccgaggccacgctgctgcagaaacttactacacagtgtctcaccaagcaagtggccttgcagagtcagttcaatacctataggctgaccctccaggacaccgaggatgcgctgtcgcaggaccaactggaacagatgatactcacagaggagcttcaggccatcagacaagcgattcagggagagctcgagctgcggaggaagactgacgcggcaattagagagaaactccaggagcacatgacaagcaataaaaccaccaagtatttcaaccaactcatactacgtttgcagaaggagaagaccaatatgatgacccatcttagcaagattaatggagatattgctcaaaccaccttggatattacccacacttcttcgcggttggacgcccatcagaaaaccctggtagaacttgaccaagacgtgaagaaggttaacgaactgattaccaatagtcagagcgaaatatcaagacggaccattctgatcgagcgaaagcagggccttattaacttcctaaataagcaactcgagcgtatggtaagcgagttaggcggagaggaagttggtcctctcgagctggaaatcaagcgcctatcaaaactgatagacgagcacgatggcaaggccgttcaagctcaagtaacgtggctgaggcttcagcaggaaatggtgaaggtgacgcaggagcaagaggaacagctagccagcctcgatgcgagtaaaaaagagctgcacataatggaacagaaaaagctccgggtggaatcaaagatcgagcaggagaagaaggagcagaaggagatcgaacatcacatgaaggatctggataatgaccttaagaagctaaatatgctgatgaacaagaatagatgttcctccgaagaactggagcaaaataacagagtaaccgaaaacgagttcgttcgcagcctgaaggcatctgaaagggagacaattaaaatgcaggataagctgaatcaattgtctgaggagaaggccacacttcttaaccagctagtggaagccgagcaccagattatgctgtgggagaagaaaattcaacttgccaaggagatgcggtcttcggtggatagcgagattggacagaccgaaatccgcgctatgaaaggtgagatccatcgaatgaagaagtattgtagaaccacacaggacgcccaccgccacgtacacgaacagcacgggacacatgcaggcacttgtactaagaacaccggtagagctcaggctagggcccgaaccactagggacgctagaggacatgtgcatgagcagcatgggaccagagcggggacttgtacgaacaacactgggcgcgcccaagcccgcgccagaacccgggatgcccgcagacatgtccacgagcacaggacccacacagcccgtgcctag

SEQ ID NO: 86179 - DNA, 3093 bp, Artificial Sequence
  derived and/or modified sequence
atggccgagcccggcggggccgccggccgcagccacccagaagatggcagcgccagcgagggggagaaggagggcaacaatgaaagccacatggtgagccccccagagaaggatgatggccagaagggggaggaggccgtgggcagcacagagcaccctgaggaggtgaccacccaggccgaggccgccatcgaggagggggaggtggagacagaaggagaggccgctgtggagggggaggaggaggccgtgtcctatggagatgctgagagcgaggaggagtactactacacagagaccagcagccctgagggccagatctctgctgctgacaccacctacccctacttcagccccccccaggagctgcccggggaggaggcctatgattctgtgtctggagaggccggcctgcagggcttccagcaggaggccaccggccccccagagagccgggagcggcgggtgaccagccctgagcccagccatggagtgctgggccccagcgagcagatgggccaggtgaccagcggccctgctgtgggccgcctgaccggcagcacagaggagccccagggccaggtgctgcccatgggcgtgcagcaccgcttccggctgagccacggcagtgacatcgagagcagtgacctggaggagtttgtgtcccaggagcctgtgatccccccaggagtgcctgatgcccacccccgggagggggacctgcccgtcttccaggaccagatccagcagcccagcacagaggagggcgccatggccgagcgggtggagagcgagggcagtgatgaggaggccgaggatgagggcagccagctggtggtgctggaccctgaccaccccctgatggtgcgcttccaggccgccctgaagaactacctgaaccggcagatcgagaagctgaagctggacctgcaggagctggtggtggccaccaagcagagccgggcccagaggcaggagctgggcgtgaacctgtatgaggtgcagcagcacctggtgcacctgcagaagctgctggagaagagccatgacagacatgccatggccagcagcgagcggcggcagaaggaggaggagctgcaggccgcccgggccctgtacaccaagacctgtgccgccgccaatgaggagaggaagaagctggccgccctgcagacagagatggagaacctggccctgcacctgttctacatgcagaacatcgaccaggacatgagagatgacatccgggtgatgacccaggtggtgaagaaggccgagacagagcgcatccgggcagaaattgagaagaagaagcaggacctgtatgtggaccagctgaccacccgggcccagcagctggaggaggacatcgccctgtttgaggcccagtacctggcccaggccgaggacacccgcatcctgaggaaggctgtgtctgaggcctgcacagaaattgatgccatctctgtggagaagaggcgcatcatgcagcagtgggccagcagcctggtgggcatgaagcacagagatgaggcccacagagctgtgctggaggccctgcggggctgccagcaccaggccaagagcacagatggagaaattgaggcctacaagaagagcatcatgaaggaggaggagaagaatgagaagctggccagcatcctgaacagaacagaaacagaggccaccctgctgcagaagctgaccacccagtgcctgaccaagcaggtggccctgcagagccagttcaacacctaccgcctgaccctgcaggacacagaagatgccctgagccaggaccagctggagcagatgatcctgacagaggagctgcaggccatccggcaggccatccagggcgagctggagctgcggaggaagacagatgctgccatccgggagaagctgcaggagcacatgaccagcaacaagaccaccaagtacttcaaccagctgatcctgcggctgcagaaggagaagaccaacatgatgacccacctgagcaagatcaatggagacatcgcccagaccaccctggacatcacccacaccagcagccggctggatgcccaccagaagaccctggtggagctggaccaggatgtgaagaaggtgaatgagctgatcaccaacagccagagcgagatcagcaggaggaccatcctgattgaaaggaagcagggcctcatcaacttcctgaacaagcagctggagaggatggtgtctgagctgggcggggaggaggtgggccccctggagctggagatcaagaggctgagcaagctgattgatgaacatgatggcaaggctgtgcaggcccaggtgacctggctgcggctgcagcaggagatggtgaaggtgacccaggagcaggaggagcagctggccagcctggatgccagcaagaaggagctgcacatcatggagcagaagaagctgcgggtggagagcaagattgagcaggagaagaaggagcagaaggagattgagcaccacatgaaggacctggacaatgacctgaagaagctgaacatgctgatgaacaagaaccgctgcagcagcgaggagctggagcagaacaacagagtgacagaaaatgaatttgtgcgcagcctgaaggccagcgagcgggagaccatcaagatgcaggacaagctgaaccagctgtctgaggagaaggccaccctgctgaaccagctggtggaggccgagcaccagatcatgctgtgggagaagaagatccagctggccaaggagatgaggagctctgtggacagcgagatcggccagacagagatccgggccatgaagggggagatccacaggatgaagaagtactgcaggaccacccaggatgcccaccgccacgtgcatgagcagcacggcacccatgctggcacctgcaccaagaacacaggccgggcccaggcccgggcccggaccaccagagatgcccggggccacgtgcatgagcagcacggcaccagggctggcacctgcaccaacaacacaggccgggcccaggcccgggcccggaccagagatgccaggagacatgtgcatgagcacaggacccacacagcccgggcctag

SEQ ID NO: 86180 - DNA, 3093 bp, Artificial Sequence
  derived and/or modified sequence
atggccgagcccggcggcgccgccggccggagccaccccgaggacgggagcgcctcagagggagaaaaggaaggcaacaatgagtcccacatggtcagcccacccgagaaggacgatggccaaaaaggggaggaagcggtgggaagcaccgagcatcctgaggaagtgacaacccaagctgaggctgcgatcgaggagggtgaagtcgaaacagagggtgaagccgctgtggaaggagaggaagaggcagtgagctatggagacgccgagtcggaggaagagtactattatactgagacatctagccctgaaggtcagatatcagctgctgatacgacctacccatacttcagccctcctcaagagctgcccggcgaggaagcctacgactctgttagtggggaggctggactccaggggtttcagcaggaagctacgggaccaccagagagccgcgaaaggagggttacttcccccgagccaagccatggagttttgggcccttcagaacagatgggacaggtgacaagtggaccagccgttggccgcttgaccggctcaaccgaagaaccgcagggacaggtgcttcccatgggggttcagcatagattcagactgagccatggcagcgacattgagtcatccgacctcgaggagttcgtttctcaggagcctgtaatacctcccggggttcctgacgcacatcctcgcgagggcgaccttccggtgtttcaggatcagattcagcagccatccacagaagaaggcgccatggccgagcgagtggaaagcgagggctccgatgaggaggcagaggacgagggaagccagctcgtcgtgctggaccccgaccatcccctgatggttcgctttcaggccgcactgaagaactatttgaatcggcagatcgaaaaattgaagctcgacttgcaggaactggtggtggccactaagcagagtcgggcccagcgacaggaattgggagttaatctgtacgaagtgcaacagcacctcgtgcacctacaaaagctgctggagaagagccacgaccgccatgctatggcctctagcgaacggaggcaaaaggaagaggagcttcaggccgcgcgggcgctctacaccaagacatgcgcagccgcgaatgaagagcgcaagaaactcgcagctctccaaactgagatggagaatctggcactgcatctcttctatatgcagaatatcgaccaggacatgagggatgacatccgggtcatgacacaggttgtgaagaaggctgaaaccgaacggatacgcgcagaaattgaaaagaagaagcaggatctctacgtcgatcagcttaccactcgggcccagcagttggaggaggacatagcgctgttcgaggctcaatatctcgcccaagcagaagatactagaattcttcgcaaggctgtatcagaagcctgcactgaaatcgatgccatctcggtggaaaagagaaggataatgcagcagtgggcttcaagtctggtgggaatgaagcaccgcgatgaggctcatcgcgccgtcctggaggccctacgggggtgccagcaccaagctaagtcaacagatggcgagatcgaggcttacaagaaatccataatgaaggaggaagaaaaaaatgagaaactggcgagcatcctcaatcgcacagagaccgaggccaccctcctgcagaaactgaccacacagtgtttgaccaaacaggtggcactgcagtctcaattcaatacctaccggcttaccctgcaggacacagaagatgctctttcgcaggaccagctggagcagatgattctgacagaggaactgcaagcaatcagacaggcaattcagggtgagttggaactacgccgcaagactgacgctgccatccgtgagaaactccaagagcacatgacaagtaataagacaacaaagtattttaaccagctgatcctgcgcctgcagaaagagaaaaccaacatgatgacccatctttctaaaatcaatggagacatcgcacaaactacactagatattacgcacactagttcacgcctagatgcacatcagaaaaccctcgtggagctcgaccaggacgtgaaaaaggtgaatgaacttatcaccaattcgcagtctgaaataagccgccgcacaattctaattgagagaaagcaaggtctaataaattttttgaataaacaactcgagcgaatggtcagcgaactggggggcgaggaagtggggcccctcgaactggagattaagcgactatcaaagctgattgacgagcatgatggaaaggccgtacaggctcaggtcacctggctgagactgcaacaagaaatggtaaaagtgacgcaagagcaggaggagcaactagccagcttagatgccagtaagaaagagttgcatatcatggaacagaagaaacttcgcgtggagagtaagatagaacaggagaagaaggagcagaaggaaatagagcaccacatgaaagacctcgacaacgaccttaagaaactcaacatgctgatgaataagaatcgctgctcatccgaggagctagagcagaacaatcgagtgacagagaacgagtttgtacgcagtctaaaagcctctgagcgggagacgatcaagatgcaggataagctgaatcagctgtcggaagagaaggcaactttgctgaatcagcttgtcgaggctgagcatcagatcatgctgtgggagaaaaaaatacaactggcaaaagaaatgcgaagcagtgtggactccgagatcgggcagaccgaaatcagggccatgaaaggggagatacatcggatgaagaaatattgtcgaaccacacaggatgctcatcgccacgtgcacgagcagcatggaacacacgcaggcacatgtaccaagaatactgggcgggctcaagctagggccaggaccaccagagatgcccggggccacgtgcatgaacagcacggcacgcgggccggtacttgcaccaacaacacagggcgcgcccaggcccgcgctcgaacacgtgatgccaggaggcatgtccatgagcaccggacccacactgctcgggcctag

SEQ ID NO: 86181 - DNA, 3093 bp, Artificial Sequence
  derived and/or modified sequence
atggccgagcctggcggagcggcagggcgaagccatccagaagacgggtccgcaagcgaaggagagaaggagggcaacaacgaaagccacatggtgtctccccctgaaaaagacgatggccagaaaggggaggaggcagtcgggagtaccgaacatcccgaggaggtaactactcaggcggaagccgctatcgaagaaggggaggtcgaaactgaaggcgaggctgctgtcgaaggcgaggaggaagccgtatcatatggagatgctgaatccgaagaagagtactattataccgaaacctcctccccggaaggacagatctctgccgcagacacgacttacccatacttctcgccacctcaagagttgcccggagaagaagcttacgactccgtgtcgggcgaagcagggctgcagggattccagcaggaagccactggcccaccagaatcgcgggagcgaagggtgaccagccccgaacctagtcacggggttctgggccctagcgaacagatggggcaggtcacttccggaccggctgttggaagacttacaggatccacagaagaaccccaaggtcaggtgcttcccatgggagtccagcaccggtttagattgagccacggatccgatatcgaaagttccgacctcgaggaattcgtctcgcaggagcctgttattccgcctggagttccagacgcccacccgcgtgagggtgatctgcctgtgtttcaggaccagatacagcagcccagtaccgaggagggagcgatggctgaaagagtcgaatccgaggggagtgatgaggaggccgaagatgagggaagtcagctggtagttctggaccccgaccacccattgatggtccggtttcaagctgcgctgaagaactacctcaaccggcagattgagaagctcaaattggatctgcaggaactcgttgtggcaacgaaacagtccagggcacagaggcaggaattaggggtgaacttatacgaggtccagcagcacctggtccacttacagaaactcctggagaagtcccacgaccgacatgccatggcttcctctgagagacgccagaaagaggaggaattacaagctgcccgagctctctacaccaagacttgcgcggctgccaacgaggagcggaagaagctagccgcactgcaaaccgaaatggagaatctggctctgcacctcttctatatgcagaacattgatcaggacatgcgagatgatatcagggtgatgacccaggtggtcaaaaaagcagagacagaacgtatccgggctgaaattgagaaaaagaaacaggatctatatgtcgatcagctgactaccagagcacaacagctggaagaagacattgctctgttcgaagcccagtacttagctcaggcagaggacacgcgtatccttcgaaaggccgtaagtgaggcatgcacagagatcgatgctatcagtgtggagaagcgacggattatgcagcagtgggcttctagtctggttggaatgaaacatagagatgaggcacacagagcagtgctagaagctctgcgcggatgtcagcaccaggccaagagcactgatggggagattgaggcttacaagaaatctatcatgaaggaagaagagaagaatgagaagctggcctcaattctgaaccgtactgagacagaggccaccctccttcaaaagctcacaacacagtgcctgacgaagcaagtggcactgcagtctcagttcaacacatataggcttactctgcaggacactgaagatgcactgtcacaggaccagttggagcagatgatcttaactgaggaattgcaggctatcaggcaggctatccaaggggagcttgaactgagaaggaagaccgacgccgcaattagggagaagctgcaggaacacatgactagtaacaagaccacaaaatattttaatcaacttatccttagacttcagaaggagaagactaacatgatgactcatctctccaagattaatggggatatcgcccagacaacactcgatattactcacacctctagtcgtctggacgcacaccagaaaactctggtggagctggaccaggacgtgaagaaagtgaatgagctgatcaccaacagccagtctgagattagccgacgcactatcctgatcgagcgaaaacaagggctgattaacttcttaaacaagcagctagaaaggatggtttccgaactgggtggtgaggaggtaggacccctcgagttagagatcaagcgactttctaagctgatagatgagcatgatggaaaggccgtgcaggctcaggtgacctggctgaggctacaacaagaaatggtcaaggtcactcaggagcaggaagagcagctggccagcttggatgcctctaaaaaggaactgcatataatggaacaaaagaagctccgcgtggagtctaagattgaacaagagaaaaaagagcagaaggagatcgagcaccacatgaaggacctggacaatgatctgaagaagttaaacatgctgatgaataaaaatcgatgttctagcgaggagctcgagcaaaacaatagagtaactgagaacgagtttgtgcgctcactgaaagcaagcgaaagagaaacaatcaagatgcaagacaagctgaatcagttgtccgaggaaaaagccacccttctcaaccaactcgttgaagcagagcaccagattatgctgtgggaaaagaaaatacagctggcaaaagagatgaggagcagtgtggattcggagataggtcagaccgagattcgtgcgatgaagggtgagattcaccgaatgaaaaagtactgtcggacgacacaagacgcacataggcatgttcatgagcaacatgggacccacgcagggacatgtacgaagaataccggcagggcccaggctcgcgcacgcaccaccagggatgctagaggccacgtgcacgagcagcatggcacacgcgctggcacgtgtacaaataataccgggagagcgcaggcccgagcaagaacccgagacgcgaggagacacgtgcacgaacaccgcactcataccgctcgggcatag

SEQ ID NO: 86182 - DNA, 3120 bp, Artificial Sequence
  derived and/or modified sequence
gttgacagcgtcgcctagcaacgggaaatggcggaaccgggcggcgcggcgggccggtcccatccggaagatggatcggcttctgagggagagaaggaagggaataatgaaagccacatggtgtcaccaccagagaaggatgatggccagaaaggtgaagaagctgtcggtagcacagagcatcctgaggaagtcacaacccaagcggaagctgcaattgaagagggggaggtggagacagaaggggaagcagcagtggaaggggaagaggaggctgtgtcctatggagatgctgaaagcgaagaggaatattactatacagaaacttcatccccggaagggcaaatcagtgctgcagatacgacttacccgtatttcagtcctcctcaggaactgcctggagaggaggcatacgatagtgttagcggggaggctggtctccaaggcttccagcaagaggccaccggtccaccagaatccagagaaaggagggtcacctccccagagccatcccacggagtcttaggcccgtcggagcaaatgggccaggtcacctctgggccagcagtgggcagattgacaggatccacagaggagccccaggggcaggtgctcccaatgggcgtccagcaccgcttccggctgagccacgggagcgacatcgagtcctcagacctggaggagttcgtctcgcaggagccagtgatccccccaggggtgcccgatgcccaccccagggaaggagacctgccagtgttccaggaccagatccagcagcccagcaccgaggagggggccatggcagagagagtggagtccgaggggagtgacgaggaagcagaagacgaagggtcccagctggtggttttggacccagaccaccccctgatggtaagattccaggctgccctgaagaactacctgaaccgacagatcgaaaagttgaagctggacctccaagagctggttgtggctaccaagcagagccgagcccagcggcaggagctgggggtgaatctctatgaggtgcagcagcacctggtacacctgcagaagctgctggagaagagtcacgaccgccacgcaatggcctcgagcgagcgcaggcagaaggaggaggagctgcaggccgcccgcgctctctacaccaagacctgcgcagccgccaacgaggagcgcaaaaagttggcggctctgcagactgagatggagaacttggccctgcatctcttctacatgcagaacatcgaccaggacatgcgtgacgacatccgcgtgatgacacaagtggtaaagaaggccgagacggagaggatccgggcagaaatcgagaagaaaaagcaggacctgtatgtggaccagctcaccactcgagcccagcaactggaagaagacattgccctgtttgaggctcagtacttggcccaagctgaggacacccggattttaaggaaagcagtgagtgaggcctgcaccgagatcgacgccatcagcgtggagaagaggcgcatcatgcagcaatgggccagcagcctggtgggcatgaagcaccgcgacgaggcgcacagggcggtgctggaggcgctcagaggatgccagcatcaagccaaatccaccgacggcgagattgaggcctataagaaatccatcatgaaggaggaagaaaagaacgagaagctggcgagcatcctgaaccggacagagacggaagccacactgctgcagaagctcaccacccagtgcctgaccaagcaggtggccctgcagagccagttcaatacctacaggctcaccctgcaggacacagaggatgccctcagccaggaccagctggaacaaatgatactcacggaggagttgcaggccatccgccaagccatccagggcgagctggagctcaggaggaagacggatgctgccatccgggagaagctgcaggagcacatgacctccaacaagaccaccaaatacttcaaccagctcatcctgaggctgcagaaggagaagaccaacatgatgacacatctttccaaaatcaacggtgacattgcccagaccaccctggacatcacacacaccagcagcaggctggacgcacaccagaagaccctggtggagctggaccaggacgtgaagaaagtcaacgagctcatcaccaacagccagagcgagatctcccggcgcacgatcctgatcgagaggaagcaagggctcatcaacttcctcaacaagcagctggagcggatggtctccgagctggggggggaagaagtggggcccctggagcttgaaatcaaaaggctgagcaagctgatcgacgagcacgatggcaaggcggtccaggcccaggtgacctggctgcgcctgcagcaggagatggtcaaggtgacacaggagcaggaggagcagctggcctccctggacgcatccaagaaggagctccacatcatggagcagaagaaactacgagtagaaagcaagattgagcaggagaagaaggagcagaaggagatcgagcaccacatgaaggacctggacaacgacctgaagaagctcaacatgttgatgaataaaaaccggtgcagctcggaggagctggagcagaacaaccgggtgacagagaatgagttcgtgcgctcgctgaaggcctctgagagggagaccatcaagatgcaggacaagctgaaccagctcagcgaggagaaggcgaccctcctgaatcaactggtggaagcagaacaccagattatgctttgggagaaaaaaatccaactggcaaaagagatgcgttcctcagtggattccgagatcggccagacggagatccgggccatgaagggcgagatccacaggatgaagaaatattgcagaacaacacaggacgcacacaggcacgtgcacgaacaacacgggacgcacgcaggcacgtgcacgaagaacacgggacgcgcgcaggcacgtgcacgaacaacacgggacgcgcgcgggcacgtgcacgaacaacacgggacgcgcgcaggcacgtgcacgaacaacacgggacgcgcgcaggcacgtgcacgaacaagggacgcgcgcaggcacgtgcacgaacacaggacacacacagcacgtgcatga

SEQ ID NO: 86183 - DNA, 3093 bp, Artificial Sequence
  derived and/or modified sequence
atggccgagcccggcggcgccgccggcagaagccaccccgaggacggcagcgccagcgagggcgagaaggagggcaacaacgagagccacatggtgagcccccccgagaaggacgacggccagaagggcgaggaggccgtgggcagcaccgagcaccccgaggaggtgaccacccaggccgaggccgccatcgaggagggcgaggtggagaccgagggcgaggccgccgtggagggcgaggaggaggccgtgagctacggcgacgccgagagcgaggaggagtactactacaccgagaccagcagccccgagggccagatcagcgccgccgacaccacctacccctacttcagccccccccaggagctgcccggcgaggaggcctacgacagcgtgagcggcgaggccggcctgcagggcttccagcaggaggccaccggcccccccgagagcagagagagaagagtgaccagccccgagcccagccacggcgtgctgggccccagcgagcagatgggccaggtgaccagcggccccgccgtgggcagactgaccggcagcaccgaggagccccagggccaggtgctgcccatgggcgtgcagcacagattcagactgagccacggcagcgacatcgagagcagcgacctggaggagttcgtgagccaggagcccgtgatcccccccggcgtgcccgacgcccaccccagagagggcgacctgcccgtgttccaggaccagatccagcagcccagcaccgaggagggcgccatggccgagagagtggagagcgagggcagcgacgaggaggccgaggacgagggcagccagctggtggtgctggaccccgaccaccccctgatggtgagattccaggccgccctgaagaactacctgaacagacagatcgagaagctgaagctggacctgcaggagctggtggtggccaccaagcagagcagagcccagagacaggagctgggcgtgaacctgtacgaggtgcagcagcacctggtgcacctgcagaagctgctggagaagagccacgacagacacgccatggccagcagcgagagaagacagaaggaggaggagctgcaggccgccagagccctgtacaccaagacctgcgccgccgccaacgaggagagaaagaagctggccgccctgcagaccgagatggagaacctggccctgcacctgttctacatgcagaacatcgaccaggacatgagagacgacatcagagtgatgacccaggtggtgaagaaggccgagaccgagagaatcagagccgagatcgagaagaagaagcaggacctgtacgtggaccagctgaccaccagagcccagcagctggaggaggacatcgccctgttcgaggcccagtacctggcccaggccgaggacaccagaatcctgagaaaggccgtgagcgaggcctgcaccgagatcgacgccatcagcgtggagaagagaagaatcatgcagcagtgggccagcagcctggtgggcatgaagcacagagacgaggcccacagagccgtgctggaggccctgagaggctgccagcaccaggccaagagcaccgacggcgagatcgaggcctacaagaagagcatcatgaaggaggaggagaagaacgagaagctggccagcatcctgaacagaaccgagaccgaggccaccctgctgcagaagctgaccacccagtgcctgaccaagcaggtggccctgcagagccagttcaacacctacagactgaccctgcaggacaccgaggacgccctgagccaggaccagctggagcagatgatcctgaccgaggagctgcaggccatcagacaggccatccagggcgagctggagctgagaagaaagaccgacgccgccatcagagagaagctgcaggagcacatgaccagcaacaagaccaccaagtacttcaaccagctgatcctgagactgcagaaggagaagaccaacatgatgacccacctgagcaagatcaacggcgacatcgcccagaccaccctggacatcacccacaccagcagcagactggacgcccaccagaagaccctggtggagctggaccaggacgtgaagaaggtgaacgagctgatcaccaacagccagagcgagatcagcagaagaaccatcctgatcgagagaaagcagggcctgatcaacttcctgaacaagcagctggagagaatggtgagcgagctgggcggcgaggaggtgggccccctggagctggagatcaagagactgagcaagctgatcgacgagcacgacggcaaggccgtgcaggcccaggtgacctggctgagactgcagcaggagatggtgaaggtgacccaggagcaggaggagcagctggccagcctggacgccagcaagaaggagctgcacatcatggagcagaagaagctgagagtggagagcaagatcgagcaggagaagaaggagcagaaggagatcgagcaccacatgaaggacctggacaacgacctgaagaagctgaacatgctgatgaacaagaacagatgcagcagcgaggagctggagcagaacaacagagtgaccgagaacgagttcgtgagaagcctgaaggccagcgagagagagaccatcaagatgcaggacaagctgaaccagctgagcgaggagaaggccaccctgctgaaccagctggtggaggccgagcaccagatcatgctgtgggagaagaagatccagctggccaaggagatgagaagcagcgtggacagcgagatcggccagaccgagatcagagccatgaagggcgagatccacagaatgaagaagtactgcagaaccacccaggacgcccacagacacgtgcacgagcagcacggcacccacgccggcacctgcaccaagaacaccggcagagcccaggccagagccagaaccaccagagacgccagaggccacgtgcacgagcagcacggcaccagagccggcacctgcaccaacaacaccggcagagcccaggccagagccagaaccagagacgccagaagacacgtgcacgagcacagaacccacaccgccagagcctag

SEQ ID NO: 86184 - protein, 639 aa, Artificial Sequence
  derived and/or modified sequence
MKTNGGRCRIRALCWSRREWRGAGMAQKKYLQAKLTQFLREDRIQLWKPPYTDENKKVGLALKDLAKQYSDRLECCENEVEKVIEEIRCKAIERGTGNDNYRTTGIATIEVFLPPRLKKDRKNLLETRLHITGRELRSKIAETFGLQENYIKIVINKKQLQLGKTLEEQGVAHNVKAMVLELKQSEEDARKNFQLEEEEQNEAKLKEKQIQRTKRGLEILAKRAAETVVDPEMTPYLDIANQTGRSIRIPPSERKALMLAMGYHEKGRAFLKRKEYGIALPCLLDADKYFCECCRELLDTVDNYAVLQLDIVWCYFRLEQLECLDDAEKKLNLAQKCFKNCYGENHQRLVHIKGNCGKEKVLFLRLYLLQGIRNYHSGNDVEAYEYLNKARQLFKELYIDPSKVDNLLQLGFTAQEARLGLRACDGNVDHAATHITNRREELAQIRKEEKEKKRRRLENIRFLKGMGYSTHAAQQVLHAASGNLDEALKILLSNPQMWWLNDSNPETDNRQESPSQENIDRLVYMGFDALVAEAALRVFRGNVQLAAQTLAHNGGSLPPELPLSPEDSLSPPATSPSDSAGTSSASTDEDMETEAVNEILEDIPEHEEDYLDSTLEDEEIIIAEYLSYVENRKSATKKN

SEQ ID NO: 86185 - DNA, 1920 bp, Artificial Sequence
  derived and/or modified sequence
atgaaaacaaatggtgggcgctgcagaatccgcgctctgtgctggtcccggagagagtggagaggggcagggatggcccaaaagaaatacctgcaggctaagctcacccagtttctgagagaagaccgcattcagctctggaagcctccctataccgatgagaacaagaaggtgggactggcactgaaggacctggctaagcagtactcagatagactggaatgctgcgagaatgaagtagaaaaagtgatagaggagattcggtgtaaggctatagaaagggggaccggcaacgacaattaccgtacaactggcattgcgaccattgaggtctttctccctccaaggctgaagaaggataggaagaacctactggaaacacgccttcacatcacgggtcgggaactacggagcaaaatcgccgaaacctttgggctccaggagaactacatcaagattgtaatcaacaagaagcaactgcaactcgggaaaacgctggaggaacagggcgtggcccacaatgtaaaggcaatggtgctcgaactgaaacaaagtgaggaggatgctcgtaagaactttcaattggaggaggaggagcaaaacgaggcaaaactgaaggagaagcagatccagcggaccaaacgcggccttgagatcctcgccaagcgcgcagccgaaactgttgtcgaccctgaaatgactccctatctggacatcgccaaccagacgggaagatccattcggattccaccttctgaacgaaaggccctgatgttagctatgggttatcacgaaaagggtcgggccttcctgaaaaggaaggagtatggaattgcgctgccatgcctcctagacgccgataagtatttctgcgagtgttgccgcgaattgttggacacggtggataattacgccgttctccagcttgacatcgtgtggtgctactttaggttggaacaactcgagtgtttggatgacgcagagaaaaagctgaacctagcgcagaaatgtttcaagaactgttacggcgaaaaccaccagcggctggttcacattaagggcaattgcggcaaggagaaggtcctcttccttaggctctaccttctccagggcattcgtaattatcactccggaaacgacgttgaagcctacgagtatcttaataaggcccgtcaactctttaaggagctctatattgatcccagtaaggtggataacctgttacagctcgggtttaccgcgcaggaggctcgcttggggcttcgtgcctgcgacggcaatgtcgaccacgccgcgactcacattaccaatcgacgcgaagagcttgcgcaaatacgcaaagaggagaaggaaaagaagcggcgtaggctcgaaaacattcgtttcttaaagggcatgggctatagtacccacgcggcacaacaagtgcttcacgctgcctctgggaacctggacgaagcgctgaaaatactgctctctaacccacagatgtggtggttgaatgactccaacccagagaccgacaatcggcaagaaagcccctcacaggagaatatcgatagacttgtgtacatgggcttcgacgcattagtcgccgaagctgctcttcgcgttttcagaggcaatgttcagctcgcagcccagacattggcccacaacggggggtccctgccaccagagctgcctctgtcacccgaagattcgctctcacccccagccacatccccaagtgactctgctgggactagttccgcctctacggatgaagatatggagactgaggccgttaatgagattctggaagacatcccagaacacgaagaggattacctggatagcacactggaagacgaagagattataatagccgagtatcttagctatgtcgaaaatcgcaagagcgcgaccaagaaaaactag

SEQ ID NO: 86186 - DNA, 3132 bp, Artificial Sequence
  derived and/or modified sequence
ggcggccgctgccgcatccgggcactctgctggtcgcggcgggagtggcgtggcgcagggatggcacaaaagaaatatcttcaagcaaaattgacccagtttttaagggaagacaggattcaactttggaaacctccatatacagatgaaaataaaaaagttggtttggcattaaaggaccttgctaagcagtactctgacagactagaatgctgtgaaaatgaagtagaaaaggtaatagaagaaatacgttgcaaggcaattgagcgtggaacaggaaatgacaattatagaacaacgggaattgctacaatcgaggtgtttttaccaccaagactaaaaaaagataggaaaaacttgttggagacccgattgcacatcactggcagagaactgaggtccaaaatagctgaaacctttggacttcaagaaaattatatcaaaattgtcataaataagaagcaactacaactagggaaaacccttgaagaacaaggcgtggctcacaatgtgaaagcgatggtgcttgaactaaaacaatctgaagaggacgcgaggaaaaacttccagttagaggaagaggagcaaaatgaggccaaactcaaagaaaaacaaattcagaggaccaagagaggactagaaatactggcaaagagagcagcagagacagtggtggatccagaaatgacaccgtacttagacatagctaaccagacaggcagatcaatcagaattcccccatcagaaagaaaagcccttatgttagctatgggatatcatgagaagggcagagctttcctgaaaagaaaagaatatggaatagccttgccatgtctgttggacgctgacaaatatttctgtgagtgttgcagagagctgctggacacagtggataactacgccgtcctccagctggatatagtgtggtgttacttccgcctggaacagctggaatgccttgatgatgcagaaaaaaaattaaacttggcccagaaatgctttaaaaattgttacggagaaaatcatcagagactggtccacataaaaggaaattgtgggaaagagaaggtactgtttctaagactctacttacttcaagggatccgaaactatcacagtggaaatgatgtagaggcttatgagtatcttaacaaggcacgtcagctctttaaagagctatatattgatccatcaaaagtggacaatttgttgcagttggggtttactgcccaggaagcccggcttggcctgagggcgtgtgatgggaacgtggatcatgcggccactcatattaccaaccgcagagaggaactggcccaaataaggaaggaggaaaaagagaagaaaagacgccgcctcgagaacatcaggtttctgaaagggatgggctactccacgcacgcggcccagcaggtactccacgcagccagcgggaacttggatgaggccctgaagattctgctcagcaatcctcagatgtggtggttaaatgattccaatcctgaaaccgacaaccgtcaagaaagtccttcccaggaaaacattgaccgattggtgtacatgggttttgatgcactcgtggccgaagctgcgctgagagtgttcagaggcaacgtccagctggccgcccagacccttgctcacaacggaggaagcctgcctcccgagctgccgctgtcgccagaagactctttgtccccgccagccacgtccccttctgactccgcaggaacctctagtgcctcaacagacgaagacatggagacagaggccgtcaatgagatactggaagacattccagagcatgaggaagactatcttgactcaactctggaagatgaagaaattattattgcagagtacctatcctatgtagaaaataggaagtcagcaacaaagaaaaactaaataatgaacagaaatagcgctaattttctgcttataaatgctatcattatgaaaaggctaatgcagctctttctgttcttactttttatctgaattacaagtcctctttgggtgtaggagggggtgggcaggggacaagtccaggaggggtcccagggccttcatgcgtggtctcggggaagaagcttcctctggcctggcgcaggccgttccatctgcctcccaggtctgcgtccctaaccccttccccagcttggtgttttaccccgaaacaggaaggaacaggggtcctgtagaacaggggtcctggggaaggtgtccagggcagggtcctgggaagggtgtcccgaccgcttcctctccagctgtggctccatctgcccagcttgcctgcctcctgcacccactgccctgaccttcctgcttcccacgctgccatctctgccagggtgccacatgggttcctgtgccaccctttccccgcccctcaaatcgtcctttaagtcttccttccaagtgctgtggggcataacgatgaggcgctggccttgggggccacaccaggtcgcagcaaatggcttcagcctgggacgccagtgttttatgctcttagttcagtaaaatacgcccccgaaattcaagattgagtgtcaggctttatatatattcagcattcctcattacagaaatcttctattgaatgggaaaggtttaaatgctaaccaaagcaatttatttttaattaatatttttagactctgtgctgtcatactgaactcactgctagctaagagacctatcagagatttagatatattttctccaggttttttgtgggttttctttgttgttgttgttgttctagccatgtgacagaggctctttctaaaagtatgtagttcgctgtgtgtcggctccagcagtaaccgtcctcactgcgccacgcactcctctgtagatgtgtgcccagtgggagttccttccagccccaggaccacagcagcagccaggtgccgagtggattgagtgccaggtgcatccaagactttccctcccttccagaaggcactgactgaagacaggatggatcatgcggagccggctgaaatgctccaactttttcaaagtgtgggtggtccagtttggactgatgggaatcttcttgtcattctttttaaacggatgataccgatggaaataaaaggtgggaaatatattcaaaaa

SEQ ID NO: 86187 - DNA, 3210 bp, Artificial Sequence
  derived and/or modified sequence
agcggcggcggcggcggcggcgcgaaggcgacagcggcggcgggggcggggctggcctcacccggaatgaaaacaaacggcggccgctgccgcatccgggcactctgctggtcgcggcgggagtggcgtggcgcagggatggcacaaaagaaatatcttcaagcaaaattgacccagtttttaagggaagacaggattcaactttggaaacctccatatacagatgaaaataaaaaagttggtttggcattaaaggaccttgctaagcagtactctgacagactagaatgctgtgaaaatgaagtagaaaaggtaatagaagaaatacgttgcaaggcaattgagcgtggaacaggaaatgacaattatagaacaacgggaattgctacaatcgaggtgtttttaccaccaagactaaaaaaagataggaaaaacttgttggagacccgattgcacatcactggcagagaactgaggtccaaaatagctgaaacctttggacttcaagaaaattatatcaaaattgtcataaataagaagcaactacaactagggaaaacccttgaagaacaaggcgtggctcacaatgtgaaagcgatggtgcttgaactaaaacaatctgaagaggacgcgaggaaaaacttccagttagaggaagaggagcaaaatgaggccaaactcaaagaaaaacaaattcagaggaccaagagaggactagaaatactggcaaagagagcagcagagacagtggtggatccagaaatgacaccgtacttagacatagctaaccagacaggcagatcaatcagaattcccccatcagaaagaaaagcccttatgttagctatgggatatcatgagaagggcagagctttcctgaaaagaaaagaatatggaatagccttgccatgtctgttggacgctgacaaatatttctgtgagtgttgcagagagctgctggacacagtggataactacgccgtcctccagctggatatagtgtggtgttacttccgcctggaacagctggaatgccttgatgatgcagaaaaaaaattaaacttggcccagaaatgctttaaaaattgttacggagaaaatcatcagagactggtccacataaaaggaaattgtgggaaagagaaggtactgtttctaagactctacttacttcaagggatccgaaactatcacagtggaaatgatgtagaggcttatgagtatcttaacaaggcacgtcagctctttaaagagctatatattgatccatcaaaagtggacaatttgttgcagttggggtttactgcccaggaagcccggcttggcctgagggcgtgtgatgggaacgtggatcatgcggccactcatattaccaaccgcagagaggaactggcccaaataaggaaggaggaaaaagagaagaaaagacgccgcctcgagaacatcaggtttctgaaagggatgggctactccacgcacgcggcccagcaggtactccacgcagccagcgggaacttggatgaggccctgaagattctgctcagcaatcctcagatgtggtggttaaatgattccaatcctgaaaccgacaaccgtcaagaaagtccttcccaggaaaacattgaccgattggtgtacatgggttttgatgcactcgtggccgaagctgcgctgagagtgttcagaggcaacgtccagctggccgcccagacccttgctcacaacggaggaagcctgcctcccgagctgccgctgtcgccagaagactctttgtccccgccagccacgtccccttctgactccgcaggaacctctagtgcctcaacagacgaagacatggagacagaggccgtcaatgagatactggaagacattccagagcatgaggaagactatcttgactcaactctggaagatgaagaaattattattgcagagtacctatcctatgtagaaaataggaagtcagcaacaaagaaaaactaaataatgaacagaaatagcgctaattttctgcttataaatgctatcattatgaaaaggctaatgcagctctttctgttcttactttttatctgaattacaagtcctctttgggtgtaggagggggtgggcaggggacaagtccaggaggggtcccagggccttcatgcgtggtctcggggaagaagcttcctctggcctggcgcaggccgttccatctgcctcccaggtctgcgtccctaaccccttccccagcttggtgttttaccccgaaacaggaaggaacaggggtcctgtagaacaggggtcctggggaaggtgtccagggcagggtcctgggaagggtgtcccgaccgcttcctctccagctgtggctccatctgcccagcttgcctgcctcctgcacccactgccctgaccttcctgcttcccacgctgccatctctgccagggtgccacatgggttcctgtgccaccctttccccgcccctcaaatcgtcctttaagtcttccttccaagtgctgtggggcataacgatgaggcgctggccttgggggccacaccaggtcgcagcaaatggcttcagcctgggacgccagtgttttatgctcttagttcagtaaaatacgcccccgaaattcaagattgagtgtcaggctttatatatattcagcattcctcattacagaaatcttctattgaatgggaaaggtttaaatgctaaccaaagcaatttatttttaattaatatttttagactctgtgctgtcatactgaactcactgctagctaagagacctatcagagatttagatatattttctccaggttttttgtgggttttctttgttgttgttgttgttctagccatgtgacagaggctctttctaaaagtatgtagttcgctgtgtgtcggctccagcagtaaccgtcctcactgcgccacgcactcctctgtagatgtgtgcccagtgggagttccttccagccccaggaccacagcagcagccaggtgccgagtggattgagtgccaggtgcatccaagactttccctcccttccagaaggcactgactgaagacaggatggatcatgcggagccggctgaaatgctccaactttttcaaagtgtgggtggtccagtttggactgatgggaatcttcttgtcattctttttaaacggatgataccgatggaaataaaaggtgggaaatatattcaaaaa

SEQ ID NO: 86188 - DNA, 1920 bp, Artificial Sequence
  derived and/or modified sequence
atgaagaccaacggcggccgctgccgcatccgggccctgtgctggagcagaagagagtggagaggagctggcatggcccagaagaagtacctgcaggccaagctgacccagttcctgagagaagatcgcatccagctgtggaagccaccctacacagatgagaacaagaaggtgggcctggccctgaaggacctggccaagcagtacagcgaccggctggagtgctgtgaaaatgaggtggagaaggtgattgaggagatccgctgcaaggccatcgagcggggcactggaaatgacaactaccgcaccaccggcatcgccaccatcgaggtgttcctgcccccccggctgaagaaggacaggaagaacctgctggagacccggctgcacatcaccggccgggagctgcggagcaagattgctgagaccttcggcctgcaggagaactacatcaagatcgtcatcaacaagaagcagctgcagctgggcaagaccctggaggagcagggcgtggcccacaacgtgaaggccatggtgctggagctgaagcagagtgaagaagatgccaggaagaacttccagctggaggaggaggagcagaatgaggccaagctgaaggagaagcagatccagaggaccaagaggggcctggagatcctggccaagagagctgctgagaccgtggtggaccctgagatgaccccctacctggacatcgccaaccagacaggccgcagcatccgcatcccccccagcgagaggaaggccctgatgctggccatgggctaccacgagaagggccgggccttcctgaagaggaaggagtatggcatcgccctgccctgcctgctggatgctgacaagtacttctgtgagtgctgccgggagctgctggacacagtggacaactatgctgtgctgcagctggacatcgtgtggtgctacttccggctggagcagctggagtgcctggatgatgctgagaagaagctgaacctggcccagaagtgcttcaagaactgctacggggagaaccaccagaggctggtgcacatcaagggcaactgtgggaaggagaaggtgctcttcctgcggctgtacctgctgcagggcatccggaactaccacagcggaaatgatgtggaggcctatgagtacctgaacaaggcccggcagctgttcaaggagctgtacatcgaccccagcaaggtggacaacctgctgcagctgggcttcaccgcccaggaggcccggctgggcctgcgggcctgtgatggaaatgtggaccatgctgccacccacatcaccaacagaagagaggagctggcccagatcaggaaggaggagaaggagaagaagagaagaaggctggagaacatccgcttcctgaagggcatgggctacagcacccacgccgcccagcaggtgctgcatgctgccagcggcaacctggatgaggccctgaagatcctgctgagcaacccccagatgtggtggctgaatgacagcaaccctgagacagacaaccggcaggagagccccagccaggagaacatcgaccggctggtgtacatgggctttgatgccctggtggccgaggccgccctgcgggtcttcagaggaaatgtgcagctggccgcccagaccctggcccacaatggaggcagcctgcccccagagctgcccctgagccctgaggacagcctgagccccccagccaccagccccagcgacagcgctggcaccagcagcgccagcacagatgaggacatggagacagaagctgtgaatgagatcctggaggacatccctgagcacgaggaggactacctggacagcaccctggaggatgaggagatcatcatcgccgagtacctgtcctatgtggagaacaggaagagcgccaccaagaagaactag

SEQ ID NO: 86189 - DNA, 1920 bp, Artificial Sequence
  derived and/or modified sequence
atgaagaccaacggcggccggtgccggatccgggccctgtgctggagtcgtcgcgaatggcggggcgccggtatggctcaaaaaaagtatttacaggctaaacttacccagtttcttcgcgaagacagaatacagctatggaagccaccatacacagacgagaacaagaaggtgggcctagccctgaaagaccttgcaaaacagtattcagatcgactcgagtgctgtgaaaacgaagtggaaaaggtaattgaggagatccgttgtaaggcaatcgagagaggaactgggaacgacaactaccgcaccaccggaatagcaacgattgaggtgttcctcccccctagactaaagaaagataggaaaaatctgctggagaccagactgcacatcacaggtagggagctgcgttcaaagatagccgagacattcgggcttcaggagaattatatcaaaatcgtaattaacaagaaacagctccagttgggcaaaacactcgaagagcagggcgtcgctcacaatgtcaaagcaatggtgctcgaactgaaacagtccgaagaggatgccagaaaaaatttccaactggaagaagaggaacaaaacgaggcaaaactcaaggaaaagcaaattcagcggacaaaaagaggtctcgagattctagcaaagagagccgccgaaactgttgttgaccctgagatgacaccttatctggacatcgccaatcagaccgggcggtctatccggatacctccgagcgaacgtaaagcacttatgcttgctatggggtaccacgagaagggacgcgcctttctgaaacggaaggaatatggaatcgcactcccgtgcctgttggacgccgataagtatttctgcgaatgttgcagagaactgctcgatactgtcgacaactacgccgtgttgcagctcgacatcgtgtggtgttactttcggctggagcagctcgagtgcctcgacgatgcagagaagaagctgaacctggcacagaagtgcttcaagaattgctatggcgagaatcaccagcgactcgtgcacataaagggaaattgcggaaaggagaaggtgctgttcctgcgcctgtatcttctccaggggatcagaaactaccatagcggaaatgacgtggaggcgtacgaatacctcaacaaagccaggcaattgttcaaagaattgtacatcgatcccagcaaggtggacaatctgttacagttgggcttcaccgctcaggaagcccggctgggactgcgagcatgcgacggaaacgtcgatcacgccgccactcacatcactaacagacgagaggagttggcgcagattaggaaggaggaaaaagagaaaaaaagaagacgactggagaacattcggttcctcaagggaatgggctactctacacatgcggcccagcaggttctgcatgccgcaagcggcaacttagacgaagctttaaaaattctgctgagcaacccacagatgtggtggctgaatgactctaaccctgagactgataaccgtcaggagtccccgtcacaggaaaatatagatagacttgtttatatgggcttcgacgcactagtcgctgaggccgccctgcgagttttccgcgggaatgtacagctggctgctcagacccttgcccataacgggggttcactcccaccagagttgcccctgagtcctgaagactctctctcacctcctgctactagtcccagtgatagcgccggcacatccagcgcatccaccgatgaggacatggaaacagaggccgtgaacgagattttggaagatatcccggaacacgaagaagactatctggactcaaccctagaagacgaggagattatcatagctgagtatctcagctacgtggaaaaccgcaagtcagcaactaagaagaattag

SEQ ID NO: 86190 - DNA, 1920 bp, Artificial Sequence
  derived and/or modified sequence
atgaagaccaatggcggaaggtgcagaattagagccctttgctggagtagaagagagtggcggggagccggtatggcccagaaaaagtacctgcaggcaaagttgactcaattcctacgtgaagaccggattcaactttggaagccaccctataccgatgaaaacaagaaggtcggactggctctgaaagatctggcgaaacagtactcggataggctcgagtgttgcgagaacgaagtcgagaaagtgatagaggaaattcgttgtaaagccattgaaagggggactggcaatgataactacaggactaccgggattgctacaattgaagtctttctgcccccaaggctgaagaaggacagaaagaatttactggaaacgcgcctgcatataaccggcagggaacttcggagtaagatcgccgaaacctttggcctgcaggagaactatatcaagatcgtgatcaataagaagcaacttcagctaggtaaaaccctggaggagcagggcgtggcccacaacgtgaaggccatggtccttgagctgaaacagtctgaagaggacgccaggaaaaattttcagttagaggaagaagagcagaacgaggccaagcttaaagagaaacagattcagagaacaaaaaggggcctggaaatcctcgccaaaagagctgcggaaactgtagtggaccccgagatgacgccttatctcgacatagcaaaccagaccggcaggagtatccgcatcccaccatctgagagaaaagcgcttatgctggctatgggataccacgagaaaggccgagccttcctcaaacgaaaggaatatggcattgctctgccatgtcttcttgacgctgacaaatacttctgcgagtgctgtcgagaactgctggatactgtcgataactatgcggtcctgcagctggacattgtgtggtgctactttcgcctcgagcagcttgagtgtctcgatgacgctgagaaaaagcttaacctggcgcaaaagtgtttcaagaattgttatggagagaatcatcaacgtttggtgcacatcaaagggaactgtggaaaggaaaaagtattgtttttgcggctctacctgctgcagggtatccgcaactatcactccggaaatgatgtggaagcctacgagtacctcaataaagcgagacagctgttcaaggaattatacattgacccatctaaggttgataatttactgcagttgggattcaccgcacaagaagcacgcttggggctgcgcgcttgcgatggcaatgtggaccatgctgctacacacattacaaatcgtagagaagagctggcacagatccggaaagaggagaaggagaagaaacgccgtagattggagaacataaggtttttgaaaggaatggggtacagcacccatgccgcacaacaagttctccatgccgctagcggaaatttggatgaggcgctgaaaatcctgctgtccaacccccagatgtggtggctgaacgatagcaatcctgagacagacaaccggcaggaatccccatcacaggagaacattgacagactggtatacatgggcttcgatgccctggtcgccgaggcagctctgagggtgttcagggggaatgtacagctggcagctcaaactctcgcgcataatggcggtagcttaccgcctgaactgcccctgagtcccgaagatagcctctccccgccagccacaagcccgagcgactcggcgggtacaagctctgcttccacagacgaagacatggaaactgaagccgtgaacgagattctagaggatatccccgagcatgaagaagactatctggattccactctggaagacgaggaaattatcattgcagaataccttagctatgtcgaaaacaggaaaagtgccacaaaaaagaactag

SEQ ID NO: 86191 - DNA, 1920 bp, Artificial Sequence
  derived and/or modified sequence
atgaagaccaacggcggcagatgcagaatcagagccctgtgctggagcagaagagagtggagaggcgccggcatggcccagaagaagtacctgcaggccaagctgacccagttcctgagagaggacagaatccagctgtggaagcccccctacaccgacgagaacaagaaggtgggcctggccctgaaggacctggccaagcagtacagcgacagactggagtgctgcgagaacgaggtggagaaggtgatcgaggagatcagatgcaaggccatcgagagaggcaccggcaacgacaactacagaaccaccggcatcgccaccatcgaggtgttcctgccccccagactgaagaaggacagaaagaacctgctggagaccagactgcacatcaccggcagagagctgagaagcaagatcgccgagaccttcggcctgcaggagaactacatcaagatcgtgatcaacaagaagcagctgcagctgggcaagaccctggaggagcagggcgtggcccacaacgtgaaggccatggtgctggagctgaagcagagcgaggaggacgccagaaagaacttccagctggaggaggaggagcagaacgaggccaagctgaaggagaagcagatccagagaaccaagagaggcctggagatcctggccaagagagccgccgagaccgtggtggaccccgagatgaccccctacctggacatcgccaaccagaccggcagaagcatcagaatcccccccagcgagagaaaggccctgatgctggccatgggctaccacgagaagggcagagccttcctgaagagaaaggagtacggcatcgccctgccctgcctgctggacgccgacaagtacttctgcgagtgctgcagagagctgctggacaccgtggacaactacgccgtgctgcagctggacatcgtgtggtgctacttcagactggagcagctggagtgcctggacgacgccgagaagaagctgaacctggcccagaagtgcttcaagaactgctacggcgagaaccaccagagactggtgcacatcaagggcaactgcggcaaggagaaggtgctgttcctgagactgtacctgctgcagggcatcagaaactaccacagcggcaacgacgtggaggcctacgagtacctgaacaaggccagacagctgttcaaggagctgtacatcgaccccagcaaggtggacaacctgctgcagctgggcttcaccgcccaggaggccagactgggcctgagagcctgcgacggcaacgtggaccacgccgccacccacatcaccaacagaagagaggagctggcccagatcagaaaggaggagaaggagaagaagagaagaagactggagaacatcagattcctgaagggcatgggctacagcacccacgccgcccagcaggtgctgcacgccgccagcggcaacctggacgaggccctgaagatcctgctgagcaacccccagatgtggtggctgaacgacagcaaccccgagaccgacaacagacaggagagccccagccaggagaacatcgacagactggtgtacatgggcttcgacgccctggtggccgaggccgccctgagagtgttcagaggcaacgtgcagctggccgcccagaccctggcccacaacggcggcagcctgccccccgagctgcccctgagccccgaggacagcctgagcccccccgccaccagccccagcgacagcgccggcaccagcagcgccagcaccgacgaggacatggagaccgaggccgtgaacgagatcctggaggacatccccgagcacgaggaggactacctggacagcaccctggaggacgaggagatcatcatcgccgagtacctgagctacgtggagaacagaaagagcgccaccaagaagaactag

SEQ ID NO: 86192 - protein, 791 aa, Artificial Sequence
  derived and/or modified sequence
MESEQLFHRGYYRNSYNSITSASSDEELLDGAGVIMDFQTSEDDNLLDGDTAVGTHYTMTNGGSINSSTHLLDLLDEPIPGVGTYDDFHTIDWVREKCKDRERHRRINSKKKESAWEMTKSLYDAWSGWLVVTLTGLASGALAGLIDIAADWMTDLKEGICLSALWYNHEQCCWGSNETTFEERDKCPQWKTWAELIIGQAEGPGSYIMNYIMYIFWALSFAFLAVSLVKVFAPYACGSGIPEIKTILSGFIIRGYLGKWTLMIKTITLVLAVASGLSLGKEGPLVHVACCCGNIFSYLFPKYSTNEAKKREVSYYFPLKTLWRSFFAALVAAFVLRSINPFGNSRLVLFYVEYHTPWYLFELFPFILLGVFGGLWGAFFIRANIAWCRRRKSTKFGKYPVLEVIIVAAITAVIAFPNPYTRLNTSELIKELFTDCGPLESSSLCDYRNDMNASKIVDDIPDRPAGIGVYSAIWQLCLALIFKIIMTVFTFGIKVPSGLFIPSMAIGAIAGRIVGIAVEQLAYYHHDWFIFKEWCEVGADCITPGLYAMVGAAACLGGVTRMTVSLVVIVFELTGGLEYIVPLMAAVMTSKWVGDAFGREGIYEAHIRLNGYPFLDAKEEFTHTTLAADVMRPRRNDPPLAVLTQDNMTVDDIENMINETSYNGFPVIMSKESQRLVGFALRRDLTIAIESARKKQEGIVGSSRVCFAQHTPSLPAESPRPLKLRSILDMSPFTVTDHTPMEIVVDIFRKLGLRQCLVTHNGRLLGIITKKDILRHMAQTANQDPASIMFN

SEQ ID NO: 86193 - DNA, 2376 bp, Artificial Sequence
  derived and/or modified sequence
atggagagcgaacagttatttcatcggggatattataggaactcgtacaatagcatcacctcagcttcgagtgacgaagaacttctggacggagcaggggtgatcatggattttcagaccagcgaagatgacaacttactggacggggacacggccgtaggtacccactacactatgactaatgggggaagtatcaatagtagtacccatttgttggatttgttggacgagcccataccgggagtcgggacgtatgatgacttccacacaattgactgggtcagagaaaaatgcaaggatcgagagaggcaccggcgcatcaactctaagaaaaaggagtctgcctgggaaatgacaaagtctctttatgatgcttggtctgggtggctcgtggtcacgctgactgggctcgccagcggcgctttagcgggcctaatagacattgcggcagattggatgactgacctgaaagaggggatctgcctgagtgcactgtggtacaaccacgagcaatgctgttggggttcaaatgagaccacctttgaggagagagataaatgcccacagtggaagacgtgggcggagctgataatagggcaggctgagggccctggctcatacataatgaactatataatgtacattttttgggcgctcagttttgcgttcctcgccgtaagcctggtcaaggtgtttgccccttatgcttgtggaagtgggattccagaaatcaagaccattctttccggctttatcatccgtggctatctgggtaagtggaccttgatgatcaagacaatcacccttgtgttggcggtcgccagtggtctctccttgggcaaggagggtccgctcgttcacgttgcttgttgttgtggcaacatattctcttatttatttcccaaatacagcacgaatgaggcaaaaaagcgggaagtcagctactatttccccctgaagacactgtggcgctcctttttcgcagcacttgttgcagcctttgtgttgaggtccatcaatcctttcggaaattccaggctcgtcctgttctacgtggaatatcacacaccttggtatcttttcgagcttttccctttcattctcttgggggtgttcggggggctctggggagcattttttatcagggccaatattgcatggtgccgacggcgtaaaagcactaaatttggtaagtaccccgtcttggaggtaattatcgtggcagctatcacagcagtaattgcgttcccgaacccttatacacggttaaacacttcagaactcatcaaagaactcttcaccgattgcgggcccctcgagtctagttctctctgcgattacagaaacgatatgaatgcaagcaagatcgtggacgacattcccgatcggcctgccggtatcggtgtttattccgccatttggcaactctgccttgccctcatctttaagatcatcatgacagtgttcacgttcggcatcaaagttccgtctggcctcttcattccaagcatggcgattggggccatagccggacgaattgtcggcatcgccgtagaacaactggcgtattatcaccacgattggttcatcttcaaagaatggtgtgaagttggagcggactgtattactccaggcctgtatgcaatggtgggcgcagccgcatgtttaggcggtgtgacacgaatgaccgtgtctttggtggttatcgtgttcgaactgactgggggattagaatacatagtgccattgatggcagccgtaatgacctctaagtgggtgggagacgcattcggccgggaggggatctacgaggctcatatcaggcttaacggatatccatttctggatgcaaaagaggaattcacacatacaaccctcgccgctgacgtgatgaggccacgccgtaacgatccgcctctggcagtactgacccaggacaacatgactgtggatgatatagaaaacatgattaacgagaccagctacaatggcttccccgtgattatgtccaaggaaagtcagcgacttgtggggttcgcgctgcgccgcgacttaacgatcgccatagagtcggctcggaaaaaacaggaaggcatagttggctcctcaagagtctgcttcgcccaacacacaccgagcctgcctgcagagagccccagacccctcaagcttaggtctattctcgacatgagcccctttacagtcacagaccacacacccatggagattgtcgtcgacatttttcggaaactggggctccggcagtgtctcgtgacccataatggtagactacttggcataataactaaaaaggatattcttcgtcacatggcacagaccgccaatcaagaccctgcaagcataatgtttaattag

SEQ ID NO: 86194 - DNA, 522 bp, Artificial Sequence
  derived and/or modified sequence
atggaatccgaacagttatttcatcgtggatattaccgcaactcatataactccataacctctgcctccagcgacgaagagctgcttgacggggccggggtcataatggacttccagactagtgaggatgacaatttgctggacggcgatacagccgtgggaacccactacactatgacgaacggaggttcaattaacagctcaacacatcttttggatctcctggacgagccaatcccaggcgttggcacgtacgatgacttccatacaatcgattgggttcgcgagaagtgtaaggatagggagaggcaccgcagaatcaatagcaaaaaaaaggagtctgcgtgggaaatgacgaagagtctgtatgacgcatggtccggctggctcgtggtgaccctcactggacttgcctcaggagctctggccggcttgattgacattgctgccgactggatgaccgatctaaaggaggggatttgcttatccgctttgtggtacaatcacgaacagtgctgctag

SEQ ID NO: 86195 - DNA, 420 bp, Artificial Sequence
  derived and/or modified sequence
atggaaagtgagcagctgttccacagagggtattatcggaacagctacaattcgattactagtgcctctagtgatgaagagctccttgacggagctggggtgattatggacttccagacctccgaggacgacaacctgctggacggcgacactgccgtggggacacattatactatgaccaatggcggaagcataaacagctcaactcatctgcttgacttactcgacgagcctatcccaggagtgggtacttacgacgatttccacacgattgactgggttcgcgaaaagtgcaaggaccgcgagaggcacaggcgaatcaattccaaaaagaaggagtctgcttgggaaatgaccaagagcctgtacgatgcatggtcaggttggcttgtggttacactgactgggttggccagttag

SEQ ID NO: 86196 - DNA, 576 bp, Artificial Sequence
  derived and/or modified sequence
atggagtccgagcagctgttccaccggggctattaccgcaatagttacaatagtattaccagtgccagttcagacgaagaacttcttgacggtgcaggtgtgatcatggactttcagacctctgaggacgacaacttgctcgatggcgatactgctgtaggcactcactacacaatgactaacggaggaagcatcaactcaagcacccacttgttggacttgctggatgagccaatcccgggggttggcacctatgacgacttccacacaatagattgggtgcgcgagaaatgcaaggacagagagcgccacaggcgtataaactcaaagaaaaaggaatctgcatgggaaatgaccaagagcctttacgatgcttggtcgggctggttggttgttacactgacgggactcgcttccggagcgcttgccgggctcatagatatcgccgccgattggatgactgatctcaaggaagggatttgccttagcgccctgtggtacaaccacgaacaatgttgctgggggtcaaacgaaaccacattcgaaaaaaagaagaaaaaaaaaaaaaaagcatag

SEQ ID NO: 86197 - DNA, 2376 bp, Artificial Sequence
  derived and/or modified sequence
atggagagcgagcagctgttccaccggggctactacagaaattcctacaacagcatcaccagcgccagcagtgatgaggagctgctggatggagctggggtcatcatggacttccagaccagtgaagatgacaacctgctggatggagacacagctgtgggcacccactacaccatgaccaatggaggcagcatcaacagcagcacccacctgctggacctgctggatgagcccatccctggggtgggcacctatgatgacttccacaccatcgactgggtgcgggagaagtgcaaggaccgggagcggcaccggcgcatcaacagcaagaagaaggagagcgcctgggagatgaccaagagcctgtatgatgcctggagcggctggctggtggtgaccctgaccggcctggccagcggggccctggccggcctgattgatattgctgctgactggatgacagacctgaaggagggcatctgcctgagcgccctgtggtacaaccacgagcagtgctgctggggcagcaatgagaccacctttgaggagcgggacaagtgcccccagtggaagacctgggccgagctgatcatcggccaggccgagggccctggcagctacatcatgaactacatcatgtacatcttctgggccctgagctttgccttcctggccgtgtccctggtgaaggtgtttgccccctatgcctgtggcagcggcatccctgagatcaagaccatcctgagcggcttcatcatccggggctacctgggcaagtggaccctgatgatcaagaccatcaccctggtgctggccgtggccagcggcctgagcctgggcaaggagggccccctggtgcacgtggcctgctgctgcggcaacatcttctcctacctgttccccaagtacagcaccaatgaggccaagaagcgggaggtgtcctactacttccccctgaagaccctgtggaggagcttctttgctgccctggtggccgcctttgtgctgcggagcatcaaccccttcggcaacagccggctggtgctcttctacgtggagtaccacaccccctggtacctgtttgagctgttccccttcatcctgctgggcgtgtttggaggcctgtggggcgccttcttcatccgggccaacatcgcctggtgcagaagaaggaagagcaccaagtttgggaagtaccctgtgctggaggtgatcatcgtggccgccatcacagctgtgattgccttccccaacccctacacccggctgaacaccagcgagctgatcaaggagctgttcacagactgtggccccctggagagcagcagcctgtgtgactacagaaatgacatgaatgccagcaagatcgtggatgacatcccagacaggcctgctggcattggagtgtacagcgccatctggcagctgtgcctggccctgatcttcaagatcatcatgacagtgttcaccttcggcatcaaggtgcccagcggcctcttcatccccagcatggccatcggggccatcgccggcagaattgtgggcattgctgtggagcagctggcctactaccaccacgactggttcatcttcaaggagtggtgtgaggtgggcgctgactgcatcaccccaggcctgtatgccatggtgggcgctgctgcctgcctgggcggcgtgaccaggatgacagtgtccctggtggtgattgtgtttgagctgaccggcggcctggagtacatcgtgcccctgatggctgctgtgatgaccagcaagtgggtgggagatgccttcggccgggagggcatctatgaggcccacatccggctgaatggctaccccttcctggatgccaaggaggagttcacccacaccaccctggccgcagatgtgatgaggcccaggagaaatgacccccccctggccgtgctgacccaggacaacatgacagtggatgacatcgagaacatgatcaatgagaccagctacaacggcttccctgtgatcatgagcaaggagagccagaggctggtgggctttgccctgcggcgggacctgaccatcgccattgaaagtgccaggaagaagcaggagggcatcgtgggcagcagccgggtgtgctttgcccagcacacccccagcctgcctgctgagagcccccggcccctgaagctgcggagcatcctggacatgagccccttcaccgtgacagaccacacccccatggagatcgtggtggacatcttcaggaagctgggcctgcggcagtgcctggtgacccacaacggccgcctgctgggcatcatcaccaagaaggacatcctgcggcacatggcccagacagccaaccaggaccctgccagcatcatgttcaactag

SEQ ID NO: 86198 - DNA, 522 bp, Artificial Sequence
  derived and/or modified sequence
atggagagcgagcagctgttccaccggggctactacagaaattcctacaacagcatcaccagcgccagcagtgatgaggagctgctggatggagctggggtcatcatggacttccagaccagtgaagatgacaacctgctggatggagacacagctgtgggcacccactacaccatgaccaatggaggcagcatcaacagcagcacccacctgctggacctgctggatgagcccatccctggggtgggcacctatgatgacttccacaccatcgactgggtgcgggagaagtgcaaggaccgggagcggcaccggcgcatcaacagcaagaagaaggagagcgcctgggagatgaccaagagcctgtatgatgcctggagcggctggctggtggtgaccctgaccggcctggccagcggggccctggccggcctgattgatattgctgctgactggatgacagacctgaaggagggcatctgcctgagcgccctgtggtacaaccacgagcagtgctgctag

SEQ ID NO: 86199 - DNA, 420 bp, Artificial Sequence
  derived and/or modified sequence
atggagagcgagcagctgttccaccggggctactacagaaattcctacaacagcatcaccagcgccagcagtgatgaggagctgctggatggagctggggtcatcatggacttccagaccagtgaagatgacaacctgctggatggagacacagctgtgggcacccactacaccatgaccaatggaggcagcatcaacagcagcacccacctgctggacctgctggatgagcccatccctggggtgggcacctatgatgacttccacaccatcgactgggtgcgggagaagtgcaaggaccgggagcggcaccggcgcatcaacagcaagaagaaggagagcgcctgggagatgaccaagagcctgtatgatgcctggagcggctggctggtggtgaccctgaccggcctggccagctag

SEQ ID NO: 86200 - DNA, 576 bp, Artificial Sequence
  derived and/or modified sequence
atggagagcgagcagctgttccaccggggctactacagaaattcctacaacagcatcaccagcgccagcagtgatgaggagctgctggatggagctggggtcatcatggacttccagaccagtgaagatgacaacctgctggatggagacacagctgtgggcacccactacaccatgaccaatggaggcagcatcaacagcagcacccacctgctggacctgctggatgagcccatccctggggtgggcacctatgatgacttccacaccatcgactgggtgcgggagaagtgcaaggaccgggagcggcaccggcgcatcaacagcaagaagaaggagagcgcctgggagatgaccaagagcctgtatgatgcctggagcggctggctggtggtgaccctgaccggcctggccagcggggccctggccggcctgattgatattgctgctgactggatgacagacctgaaggagggcatctgcctgagcgccctgtggtacaaccacgagcagtgctgctggggcagcaatgagaccacctttgagaagaagaagaagaagaagaagaaggcctag

SEQ ID NO: 86201 - DNA, 2376 bp, Artificial Sequence
  derived and/or modified sequence
atggagagcgagcagctgttccaccggggctactaccggaacagctataattccattacttcagcgtcatctgatgaggaactgttagacggcgccggggtgattatggattttcaaacgtcagaagacgataacctacttgatggcgacacagccgtgggtacacattacacaatgactaatgggggcagcattaattccagtacccacctgctggacctgctggatgagcctattccaggagtgggaacatatgacgattttcataccattgactgggtgcgggagaagtgcaaggatagggagagacaccgcagaatcaattcaaaaaaaaaagagtccgcttgggaaatgactaagagcttgtacgacgcctggagtggatggctggtagtaaccctgactggactggcttcaggagcactcgccggactcattgacatagccgctgattggatgacggacctgaaggaagggatctgtctgtcagctctatggtataaccatgaacagtgctgctggggctcaaacgaaacaaccttcgaggaaagagataaatgccctcagtggaaaacgtgggctgagctgatcattggccaagccgaaggacccggatcttacattatgaactacatcatgtatattttttgggccttaagctttgcatttctggccgtgtccctggtaaaggttttcgctccttatgcctgcggctctggcatccctgaaataaagaccattctgagcggctttattattcgtggatacctgggcaaatggaccctgatgataaaaaccataactctcgtcctcgctgtggctagcggactgtctctgggaaaggaggggccccttgttcacgtcgcgtgttgctgtggcaatatattcagctatttattccctaagtattccacaaatgaagcgaaaaagcgggaggtgtcatactatttccctctgaaaaccctctggcggtcgttcttcgccgcgctcgtggccgcatttgtgttgcgcagtattaatcctttcggaaattcccgcctcgtactgttctatgtggagtaccacacgccctggtacctatttgaactctttccctttattctgctcggtgtttttggagggctgtggggtgccttctttatccgggccaacatcgcgtggtgccgcagacggaagagtacaaaatttggtaagtacccggttctggaggtcatcatcgtggcagctatcacggctgtaatcgccttccctaatccgtacactcggcttaacacaagtgagctgattaaggaactctttaccgactgtgggcctcttgaatccagctcgctgtgcgactatcgaaatgacatgaatgcaagcaaaattgtcgatgatatcccggaccggccagccgggatcggcgtgtactctgccatctggcagctgtgcctggccctgatcttcaagattatcatgacggtattcacatttggcattaaagtacctagcggattgtttatccccagcatggccattggtgccatcgccggaaggattgtggggattgcagtggaacagcttgcttattatcaccacgactggtttatattcaaagaatggtgtgaggttggagccgactgcattacccccggattgtacgccatggtgggagcggccgcctgcttaggcggcgtgacccgaatgaccgtgtccctagttgtgattgtgtttgaacttacggggggcctggagtatattgtacccctgatggccgccgtcatgacttcaaaatgggtgggtgatgcctttggccgggagggcatatatgaggctcatatcagactgaatggttaccccttcttagacgccaaggaagagttcacccacaccactcttgccgccgacgtgatgagacctaggcgaaatgacccacccctggccgtactgacgcaggacaatatgaccgtggatgatatcgagaacatgatcaatgagactagctacaacggcttcccagtcatcatgtcaaaggagagtcaaagactggtgggtttcgcactgcgaagggacctgacaatcgctattgagtcggcaaggaaaaaacaggaggggatcgtcggatcgagccgagtctgtttcgctcagcacaccccatcactgccagcggaatcaccccgcccccttaagttgcgatctattctcgacatgtcccctttcacagtcactgatcacacacctatggagatagtggtggatatctttcgcaagctggggcttcggcaatgtctggtgactcataatggacgccttctcgggataatcaccaagaaagacatcctgagacatatggcccagaccgctaatcaggatccagcatccataatgttcaattag

SEQ ID NO: 86202 - DNA, 522 bp, Artificial Sequence
  derived and/or modified sequence
atggagagcgagcagctgttccaccggggctactaccggaacagctacaacagcataacaagcgcgtcctctgatgaagagttgttggatggcgctggcgttataatggattttcagaccagtgaggacgataacttactggatggtgatacagccgtgggtacacactacactatgaccaacggcgggagtatcaactcttccacacacctgctggatctgctcgatgaaccaataccaggagtgggcacgtatgatgatttccatactattgattgggtgcgcgagaaatgcaaggacagggagcggcacaggcgaatcaattcaaagaaaaaagaatcagcttgggagatgaccaagtccttatatgacgcctggagtggatggcttgtcgtcacgctgacgggtctggcgtcaggagcactggccgggctcatcgatattgcagccgactggatgacggacctgaaagaagggatctgcctgagcgccctttggtacaaccatgaacaatgttgctag

SEQ ID NO: 86203 - DNA, 420 bp, Artificial Sequence
  derived and/or modified sequence
atggagagcgagcagctgttccaccggggctactaccggaacagctacaattctatcacgagcgcttccagcgacgaggagttgcttgacggcgccggcgtaatcatggactttcagactagcgaagatgacaatctcctggacggggataccgctgtgggaacgcactacacaatgaccaacggaggtagcataaactcttccacccatctccttgatttgcttgatgaaccaataccaggagtgggcacctatgatgatttccatactattgattgggttagggagaaatgcaaggatcgcgaaagacacaggcgaattaattccaagaagaaagaaagtgcatgggaaatgacaaaaagcttgtacgatgcctggtctggctggctggtggttaccctcactgggttggccagttag

SEQ ID NO: 86204 - DNA, 576 bp, Artificial Sequence
  derived and/or modified sequence
atggagagcgagcagctgttccaccggggctactaccggaacagctataacagtattacgtcagcctcctccgatgaggagttgctggacggagccggggtaatcatggacttccagacatctgaggacgacaacctacttgacggtgatacagcagtcggaactcactatactatgaccaatggcggctccattaacagttcaacccacttactagacttactcgatgaacccatccctggggtcgggacctatgacgattttcacacaattgattgggttcgagaaaagtgcaaagacagggagcggcataggcggattaacagtaagaaaaaagaatccgcttgggagatgacaaagagtctgtacgacgcttggtccggatggctggtggttaccttgaccggcctcgcctcgggcgcactggctggtcttattgatattgcggccgattggatgacagacctgaaagagggaatttgcctgagcgccctgtggtataatcatgagcagtgttgttggggaagcaacgaaacgacttttgaaaagaagaaaaagaagaaaaagaaagcctag

SEQ ID NO: 86205 - DNA, 2376 bp, Artificial Sequence
  derived and/or modified sequence
atggaatcggagcagttgtttcatcggggatactatagaaactcttataactccatcacctccgcctcttccgatgaggagctccttgacggagcgggagtgatcatggatttccagacctcggaagatgacaatctgcttgacggcgacaccgcggtcgggacgcactataccatgacaaacgggggaagcatcaactccagcacccatctactggacctgctggacgagcctatcccaggcgtcggtacctatgacgacttccatactatcgattgggtgcgtgagaaatgtaaggaccgggagcggcatcgcaggatcaactcaaagaagaaggagtcagcctgggagatgactaagtctctgtatgacgcctggagcgggtggctcgtggttaccctcaccggtttggcctccggagctctggccggtctgattgacatcgcagcagattggatgactgatctgaaagaaggtatatgcttatccgctctgtggtacaaccatgaacagtgttgttgggggtctaatgaaactacctttgaagagcgcgataaatgccctcaatggaaaacatgggcggagttaataattggacaggcggaaggaccaggaagctatatcatgaattatatcatgtatatattctgggccctgtcttttgccttccttgccgtatctctggtcaaagtttttgccccatacgcctgtggttccggtattcctgagattaaaacgattttatccgggtttataattcgcggatacttgggaaagtggaccctaatgatcaaaaccattacattggtattggccgttgcctcggggctgagccttgggaaagaaggaccgctggtccatgtcgcatgttgttgcggcaatatcttcagttacctgtttccaaagtatagcacgaatgaagccaagaagcgggaggttagttactacttccccctcaagacactctggcgatccttctttgccgctctggtcgcagcttttgttttaagatctattaatcctttcggaaactcaagactagtattgttctatgtggagtaccacacaccgtggtacttgtttgaactgtttccctttatcctcctcggggtgtttggaggtctgtggggggcttttttcatcagggctaatatcgcttggtgtcgacgcaggaaaagtacaaagttcggtaaataccctgtgctggaggtgatcatcgttgccgctatcacagccgtcatcgctttccccaacccgtatactagattgaacacctccgagctcatcaaggaactcttcacagattgcgggcctcttgaatcctcatccctgtgcgattaccgaaacgatatgaatgcgtcaaaaatcgtagacgatattcccgaccggcctgcaggcatcggggtttatagcgccatttggcagctgtgcctggcactcatctttaagattatcatgacagtgtttactttcgggatcaaggtgccaagtggcctgtttatcccttctatggccataggcgcaattgctggacgcatcgtgggcatcgcggttgaacaattggcctattatcatcatgattggttcattttcaaggaatggtgtgaggtcggagcagactgtatcacgcccggtttatatgcgatggtcggtgctgcggcttgcctaggcggtgttaccaggatgactgtatcactggtggtgatagtgttcgagcttacaggtggtttggaatacatcgtacctctgatggccgcagtaatgaccagtaaatgggtgggtgatgcgtttgggagggaaggaatttatgaagctcacatcaggcttaacggatacccttttctcgacgcgaaagaggagttcacgcataccaccctcgccgcagatgttatgcggccacggagaaatgatcctcccctagcggtgctgacacaggacaacatgacagtggatgacattgagaacatgatcaacgagacatcttacaatggcttccccgtgatcatgagtaaagaatcccagagactcgtcgggtttgcgcttagacgggacctgacaattgctattgagagcgccaggaaaaagcaagaggggattgtgggcagctctagagtgtgcttcgcacagcatacgccgtccctcccagccgagtcccccagacctctaaaactgcggagcattttggatatgtctccttttacagtgactgatcataccccaatggagatagtggttgatatcttccgcaagctgggcctgagacagtgcctggtgactcacaacggcagactcctggggatcatcaccaagaaagacattctgaggcatatggcccagaccgctaatcaggatcccgcttccatcatgtttaactag

SEQ ID NO: 86206 - DNA, 522 bp, Artificial Sequence
  derived and/or modified sequence
atggaaagcgagcagctcttccaccgtggctattaccggaattcttacaattccatcacctctgcgtcttccgacgaagagctgctcgatggagccggagtgataatggattttcaaacatcggaagacgacaatcttttggatggcgacaccgcggtgggaactcattacacaatgacaaacgggggatctatcaactcctcaacacatctgttggacctgctcgacgaaccgatacccggagttggcacctacgacgactttcacacgattgactgggtgcgtgagaaatgtaaggacagggagaggcatcggagaattaactctaaaaaaaaggaatccgcttgggaaatgacaaaatcactgtatgacgcctggtccgggtggctggttgtgacccttacaggactggcatccggggctctggcaggtttgattgacatcgcagctgactggatgactgacctgaaggaggggatctgtttaagtgccctgtggtacaaccacgagcagtgttgttag

SEQ ID NO: 86207 - DNA, 420 bp, Artificial Sequence
  derived and/or modified sequence
atggagagcgagcagctcttccatcgagggtactacagaaactcttataattctattacttccgcaagcagcgatgaggagctccttgatggcgcaggcgtaattatggacttccaaaccagtgaagacgacaacctccttgacggggacactgctgtggggacacactacacaatgaccaacggtggaagcatcaacagctcgactcatctgctggacttattagacgaacccattcctggcgtggggacatacgacgattttcacacgatcgattgggtccgcgagaaatgcaaggaccgtgagagacacaggaggatcaatagtaaaaagaaggagtctgcctgggagatgacgaagagtctgtacgacgcttggtctgggtggttggtggtgaccctcaccggtctagcctcgtag

SEQ ID NO: 86208 - DNA, 576 bp, Artificial Sequence
  derived and/or modified sequence
atggaatcggaacagctctttcatcggggttattatagaaacagttataattccatcaccagtgccagctccgacgaggaactcctggatggagccggagtaataatggactttcagacttcagaggatgacaatctgctcgacggggataccgcagtggggacccactacactatgacaaacggaggatcgatcaattcctcaactcacttgttagacttgttggatgaaccaattcctggtgtaggtacttacgatgactttcatacgattgattgggtgagagaaaaatgcaaagatagagaacgccaccgaagaattaatagtaagaagaaggagtctgcctgggagatgaccaagtcattatatgatgcctggagtggctggttggtggtaactctgaccggactggctagcggcgctctcgccggactgattgacattgccgctgactggatgaccgacctgaaagaaggcatctgcctgtctgccctctggtacaatcacgaacagtgttgctggggctccaacgaaactacctttgagaagaagaaaaaaaagaagaagaaagcatag

SEQ ID NO: 86209 - DNA, 3208 bp, Artificial Sequence
  derived and/or modified sequence
acgcgtcgacgctggggcgtacctttcgggctcctgactcctgccgcttctcttccccttccgtgggtcagggccggtccggtccggaacctgcagcccctttcccagtgttctagttcgcccgtgacccggaataatgagcaaggagggtgtggtgggttgaaagccatcctactttactcccgagttagagcatggattcagttttagtcttaagggggaagtgagattggagatttttatttttaattttgggcagaagcaggttgactctagggatctccagagcgagaggatttaacttcatgttgctcccgtgtttgaaggaggacaataaaagtcccaccgggcaaaattttcgtaacctctgcggtagaaaacgtcaggtatcttttaaatcgcgatagttttcgctgtgtcaggctttcttcggtggagctccgagggtagctaggttctaggtttgaaacagatgcagaatccaaaggcagcgcaaaaaacagccaccgattttgctatgtctctgagctgcgagataatcagacagctaaatggagtctgagcagctgttccatagaggctactatagaaacagctacaacagtataacaagtgcaagtagtgatgaggaacttttagatggagcaggtgttattatggactttcaaacatctgaagatgacaatttattagatggtgacactgcagttggaactcattatacaatgacaaatggaggcagcattaacagttctacacatttactggatcttttggatgaaccaattccaggtgttggtacatatgatgatttccatactattgattgggtgcgagaaaaatgtaaagacagagaaaggcatagacggatcaacagcaaaaagaaagaatcagcatgggaaatgacaaaaagtttgtatgatgcgtggtcaggatggctagtagtaacactaacaggattggcatcaggggcactggccggattaatagacattgctgccgattggatgactgacctaaaggagggcatttgccttagtgcgttgtggtacaaccacgaacagtgctgttggggatctaatgaaacaacatttgaagagagggataaatgtccacagtggaaaacatgggcagaattaatcataggtcaagcagagggtcctggttcttatatcatgaactacataatgtacatcttctgggccttgagttttgcctttcttgcagtttccctggtaaaggtatttgctccatatgcctgtggctctggaattccagagattaaaactattttaagtggattcatcatcagaggttacttgggaaaatggactttaatgattaaaaccatcacattagtcctggctgtggcatcaggtttgagtttaggaaaagaaggtcccctggtacatgttgcctgttgctgcggaaatatcttttcctacctctttccaaagtatagcacaaacgaagctaaaaaaagggaggttagctattattttcctctcaaaactttatggagatcattttttgctgctttagtggctgcatttgttttgaggtccatcaatccatttggtaacagccgtctggtccttttttatgtggagtatcatacaccatggtacctttttgaactgtttccttttattcttctaggggtatttggagggctttggggagcctttttcattagggcaaatattgcctggtgtcgtcgacgcaagtccacgaaatttggaaagtatcccgttctggaagtcattattgttgcagccattactgctgtgatagccttccctaatccatacactaggctaaacaccagtgaactgatcaaagagctttttacagactgtggtcccctggaatcctcttctctttgtgactacagaaatgacatgaatgccagtaaaattgtcgatgacattcctgatcgtccagcaggcattggagtatattcagctatatggcagttatgcctggcactcatatttaaaatcataatgacagtattcacttttggcatcaaggttccatcaggcttgttcatccccagcatggccattggagcgatcgcaggaaggattgtggggattgcggtggagcagcttgcctactatcaccacgactggtttatctttaaggagtggtgtgaggtcggggctgattgcattacacctggcctttatgccatggttggtgctgctgcatgcttaggtggtgtgacaagaatgactgtctccctggtggttattgtttttgagcttactggaggcttggaatatattgttccccttatggctgcagtcatgaccagtaaatgggttggagatgcctttggcagggaaggcatttatgaagcacacatccgattaaatggataccctttcttggatgcaaaagaagaattcactcataccaccctggctgctgacgttatgagacctcgaaggaatgatcctcccttagctgtcctgacacaggacaatatgacagtggatgatatagaaaacatgattaatgaaaccagctacaatggatttcctgtcataatgtcaaaagaatctcagagattagtgggatttgccctcagaagagacctgacaattgcaatagaaagtgccaggaaaaaacaagaaggtatcgttggcagttctcgggtgtgttttgcacagcacaccccatctcttccagcagaaagtcctcggccattgaagcttcgaagcattcttgacatgagcccttttacagtgacagaccacaccccaatggagatcgtggtggatattttccgaaagctgggactgaggcagtgccttgtaactcacaatgggcgcctccttggcattataacaaaaaaagatatcctccggcatatggcccagacggcaaaccaagaccccgcttcaataatgttcaactgaatctcacagatgaggagagagaagaaacggaagaggaagtttatttgttgaatagcacaactctttaacctgagggagtcatctacttttttttcctcctttacaaaaaaagaaaggaaatataaaagccgggtttttgcaacatggtttgcaaataatgctggtggaatggaggagttgtttggggagggaaaggagagagaaggaaaggagtgaggtatttcccgtctaacagaaagcagcgtatcaactcctattgttctgcactggatgcattcagc

SEQ ID NO: 86210 - DNA, 582 bp, Artificial Sequence
  derived and/or modified sequence
agcgcgtggaaggcggcacgcagcggaggcggctgggaaggagcaataatcagacagctaaatggagtctgagcagctgttccatagaggctactatagaaacagctacaacagtataacaagtgcaagtagtgatgaggaacttttagatggagcaggtgttattatggactttcaaacatctgaagatgacaatttattagatggtgacactgcagttggaactcattatacaatgacaaatggaggcagcattaacagttctacacatttactggatcttttggatgaaccaattccaggtgttggtacatatgatgatttccatactattgattgggtgcgagaaaaatgtaaagacagagaaaggcatagacggatcaacagcaaaaagaaagaatcagcatgggaaatgacaaaaagtttgtatgatgcgtggtcaggatggctagtagtaacactaacaggattggcatcaggggcactggccggattaatagacattgctgccgattggatgactgacctaaaggagggcatttgccttagtgcgttgtggtacaaccacgaacagtgctgttg

SEQ ID NO: 86211 - DNA, 563 bp, Artificial Sequence
  derived and/or modified sequence
tttcgggctcctgactcctgccgcttctcttccccttccgtgggtcagggccggtccggtccggaacctgcagcccctttcccagtgttctagttcgcccgtgacccggaataatgagcaaggagggtgtgataatcagacagctaaatggagtctgagcagctgttccatagaggctactatagaaacagctacaacagtataacaagtgcaagtagtgatgaggaacttttagatggagcaggtgttattatggactttcaaacatctgaagatgacaatttattagatggtgacactgcagttggaactcattatacaatgacaaatggaggcagcattaacagttctacacatttactggatcttttggatgaaccaattccaggtgttggtacatatgatgatttccatactattgattgggtgcgagaaaaatgtaaagacagagaaaggcatagacggatcaacagcaaaaagaaagaatcagcatgggaaatgacaaaaagtttgtatgatgcgtggtcaggatggctagtagtaacactaacaggattggcatc

SEQ ID NO: 86212 - DNA, 1082 bp, Artificial Sequence
  derived and/or modified sequence
gccgcttctcttccccttccgtgggtcagggccggtccggtccggaacctgcagcccctttcccagtgttctagttcgcccgtgacccggaataatgagcaaggagggtgtggtgggttgaaagccatcctactttactcccgagttagagcatggattcagttttagtcttaagggggaagtgagattggagatttttatttttaattttgggcagaagcaggttgactctagggatctccagagcgagaggatttaacttcatgttgctcccgtgtttgaaggaggacaataaaagtcccaccgggcaaaattttcgtaacctctgcggtagaaaacgtcaggtatcttttaaatcgcgatagttttcgctgtgtcaggctttcttcggtggagctccgagggtagctaggttctaggtttgaaacagatgcagaatccaaaggcagcgcaaaaaacagccaccgattttgctatgtctctgagctgcgagataatcagacagctaaatggagtctgagcagctgttccatagaggctactatagaaacagctacaacagtataacaagtgcaagtagtgatgaggaacttttagatggagcaggtgttattatggactttcaaacatctgaagatgacaatttattagatggtgacactgcagttggaactcattatacaatgacaaatggaggcagcattaacagttctacacatttactggatcttttggatgaaccaattccaggtgttggtacatatgatgatttccatactattgattgggtgcgagaaaaatgtaaagacagagaaaggcatagacggatcaacagcaaaaagaaagaatcagcatgggaaatgacaaaaagtttgtatgatgcgtggtcaggatggctagtagtaacactaacaggattggcatcaggggcactggccggattaatagacattgctgccgattggatgactgacctaaaggagggcatttgccttagtgcgttgtggtacaaccacgaacagtgctgttggggatctaatgaaacaacatttgaaaaaaaaaaaaaaaaaaaaaagaaagcc

SEQ ID NO: 86213 - DNA, 2376 bp, Artificial Sequence
  derived and/or modified sequence
atggagagcgagcagctgttccacagaggctactacagaaacagctacaacagcatcaccagcgccagcagcgacgaggagctgctggacggcgccggcgtgatcatggacttccagaccagcgaggacgacaacctgctggacggcgacaccgccgtgggcacccactacaccatgaccaacggcggcagcatcaacagcagcacccacctgctggacctgctggacgagcccatccccggcgtgggcacctacgacgacttccacaccatcgactgggtgagagagaagtgcaaggacagagagagacacagaagaatcaacagcaagaagaaggagagcgcctgggagatgaccaagagcctgtacgacgcctggagcggctggctggtggtgaccctgaccggcctggccagcggcgccctggccggcctgatcgacatcgccgccgactggatgaccgacctgaaggagggcatctgcctgagcgccctgtggtacaaccacgagcagtgctgctggggcagcaacgagaccaccttcgaggagagagacaagtgcccccagtggaagacctgggccgagctgatcatcggccaggccgagggccccggcagctacatcatgaactacatcatgtacatcttctgggccctgagcttcgccttcctggccgtgagcctggtgaaggtgttcgccccctacgcctgcggcagcggcatccccgagatcaagaccatcctgagcggcttcatcatcagaggctacctgggcaagtggaccctgatgatcaagaccatcaccctggtgctggccgtggccagcggcctgagcctgggcaaggagggccccctggtgcacgtggcctgctgctgcggcaacatcttcagctacctgttccccaagtacagcaccaacgaggccaagaagagagaggtgagctactacttccccctgaagaccctgtggagaagcttcttcgccgccctggtggccgccttcgtgctgagaagcatcaaccccttcggcaacagcagactggtgctgttctacgtggagtaccacaccccctggtacctgttcgagctgttccccttcatcctgctgggcgtgttcggcggcctgtggggcgccttcttcatcagagccaacatcgcctggtgcagaagaagaaagagcaccaagttcggcaagtaccccgtgctggaggtgatcatcgtggccgccatcaccgccgtgatcgccttccccaacccctacaccagactgaacaccagcgagctgatcaaggagctgttcaccgactgcggccccctggagagcagcagcctgtgcgactacagaaacgacatgaacgccagcaagatcgtggacgacatccccgacagacccgccggcatcggcgtgtacagcgccatctggcagctgtgcctggccctgatcttcaagatcatcatgaccgtgttcaccttcggcatcaaggtgcccagcggcctgttcatccccagcatggccatcggcgccatcgccggcagaatcgtgggcatcgccgtggagcagctggcctactaccaccacgactggttcatcttcaaggagtggtgcgaggtgggcgccgactgcatcacccccggcctgtacgccatggtgggcgccgccgcctgcctgggcggcgtgaccagaatgaccgtgagcctggtggtgatcgtgttcgagctgaccggcggcctggagtacatcgtgcccctgatggccgccgtgatgaccagcaagtgggtgggcgacgccttcggcagagagggcatctacgaggcccacatcagactgaacggctaccccttcctggacgccaaggaggagttcacccacaccaccctggccgccgacgtgatgagacccagaagaaacgacccccccctggccgtgctgacccaggacaacatgaccgtggacgacatcgagaacatgatcaacgagaccagctacaacggcttccccgtgatcatgagcaaggagagccagagactggtgggcttcgccctgagaagagacctgaccatcgccatcgagagcgccagaaagaagcaggagggcatcgtgggcagcagcagagtgtgcttcgcccagcacacccccagcctgcccgccgagagccccagacccctgaagctgagaagcatcctggacatgagccccttcaccgtgaccgaccacacccccatggagatcgtggtggacatcttcagaaagctgggcctgagacagtgcctggtgacccacaacggcagactgctgggcatcatcaccaagaaggacatcctgagacacatggcccagaccgccaaccaggaccccgccagcatcatgttcaactag

SEQ ID NO: 86214 - DNA, 522 bp, Artificial Sequence
  derived and/or modified sequence
atggagagcgagcagctgttccacagaggctactacagaaacagctacaacagcatcaccagcgccagcagcgacgaggagctgctggacggcgccggcgtgatcatggacttccagaccagcgaggacgacaacctgctggacggcgacaccgccgtgggcacccactacaccatgaccaacggcggcagcatcaacagcagcacccacctgctggacctgctggacgagcccatccccggcgtgggcacctacgacgacttccacaccatcgactgggtgagagagaagtgcaaggacagagagagacacagaagaatcaacagcaagaagaaggagagcgcctgggagatgaccaagagcctgtacgacgcctggagcggctggctggtggtgaccctgaccggcctggccagcggcgccctggccggcctgatcgacatcgccgccgactggatgaccgacctgaaggagggcatctgcctgagcgccctgtggtacaaccacgagcagtgctgctag

SEQ ID NO: 86215 - DNA, 420 bp, Artificial Sequence
  derived and/or modified sequence
atggagagcgagcagctgttccacagaggctactacagaaacagctacaacagcatcaccagcgccagcagcgacgaggagctgctggacggcgccggcgtgatcatggacttccagaccagcgaggacgacaacctgctggacggcgacaccgccgtgggcacccactacaccatgaccaacggcggcagcatcaacagcagcacccacctgctggacctgctggacgagcccatccccggcgtgggcacctacgacgacttccacaccatcgactgggtgagagagaagtgcaaggacagagagagacacagaagaatcaacagcaagaagaaggagagcgcctgggagatgaccaagagcctgtacgacgcctggagcggctggctggtggtgaccctgaccggcctggccagctag

SEQ ID NO: 86216 - DNA, 576 bp, Artificial Sequence
  derived and/or modified sequence
atggagagcgagcagctgttccacagaggctactacagaaacagctacaacagcatcaccagcgccagcagcgacgaggagctgctggacggcgccggcgtgatcatggacttccagaccagcgaggacgacaacctgctggacggcgacaccgccgtgggcacccactacaccatgaccaacggcggcagcatcaacagcagcacccacctgctggacctgctggacgagcccatccccggcgtgggcacctacgacgacttccacaccatcgactgggtgagagagaagtgcaaggacagagagagacacagaagaatcaacagcaagaagaaggagagcgcctgggagatgaccaagagcctgtacgacgcctggagcggctggctggtggtgaccctgaccggcctggccagcggcgccctggccggcctgatcgacatcgccgccgactggatgaccgacctgaaggagggcatctgcctgagcgccctgtggtacaaccacgagcagtgctgctggggcagcaacgagaccaccttcgagaagaagaagaagaagaagaagaaggcctag

SEQ ID NO: 86217 - DNA, 2406 bp, Artificial Sequence
  derived and/or modified sequence
atggtgaccctgcaactgggggaaagtcactacgtcgtccaggcgggacttcagttactcggctcgtccaatccacccgcactcgcttcacaggtggcggaaatcactggcacccactacaccatgactaacggggggagtatcaactcatcgacacatttactggatcttctcgatgaaccgatacccggggtaggaacctatgacgacttccacacaattgactgggtgagagagaagtgcaaagatagggagcgccataggcggattaattccaagaagaaggaatctgcttgggagatgaccaagtcgctctatgacgcatggtctggatggttggtggtgacactcaccgggctcgcatccggagccctggctggtctgattgacatcgcggcggactggatgacagacttgaaggaggggatttgcctaagtgccctgtggtacaatcatgagcagtgctgttgggggtccaacgagacaactttcgaagaacgggataaatgtccccagtggaaaacatgggccgagttaataataggccaggctgaaggaccgggctcttacattatgaactacataatgtacatcttctgggcgttgtcattcgccttcttggcagtcagcctggtaaaagtttttgccccttatgcctgtgggagtgggatccccgagattaagacaattctcagcgggttcatcataaggggataccttggcaaatggaccttaatgatcaaaacaataacattggtcctggctgtagcatcagggttgagcctgggcaaagagggtccactcgtgcacgtggcttgctgctgcggcaatatcttctcctacttattccccaagtattccactaatgaagcaaaaaagagagaggtgctgagcgccgcatctgctgccggcgtcagtgtggcatttggcgctcctatagggggagttctcttctcattggaggaggtgtcttattattttccactgaagacgctttggcgcagcttctttgcagctctggttgcagcctttgttctgcgctctatcaaccccttcggcaatagccggctagttttgttctacgtggagtaccatactccctggtatctctttgaactcttcccctttatccttctcggggtcttcgggggcctctggggggccttcttcatacgtgctaatattgcatggtgtcgcaggcggaagtccacaaaatttgggaagtacccggtgctggaagtaatcatcgttgctgcgataacagccgttatcgccttcccaaacccttacacccggttgaacacatctgagttaatcaaagagcttttcacggattgcggacccctggagtctagctctctatgtgactaccgcaatgacatgaacgcttctaagatagttgatgatattcctgacaggcctgccggtatcggggtgtattctgctatttggcaactgtgtctggccctgatcttcaagataatcatgactgtgttcacatttggcataaaggtcccctcagggttgtttatcccctccatggctattggggccattgctgggcggatcgtcggaatcgccgtcgagcagctcgcttactaccatcatgattggttcatcttcaaagaatggtgtgaggtgggggctgattgcatcacacctggtctctatgctatggttggagctgctgcctgcctagggggggtaacgagaatgactgtgagtctggtcgtgatagtgttcgaacttacgggtggcctggaatatattgtgcccttgatggcagctgtcatgacatctaagtgggtgggagacgcattcggacgtgagggtatttatgaagcacacattagactgaacgggtacccgtttttggacgcaaaggaggaattcactcacaccacactggcagcagacgtgatgaggcccaggcgcaatgaccctccactcgcagtgcttacgcaggataacatgaccgtagacgatatcgagaatatgataaatgaaacaagctataacggatttcctgttattatgagcaaagaatcccaacggctcgtgggattcgctcttcgccgtgacctgacaatagcaattgagtcggcccgaaaaaaacaggagggtatagttggatcctcccgggtgtgttttgcacaacatacaccttcactgcccgcagagtccccgcgtcctttgaagctgagatctatcctggacatgagtcccttcaccgtgactgaccatactccgatggaaattgttgtcgatatctttaggaaactgggcctgcgacagtgtctggttacccataatgggagactcctggggatcatcactaaaaaagatatactccggcatatggctcaaactgcgaaccaggaccccgccagcataatgttcaattag

SEQ ID NO: 86218 - DNA, 2406 bp, Artificial Sequence
  derived and/or modified sequence
atggtgaccctgcagctgggggagagccactacgtggtgcaggccggcctgcagctgctgggcagcagcaaccccccagccctggccagccaggtggccgagatcaccggcacccactacaccatgaccaacggcggcagcatcaacagcagcacccacctgctggacctgctggatgagcccatccctggggtgggcacctatgatgacttccacaccatcgactgggtgcgggagaagtgcaaggaccgggagcggcaccggcgcatcaacagcaagaagaaggagagcgcctgggagatgaccaagagcctgtatgatgcctggagcggctggctggtggtgaccctgaccggcctggccagcggggccctggccggcctgattgatattgctgctgactggatgacagacctgaaggagggcatctgcctgagcgccctgtggtacaaccacgagcagtgctgctggggcagcaatgagaccacctttgaggagcgggacaagtgcccccagtggaagacctgggccgagctgatcatcggccaggccgagggccctggcagctacatcatgaactacatcatgtacatcttctgggccctgagctttgccttcctggccgtgtccctggtgaaggtgtttgccccctatgcctgtggcagcggcatccctgagatcaagaccatcctgagcggcttcatcatccggggctacctgggcaagtggaccctgatgatcaagaccatcaccctggtgctggccgtggccagcggcctgagcctgggcaaggagggccccctggtgcacgtggcctgctgctgcggcaacatcttctcctacctgttccccaagtacagcaccaatgaggccaagaagcgggaggtgctgtctgctgccagcgctgctggggtgtctgtggcctttggagcccccatcggcggcgtgctcttcagcctggaggaggtgtcctactacttccccctgaagaccctgtggaggagcttctttgctgccctggtggccgcctttgtgctgcggagcatcaaccccttcggcaacagccggctggtgctcttctacgtggagtaccacaccccctggtacctgtttgagctgttccccttcatcctgctgggcgtgtttggaggcctgtggggcgccttcttcatccgggccaacatcgcctggtgcagaagaaggaagagcaccaagtttgggaagtaccctgtgctggaggtgatcatcgtggccgccatcacagctgtgattgccttccccaacccctacacccggctgaacaccagcgagctgatcaaggagctgttcacagactgtggccccctggagagcagcagcctgtgtgactacagaaatgacatgaatgccagcaagatcgtggatgacatcccagacaggcctgctggcattggagtgtacagcgccatctggcagctgtgcctggccctgatcttcaagatcatcatgacagtgttcaccttcggcatcaaggtgcccagcggcctcttcatccccagcatggccatcggggccatcgccggcagaattgtgggcattgctgtggagcagctggcctactaccaccacgactggttcatcttcaaggagtggtgtgaggtgggcgctgactgcatcaccccaggcctgtatgccatggtgggcgctgctgcctgcctgggcggcgtgaccaggatgacagtgtccctggtggtgattgtgtttgagctgaccggcggcctggagtacatcgtgcccctgatggctgctgtgatgaccagcaagtgggtgggagatgccttcggccgggagggcatctatgaggcccacatccggctgaatggctaccccttcctggatgccaaggaggagttcacccacaccaccctggccgcagatgtgatgaggcccaggagaaatgacccccccctggccgtgctgacccaggacaacatgacagtggatgacatcgagaacatgatcaatgagaccagctacaacggcttccctgtgatcatgagcaaggagagccagaggctggtgggctttgccctgcggcgggacctgaccatcgccattgaaagtgccaggaagaagcaggagggcatcgtgggcagcagccgggtgtgctttgcccagcacacccccagcctgcctgctgagagcccccggcccctgaagctgcggagcatcctggacatgagccccttcaccgtgacagaccacacccccatggagatcgtggtggacatcttcaggaagctgggcctgcggcagtgcctggtgacccacaacggccgcctgctgggcatcatcaccaagaaggacatcctgcggcacatggcccagacagccaaccaggaccctgccagcatcatgttcaactag

SEQ ID NO: 86219 - DNA, 2406 bp, Artificial Sequence
  derived and/or modified sequence
atggtgaccctgcagctgggcgagagccactacgtggtgcaggccggtctgcagctgttaggctcaagcaacccaccagcactcgcttcacaggtcgcagagataacaggcacccattacactatgactaatggcggtagtatcaatagctctacccacctgctggatttactcgacgaacccatacccggggtgggcacttacgatgactttcacaccattgactgggtgagagagaagtgcaaagatcgcgaaagacacagacggatcaatagcaaaaagaaggaatcagcatgggaaatgaccaagagcctgtatgatgcttggtccggctggttagtagtgacactgaccgggctggccagtggagcattggccggcttaatcgacattgccgctgattggatgacagatcttaaggaaggcatttgtctgagcgctctgtggtacaaccatgaacaatgttgctgggggtcaaacgaaactacatttgaggaaagagacaaatgcccccaatggaaaacttgggccgaactgatcatcggacaggctgagggccccggctcttacattatgaattacatcatgtatattttctgggccctctcatttgcattcctcgcagtcagcctcgtaaaagtgtttgccccgtatgcctgcggcagtgggatcccagaaatcaaaacaatcctgtccggtttcataattaggggatatttgggcaagtggaccctgatgatcaaaaccatcaccctggtacttgctgtagcctcggggttgtccctcggcaaagaggggccgctcgtccacgtggcctgctgttgcgggaatattttcagctacctgttccccaagtattccacaaacgaggctaagaaaagggaggttctgtctgccgccagtgctgccggagtatccgtggccttcggtgcccccatcgggggcgtcctgtttagtctcgaagaggtgagttattacttcccactgaaaaccctgtggaggagttttttcgccgccctggtggcagcttttgtcctccgctccattaacccttttgggaactcgcggctggtgcttttctacgtcgaatatcatacaccttggtatctgtttgaactctttcccttcatcctcctgggagtgtttggtggattatggggcgccttcttcatcagggcaaatatcgcatggtgcaggcggagaaagtcaacgaagtttggtaagtatccggttctggaggtgataattgttgctgccatcacggccgtaatcgcattcccgaacccctacaccaggctgaatactagcgagctgattaaggaactcttcaccgactgcgggccactggaatccagtagtctgtgtgattatcgcaacgacatgaacgcctccaagattgtggatgacattcccgatcgtcccgcaggaattggcgtttactcagctatctggcaactgtgtctggcgctgatctttaaaattatcatgacggtttttacatttggcataaaagtgcctagtggactgtttattcccagtatggccattggcgccattgcagggcggatcgtcggaatcgccgtggaacaactcgcttactaccaccacgattggtttatctttaaggaatggtgtgaggtgggggctgactgcatcacccctggtctgtatgccatggttggagcagccgcttgtttgggaggagttactcggatgactgtcagtcttgtggtgatcgttttcgaactaactggaggcctcgagtacattgtgccgctcatggcggccgtgatgacttcaaaatgggtcggggacgcattcggacgggaaggtatttacgaagctcacatcaggcttaatggataccccttccttgacgctaaagaagagttcactcacaccacacttgcagctgacgtcatgaggcccagacgaaatgacccaccccttgcagtcttgacccaggataatatgaccgtggatgatattgagaacatgatcaatgagacatcatataatggtttccctgttataatgtccaaagagtcacagagactggtgggctttgccctaaggcgggatctgactatagccatcgaaagtgcccgcaagaagcaggagggaattgttgggtccagcagggtctgcttcgcgcagcatacgccatctttgccagcagaatctcccaggccacttaaactccgatcaatactagacatgagcccctttactgtgacagatcacaccccaatggaaatagtggtggatatttttagaaagctgggcttgcgacagtgtctcgtaactcacaacggcaggctgctcggcatcattactaagaaagatattctgagacacatggctcagacggcaaaccaggatcccgcatctatcatgtttaactag

SEQ ID NO: 86220 - DNA, 2406 bp, Artificial Sequence
  derived and/or modified sequence
atggtgacattacagctcggtgagtcccattacgtagtccaggccggtctacagctgttgggatccagcaatccacccgctctggcaagccaggtggccgagatcaccggtacccactacactatgaccaacggcggttctatcaacagctctactcatttgctggacctgctggacgaacctatccctggcgtagggacatacgacgatttccacaccatagattgggtacgcgagaagtgcaaggacagagagcggcatagaagaataaactctaaaaagaaggagtctgcttgggaaatgaccaaatcattgtacgacgcatggtcaggatggcttgttgtgacgctgacaggattggcctcaggggcattggctggtctcatcgatatagccgctgactggatgactgacctgaaagaaggaatatgtctaagtgccctgtggtacaaccatgagcaatgctgttgggggagcaatgaaacaactttcgaggaacgcgataagtgtcctcagtggaaaacctgggctgagcttattattggtcaggcagagggccctggatcatacatcatgaattacattatgtatatcttctgggcattgagctttgcttttctcgcagtgtctcttgtgaaggtgtttgccccatatgcatgtggctctggcatcccagagatcaagaccatcctgtccggatttatcattcggggatatctcggtaaatggacactgatgatcaagactattaccctggtgctcgctgtcgcgtccggcctgtccctaggaaaggagggcccactggttcacgtcgcatgttgttgcggcaacatttttagctatctttttcccaagtactctactaatgaggccaaaaaacgggaggttttgagcgctgccagcgcagccggagttagcgtggctttcggcgcaccaatcggaggcgtactctttagtctcgaagaagtctcctattatttccctcttaagacattgtggaggagtttttttgccgcactggtggccgcatttgttctgcgatccattaatccctttggcaacagcagactggtgctgttttacgtagaataccataccccttggtacttattcgaacttttcccattcatactgttaggtgtgtttggtgggctttggggagccttcttcatcagagcaaacatcgcctggtgtagaagacgcaagtctacaaaatttgggaagtaccctgtgctggaggtgattatagtggcagcaataacggcagtgatcgcttttcccaacccatatacccggttgaatactagcgaactcattaaagagctgttcactgattgcggccctctggagagcagcagcctctgcgactacagaaatgacatgaacgctagtaaaatcgtagatgacattccggataggcctgccggtatcggtgtgtacagcgcaatttggcagttgtgtctggcactgatcttcaaaattattatgactgtattcaccttcgggataaaagtccccagtggtctgttcatcccaagtatggctatcggcgcaatcgctggaaggatagtggggatagctgtagagcaactggcctactaccaccacgattggtttattttcaaggagtggtgcgaggtgggagcggactgtattacgcctggactctacgccatggtcggtgctgctgcctgtctgggcggtgtaacccgcatgaccgtctctctggttgttattgtttttgagttaactgggggacttgagtatattgtgcctctgatggcagccgtgatgactagcaagtgggtgggagacgctttcgggagagaaggaatatatgaagcccacatccggctaaatggatatcctttcttggacgccaaagaggagttcacccatacaacacttgcagccgatgttatgaggcctagaagaaacgaccctccacttgctgtgttgacccaagataatatgactgtggacgatatcgaaaacatgatcaatgaaacatcttataatgggttccccgtcatcatgagcaaggagtcacagcggttggttgggtttgcactgcgccgagatttgactatcgccatcgaatccgcacgcaagaaacaagaggggatcgtggggtctagccgggtctgctttgcccaacacactccatccctgcccgctgagagcccaaggcccctaaaacttaggtccatcctggacatgtctccatttaccgtgacagatcacacaccaatggagatcgtggtcgatatctttaggaagttgggtctgcggcagtgcttagttacccataatggcagactgttgggaatcattaccaaaaaagatattttgcgacatatggcccagaccgctaaccaagatcctgctagtattatgtttaattag

SEQ ID NO: 86221 - DNA, 3157 bp, Artificial Sequence
  derived and/or modified sequence
ttgctcccgtgtttgaaggaggacaataaaagtcccaccgggcaaaattttcgtaacctctgcggtagaaaacgtcaggtatcttttaaatcgcgatagttttcgctgtgtcaggctttcttcggtggagctccgagggtagctaggttctaggtttgaaacagatgcagaatccaaaggcagcgcaaaaaacagccaccgattttgctatgtctctgagctgcgagataatcagacagctaaatggagtctgagcagctgttccatagaggctactatagaaacagctacaacagtataacaagtgcaagtagtgatgaggaacttttagatggagcaggtgttattatggactttcaaacatctgaagatgacaatttattagatggtgacactgcagttgggagagtctcactatgttgtccaggctggtctccaactcctgggctcaagcaaccctcctgccttggcctcccaagtagctgagattacaggaactcattatacaatgacaaatggaggcagcattaacagttctacacatttactggatcttttggatgaaccaattccaggtgttggtacatatgatgatttccatactattgattgggtgcgagaaaaatgtaaagacagagaaaggcatagacggatcaacagcaaaaagaaagaatcagcatgggaaatgacaaaaagtttgtatgatgcgtggtcaggatggctagtagtaacactaacaggattggcatcaggggcactggccggattaatagacattgctgccgattggatgactgacctaaaggagggcatttgccttagtgcgttgtggtacaaccacgaacagtgctgttggggatctaatgaaacaacatttgaagagagggataaatgtccacagtggaaaacatgggcagaattaatcataggtcaagcagagggtcctggttcttatatcatgaactacataatgtacatcttctgggccttgagttttgcctttcttgcagtttccctggtaaaggtatttgctccatatgcctgtggctctggaattccagagattaaaactattttaagtggattcatcatcagaggttacttgggaaaatggactttaatgattaaaaccatcacattagtcctggctgtggcatcaggtttgagtttaggaaaagaaggtcccctggtacatgttgcctgttgctgcggaaatatcttttcctacctctttccaaagtatagcacaaacgaagctaaaaaaagggaggtgctatcagctgcctcagctgcaggggtttctgtagcttttggtgcaccaattggaggagttctttttagcctggaagaggttagctattattttcctctcaaaactttatggagatcattttttgctgctttagtggctgcatttgttttgaggtccatcaatccatttggtaacagccgtctggtccttttttatgtggagtatcatacaccatggtacctttttgaactgtttccttttattcttctaggggtatttggagggctttggggagcctttttcattagggcaaatattgcctggtgtcgtcgacgcaagtccacgaaatttggaaagtatcccgttctggaagtcattattgttgcagccattactgctgtgatagccttccctaatccatacactaggctaaacaccagtgaactgatcaaagagctttttacagactgtggtcccctggaatcctcttctctttgtgactacagaaatgacatgaatgccagtaaaattgtcgatgacattcctgatcgtccagcaggcattggagtatattcagctatatggcagttatgcctggcactcatatttaaaatcataatgacagtattcacttttggcatcaaggttccatcaggcttgttcatccccagcatggccattggagcgatcgcaggaaggattgtggggattgcggtggagcagcttgcctactatcaccacgactggtttatctttaaggagtggtgtgaggtcggggctgattgcattacacctggcctttatgccatggttggtgctgctgcatgcttaggtggtgtgacaagaatgactgtctccctggtggttattgtttttgagcttactggaggcttggaatatattgttccccttatggctgcagtcatgaccagtaaatgggttggagatgcctttggcagggaaggcatttatgaagcacacatccgattaaatggataccctttcttggatgcaaaagaagaattcactcataccaccctggctgctgacgttatgagacctcgaaggaatgatcctcccttagctgtcctgacacaggacaatatgacagtggatgatatagaaaacatgattaatgaaaccagctacaatggatttcctgtcataatgtcaaaagaatctcagagattagtgggatttgccctcagaagagacctgacaattgcaatagaaagtgccaggaaaaaacaagaaggtatcgttggcagttctcgggtgtgttttgcacagcacaccccatctcttccagcagaaagtcctcggccattgaagcttcgaagcattcttgacatgagcccttttacagtgacagaccacaccccaatggagatcgtggtggatattttccgaaagctgggactgaggcagtgccttgtaactcacaatgggcgcctccttggcattataacaaaaaaagatatcctccggcatatggcccagacggcaaaccaagaccccgcttcaataatgttcaactgaatctcacagatgaggagagagaagaaacggaagaggaagtttatttgttgaatagcacaactctttaacctgagggagtcatctacttttttttcctcctttacaaaaaaagaaaggaaatataaaagccgggtttttgcaacatggtttgcaaataatgctggtggaatggaggagttgtttggggagggaaaggagagagaaggaaaggagtgaggtatttcccgtctaacagaaagcagcgtatcaactcctattgttctgcactggatgcattcagctgaggatgtgcctgatagtgcaggcttgcgcctcaacagagatgacagcagagtcctcgagcacctggcctgttgctccaacatt

SEQ ID NO: 86222 - DNA, 2406 bp, Artificial Sequence
  derived and/or modified sequence
atggtgaccctgcagctgggcgagagccactacgtggtgcaggccggcctgcagctgctgggcagcagcaacccccccgccctggccagccaggtggccgagatcaccggcacccactacaccatgaccaacggcggcagcatcaacagcagcacccacctgctggacctgctggacgagcccatccccggcgtgggcacctacgacgacttccacaccatcgactgggtgagagagaagtgcaaggacagagagagacacagaagaatcaacagcaagaagaaggagagcgcctgggagatgaccaagagcctgtacgacgcctggagcggctggctggtggtgaccctgaccggcctggccagcggcgccctggccggcctgatcgacatcgccgccgactggatgaccgacctgaaggagggcatctgcctgagcgccctgtggtacaaccacgagcagtgctgctggggcagcaacgagaccaccttcgaggagagagacaagtgcccccagtggaagacctgggccgagctgatcatcggccaggccgagggccccggcagctacatcatgaactacatcatgtacatcttctgggccctgagcttcgccttcctggccgtgagcctggtgaaggtgttcgccccctacgcctgcggcagcggcatccccgagatcaagaccatcctgagcggcttcatcatcagaggctacctgggcaagtggaccctgatgatcaagaccatcaccctggtgctggccgtggccagcggcctgagcctgggcaaggagggccccctggtgcacgtggcctgctgctgcggcaacatcttcagctacctgttccccaagtacagcaccaacgaggccaagaagagagaggtgctgagcgccgccagcgccgccggcgtgagcgtggccttcggcgcccccatcggcggcgtgctgttcagcctggaggaggtgagctactacttccccctgaagaccctgtggagaagcttcttcgccgccctggtggccgccttcgtgctgagaagcatcaaccccttcggcaacagcagactggtgctgttctacgtggagtaccacaccccctggtacctgttcgagctgttccccttcatcctgctgggcgtgttcggcggcctgtggggcgccttcttcatcagagccaacatcgcctggtgcagaagaagaaagagcaccaagttcggcaagtaccccgtgctggaggtgatcatcgtggccgccatcaccgccgtgatcgccttccccaacccctacaccagactgaacaccagcgagctgatcaaggagctgttcaccgactgcggccccctggagagcagcagcctgtgcgactacagaaacgacatgaacgccagcaagatcgtggacgacatccccgacagacccgccggcatcggcgtgtacagcgccatctggcagctgtgcctggccctgatcttcaagatcatcatgaccgtgttcaccttcggcatcaaggtgcccagcggcctgttcatccccagcatggccatcggcgccatcgccggcagaatcgtgggcatcgccgtggagcagctggcctactaccaccacgactggttcatcttcaaggagtggtgcgaggtgggcgccgactgcatcacccccggcctgtacgccatggtgggcgccgccgcctgcctgggcggcgtgaccagaatgaccgtgagcctggtggtgatcgtgttcgagctgaccggcggcctggagtacatcgtgcccctgatggccgccgtgatgaccagcaagtgggtgggcgacgccttcggcagagagggcatctacgaggcccacatcagactgaacggctaccccttcctggacgccaaggaggagttcacccacaccaccctggccgccgacgtgatgagacccagaagaaacgacccccccctggccgtgctgacccaggacaacatgaccgtggacgacatcgagaacatgatcaacgagaccagctacaacggcttccccgtgatcatgagcaaggagagccagagactggtgggcttcgccctgagaagagacctgaccatcgccatcgagagcgccagaaagaagcaggagggcatcgtgggcagcagcagagtgtgcttcgcccagcacacccccagcctgcccgccgagagccccagacccctgaagctgagaagcatcctggacatgagccccttcaccgtgaccgaccacacccccatggagatcgtggtggacatcttcagaaagctgggcctgagacagtgcctggtgacccacaacggcagactgctgggcatcatcaccaagaaggacatcctgagacacatggcccagaccgccaaccaggaccccgccagcatcatgttcaactag

SEQ ID NO: 86223 - protein, 327 aa, Artificial Sequence
  derived and/or modified sequence
MSDLQEEGKNAINSPMSPALVDVHPEDTQLEENEERTMIDPTSKEDPKFKELVKVLLDWINDVLVEERIIVKQLEEDLYDGQVLQKLLEKLAGCKLNVAEVTQSEIGQKQKLQTVLEAVHDLLRPRGWALRWSVDSIHGKNLVAILHLLVSLAMHFRAPIRLPEHVTVQVVVVRKREGLLHSSHISEELTTTTEMMMGRFERDAFDTLFDHAPDKLSVVKKSLITFVNKHLNKLNLEVTELETQFADGVYLVLLMGLLEDYFVPLHHFYLTPESFDQKVHNVSFAFELMLDGGLKKPKARPEDVVNLDLKSTLRVLYNLFTKYKNVE

SEQ ID NO: 86224 - DNA, 984 bp, Artificial Sequence
  derived and/or modified sequence
atgtcggatcttcaggaggagggcaaaaacgctatcaactccccaatgtccccagccctggtggacgttcaccccgaggacacgcagttagaagagaacgaagagcggaccatgatagacccgacctctaaggaggacccaaagtttaaagaacttgtcaaagtgctgctagattggattaatgatgttttggttgaagagcgtattatcgtgaagcagctcgaagaagatctctatgacggccaagtgctgcaaaagctactggaaaagctggcaggctgcaaactgaatgtggctgaggtgacccagtcagagatcgggcagaagcaaaagctccagacagttctggaggcagtgcacgatcttctgcgccctcgcggctgggcactgcgttggtccgtggactctatccatggtaagaatctggttgcaattctccacctcctcgtgtctctggcaatgcattttcgggcccctatccgcctgccggagcatgtaaccgttcaggtggttgtggtgagaaaaagagagggcctgcttcattcgtctcacatctcggaagagttaacaactactactgaaatgatgatgggccgttttgaaagagacgcttttgacacactgtttgaccatgcccctgacaaactctctgtggtaaagaagtctctgatcacttttgtgaacaaacatcttaataagttgaatctggaggtgactgaattggaaacgcagtttgctgacggtgtgtatctcgtgctgctgatgggcctgctcgaggactacttcgtgccccttcatcacttttatctgactccagagagtttcgatcagaaggtgcataatgtgagttttgcgtttgaactaatgctggatggaggactcaagaaacccaaggctcgtcctgaggatgtagttaacctcgatctcaaatccacacttagagtcctttacaacctcttcacaaagtacaagaatgtagaatag

SEQ ID NO: 86225 - DNA, 984 bp, Artificial Sequence
  derived and/or modified sequence
atgtctgacctgcaggaggagggcaagaatgccatcaacagccccatgagccctgccctggtggatgtgcaccctgaggacacccagctggaggagaatgaggagaggaccatgattgaccccaccagcaaagaagaccccaagttcaaggagctggtgaaggtgctgctggactggatcaatgatgtgctggtggaggagcgcatcatcgtgaagcagctggaggaggacctgtatgatggccaggtgctgcagaagctgctggagaagctggccggctgcaagctgaatgtggccgaggtgacccagagcgagatcggccagaagcagaagctgcagacagtgctggaggccgtgcatgacctgctgcggccccggggctgggccctgcgctggagcgtggacagcatccacggcaagaacctggtggccatcctgcacctgctggtgtccctggccatgcacttccgggcccccatccggctgcctgagcacgtgacagtgcaggtggtggtggtgaggaagcgggagggcctgctgcacagcagccacatcagcgaggagctgaccaccaccacagagatgatgatgggccgctttgaaagagatgcctttgacaccctgtttgaccacgccccagacaagctgtctgtggtgaagaagagcctcatcacctttgtgaacaagcacctgaacaagctgaacctggaggtgacagagctggagacccagtttgctgatggagtgtacctggtgctgctgatgggcctgctggaggactactttgtgcccctgcaccacttctacctgaccccagagagctttgaccagaaggtgcacaacgtgtcctttgcctttgagctgatgctggatggcggcctgaagaagcccaaggcccggccagaagatgtggtgaacctggacctgaagagcaccctgcgggtgctgtacaacctcttcaccaagtacaagaatgtggagtag

SEQ ID NO: 86226 - DNA, 984 bp, Artificial Sequence
  derived and/or modified sequence
atgagcgacctgcaggaggagggcaagaacgccatcaacagccccatgtccccagctctggtcgatgtgcatcccgaagacactcagctggaggagaatgaggagcgtaccatgatcgaccctacttcaaaggaggaccctaagttcaaggagttggtgaaagttctgctggactggattaatgatgtgctagtggaagaacgaatcatagtgaagcaattggaagaagacttgtatgatggtcaggtgttacagaaactcctggagaagttggctgggtgtaaattgaacgttgctgaggtgacccagtctgaaatcggtcagaagcaaaaactgcagactgtgcttgaggctgtgcacgatctgctgcgcccccgcggctgggcgcttcggtggtccgtcgacagtatccacggaaagaacctggtcgcaatcctccaccttcttgtctcattggcaatgcactttcgtgcccctatccggcttcctgagcatgtgacagtgcaggtggtggtagtcagaaagcgtgaagggttgctccactcatcccatatatcggaagagctgactacaaccaccgaaatgatgatgggtcgcttcgaacgcgacgcgttcgataccctgtttgaccatgcgcctgacaagttgtcagtggtcaagaaaagcttaattacttttgtgaataaacatcttaataagctgaacctcgaagtcaccgagctggagacccagttcgcggatggagtttatctggttttactgatgggcctcctggaagattactttgtccctttgcaccatttctatctcactccagagagtttcgatcagaaggtgcacaacgtgtctttcgctttcgagcttatgctcgacgggggtctcaagaagccaaaagcccggcctgaggatgtagtaaacctcgacctcaagtcaaccctcagagtgctatacaacctatttacaaagtataagaacgtggaatag

SEQ ID NO: 86227 - DNA, 1591 bp, Artificial Sequence
  derived and/or modified sequence
ctgccacgtccctatatgaacggggtgtgtgcccgcctgccctccgacgtccgccggctgtgctggtctgcagagctgccgccagctgcaccctcctcgccatgagtgacctgcaggaagaaggcaagaatgccatcaactcaccgatgtcccccgccctggtggatgttcaccctgaagacacccagcttgaggagaacgaggagcgcacgatgattgaccccacttccaaggaagaccccaagttcaaggaactggtcaaggtcctcctcgactggattaatgacgtgctggtggaggagaggatcattgtgaagcagctggaggaagacctgtatgacggccaggtgctgcagaagctcttggaaaaactggcagggtgcaagctgaatgtggctgaggtgacacagtccgaaatagggcagaaacagaagctgcagacggtgctggaagcagtacatgacctgctgcggccccgaggctgggcgctccggtggagcgtggactcaattcacgggaagaacctggtggccatcctccacctgctggtctctctggccatgcacttcagggcccccatccgccttcctgagcatgtaacggtgcaggtggtggtcgtgcggaaacgggaaggcctgctgcattccagccacatctcggaggagctgaccacaactacagagatgatgatgggccggttcgagcgggatgccttcgacacgctgttcgaccacgccccggataagctcagcgtggtgaagaagtctctcatcacttttgtgaacaagcacctgaacaagctgaatttggaggtgacggaactggagacccagtttgcagatggcgtgtacctggttctgctcatgggccttctggaagactactttgttcctctccaccacttctacctgactccggaaagcttcgatcagaaggtccacaatgtgtccttcgcctttgagctgatgctggacggaggcctcaagaaacccaaggctcgtcctgaagacgtggttaacttggacctcaaatccaccctgagggttctttacaacctgttcaccaagtacaagaacgtggagtgacgggggagctgtggatggtggcaggagtgtcccagcaagaaaggcggcatccgtctgtgccctgtgcctttccagggagccaggcgccatgggcttctggtccaagctgtgttgactgtcatccccaccccacccctacctcacgcctgccccaccccctgcctcttttggttgttgttcttaatctcctctccatgtagttcccagtgggcaagagcctttgaaaatgcaggattctaaacactcgtgcttgcgtttgaagcctcgcgtcactcagtcgcgtgggatgatgagtccgttgttgtctgccttggccgaaagatgaaaaaaagcctgaaccccaacccccagctggttgagagcaccctgcattctgcctcatggtgcagttagcgatcacaggccttcagaagtacaacatcagctcagcaggaacgccggctccccgaggacccaggcttgacgattcaccggggatctcctgggctgggctctccttggaagtg

SEQ ID NO: 86228 - DNA, 984 bp, Artificial Sequence
  derived and/or modified sequence
atgtccgatctgcaggaggaaggaaaaaacgcgataaatagtccgatgagccccgctctggtcgatgtgcacccggaggatacccaactcgaagaaaacgaagagaggaccatgattgatcccacctccaaggaggatcctaaattcaaggagttagtgaaggtactgctggactggatcaacgacgtgcttgttgaagagcgtattatcgtgaagcagctggaagaagacctttacgatggccaggtccttcaaaaactcctggaaaaactcgctggttgcaagctcaatgtggctgaggtgacacaatctgagatcgggcagaagcaaaagctccaaacagtactcgaggcggtgcatgatctgctccgccctagagggtgggctctaaggtggtcggtggatagcatccatgggaaaaatcttgttgctatactgcacctacttgtgtctttagccatgcactttagggcgccaattcggctgccagaacatgtgaccgtccaagtggtggtggttcgcaagcgggaaggactgcttcattcatcccacatttcagaagagctgaccactacaactgaaatgatgatggggaggtttgaacgtgacgctttcgataccctctttgaccacgccccagacaagctttcagtggtaaagaagtccctgattacattcgtgaacaagcacctgaataagctgaatctggaggtcacggaattggaaacccaatttgccgatggggtgtacctcgtgctcctgatgggcttgctggaggattacttcgtgccgctccaccacttctacctgactcccgaatcatttgatcagaaggtgcataatgtgtctttcgcctttgagcttatgttagacggaggattgaaaaaacccaaggctcggccagaggatgtcgtcaatctagatttaaaaagtacgctgcgggttctctacaacctattcaccaagtacaaaaatgtggaatag

SEQ ID NO: 86229 - DNA, 984 bp, Artificial Sequence
  derived and/or modified sequence
atgagcgacctgcaggaggagggcaagaacgccatcaacagccccatgagccccgccctggtggacgtgcaccccgaggacacccagctggaggagaacgaggagagaaccatgatcgaccccaccagcaaggaggaccccaagttcaaggagctggtgaaggtgctgctggactggatcaacgacgtgctggtggaggagagaatcatcgtgaagcagctggaggaggacctgtacgacggccaggtgctgcagaagctgctggagaagctggccggctgcaagctgaacgtggccgaggtgacccagagcgagatcggccagaagcagaagctgcagaccgtgctggaggccgtgcacgacctgctgagacccagaggctgggccctgagatggagcgtggacagcatccacggcaagaacctggtggccatcctgcacctgctggtgagcctggccatgcacttcagagcccccatcagactgcccgagcacgtgaccgtgcaggtggtggtggtgagaaagagagagggcctgctgcacagcagccacatcagcgaggagctgaccaccaccaccgagatgatgatgggcagattcgagagagacgccttcgacaccctgttcgaccacgcccccgacaagctgagcgtggtgaagaagagcctgatcaccttcgtgaacaagcacctgaacaagctgaacctggaggtgaccgagctggagacccagttcgccgacggcgtgtacctggtgctgctgatgggcctgctggaggactacttcgtgcccctgcaccacttctacctgacccccgagagcttcgaccagaaggtgcacaacgtgagcttcgccttcgagctgatgctggacggcggcctgaagaagcccaaggccagacccgaggacgtggtgaacctggacctgaagagcaccctgagagtgctgtacaacctgttcaccaagtacaagaacgtggagtag

SEQ ID NO: 86230 - protein, 97 aa, Artificial Sequence
  derived and/or modified sequence
MDSRVSGTTSNGETKPVYPVMEKKEEDGTLERGHWNNKMEFVLSVAGEIIGLGNVWRFPYLCYKNGGGEMRALVPPHPLLEGGYFHLLHLRPLWGVP

SEQ ID NO: 86231 - DNA, 294 bp, Artificial Sequence
  derived and/or modified sequence
atggacagcagagtgagcggcaccaccagcaacggcgagaccaagcccgtgtaccccgtgatggagaagaaggaggaggacggcaccctggagagaggccactggaacaacaagatggagttcgtgctgagcgtggccggcgagatcatcggcctgggcaacgtgtggagattcccctacctgtgctacaagaacggcggcggcgagatgagagccctggtgcccccccaccccctgctggagggcggctacttccacctgctgcacctgagacccctgtggggcgtgccctag

SEQ ID NO: 86232 - DNA, 294 bp, Artificial Sequence
  derived and/or modified sequence
atggactccagggtctcgggtacgacaagtaatggtgagacaaaacccgtgtacccagtcatggaaaaaaaggaggaggacggtaccctggagaggggccactggaataataagatggagtttgtgctctccgtggcaggggagattataggccttggcaatgtgtggaggttcccctacctgtgctataagaatgggggaggtgaaatgcgcgctctcgtgcctccacaccccttgcttgagggcgggtatttccatctgttgcacctgagaccactgtggggggtgccgtag

SEQ ID NO: 86233 - DNA, 294 bp, Artificial Sequence
  derived and/or modified sequence
atggacagccgggtgtctggcaccaccagcaatggagagaccaagcctgtgtaccctgtgatggagaagaaggaggaggatggcaccctggagcggggccactggaacaacaagatggagtttgtgctgtctgtggccggggagatcatcggcctgggcaatgtgtggaggttcccctacctgtgctacaagaatggaggaggagagatgagggccctggtgcccccccaccccctgctggagggcggctacttccacctgctgcacctgcggcccctgtggggcgtgccctag

SEQ ID NO: 86234 - DNA, 294 bp, Artificial Sequence
  derived and/or modified sequence
atggacagccgggtgagcggcaccaccagcaacggcgagaccaagccggtctacccagtcatggagaagaaggaagaggatgggacattggagcggggtcattggaacaataagatggagttcgtcttgtcagtggcgggggaaataattggtcttgggaatgtctggaggttcccatacctgtgctacaagaacggtgggggagagatgagggccctcgtaccaccacatccactgttggagggtggatattttcacttactccacctgcgacctctctggggagtgccttag

SEQ ID NO: 86235 - DNA, 294 bp, Artificial Sequence
  derived and/or modified sequence
atggattcccgcgtcagcggaactacaagcaatggagaaaccaagcctgtctacccagtgatggaaaagaaagaagaggatggcactctggaacgtggccactggaataacaaaatggagtttgtcctgagtgtagcaggagaaataattggtttgggtaacgtgtggagattcccctacctttgctacaagaatggaggcggagaaatgcgcgctctggttccaccgcatccactgctcgaaggcggatattttcatctcctgcatttaagaccactgtggggggttccttag

SEQ ID NO: 86236 - DNA, 1101 bp, Artificial Sequence
  derived and/or modified sequence
agataattcttctcccctgactggacctctggcagcagcttcactaaggtgggatggatagcagggtctcaggcacaaccagtaatggagagacaaaaccagtgtatccagtcatggaaaagaaggaggaagatggcaccctggagcgggggcactggaacaacaagatggagtttgtgctgtcagtggctggggagatcattggcttaggcaacgtctggaggtttccctatctctgctacaaaaatgggggaggtgagatgagagcccttgtgccaccccacccactcctggaaggaggatacttccatctcctgcacttacggcccctctggggagtcccatagatgtatagaattctggaggtaggaggacgcttagaggtcattaaggacactctgtaagagactaagacctagaaaggttacgtgactatcccagggctctttctattataacgtggcatcgtagaaatatgagcacaagctggaaccaggtggatgagagtttggattctggctctgctacttaacactctgtgtgatcttggacaagttacttaagctctcagagcatcaattgccgctcctgcaaattgagataataatgcctgcctttcaaggtcattgtaaggattagagacaatgtgtgtaaagcacttaataaatagtagctctgctgatgatgacgttgataaccaaactgttctgtggtcttaagtaataaatagtagctctgctgatgatgacgttgataaccaaactgttctgtggtcttaagtaataagtagtagctctgttgatgatgacgttgataaccaaactgttctgtggtcttaagtaataagtagtagctctgctgatgatgacgttgataaccaaactgttctgtggtcttaagtaataaatagtagctctgctgatgatgatgttgataaccaaactgttctgtggtcttaagtaataaatagtagctctgctgatgatgacgttgataaccaaactgttctgtggtcttaagtaataaatagtagctctgctgatgatgacgttgataaccaaactgttctgtggtcttaagtaataaatagtagctctgctg

SEQ ID NO: 86237 - protein, 906 aa, Artificial Sequence
  derived and/or modified sequence
MFGRSRSWVGGGHGKTSRNIHSLDHLKYLYHVLTKNTTVTEQNRNLLVETIRSITEILIWGDQNDSSVFDFFLEKNMFVFFLNILRQKSGRYVCVQLLQTLNILFENISHETSLYYLLSNNYVNSIIVHKFDFSDEEIMAYYISFLKTLSLKLNNHTVHFFYNEHTNDFALYTEAIKFFNHPESMVRIAVRTITLNVYKVDNQAMLHYIRDKTAVPYFSNLVWFIGSHVIELDDCVQTDEEHRNRGKLSDLVAEHLDHLHYLNDILIINCEFLNDVLTDHLLNRLFLPLYVYSLENQDKGGERPKISLPVSLYLLSQVFLIIHHAPLVNSLAEVILNGDLSEMYAKTEQDIQRSSAKPSIRCFIKPTETLERSLEMNKHKGKRRVQKRPNYKNVGEEEDEEKGPTEDAQEDAEKAKEIEMVIMERSKLSELAASTSVQEQNTTDEEKSAAATCSESTQWSRPFLDMVYHALDSPDDDYHALFVLCLLYAMSHNKGMDPEKLERIQLPVPNAAEKTTYNHPLAERLIRIMNNAAQPDGKIRLATLELSCLLLKQQVLMSAGCIMKDVHLACLEGAREESVHLVRHFYKGEDIFLDMFEDEYRSMTMKPMNVEYLMMDASILLPPTGTPLTGIDFVKRLPCGDVEKTRRAIRVFFMLRSLSLQLRGEPETQLPLTREEDLIKTDDVLDLNNSDLIACTVITKDGGMVQRFLAVDIYQMSLVEPDVSRLGWGVVKFAGLLQDMQVTGVEDDSRALNITIHKPASSPHSKPFPILQATFIFSDHIRCIIAKQRLAKGRIQARRMKMQRIAALLDLPIQPTTEVLGFGLGSSTSTQHLPFRFYDQGRRGSSDPTVQRSVFASVDKVPGEPAPRPAPQLVHHGGRSRSFSLWSLCELPFLSQKPRRLAAPAS

SEQ ID NO: 86238 - DNA, 2721 bp, Artificial Sequence
  derived and/or modified sequence
atgtttggaagatctagatcttgggtcggcggcggacacgggaagacttctcggaatattcactcccttgaccacctaaagtacttgtatcacgtgctgacaaagaacacaactgtcaccgaacagaatcgcaatttgctcgtggaaacgatccgtagtatcactgaaatcctcatttggggggaccagaatgatagcagcgtgttcgattttttcttggagaaaaatatgttcgtgtttttcctgaatatcctcaggcagaaaagcgggcggtacgtatgcgtgcagctgctccaaacgttgaacatcttatttgagaatattagccatgaaacaagcctgtactaccttctgtctaacaactacgtcaactccattatagtgcacaagtttgacttctctgatgaagagataatggcctactatatttccttcctaaaaactcttagcctcaagttgaacaatcatactgttcacttcttctacaacgagcatacgaatgatttcgccctgtacactgaggcgatcaaattcttcaaccatcccgagagcatggtacgaatcgcggtgcggactattacactgaatgtgtacaaagtcgataaccaggctatgttgcattatattagagataaaacagcagtgccctatttcagcaacctggtatggtttatcggatcccatgtgattgaactagatgattgtgtccagacagacgaggagcaccgtaaccgcggtaagctcagcgatcttgtggcagaacaccttgaccatcttcattatctcaacgacatcttgatcattaattgtgagtttctcaatgacgttctgactgaccatctgctgaacaggctattcctccccctgtacgtgtactcactggaaaatcaagacaagggcggggaaaggccgaagatcagtctgccggtcagcctttacctgctgtctcaggtttttctcattatacaccacgctcctttagtgaactctttagctgaggtgatcctgaacggtgatttgtccgaaatgtacgctaagaccgagcaggatatccaacgatcatccgctaagccctctataagatgcttcatcaaacccacagaaacgttggagcggagcttggagatgaacaagcacaagggcaaacggcgtgtgcagaaacgtcctaactataagaacgtaggggaggaggaagacgaagaaaaaggtccaacagaggacgcgcaggaagacgctgagaaagcaaaggagatcgaaatggtgataatggaacggagtaagctgtctgaactagccgcctccacctcagtgcaggaacagaatactacagatgaagaaaagtcggcggctgcaacctgctccgagtccacccagtggagtcggcctttcctggacatggtgtatcacgcacttgactctccggacgatgactatcatgctctgtttgttttgtgcttactgtacgcaatgtctcataacaagggaatggatccagaaaagctggaaagaattcagctgcctgtgccgaatgctgctgagaagactacatacaatcacccactggccgagagactgatacgtattatgaacaacgctgctcagccagatggaaaaattcggttggccacgcttgagttgtcatgcctcctgttaaagcaacaggtcctcatgagcgctggctgtatcatgaaagatgtgcatctggcctgcttagagggcgctagggaggagagtgtgcatctggtgagacacttctataagggcgaggacatctttctggatatgtttgaggacgaatatagatctatgacaatgaagcccatgaatgtcgagtacctgatgatggacgccagtattctcttacctcccacaggaacaccactgacagggatcgactttgtgaaaaggctaccatgcggtgatgtggagaagacccgccgggccatccgagtctttttcatgctgcggtctctgagtctgcagctgcgcggtgagccagaaacacagctgccgctgacgcgcgaagaggatctgatcaagacagacgatgttcttgatcttaataattctgatctgatcgcgtgtactgttatcaccaaggacggggggatggtgcagagatttctcgctgtggacatataccagatgtctctagtggagcccgacgtatcgcgcctggggtggggagtggttaagttcgcagggctcctgcaagacatgcaagttacgggtgtagaggacgattcgcgcgcattgaatattactattcataagccggccagcagccctcatagcaaaccattcccaattctgcaggccacatttattttctcagaccatattcgctgtatcatcgcaaaacaaagacttgcaaagggacgcattcaagcccgcagaatgaagatgcagcgcatcgctgcgctgctggacctccctattcagcctactacggaagtcctgggcttcggtctagggtcctcaacctctacacagcatctcccatttaggttctacgaccaggggaggagaggctcgtccgacccgaccgtgcaacgaagcgtttttgcctccgtagacaaggtgcccggagaacctgcccccagacccgcaccacagctagttcaccatggtgggaggtcaaggagctttagcctgtggtcgctgtgcgagttacctttcctttcccaaaagccccgtcgcctcgccgcgcctgcctcttag

SEQ ID NO: 86239 - DNA, 2721 bp, Artificial Sequence
  derived and/or modified sequence
atgtttggccgcagccgctcctgggtgggcggcggccacggcaagaccagcaggaacatccacagcctggaccacctgaagtacctgtaccacgtgctgaccaagaacaccaccgtgacagagcagaacagaaacctgctggtggagaccatccgcagcatcacagagatcctgatctggggagaccagaatgacagctctgtgtttgacttcttcctggagaagaacatgtttgtgttcttcctgaacatcctgcggcagaagagcggccgctacgtgtgtgtgcagctgctgcagaccctgaacatcctgtttgagaacatcagccatgagaccagcctgtactacctgctgagcaacaactacgtgaacagcatcatcgtgcacaagtttgacttcagtgatgaggagatcatggcctactacatctccttcctgaagaccctgagcctgaagctgaacaaccacacagtgcacttcttctacaatgagcacaccaatgactttgccctgtacacagaggccatcaagttcttcaaccaccctgagagcatggtgagaattgctgtgaggaccatcaccctgaatgtgtacaaggtggacaaccaggccatgctgcactacatccgggacaagacagctgtgccctacttcagcaacctggtgtggttcatcggcagccacgtgattgagctggatgactgtgtgcagacagatgaggagcacaggaacagaggcaagctgagtgacctggtggccgagcacctggaccacctgcactacctgaatgacatcctgatcatcaactgtgagttcctgaatgatgtgctgacagaccacctgctgaacagactcttcctgcccctgtatgtgtacagcctggagaaccaggacaagggcggggagcggcccaagatcagcctgcctgtgtccctgtacctgctgagccaggtgttcctgatcatccaccacgcccccctggtgaacagcctggccgaggtgatcctgaatggagacctgtctgagatgtatgccaagacagagcaggacatccagaggagcagcgccaagcccagcatccgctgcttcatcaagcccacagagaccctggagaggagcctggagatgaacaagcacaagggcaagagaagagtgcagaagaggcccaactacaagaatgtgggggaggaggaggatgaggagaagggccccacagaagatgcccaggaggatgctgagaaggccaaggagattgagatggtgatcatggagaggagcaagctgtctgagctggccgccagcacctctgtgcaggagcagaacaccacagatgaggagaagtctgctgctgccacctgcagcgagagcacccagtggagccggcccttcctggacatggtgtaccacgccctggacagcccagatgatgactaccacgccctgtttgtgctgtgcctgctgtatgccatgagccacaacaagggcatggaccctgagaagctggagcgcatccagctgcctgtgcccaatgctgctgagaagaccacctacaaccaccccctggccgagcggctcatccgcatcatgaacaatgctgcccagccagatggcaagatccggctggccaccctggagctgagctgcctgctgctgaagcagcaggtgctgatgtctgctggctgcatcatgaaggatgtgcacctggcctgcctggagggcgcccgggaggagagcgtgcacctggtgcgccacttctacaagggggaggacatcttcctggacatgtttgaagatgagtaccgctccatgaccatgaagcccatgaatgtggagtacctgatgatggatgccagcatcctgctgccccccaccggcacccccctgactggaattgactttgtgaagaggctgccctgtggagatgtggagaagacccggcgggccatccgggtcttcttcatgctgcggagcctgagcctgcagctgcggggggagcctgagacccagctgcccctgacccgggaggaggacctgatcaagacagatgatgtgctggacctgaacaacagcgacctgattgcctgcaccgtcatcaccaaggatggcggcatggtgcagcgcttcctggccgtggacatctaccagatgagcctggtggagccagatgtgtcccggctgggctggggcgtggtgaagtttgctggcctgctgcaggacatgcaggtgactggagtggaggatgacagccgggccctgaacatcaccatccacaagccagccagcagcccccacagcaagcccttccccatcctgcaggccaccttcatcttcagtgaccacatccgctgcatcatcgccaagcagaggctggccaagggccgcatccaggcccggaggatgaagatgcagagaattgctgccctgctggacctgcccatccagcccaccacagaggtgctgggcttcggcctgggcagcagcaccagcacccagcacctgcccttccgcttctatgaccagggccggcggggcagcagtgaccccaccgtgcagaggtctgtgtttgcctctgtggacaaggtgcctggagagcccgcccccaggcctgccccccagctggtgcaccacggcggccgcagccgctccttcagcctgtggagcctgtgtgagctgcccttcctgagccagaagccccggcggctggccgccccagccagctag

SEQ ID NO: 86240 - DNA, 2721 bp, Artificial Sequence
  derived and/or modified sequence
atgttcggccggagccggagctgggtgggcggcggccacggcaagacaagtcgaaatatccacagcctcgaccacttgaagtacctataccacgtactcacaaaaaatacgactgttacggagcagaatcgcaacctgctcgtcgaaactatccgtagtattacagagatcctgatatggggtgaccaaaatgactcttcagtgtttgacttctttctcgagaagaacatgtttgttttcttcttgaacatcctgcgtcagaaatcaggcaggtatgtatgcgtgcagctgttgcagaccctgaacatcctgtttgagaacatctcccacgagaccagcctttactatctgctatccaacaattacgtgaattcaataatcgtccacaagtttgacttctcagatgaggagatcatggcctactatattagctttctgaagaccttgagtctcaagctgaataatcacaccgtgcatttcttttataacgagcacacaaatgacttcgccctctacacagaggcaattaaatttttcaatcatccagagagcatggtgcgcattgccgttagaacaataacactcaacgtatataaagtggacaatcaggccatgctccactacattagggataaaactgccgtgccttacttcagcaatttggtgtggtttatcggcagccacgttatcgaactggacgactgcgtccagaccgatgaagagcaccggaaccgaggtaagctgtccgatcttgttgccgagcatctagatcacctgcactatctcaacgacattctgatcatcaactgtgagttccttaacgacgtgctaacagaccacctactgaacaggctctttctaccactctacgtatactctttggagaaccaggataagggtggtgagagacctaaaatttctctccctgtttcactatacctgctgtctcaggtctttctcataattcaccatgcacctttggtcaacagcttagcggaggtgatattgaacggcgacctatccgagatgtatgctaagactgagcaagatatccagcggagttctgcaaaaccttccatcagatgtttcatcaagccgactgagaccttggagaggagcctggagatgaataagcataaggggaagcggcgcgtgcagaaaagaccaaactacaagaatgtgggcgaggaagaggacgaagagaaggggccgaccgaggatgcccaggaagatgccgaaaaggctaaagaaattgagatggtgatcatggaaagatctaaactgtctgagctggctgcctctacctccgtacaggaacagaataccaccgatgaggaaaaaagcgctgccgcgacctgcagtgagagcacccaatggtcacgacctttcctcgatatggtctaccacgcactagacagccccgacgacgattaccacgctctgtttgttctatgcctgctgtacgctatgtcacacaacaagggcatggaccctgagaagctggagcgaatccagctccctgttccgaacgccgcagagaagacaacgtacaatcacccactagcagagagacttattaggatcatgaacaacgctgcccagccagacggaaagatacgtctggctacacttgagctgagctgtctcctgctcaagcagcaggtgctgatgagcgccggctgcataatgaaagacgtgcacctcgcttgtctggagggggccagggaagagagcgttcacctcgtcaggcacttttacaaaggggaagacatctttctggatatgttcgaggatgaatataggagcatgaccatgaagccgatgaatgtggaatatttaatgatggacgcctccattctgctcccgcctacaggcacacccctgactggaatagactttgtcaagcgacttccatgcggggatgtcgagaaaactcggagggctatccgcgtattttttatgctacggagtctgagcctccagttaaggggagagcccgagactcagctgcctttgactagagaggaggatcttatcaagacagacgacgtgctcgacctgaataatagtgacctgatcgcctgtacagtgatcaccaaagacgggggaatggtgcagcgtttcctggccgttgatatttaccagatgtccctggtcgagcctgatgtgtcccgactcggctggggagtcgtgaagtttgcaggtttattacaggatatgcaggtgactggagtggaggacgattccagagccctgaacatcacaattcacaagcctgcctcatcaccacattctaagcccttcccaatccttcaggcaactttcatattctccgatcacatccgctgtatcattgccaaacagcgcctggccaaagggaggatacaggcacggcgaatgaaaatgcagcggattgccgccctcctcgacctgcccattcagccaaccactgaagttctcggttttgggctgggcagcagtacctcaactcagcatctcccttttcgcttctacgaccagggcagacgcggatcctctgatccgactgtgcagcggagtgtgtttgccagtgtggataaagttcctggtgagcctgctccaaggcccgcccctcagctggtccaccatgggggacgttcacggagtttctccctgtggtcattgtgtgagctgcccttcctatcccagaaaccacgcaggctagccgcacctgcttcttag

SEQ ID NO: 86241 - DNA, 2721 bp, Artificial Sequence
  derived and/or modified sequence
atgtttgggagatcccgctcctgggtgggcggaggccacgggaagaccagccgaaacatccacagcctggatcacctaaagtatctatatcatgtgctgactaaaaacaccaccgtcactgagcagaacagaaatctcctggttgaaacgatccgttcaatcaccgagatcctgatctggggtgatcagaacgattcttcggtgttcgacttctttctggagaaaaacatgttcgtcttctttctgaacatcctgcgccaaaaatccgggagatacgtgtgcgtgcagttactccaaaccctgaacatcctctttgaaaacatcagccatgagacttcactctattacctactgtcaaacaattacgtcaactccatcatcgtgcataaatttgatttcagtgacgaggagataatggcttactacatttcttttctgaaaaccctcagtttaaaactgaacaatcataccgtgcattttttctacaatgagcatacgaatgattttgcactttacactgaggccatcaagttttttaatcatcccgaatctatggtccgcatcgccgtgcgcactatcactctaaacgtgtataaggtggacaatcaagctatgcttcattacatccgtgataagactgccgttccttactttagcaaccttgtgtggttcattggtagccatgtcatcgagctcgatgattgcgtgcagacagatgaagagcacagaaatcgcggaaaactgagtgatctggtcgccgagcaccttgaccacctacactatctcaacgacatcctgataattaactgcgaatttctaaacgacgtactcactgatcatctcctgaatcgtctgtttttgcctctgtacgtatactctctggagaatcaggacaagggaggggagcggcctaaaatctcattaccggtgtccctatacctcctcagtcaagtcttcctcatcatacaccacgccccactggtgaactccttagccgaggtcatcctcaatggagacttgagtgagatgtatgccaagacggagcaagatattcaaagatcaagcgctaaaccgtccatccggtgttttatcaaacctactgagaccctcgagcggtccctcgaaatgaacaagcataagggcaagcgcagagttcagaagcgccctaattataaaaacgtgggggaggaggaggacgaggaaaagggcccaacagaggatgctcaggaggacgccgagaaagcaaaagaaatcgaaatggtgattatggagagaagtaaactttccgagcttgctgccagcactagcgttcaggaacagaacaccaccgatgaggagaagtcggctgccgcaacttgcagtgaaagcacccagtggtctagaccatttttggatatggtttatcatgcccttgacagtcctgatgatgactatcacgccttgttcgtgttatgtctgttatacgccatgtctcacaataagggcatggaccccgaaaaactggagcgtattcaactgcctgttccgaacgcagcggagaagacaacatacaatcacccccttgcggagaggcttatccgtatcatgaataatgccgcacagccagatggcaaaatccgactcgcgacccttgaattgtcctgtctgttgctgaaacagcaggtcctcatgtccgcagggtgtatcatgaaagacgtccatctggcttgcctcgaaggagccagagaggaatcagttcaccttgtccggcatttttataagggtgaagacatctttctcgacatgttcgaagatgagtaccggtcaatgactatgaagccaatgaatgtggagtacctcatgatggatgcaagcatcttgttaccacctacgggcaccccgcttaccggcattgactttgtgaaacgcctcccttgtggagatgtggaaaaaacaaggcgcgctataagagtcttctttatgcttaggtcactgagtctccagctgcggggagaacccgaaacacagctgcccctgaccagagaggaggatctgattaagaccgacgacgttttggacctgaataactctgatcttatcgcttgtaccgttattaccaaagatggaggtatggtccagcggtttctggcagtggacatataccagatgagcctagtggaacctgatgtgagtcggcttggctggggcgtagtgaaattcgcaggattgctgcaggatatgcaggtcaccggcgtggaagatgactcgcgcgcactcaatattaccattcacaagcctgctagttcccctcacagtaagccattccctattctgcaagccacatttatctttagcgaccacattcgctgcataatcgctaagcagcggttggccaagggcagaatacaggcacgacgcatgaaaatgcagcggatcgctgctctgctggacctcccaatccaaccgacgactgaagtccttggctttggacttgggagctctacttccactcagcatctgccattcaggttttatgaccaggggaggcggggatcttctgacccaactgtccagagaagtgtgttcgcgtctgtcgataaagtaccaggggaaccagctccgagacctgctccccagctcgttcatcacggcggtcggtctaggagcttctccctttggagcctctgcgagctgccattcctgtcccaaaagcccagaagattggcagcaccggcttcatag

SEQ ID NO: 86242 - DNA, 2922 bp, Artificial Sequence
  derived and/or modified sequence
cggggaggaaggcggctcgcggttcctccaccgcctccgccgccgcatcctccgcttgtgctaccgccgcgggcgctgggccgctctgctggtccggcatgagaccgtgagacgagagacgggtcggggccgccgacatgtttggccgctcgcggagctgggtgggcgggggccatggcaagacttcccgcaacatccactccttggaccacctcaagtatctgtaccacgttttgaccaaaaacaccacagtcacagaacagaaccggaacctgctagtggagaccatccgttccatcactgagatcctgatctggggagatcaaaatgacagctctgtatttgacttcttcctggagaagaatatgtttgttttcttcttgaacatcttgcggcaaaagtcgggccgttacgtgtgcgttcagctgctgcagaccttgaacatcctctttgagaacatcagtcacgagacctcactttattatttgctctcaaataactacgtaaattctatcatcgttcataaatttgacttttctgatgaggagattatggcctattatatatcgttcctgaaaacactttcgttaaaactcaacaaccacactgtccatttcttttataatgagcacaccaatgactttgccctgtacacagaagccatcaagtttttcaaccaccctgaaagcatggttagaattgctgtaagaaccataactttgaatgtctataaagtggataaccaggccatgctgcactacatccgagataaaactgctgttccttacttctccaatttggtctggttcattgggagccatgtgatcgaactcgatgactgcgtgcagactgatgaggagcatcggaatcggggtaaactgagtgatctggtggcagagcacctagaccacctgcactatctcaatgacatcctgatcatcaactgtgagttcctcaacgatgtgctcactgaccacctgctcaacaggctcttcctgcccctctacgtgtactcactggagaaccaggacaagggaggagaacggccgaaaattagcctgccggtgtctctttatcttctgtcacaggtcttcttaattatacatcatgcaccgctggtgaactcgttagctgaagtcattctgaatggtgatctgtctgagatgtacgctaagactgaacaggatattcagagaagttctgccaagcccagcattcggtgcttcattaaacccaccgagacactcgagcggtcccttgagatgaacaagcacaagggcaagaggcgggtgcaaaagagacccaactacaaaaacgttggggaagaagaagatgaggagaaagggcccaccgaggatgcccaagaagacgccgagaaggctaaagagatcgagatggtgatcatggagcgtagcaagctctcagagctggccgccagcacctccgtgcaggagcagaacaccacggacgaggagaaaagcgccgccgccacctgctctgagagcacgcaatggagcagacccttcctggatatggtgtaccacgcgctggacagcccggatgatgattaccatgccctgttcgtgctctgcctcctctatgccatgtctcataataaaggcatggatcctgaaaaattagagcgaatccagctccccgtgccaaatgcggccgagaagaccacctacaaccacccgctagctgaaagactcatcaggatcatgaacaacgctgcccagccagatgggaagatccggctggcgacgctggagctgagctgcctgcttctgaagcagcaagtcctgatgagtgctggctgcatcatgaaggacgtgcacctggcctgcctggagggtgcgagagaagaaagtgttcaccttgtacgacatttttataagggagaagacatttttttggacatgtttgaagatgagtataggagcatgacaatgaagcccatgaacgtggaatatctcatgatggacgcctccatcctgctgcccccaacaggcacgccactgacgggcattgacttcgtgaagcggctgccgtgtggcgatgtggagaagacccggcgggccatccgggtgttcttcatgctgcgttccctgtcactgcaattgcgaggggagcctgagacacagttgccgctgactcgggaggaggacctgatcaagactgatgatgtcctggatctgaataacagcgacttgattgcatgtacagtgatcaccaaggatggcggcatggtccagcgattcctggctgtggatatttaccagatgagtttggtggagcctgatgtgtccaggcttggctggggagtggtcaagtttgcaggcctattgcaggacatgcaggtgactggcgtggaggacgacagccgtgccctgaacatcaccatccacaagcctgcgtccagcccccattccaagcccttccccatcctccaggccaccttcatcttctcagaccacatccgctgcatcatcgccaagcagcgcctggccaaaggccgcatccaggcaaggcgcatgaagatgcagagaatagctgccctcctggacctcccaatccagcccaccactgaagtcctggggtttggactcggctcctccacctccactcagcacctgcctttccgcttctacgaccaggggcgccggggcagcagcgaccccacagtgcagcgctccgtgtttgcatcggtggacaaggtgccaggtgagccagccccccgccctgcgccacagctcgttcatcatggtgggcgttcaaggtctttctctctgtggagcctgtgtgagctgcccttcctctctcagaagccccgtcggctggcagcaccagcttcttagaatttgtcaaagcacagcgcaagattaaacacagcccccaaaataaattttggctttcccttta

SEQ ID NO: 86243 - DNA, 2721 bp, Artificial Sequence
  derived and/or modified sequence
atgttcggcagaagcagaagctgggtgggcggcggccacggcaagaccagcagaaacatccacagcctggaccacctgaagtacctgtaccacgtgctgaccaagaacaccaccgtgaccgagcagaacagaaacctgctggtggagaccatcagaagcatcaccgagatcctgatctggggcgaccagaacgacagcagcgtgttcgacttcttcctggagaagaacatgttcgtgttcttcctgaacatcctgagacagaagagcggcagatacgtgtgcgtgcagctgctgcagaccctgaacatcctgttcgagaacatcagccacgagaccagcctgtactacctgctgagcaacaactacgtgaacagcatcatcgtgcacaagttcgacttcagcgacgaggagatcatggcctactacatcagcttcctgaagaccctgagcctgaagctgaacaaccacaccgtgcacttcttctacaacgagcacaccaacgacttcgccctgtacaccgaggccatcaagttcttcaaccaccccgagagcatggtgagaatcgccgtgagaaccatcaccctgaacgtgtacaaggtggacaaccaggccatgctgcactacatcagagacaagaccgccgtgccctacttcagcaacctggtgtggttcatcggcagccacgtgatcgagctggacgactgcgtgcagaccgacgaggagcacagaaacagaggcaagctgagcgacctggtggccgagcacctggaccacctgcactacctgaacgacatcctgatcatcaactgcgagttcctgaacgacgtgctgaccgaccacctgctgaacagactgttcctgcccctgtacgtgtacagcctggagaaccaggacaagggcggcgagagacccaagatcagcctgcccgtgagcctgtacctgctgagccaggtgttcctgatcatccaccacgcccccctggtgaacagcctggccgaggtgatcctgaacggcgacctgagcgagatgtacgccaagaccgagcaggacatccagagaagcagcgccaagcccagcatcagatgcttcatcaagcccaccgagaccctggagagaagcctggagatgaacaagcacaagggcaagagaagagtgcagaagagacccaactacaagaacgtgggcgaggaggaggacgaggagaagggccccaccgaggacgcccaggaggacgccgagaaggccaaggagatcgagatggtgatcatggagagaagcaagctgagcgagctggccgccagcaccagcgtgcaggagcagaacaccaccgacgaggagaagagcgccgccgccacctgcagcgagagcacccagtggagcagacccttcctggacatggtgtaccacgccctggacagccccgacgacgactaccacgccctgttcgtgctgtgcctgctgtacgccatgagccacaacaagggcatggaccccgagaagctggagagaatccagctgcccgtgcccaacgccgccgagaagaccacctacaaccaccccctggccgagagactgatcagaatcatgaacaacgccgcccagcccgacggcaagatcagactggccaccctggagctgagctgcctgctgctgaagcagcaggtgctgatgagcgccggctgcatcatgaaggacgtgcacctggcctgcctggagggcgccagagaggagagcgtgcacctggtgagacacttctacaagggcgaggacatcttcctggacatgttcgaggacgagtacagaagcatgaccatgaagcccatgaacgtggagtacctgatgatggacgccagcatcctgctgccccccaccggcacccccctgaccggcatcgacttcgtgaagagactgccctgcggcgacgtggagaagaccagaagagccatcagagtgttcttcatgctgagaagcctgagcctgcagctgagaggcgagcccgagacccagctgcccctgaccagagaggaggacctgatcaagaccgacgacgtgctggacctgaacaacagcgacctgatcgcctgcaccgtgatcaccaaggacggcggcatggtgcagagattcctggccgtggacatctaccagatgagcctggtggagcccgacgtgagcagactgggctggggcgtggtgaagttcgccggcctgctgcaggacatgcaggtgaccggcgtggaggacgacagcagagccctgaacatcaccatccacaagcccgccagcagcccccacagcaagcccttccccatcctgcaggccaccttcatcttcagcgaccacatcagatgcatcatcgccaagcagagactggccaagggcagaatccaggccagaagaatgaagatgcagagaatcgccgccctgctggacctgcccatccagcccaccaccgaggtgctgggcttcggcctgggcagcagcaccagcacccagcacctgcccttcagattctacgaccagggcagaagaggcagcagcgaccccaccgtgcagagaagcgtgttcgccagcgtggacaaggtgcccggcgagcccgcccccagacccgccccccagctggtgcaccacggcggcagaagcagaagcttcagcctgtggagcctgtgcgagctgcccttcctgagccagaagcccagaagactggccgcccccgccagctag

SEQ ID NO: 86244 - protein, 70 aa, Artificial Sequence
  derived and/or modified sequence
MSDTKVKVAVRVRPMNRRELELNTKCVVEMEGNQTVLHPPPSNTKQGERLVTVAHISNSSTLGGQGKRIT

SEQ ID NO: 86245 - DNA, 213 bp, Artificial Sequence
  derived and/or modified sequence
atgtcagataccaaagtgaaagtggcggtccgggtgaggcctatgaatcgacgagaattagaactcaacaccaaatgtgtggtggaaatggaagggaatcagaccgtccttcacccccctccaagtaatactaagcagggggaacgccttgtgaccgtggcacacatttcaaattccagcaccctggggggccaaggcaagagaataacatag

SEQ ID NO: 86246 - DNA, 1327 bp, Artificial Sequence
  derived and/or modified sequence
cgggatggcccgcgcgcctcggcgctgcctctcggagctcacggcggagcggcggcggccgcgctcgaggggcgcgcggctgcagcggcggcggcgccgcgcgtgaggggccgcctaaggccgagcgggcgcggcgagcggccgggcgagcgcagccaacatgtcggataccaaggtaaaagttgccgtccgggtccggcccatgaaccgacgagaactggaactgaacaccaagtgcgtggtggagatggaagggaatcaaacggtcctgcaccctcctccttctaacaccaaacagggagaaaggctggtcacagtggctcacatctctaattccagcactttgggaggccaaggcaagaggatcacttgagccgaggatttcaagaccagcctttgcaacatggcaaaaccccatctctacaaaaaatttgtttaaaattagctggacgtggtggcgcatacctgtggtcccagctactcaggagactgaggcaggaggctccagtgagctgtttgagccactgcacgccagcctgggtgacagagccagaccctgtcttcaaaaaaataaaaaattaaagtggcgtgaggtgaattgcatcagaccccacatatgaataaatggatggttggcaaagtgttatatataataagtacaattccttaggtgtccttaggtgtactactaaagtgggtttgtgatagcccatatatttagtcatttatgttcaatagtgttatattcatttgagaaattattttaagaaatttaaaattaagaaagttttaaaagtcctttagtaattagagatttctctgggtgggtggatacggttgtttctaattatcccacacatttaatcatttatgttcaatagtgttgtattttttgagaaattattttaagaaatgcaaaattaagaaagatttaaaagtcctttagtaattagagatttttctagttgggtggataagggttatttctaagtatcttttgagtattttttgtcatatatttcgttttttaggcatgattaaaagtgtatttgaggactcttagacacataaagttgaattcctcagattgagagatagttattgctttttaattttgttaagatgctcagctgttggataaataatgcttttgttaaaatcctgtggggcattcatccaacaaatggggtataagaaaggaatgtgtgtttgtgtacatgttcttctatctgttggtcctaaagagtgtaagaaggtaaatttgaccagtgaaattcataattacagagttttatttggtaatccattaataaatcattttctgaaa

SEQ ID NO: 86247 - DNA, 213 bp, Artificial Sequence
  derived and/or modified sequence
atgtctgacaccaaggtgaaggtggccgtgcgggtgcggcccatgaacagaagagagctggagctgaacaccaagtgtgtggtggagatggagggcaaccagacagtgctgcaccccccacccagcaacaccaagcagggcgagcggctggtgacagtggcccacatcagcaacagcagcaccctgggcggccagggcaagaggatcacctag

SEQ ID NO: 86248 - DNA, 213 bp, Artificial Sequence
  derived and/or modified sequence
atgagcgacaccaaggtgaaggtggccgtgcgggtgcggcccatgaatcgcagagagcttgagctgaacacaaaatgtgttgtggaaatggagggcaatcaaacagtgcttcacccgcccccatcaaacaccaagcagggtgaaagattagtgacagtggcacacatctcgaactcctccaccctcggcgggcaaggtaagagaatcacttag

SEQ ID NO: 86249 - DNA, 213 bp, Artificial Sequence
  derived and/or modified sequence
atgtccgatacaaaggtaaaggtagctgttagagtgagacctatgaacagaagggagcttgagctgaatacgaagtgcgtggtggagatggaaggcaaccaaaccgtgctccaccctccacccagtaacaccaagcagggggagagacttgtcaccgtcgcccatatatctaattcaagcaccctcggcggtcagggcaaacggatcacctag

SEQ ID NO: 86250 - DNA, 213 bp, Artificial Sequence
  derived and/or modified sequence
atgagcgacaccaaggtgaaggtggccgtgagagtgagacccatgaacagaagagagctggagctgaacaccaagtgcgtggtggagatggagggcaaccagaccgtgctgcaccccccccccagcaacaccaagcagggcgagagactggtgaccgtggcccacatcagcaacagcagcaccctgggcggccagggcaagagaatcacctag

SEQ ID NO: 86251 - DNA, 1092 bp, Artificial Sequence
  derived and/or modified sequence
atggtgggcagccccgacaccgtgggcatgaactacggcagctacatggaggagaagcacatgcccccccccaacatgaccaccaacgagagaagagtgatcgtgcccgccgaccccaccctgtggagcaccgaccacgtgagacagtggctggagtgggccgtgaaggagtacggcctgcccgacgtgaacatcctgctgttccagaacatcgacggcaaggagctgtgcaagatgaccaaggacgacttccagagactgacccccagctacaacgccgacatcctgctgagccacctgcactacctgagagagacccccctgccccacctgaccagcgacgacgtggacaaggccctgcagaacagccccagactgatgcacgccagaaacaccgacctgccctacgagccccccagaagaagcgcctggaccggccacggccaccccaccccccagagcaaggccgcccagcccagccccagcaccgtgcccaagaccgaggaccagagaccccagctggacccctaccagatcctgggccccaccagcagcagactggccaaccccggcagcggccagatccagctgtggcagttcctgctggagctgctgagcgacagcagcaacagcagctgcatcacctgggagggcaccaacggcgagttcaagatgaccgaccccgacgaggtggccagaagatggggcgagagaaagagcaagcccaacatgaactacgacaagctgagcagagccctgagatactactacgacaagaacatcatgaccaaggtgcacggcaagagatacgcctacaagttcgacttccacggcatcgcccaggccctgcagccccacccccccgagagcagcctgtacaagtaccccagcgacctgccctacatgggcagctaccacgcccacccccagaagatgaacttcgtggccccccacccccccgccctgcccgtgaccagcagcagcttcttcgccgcccccaacccctactggaacagccccaccggcggcatctaccccaacaccagactgcccaccagccacatgcccagccacctgggcacctactactag

SEQ ID NO: 86252 - DNA, 1092 bp, Artificial Sequence
  derived and/or modified sequence
atggtgggttccccagataccgtgggcatgaattatggctcttatatggaagaaaaacacatgccgcctcccaatatgactacgaacgaacggagggtgatcgtgcctgctgatcccacgctgtggtcaactgaccacgtacgacagtggctcgagtgggcagtgaaggagtacggcctgcctgatgtaaatatcctactttttcagaatatagacggaaaagagctctgtaaaatgactaaggatgatttccagaggctcacccctagttacaacgctgacattttactgtcccacctgcattatttaagagaaacgccacttccacatttgacgagtgacgacgtggacaaagccctgcaaaactcacctcggctcatgcatgcccggaatactgacctcccctacgaacctcccaggagatcagcctggaccggccacggacaccctacgccccaatcaaaagctgcccaacccagccctagtactgtacctaagaccgaggatcaaagacctcagctcgatccgtaccagatcctcggcccaacttccagcaggctggcaaaccctgggagcggtcaaatccaactgtggcaattcctgttagaactgctgagtgattcttctaactcctcttgcatcacgtgggagggcaccaatggggaattcaagatgactgaccctgacgaggtagcgagacgctggggcgagcggaagagcaaaccaaacatgaactatgacaagctttctagggcccttcgatactactacgacaaaaacatcatgaccaaagttcacggaaaacggtacgcatacaagttcgacttccacggcattgcccaggcactacagccgcacccgcccgagtcttccttgtacaagtacccttccgatttgccttacatggggtcttaccatgcccacccccaaaagatgaactttgttgccccccacccaccagctcttccagttacttcctcatcattttttgccgcccctaatccctactggaattcccccactggaggcatttatccgaatacacgcctgcctacatctcacatgccctcgcatcttggtacctactattag

SEQ ID NO: 86253 - DNA, 1092 bp, Artificial Sequence
  derived and/or modified sequence
atggtgggcagcccagacacagtgggcatgaactacggcagctacatggaggagaagcacatgcccccacccaacatgaccaccaatgaaagaagagtcatcgtgcctgctgaccccaccctgtggagcacagaccacgtgcggcagtggctggagtgggccgtgaaggagtatggcctgcctgatgtgaacatcctgctcttccagaacattgatggcaaggagctgtgcaagatgaccaaggatgacttccagaggctgacccccagctacaatgctgacatcctgctgagccacctgcactacctgcgggagacccccctgccccacctgaccagtgatgatgtggacaaggccctgcagaacagcccccggctgatgcacgccaggaacacagacctgccctatgagcccccccggcgcagcgcctggacaggccacggccaccccaccccccagagcaaggccgcccagcccagccccagcacagtgcccaagacagaggaccagaggccccagctggacccctaccagatcctgggccccaccagcagccggctggccaaccctggcagcggccagatccagctgtggcagttcctgctggagctgctgagtgacagcagcaacagcagctgcatcacctgggagggcaccaacggggagttcaagatgacagatcctgatgaggtggcccggcgctggggcgagaggaagagcaagcccaacatgaactatgacaagctgagccgggccctgcgctactactatgacaagaacatcatgaccaaggtgcacggcaagagatatgcctacaagtttgacttccatggaattgcccaggccctgcagccccaccccccagagagcagcctgtacaagtaccccagcgacctgccctacatgggcagctaccacgcccacccccagaagatgaactttgtggccccccaccccccagccctgcctgtgaccagcagcagcttctttgctgcccccaacccctactggaacagccccactggaggcatctaccccaacacccggctgcccaccagccacatgcccagccacctgggcacctactactag

SEQ ID NO: 86254 - DNA, 1092 bp, Artificial Sequence
  derived and/or modified sequence
atggtgggcagccccgacaccgtgggcatgaactacggcagctacatggaagagaaacacatgccgccaccaaacatgactacaaatgagcggcgcgtcatcgtacctgccgatcccacgctctggagtaccgatcacgtgcgacaatggctggagtgggctgtgaaagagtatggattacccgacgtaaatattctgctgtttcagaacatcgatggtaaggagctgtgcaaaatgactaaggacgacttccagaggctgacgccaagttacaacgcggacattctcctttcacacctccactacctgcgggaaacacccttgccccacctcacttccgacgacgtggataaagcgctacagaatagtccaaggctgatgcacgctagaaatacggacttgccatacgaaccgccaaggcgttcggcatggacaggtcacgggcatcccactccacaatctaaagctgcccagccatccccatctaccgttcccaaaacggaggaccagcgaccccagcttgatccataccagatcctcgggccaactagttctcgtctcgccaatcccggttccgggcagatccagctctggcagttcctgctcgagctgctatcggattcttccaacagctcttgcattacctgggagggaacaaatggcgaattcaagatgactgatcccgacgaggttgcacgcagatggggcgagagaaaatccaagccaaacatgaattatgacaaattgagcagggccctaagatactactacgacaagaatataatgactaaggtgcatggaaagcggtacgcttacaagtttgatttccatggcatcgctcaagcccttcaaccccatcctcccgagtcctccctctacaagtatccaagcgatctgccgtacatggggtcttaccacgcccatcctcagaaaatgaattttgtggccccacatcctccagccctcccggtgacgtcctcgagtttctttgccgcaccgaatccatactggaacagtcctacaggagggatctatccgaatacaagactgcctacgagccatatgccctctcatctgggcacatactactag

SEQ ID NO: 86255 - DNA, 1092 bp, Artificial Sequence
  derived and/or modified sequence
atggttggttccccagatacagtaggaatgaattatggatcatacatggaagagaaacacatgcctccaccaaacatgacaactaatgaacgtcgtgttatcgtccccgctgatcccacgctttggtccacggaccatgtgaggcagtggctggagtgggctgttaaggaatatggcttgccagacgtaaacatactgcttttccagaacatagacggtaaagaactgtgtaaaatgaccaaggatgacttccagcggcttacccccagttacaatgcagatattctgctgtcacatctacattacttgagagaaacacccttacctcatctcacctctgatgacgtcgacaaggcactccagaactcaccccgtctcatgcacgctagaaatacagatttgccgtacgaacccccacggagatccgcgtggacgggccacgggcatcctacacctcagagcaaggcggcacagccaagtcctagtacagtcccgaagacggaggatcagagaccccaattagatccttaccagattctgggtcctactagttcccgccttgcaaaccccggatcaggccagatccaactgtggcagttcttgctagaactcctgagtgactccagcaatagttcatgcatcacgtgggaggggacaaacggagaatttaagatgacagacccagacgaggtggccaggcggtggggcgaaagaaagtccaaaccgaacatgaactatgacaagttgtctcgagccctcagatattattatgataagaacatcatgaccaaggtgcatggcaaacggtacgcctacaaattcgattttcatggtatagctcaggctctgcagccacatcccccagagagtagcctgtataagtacccatcagatctcccgtatatgggcagttatcacgcccacccacagaaaatgaacttcgttgcaccacatccgccagccctccccgtgacaagtagcagtttcttcgccgcaccgaacccatattggaattcccctacagggggtatctatcccaacaccagactacccaccagccacatgccctctcacctgggaacctattactag

SEQ ID NO: 86256 - DNA, 2112 bp, Artificial Sequence
  derived and/or modified sequence
atgggcaaccacagcggcagacccgaggaccccgagcccggcgccttcaccaccaccaagagaaccggcatccccgcccccagagagttcagcgtgaccgtgagcagagagagaagcgtgcccagaggccccagcaaccccagaaagagcgtgagcagccccaccagcagcaacacccccacccccaccaagcacctgagaacccccagcaccaagcccaagcaggagaacgagggcggcgagaaggccgccctggagagccaggtgagagagctgctggccgaggccaaggccaaggacagcgagatcaacagactgagaagcgagctgaagaagtacaaggagaagagaaccctgaacgccgagggcaccgacgccctgggccccaacgtggacggcaccagcgtgagccccggcgacaccgagcccatgatcagagccctggaggagaagaacaagaacttccagaaggagctgagcgacctggaggaggagaacagagtgctgaaggagaagctgatctacctggagcacagccccaacagcgagggcgccgccagccacaccggcgacagcagctgccccaccagcatcacccaggagagcagcttcggcagccccaccggcaaccagatgagcagcgacatcgacgagtacaagaagaacatccacggcaacgccctgagaaccagcggcagcagcagcagcgacgtgaccaaggccagcctgagccccgacgccagcgacttcgagcacatcaccgccgagacccccagcagacccctgagcagcaccagcaaccccttcaagagcagcaagtgcagcaccgccggcagcagccccaacagcgtgagcgagctgagcctggccagcctgaccgagaagatccagaagatggaggagaaccaccacagcaccgccgaggagctgcaggccaccctgcaggagctgagcgaccagcagcagatggtgcaggagctgaccgccgagaacgagaagctggtggacgagaagaccatcctggagaccagcttccaccagcacagagagagagccgagcagctgagccaggagaacgagaagctgatgaacctgctgcaggagagagtgaagaacgaggagcccaccacccaggagggcaagatcatcgagctggagcagaagtgcaccggcatcctggagcagggcagattcgagagagagaagctgctgaacatccagcagcagctgacctgcagcctgagaaaggtggaggaggagaaccagggcgccctggagatgatcaagagactgaaggaggagaacgagaagctgaacgagttcctggagctggagagacacaacaacaacatgatggccaagaccctggaggagtgcagagtgaccctggagggcctgaagatggagaacggcagcctgaagagccacctgcagggcgagaagcagaaggccaccgaggccagcgccgtggagcagaccgccgagagctgcgaggtgcaggagatgctgaaggtggccagagccgagaaggacctgctggagctgagctgcaacgagctgagacaggagctgctgaaggccaacggcgagatcaagcacgtgagcagcctgctggccaaggtggagaaggactacagctacctgaaggagatctgcgaccaccaggccgagcagctgagcagaaccagcctgaagctgcaggagaaggccagcgagagcgacgccgagatcaaggacatgaaggagaccatcttcgagctggaggaccaggtggagcagcacagagccgtgaagctgcacaacaaccagctgatcagcgagctggagagcagcgtgatcaagctggaggagcagaagagcgacctggagagacagctgaagaccctgaccaagcagatgaaggaggagaccgaggagtggagaagattccaggccgacctgcagaccgccgtggtggtggccaacgacatcaagtgcgaggcccagcaggagctgagaaccgtgaagagaaagctgctggaggaggaggagaagaacgccagactgcagaaggagctgggcgacgtgcagggccacggcagagtggtgaccagcagagccgcccccccctag

SEQ ID NO: 86257 - DNA, 2112 bp, Artificial Sequence
  derived and/or modified sequence
atgggtaaccactccggccgcccagaggatcctgaacccggagcattcaccaccacaaaaagaacggggattcctgcaccccgagagttcagcgtcaccgtgagccgtgaacggtccgtgcctcgtggacctagcaacccacggaaaagcgtgtcaagcccaacctcttctaatactccaactcccacaaagcacctgcgaacgccatccactaaacccaagcaggagaatgaaggaggcgaaaaggcagctcttgaatcacaagtgcgagagctgctggcagaggccaaagctaaagactctgagataaaccgactgaggtctgagctgaagaaatacaaagaaaagagaacactcaacgcggagggaactgatgcgctggggcccaacgtggacggtacatccgtttcacctggcgataccgaaccaatgatccgcgcactagaagagaaaaacaaaaactttcaaaaggaactgtctgatcttgaagaggagaaccgagtactaaaagagaagctgatataccttgagcactcacctaattctgaaggcgccgcatcgcataccggcgactcgagctgccccacatccatcacacaggagtcctcttttggatctccaactgggaaccagatgtcctccgatattgatgaatataagaaaaacatacacgggaatgccttgaggacgagtggatcaagctcatctgacgtaacaaaggcatctctctcgcctgacgcttctgattttgagcacataaccgctgaaacgccatctcgtccgctgtcgtctacgagcaaccctttcaaaagcagtaagtgctcaacagcaggctcctcacccaacagtgtctcagaactcagtctggcttccctgaccgaaaaaatccagaagatggaggagaaccaccactcaaccgcagaggaactgcaagccacattacaggagctgtccgaccagcaacagatggtgcaagagctcacagctgaaaacgagaagttggtcgacgaaaagaccatcctggaaactagctttcaccaacatcgcgaaagggcagaacagctcagccaggaaaacgagaaattgatgaatttactccaggaaagggtaaagaatgaagagccaaccacccaggaaggcaagatcatcgagcttgagcaaaagtgcactggcatcctggagcaggggcggtttgagcgggaaaagttattgaacattcaacagcagctgacctgtagcctgcggaaagtcgaggaagaaaaccagggggccctggagatgatcaagagattgaaagaggagaatgagaaactgaatgagttcttagagctggaacgccataataataatatgatggcaaaaactctcgaggaatgtagggttacactggaggggctcaagatggaaaacggaagtctgaagtctcacctgcagggtgagaaacagaaagctaccgaagcgtccgccgttgagcagactgcagaatcatgtgaagtgcaggaaatgttgaaagttgctcgcgcagagaaagatttgctggagttgagctgcaacgagttacggcaggaactactcaaagctaacggcgagattaaacacgtgagtagcctgctcgccaaagtggagaaggactactcttaccttaaggagatttgtgaccaccaggcggagcagctaagtaggacaagcctaaagctacaggagaaggcatccgaaagtgatgcagagatcaaggacatgaaggaaactatcttcgaactggaagaccaagtggagcagcaccgcgccgtaaaacttcacaacaaccagctcatttctgagctcgaatcaagtgtcataaaattggaggaacagaagagcgacttggaacgccaactcaagacgcttaccaaacaaatgaaggaagaaacagaggagtggcgacgctttcaggcggatctgcaaaccgccgttgttgtagcaaatgatatcaaatgtgaagctcagcaggagctccgcactgttaagaggaagctcctggaggaggaggaaaaaaacgctagactacagaaagagttgggagatgtacagggtcatggccgagttgtcacaagccgggccgctccaccttag

SEQ ID NO: 86258 - DNA, 2112 bp, Artificial Sequence
  derived and/or modified sequence
atgggcaaccacagcggccgcccagaagatcctgagcccggggccttcaccaccaccaagaggacaggcatcccagccccccgggagttctctgtgacagtgtcccgggagaggtctgtgccccggggccccagcaaccccaggaagtctgtgagcagccccaccagcagcaacacccccacccccaccaagcacctgcggacccccagcaccaagcccaagcaggagaatgaaggaggagagaaggccgccctggagagccaggtgcgggagctgctggccgaggccaaggccaaggacagcgagatcaaccggctgcggtctgagctgaagaagtacaaggagaagaggaccctgaatgctgagggcacagatgccctgggccccaacgtggatggcacctctgtgtcccctggggacacagagcccatgatccgggccctggaggagaagaacaagaacttccagaaggagctgagtgacctggaggaggagaacagagtgctgaaggagaagctgatctacctggagcacagccccaacagcgagggcgccgccagccacactggagacagcagctgccccaccagcatcacccaggagagcagctttggcagccccaccggcaaccagatgagcagtgacattgatgagtacaagaagaacatccacggcaatgccctgcggaccagcggcagcagcagcagtgatgtgaccaaggccagcctgagcccagatgccagtgactttgagcacatcacagctgagacccccagccggcccctgagcagcaccagcaaccccttcaagagcagcaagtgcagcacagctggcagcagccccaacagcgtgtctgagctgagcctggccagcctgacagagaagatccagaagatggaggagaaccaccacagcacagctgaggagctgcaggccaccctgcaggagctgagtgaccagcagcagatggtgcaggagctgacagcagaaaatgagaagctggtggatgagaagaccatcctggagaccagcttccaccagcaccgggagcgggcagagcagctgagccaggagaatgagaagctgatgaacctgctgcaggagcgggtgaagaatgaggagcccaccacccaggagggcaagatcatcgagctggagcagaagtgcaccggcatcctggagcagggccgctttgagcgggagaagctgctgaacatccagcagcagctgacctgcagcctgaggaaggtggaggaggagaaccagggcgccctggagatgatcaagaggctgaaggaggagaatgagaagctgaatgagttcctggagctggagcggcacaacaacaacatgatggccaagaccctggaggagtgccgggtgaccctggagggcctgaagatggagaatggcagcctgaagagccacctgcagggcgagaagcagaaggccacagaggccagcgctgtggagcagacagctgagagctgtgaggtgcaggagatgctgaaggtggcccgggcagagaaggacctgctggagctgagctgcaatgagctgcggcaggagctgctgaaggccaacggggagatcaagcacgtgagcagcctgctggccaaggtggagaaggactacagctacctgaaggagatctgtgaccaccaggccgagcagctgagcaggaccagcctgaagctgcaggagaaggccagcgagagtgatgctgagatcaaggacatgaaggagaccatctttgagctggaggaccaggtggagcagcacagagctgtgaagctgcacaacaaccagctgatcagcgagctggagagcagcgtcatcaagctggaggagcagaagagtgacctggagcggcagctgaagaccctgaccaagcagatgaaggaggagacagaggagtggaggcgcttccaggccgacctgcagacagctgtggtggtggccaatgacatcaagtgtgaggcccagcaggagctgaggacagtgaagaggaagctgctggaggaggaggagaagaatgcccggctgcagaaggagctgggagatgtgcagggccacggccgggtggtgaccagccgggccgccccaccctag

SEQ ID NO: 86259 - DNA, 2112 bp, Artificial Sequence
  derived and/or modified sequence
atgggcaaccacagcggccggcccgaggaccccgagcccggcgccttcaccacgacgaagcggaccggcattccggccccacgcgagttttcagtaacggtgtcacgcgagagatcagtgcccaggggaccctccaatcccaggaagtcggtctccagtccaacttctagcaatactccaacacctaccaagcatcttagaacaccatcaacgaagcctaaacaggagaacgaggggggagagaaagccgcgctcgagtctcaggtccgggagctgctcgctgaagcaaaagctaaagatagtgagataaaccggctgcggtctgagttaaaaaagtataaagagaagcggacgctcaatgctgagggtacagacgcattaggaccgaacgttgacgggacttccgtgtcccccggcgataccgagccaatgattcgtgcccttgaggaaaagaataagaacttccagaaggagctgagtgacctggaggaagaaaaccgcgtattgaaggaaaagcttatctacctggaacactctcctaatagcgagggcgctgcatcacacactggggattctagctgtcctacgagcatcacacaggagtcaagcttcggatcgcctaccggcaatcagatgagttccgacattgacgagtacaagaaaaatattcatggaaacgcactcagaacctcaggctcaagctcttccgacgttacaaaagctagcctgagcccagacgcgagcgacttcgagcacattaccgcagagacgcccagccgcccgctgtctagtactagtaaccccttcaagtcatcaaaatgctccacagcaggcagcagtccgaatagtgtctcggaactttcactcgcctcgctgacagagaagatacagaaaatggaggaaaaccatcatagcactgctgaggagctccaagctaccctgcaggagttgtccgaccaacagcagatggtgcaggagctcaccgctgaaaatgagaagctggtcgatgagaagaccatcctggagacatcatttcatcaacatcgagaacgggcggaacagctcagccaagaaaatgagaagctcatgaaccttttacaggaacgcgtgaagaacgaagagcccaccacacaggaaggaaaaattatcgagctggaacagaaatgcaccgggatcctggagcagggtagattcgagcgcgagaaactgctaaatatccaacagcagctgacttgttccctgcggaaagtggaggaagaaaaccagggagccctggagatgatcaagcgcctgaaggaggaaaacgagaaactgaatgaatttctggaacttgaacgacataacaataacatgatggctaaaacgctggaagaatgccgtgtgacccttgagggcctgaaaatggagaacggcagtcttaagtcgcacctgcagggcgagaagcagaaggcaaccgaagcctctgcggttgagcaaacagcggagtcatgtgaagtgcaagagatgctgaaggttgccagagccgagaaagacttgctggagctgtcatgtaatgaactgagacaggaactgcttaaagcaaatggtgagataaaacatgtaagctccctgcttgcaaaagttgagaaggactactcctaccttaaagagatttgtgaccaccaggcagaacagctgtccagaacatcgctcaaattacaggagaaggcctcggagagcgatgcagaaatcaaggacatgaaagagactatcttcgaactggaggaccaggttgaacaacatcgggctgtgaagctgcacaataatcagttgatttccgagttggagtcctccgtgattaagcttgaagagcagaagagcgacctggaacgccaactcaaaactttaaccaagcagatgaaagaagagaccgaggaatggcgcagattccaagcagatctgcagacagccgtggtggttgccaatgatatcaagtgcgaagctcagcaagaactaaggacagtgaaacggaaactgttagaagaagaagaaaaaaacgcacgtctgcagaaagagctgggcgacgtgcagggccacggacgcgtggtgaccagccgcgccgcaccaccatag

SEQ ID NO: 86260 - DNA, 2112 bp, Artificial Sequence
  derived and/or modified sequence
atgggaaaccacagtgggcgtccagaggaccccgaacccggtgccttcaccacgacaaaaagaacgggcattcccgctccaagagagttttccgtgacagtgagcagggagaggagcgttccgagaggaccatcaaacccacggaaaagcgtcagctcaccaacttcctcgaatacccccactccaacgaaacatctgcgcacaccctctacaaagcctaaacaggaaaatgaggggggtgagaaggcggctctggaatctcaggtgcgcgagctgctggccgaggccaaggcaaaggattccgagatcaatagattgcggagcgaactcaagaagtacaaagagaagcgcaccttaaacgctgaaggcactgatgcattggggcctaacgtcgatggtacctccgtgtcacctggagacaccgagcctatgattcgggctttggaggaaaaaaacaagaactttcagaaggaactgagcgatttagaggaagaaaatagagtgctcaaggaaaagctcatttacttagagcatagccctaacagtgaaggggcagctagtcatacaggcgatagctcttgcccaacttcaatcactcaggagagctctttcgggagtcccacaggtaaccaaatgtccagtgacattgatgaatataagaagaacatccacggtaacgcactgaggacatccggaagcagtagttccgacgtgaccaaagccagtcttagccctgacgcatccgacttcgaacatattactgctgagactccaagcaggccactgtcttccacaagcaacccctttaaatcaagcaagtgcagtacagccggttcatccccgaatagcgtatctgaactcagcctcgcttctctcaccgaaaaaatacagaaaatggaggaaaaccaccactcaacagccgaagagctgcaggctacattacaggagctgagtgaccagcagcagatggtgcaggagctgactgccgagaatgagaagttggtcgatgagaaaaccatcctggaaacgtcctttcaccagcatcgggagcgggctgagcagttgagccaggagaacgagaagcttatgaatttgctgcaggaaagggtgaaaaacgaggagccgacaacccaggaaggaaagataatagagctggaacagaagtgcactggaatcctggagcagggacggtttgaacgcgaaaagttgttaaacatccaacaacagctgacatgctccctacgaaaagtggaagaggagaaccagggagcactcgaaatgatcaaaagactcaaggaagaaaacgaaaagctgaatgagtttttagaattggagaggcacaataataacatgatggcaaagactctggaagaatgtagagtcacactagaggggctgaagatggagaacggaagcttaaaatcacacttgcaaggcgagaaacagaaggctacagaggcctcagcggtggagcagactgctgagagttgcgaggtgcaggagatgttaaaggttgccagagcagaaaaggacctgctggagctctcctgtaatgagttgcggcaggagcttcttaaggcaaacggagaaattaagcacgtaagctccttgttggcgaaggttgaaaaagactacagttatctcaaagaaatctgcgaccaccaggctgaacagctgtcacgcacatcactgaaacttcaggagaaggctagcgaatctgatgccgaaatcaaagatatgaaagaaaccatctttgaattggaggaccaggtggagcagcatcgggcagttaaattgcacaataaccagcttatcagcgagttggagtcctcagtgataaagctggaggagcagaaatccgacttggagcggcagctcaagacgcttaccaagcagatgaaagaagaaacggaagaatggcggagattccaggcggatctgcaaactgcagtagtagtggccaatgacatcaagtgcgaagcacagcaagagctacgcaccgttaagaggaagctattagaggaggaagagaaaaatgctcgacttcagaaggagctaggcgacgtccagggccatggaagagtggtaacatctcgagcagccccaccatag

SEQ ID NO: 86261 - protein, 1068 aa, Artificial Sequence
  derived and/or modified sequence
MRSAAKPWNPAIRAGGHGPDRVRPLPAASSGMKSSKSSTSLAFESRLSRLKRASSEDTLNKPGSTAASGVVRLKKTATAGAISELTESRLRSGTGAFTTTKRTGIPAPREFSVTVSRERSVPRGPSNPRKSVSSPTSSNTPTPTKHLRTPSTKPKQENEGGEKAALESQVRELLAEAKAKDSEINRLRSELKKYKEKRTLNAEGTDALGPNVDGTSVSPGDTEPMIRALEEKNKNFQKELSDLEEENRVLKEKLIYLEHSPNSEGAASHTGDSSCPTSITQESSFGSPTGNQMSSDIDEYKKNIHGNALRTSGSSSSDVTKASLSPDASDFEHITAETPSRPLSSTSNPFKSSKCSTAGSSPNSVSELSLASLTEKIQKMEENHHSTAEELQATLQELSDQQQMVQELTAENEKLVDEKTILETSFHQHRERAEQLSQENEKLMNLLQERVKNEEPTTQEGKIIELEQKCTGILEQGRFEREKLLNIQQQLTCSLRKVEEENQGALEMIKRLKEENEKLNEFLELERHNNNMMAKTLEECRVTLEGLKMENGSLKSHLQGEKQKATEASAVEQTAESCEVQEMLKVARAEKDLLELSCNELRQELLKANGEIKHVSSLLAKVEKDYSYLKEICDHQAEQLSRTSLKLQEKASESDAEIKDMKETIFELEDQVEQHRAVKLHNNQLISELESSVIKLEEQKSDLERQLKTLTKQMKEETEEWRRFQADLQTAVVVANDIKCEAQQELRTVKRKLLEEEEKNARLQKELGDVQGHGRVVTSRAAPPPVDEEPESSEVDAAGRWPGVCVSRTSPTPPESATTVKSLIKSFDLGRPGGAGQNISVHKTPRSPLSGIPVRTAPAAAVSPMQRHSTYSSVRPASRGVTQRLDLPDLPLSDILKGRTETLKPDPHLRKSPSLESLSRPPSLGFGDTRLLSASTRAWKPQSKLSVERKDPLAALAREYGGSKRNALLKWCQKKTQGYANIDITNFSSSWSDGLAFCALLHTYLPAHIPYQELNSQEKKRNLLLAFEAAESVGIKPSLELSEMLYTDRPDWQSVMQYVAQIYKYFET

SEQ ID NO: 86262 - DNA, 3207 bp, Artificial Sequence
  derived and/or modified sequence
atgagaagcgccgccaagccctggaaccccgccatcagagccggcggccacggccccgacagagtgagacccctgcccgccgccagcagcggcatgaagagcagcaagagcagcaccagcctggccttcgagagcagactgagcagactgaagagagccagcagcgaggacaccctgaacaagcccggcagcaccgccgccagcggcgtggtgagactgaagaagaccgccaccgccggcgccatcagcgagctgaccgagagcagactgagaagcggcaccggcgccttcaccaccaccaagagaaccggcatccccgcccccagagagttcagcgtgaccgtgagcagagagagaagcgtgcccagaggccccagcaaccccagaaagagcgtgagcagccccaccagcagcaacacccccacccccaccaagcacctgagaacccccagcaccaagcccaagcaggagaacgagggcggcgagaaggccgccctggagagccaggtgagagagctgctggccgaggccaaggccaaggacagcgagatcaacagactgagaagcgagctgaagaagtacaaggagaagagaaccctgaacgccgagggcaccgacgccctgggccccaacgtggacggcaccagcgtgagccccggcgacaccgagcccatgatcagagccctggaggagaagaacaagaacttccagaaggagctgagcgacctggaggaggagaacagagtgctgaaggagaagctgatctacctggagcacagccccaacagcgagggcgccgccagccacaccggcgacagcagctgccccaccagcatcacccaggagagcagcttcggcagccccaccggcaaccagatgagcagcgacatcgacgagtacaagaagaacatccacggcaacgccctgagaaccagcggcagcagcagcagcgacgtgaccaaggccagcctgagccccgacgccagcgacttcgagcacatcaccgccgagacccccagcagacccctgagcagcaccagcaaccccttcaagagcagcaagtgcagcaccgccggcagcagccccaacagcgtgagcgagctgagcctggccagcctgaccgagaagatccagaagatggaggagaaccaccacagcaccgccgaggagctgcaggccaccctgcaggagctgagcgaccagcagcagatggtgcaggagctgaccgccgagaacgagaagctggtggacgagaagaccatcctggagaccagcttccaccagcacagagagagagccgagcagctgagccaggagaacgagaagctgatgaacctgctgcaggagagagtgaagaacgaggagcccaccacccaggagggcaagatcatcgagctggagcagaagtgcaccggcatcctggagcagggcagattcgagagagagaagctgctgaacatccagcagcagctgacctgcagcctgagaaaggtggaggaggagaaccagggcgccctggagatgatcaagagactgaaggaggagaacgagaagctgaacgagttcctggagctggagagacacaacaacaacatgatggccaagaccctggaggagtgcagagtgaccctggagggcctgaagatggagaacggcagcctgaagagccacctgcagggcgagaagcagaaggccaccgaggccagcgccgtggagcagaccgccgagagctgcgaggtgcaggagatgctgaaggtggccagagccgagaaggacctgctggagctgagctgcaacgagctgagacaggagctgctgaaggccaacggcgagatcaagcacgtgagcagcctgctggccaaggtggagaaggactacagctacctgaaggagatctgcgaccaccaggccgagcagctgagcagaaccagcctgaagctgcaggagaaggccagcgagagcgacgccgagatcaaggacatgaaggagaccatcttcgagctggaggaccaggtggagcagcacagagccgtgaagctgcacaacaaccagctgatcagcgagctggagagcagcgtgatcaagctggaggagcagaagagcgacctggagagacagctgaagaccctgaccaagcagatgaaggaggagaccgaggagtggagaagattccaggccgacctgcagaccgccgtggtggtggccaacgacatcaagtgcgaggcccagcaggagctgagaaccgtgaagagaaagctgctggaggaggaggagaagaacgccagactgcagaaggagctgggcgacgtgcagggccacggcagagtggtgaccagcagagccgcccccccccccgtggacgaggagcccgagagcagcgaggtggacgccgccggcagatggcccggcgtgtgcgtgagcagaaccagccccaccccccccgagagcgccaccaccgtgaagagcctgatcaagagcttcgacctgggcagacccggcggcgccggccagaacatcagcgtgcacaagacccccagaagccccctgagcggcatccccgtgagaaccgcccccgccgccgccgtgagccccatgcagagacacagcacctacagcagcgtgagacccgccagcagaggcgtgacccagagactggacctgcccgacctgcccctgagcgacatcctgaagggcagaaccgagaccctgaagcccgacccccacctgagaaagagccccagcctggagagcctgagcagaccccccagcctgggcttcggcgacaccagactgctgagcgccagcaccagagcctggaagccccagagcaagctgagcgtggagagaaaggaccccctggccgccctggccagagagtacggcggcagcaagagaaacgccctgctgaagtggtgccagaagaagacccagggctacgccaacatcgacatcaccaacttcagcagcagctggagcgacggcctggccttctgcgccctgctgcacacctacctgcccgcccacatcccctaccaggagctgaacagccaggagaagaagagaaacctgctgctggccttcgaggccgccgagagcgtgggcatcaagcccagcctggagctgagcgagatgctgtacaccgacagacccgactggcagagcgtgatgcagtacgtggcccagatctacaagtacttcgagacctag

SEQ ID NO: 86263 - DNA, 3207 bp, Artificial Sequence
  derived and/or modified sequence
atgagatctgccgctaagccctggaatccagctattcgtgccggcgggcatgggcccgacagggtgaggcccctcccagctgcctcttctggtatgaagtccagtaaaagttccacatctctggcattcgaatcgcgattgagccgcttaaagcgagcaagcagtgaagatacactaaacaaacccggcagtacagcagcctccggtgtggttcgactgaaaaagactgctacagcgggggctatcagtgaacttactgagtcccggttacggtccgggaccggcgctttcaccacaaccaaacgcaccggtatccccgcccctcgagaattcagcgttactgtgtcaagagaaagatccgtgcctagggggccatctaacccaaggaagagcgtctcctctccaacgagtagcaacactcccacgcccaccaaacatctgaggacaccttccactaagccaaagcaggagaatgaaggcggagaaaaagcagcccttgaaagccaggtgcgtgaactgctggccgaagcgaaagcaaaggattcagagatcaacagattgagatcagagctgaaaaagtacaaagaaaagcgtactttgaatgctgaaggcacagacgcattaggacccaacgtggacggcacaagtgtcagtcctggggataccgagcccatgattcgtgctcttgaagaaaaaaataagaatttccagaaagaactttccgacctggaagaggaaaacagagtcctcaaagagaagcttatctatctagaacactctccaaactcagagggcgccgccagccacactggcgacagcagttgccctaccagcataacacaggagagttccttcggttcgcccacaggtaaccagatgagttcagatattgatgaatacaaaaagaacatccatggcaacgcattaaggactagtggctcctcttcttccgacgtgaccaaagcttctctgagcccagacgcctcggacttcgagcatatcaccgctgagactccaagccgtcctctctcgagcacaagcaatcctttcaagagctcaaaatgttcaacggctggaagctcccctaattcggttagtgagctgtcacttgcctcattgactgaaaagattcagaaaatggaggagaatcatcacagcaccgcagaggaacttcaggcaaccttgcaggagctgagtgatcagcaacagatggtgcaggagcttacagcagagaacgagaaactggtagatgagaaaacaattcttgagactagctttcaccaacacagggagagagccgagcagttgtctcaagagaatgagaagctaatgaacctcctccaggagcgggtcaaaaatgaggaacctacaacccaagaggggaagatcatcgagctggagcagaaatgtaccggaatcctggagcagggacgtttcgaaagagagaagttactgaatatccagcagcaactcacgtgctccttgcgcaaagtcgaggaagaaaatcagggagcacttgagatgataaagagactgaaagaagaaaatgagaaactcaacgagttcctcgaattggagcgccataataataatatgatggctaaaacgttggaggaatgcagagtcaccctggagggcctcaagatggagaacggctctttaaagagtcaccttcaaggtgaaaaacagaaagccaccgaagctagcgctgttgaacagaccgccgagagctgcgaggttcaggaaatgcttaaggtggcaagggccgagaaagatttgcttgagctgagttgtaatgagttgcgacaggagctgttaaaagccaatggtgagatcaagcatgtatcatctctactcgccaaagttgagaaagattactcttacctgaaggaaatttgcgaccatcaagccgagcaactgtctcggacttccttaaaactgcaggaaaaagcatccgaatccgacgccgagattaaggatatgaaagagaccatattcgagctggaggaccaagtggagcagcatcgagccgtcaaactgcataataaccagcttatatctgaattggagagtagtgtgattaagttagaggaacagaaaagcgatctggagcgtcagcttaaaactctcacaaagcagatgaaggaagaaactgaggaatggcgacgatttcaggccgacctacaaactgccgtggttgttgctaatgatattaaatgtgaggcacagcaggagttgaggacggtgaagcgcaagctgctggaggaagaggagaaaaatgcacgcttgcagaaagaactcggagatgtgcaggggcacggccgggttgtaacgtctcgcgcagctcctccgcccgtggacgaggagcctgagagctctgaggtagatgcagccggaagatggcccggcgtgtgcgtctctcggaccagcccaacacctcccgaaagcgccacaacagttaagtctttgatcaaatcctttgacctgggcagaccaggtggagcgggccagaatatttctgtgcataagacccctcgctcgcccttgagcggcattcccgttagaacagccccagccgccgcagtcagccccatgcagcggcactctacatactcttccgtccggcccgcctcccggggtgtgacgcagagactagaccttcccgatttaccactgagtgatatactgaaaggaagaacggagaccctgaagcccgatccacaccttcgtaagtctcccagtttagagagcctgagtagaccacccagcctgggcttcggagacacacggctgctttcagcatccactcgggcatggaagccacagtccaaactgagcgtcgaacggaaggaccctctcgcggctttggctagggagtacggagggagcaaacgaaacgcacttttgaagtggtgccaaaaaaaaactcagggctacgccaacatcgacataaccaacttttcttccagttggtccgacggcctggctttctgtgcgctactccatacatatttgcctgctcacatcccctatcaagagctgaactcccaagagaaaaagagaaatttgctcttagcttttgaggccgcagagtctgtcggcatcaaaccgtctttggagctgagcgaaatgctgtatacagaccgcccggactggcaaagtgttatgcagtatgtggctcaaatctacaagtatttcgaaacgtag

SEQ ID NO: 86264 - DNA, 3207 bp, Artificial Sequence
  derived and/or modified sequence
atgaggtctgctgccaagccctggaacccagccatccgggccggcggccacggccctgacagagtgcggcccctgcctgctgccagcagcggcatgaagagcagcaagagcagcaccagcctggcctttgagagccggctgagccggctgaagagggccagcagcgaggacaccctgaacaagccaggcagcacagctgccagcggcgtggtgcggctgaagaagacagccacagctggggccatcagcgagctgacagagagccggctgcggagcggcaccggggccttcaccaccaccaagaggacaggcatcccagccccccgggagttctctgtgacagtgtcccgggagaggtctgtgccccggggccccagcaaccccaggaagtctgtgagcagccccaccagcagcaacacccccacccccaccaagcacctgcggacccccagcaccaagcccaagcaggagaatgaaggaggagagaaggccgccctggagagccaggtgcgggagctgctggccgaggccaaggccaaggacagcgagatcaaccggctgcggtctgagctgaagaagtacaaggagaagaggaccctgaatgctgagggcacagatgccctgggccccaacgtggatggcacctctgtgtcccctggggacacagagcccatgatccgggccctggaggagaagaacaagaacttccagaaggagctgagtgacctggaggaggagaacagagtgctgaaggagaagctgatctacctggagcacagccccaacagcgagggcgccgccagccacactggagacagcagctgccccaccagcatcacccaggagagcagctttggcagccccactggaaaccagatgagcagtgacattgatgagtacaagaagaacatccatggaaatgccctgcggaccagcggcagcagcagcagtgatgtgaccaaggccagcctgagcccagatgccagtgactttgagcacatcacagctgagacccccagccggcccctgagcagcaccagcaaccccttcaagagcagcaagtgcagcacagctggcagcagccccaacagcgtgtctgagctgagcctggccagcctgacagagaagatccagaagatggaggagaaccaccacagcacagctgaggagctgcaggccaccctgcaggagctgagtgaccagcagcagatggtgcaggagctgacagcagaaaatgagaagctggtggatgagaagaccatcctggagaccagcttccaccagcaccgggagagagctgagcagctgagccaggagaatgagaagctgatgaacctgctgcaggagcgggtgaagaatgaggagcccaccacccaggagggcaagatcatcgagctggagcagaagtgcaccggcatcctggagcagggccgctttgagcgggagaagctgctgaacatccagcagcagctgacctgcagcctgaggaaggtggaggaggagaaccagggcgccctggagatgatcaagaggctgaaggaggagaatgagaagctgaatgagttcctggagctggagcggcacaacaacaacatgatggccaagaccctggaggagtgccgggtgaccctggagggcctgaagatggagaatggcagcctgaagagccacctgcagggcgagaagcagaaggccacagaggccagcgctgtggagcagacagctgagagctgtgaggtgcaggagatgctgaaggtggcccgggcagagaaggacctgctggagctgagctgcaatgagctgcggcaggagctgctgaaggccaatggagagatcaagcacgtgagcagcctgctggccaaggtggagaaggactacagctacctgaaggagatctgtgaccaccaggccgagcagctgagcaggaccagcctgaagctgcaggagaaggccagcgagagtgatgctgagatcaaggacatgaaggagaccatctttgagctggaggaccaggtggagcagcacagagctgtgaagctgcacaacaaccagctgatcagcgagctggagagcagcgtcatcaagctggaggagcagaagagtgacctggagcggcagctgaagaccctgaccaagcagatgaaggaggagacagaggagtggaggcgcttccaggccgacctgcagacagctgtggtggtggccaatgacatcaagtgtgaggcccagcaggagctgaggacagtgaagaggaagctgctggaggaggaggagaagaatgcccggctgcagaaggagctgggagatgtgcagggccacggccgggtggtgaccagcagagctgcccctcctcctgtggatgaggagcctgagagcagcgaggtggatgctgctggccgctggccaggagtgtgtgtgtccaggaccagccccaccccacctgagagcgccaccaccgtgaagagcctcatcaagagctttgacctgggccggcctgggggcgccggccagaacatctctgtgcacaagacccccaggagccccctgagcggcatccctgtgaggacagccccagctgctgctgtgagccccatgcagaggcacagcacctacagctctgtgcggcctgccagccggggcgtgacccagaggctggacctgcctgacctgcccctgagtgacatcctgaagggccgcacagagaccctgaagccagacccccacctgaggaagagccccagcctggagagcctgagcaggcctcccagcctgggctttggagacacccggctgctgagcgccagcacccgggcctggaagccccagagcaagctgtctgtggagaggaaggaccccctggccgccctggcccgggagtatggaggcagcaagagaaatgccctgctgaagtggtgccagaagaagacccagggctacgccaacatcgacatcaccaacttcagcagctcctggagcgatggcctggccttctgtgccctgctgcacacctacctgcctgcccacatcccctaccaggagctgaacagccaggagaagaagaggaacctgctgctggcctttgaagctgctgagagcgtgggcatcaagcccagcctggagctgtctgagatgctgtacacagacagaccagactggcagagcgtgatgcagtatgtggcccagatctacaagtactttgagacctag

SEQ ID NO: 86265 - DNA, 3207 bp, Artificial Sequence
  derived and/or modified sequence
atgcggagcgccgccaagccctggaaccccgccatccgggccggcggccacggcccggatcgcgtgcggcctctcccagccgcctcctccggaatgaagtcctcaaagtcatccacaagtcttgcttttgaatccagactgagccgtctcaagagagccagcagcgaggacacgctgaataaaccaggttccacagcagctagtggggtcgttagactgaaaaaaaccgcaacagctggcgcaatctcagaactgactgaaagcagactgaggagcggaacaggtgcattcacgacaacaaagagaactggtatacctgcacctcgtgaattctccgtaaccgtttctcgggagagatccgtccctagggggcctagcaacccacgtaaatccgtgagctcacccaccagtagcaatactcctacaccaacaaagcacctgcggaccccaagtaccaagcctaaacaggagaatgagggtggcgagaaggcagctctggaatcccaggtgcgggaacttctcgccgaggccaaagctaaggactctgagatcaaccggttacgctctgagttgaaaaaatataaggagaagcgaacactgaacgctgagggtactgacgcgctcggacctaacgtggacggcaccagcgtttcgccaggggacacagaacctatgatccgagccctcgaggagaagaacaaaaacttccagaaggagctgagtgatctggaagaagaaaatcgcgtcctcaaggagaagctgatttacctggaacactcccctaacagtgagggggcagcctcccataccggggactcctcctgtcccacctctattacgcaggaaagctctttcggtagtccgacgggaaatcagatgagtagcgatattgatgaatacaagaaaaatatacatggtaatgcattgaggacgagcggttcatccagctccgacgtgacaaaggctagcctgtcccccgacgcttctgattttgagcatatcacagctgagaccccatccaggcctctgtcatccacatccaaccctttcaaaagttccaagtgttcaacagctggttcttcccctaattcagttagcgaactgtccctagcctctctaacggaaaaaatccagaaaatggaggagaaccaccattccaccgcggaagagctacaggccacgctacaggagttgtccgaccagcagcagatggttcaagagctgactgccgaaaatgagaaactggtggacgagaagactatcctcgagacaagcttccatcagcatcgagagagggctgagcaactgtctcaggagaacgaaaaactgatgaatctcctgcaggaacgtgttaaaaatgaagaaccaacaacccaggaaggcaagattatcgagttggaacagaagtgcacagggattttggagcaagggcgcttcgagagggagaagctgcttaatatccagcagcaattgacctgttccctgcgaaaagtcgaagaggaaaatcaaggagccctcgagatgatcaagagactgaaggaggaaaatgagaaactcaatgaatttctggagctcgaacgacacaacaacaacatgatggccaagacattggaggaatgccgggtgacactcgagggactgaagatggaaaatggttccctcaaaagtcacctccaaggggagaagcagaaggccactgaggcgtccgctgtcgaacagacggctgaatcctgtgaggtacaagagatgttaaaggtagcaagggcagaaaaggacctgctcgagcttagctgtaacgaattgaggcaggaacttttaaaggcaaatggggagatcaagcatgtgtccagtcttttggcaaaggtagaaaaagattacagctacttaaaggaaatatgcgatcaccaggcagaacagctcagcaggaccagtttaaagctccaagagaaagctagcgaaagcgatgccgaaataaaggacatgaaggaaacaatcttcgagctggaggatcaagtggagcagcatcgggcagtcaaactgcacaacaatcagttgatctctgagctggagtcatccgtcatcaaactggaggaacaaaagagtgatctggagaggcagctcaagactcttaccaaacagatgaaggaggagactgaggagtggagacgttttcaggccgatctccagacagcagtcgtggttgcgaacgacattaaatgtgaggctcaacaagaactgaggaccgtaaaaaggaaacttttagaggaagaagagaagaacgctcgactgcagaaggagttgggtgatgtgcagggccacggtagggtcgtgacatctagggctgcccctcctcccgtagatgaagaaccagagtcatcagaggtagacgcagccggccgctggccaggggtttgcgtgagccgaaccagcccgactccgccggaatccgccacaaccgtcaagagccttatcaagtccttcgacctcggacgacccggcggcgccggacagaacatctctgtccataagaccccccggtctccgctttcagggattccagtccggaccgcccccgcagccgcagtatcccccatgcaacgacacagcacttattcaagtgttcgtcccgcgagccgaggcgtaacacagaggctcgacctaccagacttgcccctgagtgacatattaaaggggagaaccgaaactttaaagcctgacccacatctgaggaagagtcccagccttgaaagcctgagtcgtcccccctccctcggttttggagacacaagactcctgtctgcctccactagagcctggaagcctcagtcaaaactaagtgttgaaaggaaagaccccttggcggcccttgcccgtgagtacggaggtagcaagcgcaatgccttattaaaatggtgccagaagaagactcagggttatgcgaatatcgatattaccaatttcagctcatcttggagcgatggcctggccttttgcgcactattgcacacctacctgcccgcccacatcccctaccaggagctgaactctcaagaaaaaaaacggaatttgctccttgcatttgaagctgccgagagcgttggtatcaagccctctctcgagctctccgaaatgctgtatacagaccgccctgattggcagtctgtaatgcaatatgtagctcagatttacaagtacttcgaaacttag

SEQ ID NO: 86266 - DNA, 3207 bp, Artificial Sequence
  derived and/or modified sequence
atgaggtccgcagcgaaaccctggaacccggcaatccgcgctggaggacacgggcctgatcgggtccggcctctccctgccgctagctccggcatgaaatcatccaagagtagcacatctttggcctttgaatcaaggcttagtcgcctgaagcgagcgagtagtgaagacaccctgaataaaccgggttccacagccgcttccggagtggtacggttaaagaaaacagccaccgcgggagctattagtgaactgactgagtcacgtctccggagcggaacaggggcttttacgacaaccaagcgaaccgggatcccagccccaagggaattctctgtcactgttagcagagaaaggtccgttcctagaggtccctcaaacccaagaaagagcgtcagctccccaacctcatccaacacgcccactcctactaaacatctccgtacgccaagcacaaagccaaaacaggagaacgaaggcggtgaaaaggctgcactggaatcccaggtccgggagctgttggccgaggcaaaagctaaagactccgaaatcaaccgtctgcggtcagagctcaagaagtacaaagaaaaacgcactctgaacgccgaaggcacagatgcactcggccctaacgtggatggcacttcagtctcccccggagacactgagcctatgatcagggcgcttgaggagaaaaacaaaaatttccagaaggagctctctgatctggaggaggaaaaccgggtgctcaaggaaaaactcatctaccttgagcatagccccaattctgagggggcagcctcccatactggtgatagtagctgtcccacgtccattactcaggagtctagctttggttccccaaccggcaatcagatgtcgagcgatatagatgaatacaagaagaatatccatggtaatgccttacggaccagcgggtcctcctcaagcgacgtgactaaagcttccttatcacctgatgcatctgactttgagcatatcaccgccgaaaccccttcacgcccattgtcttccacctcgaacccctttaaatcatctaaatgttccaccgcagggtccagccccaacagcgtgagtgagctgagcctcgcctcacttactgagaagattcagaaaatggaagaaaatcaccactcaacagccgaggagctacaagccactctgcaggagctaagcgatcagcagcagatggtgcaggaacttacggctgagaatgagaagctggttgatgaaaagaccatcctcgagacctcttttcaccaacaccgggagcgcgctgagcaactgtcccaggagaacgagaaactcatgaatcttctgcaggagagagtaaagaatgaagagcccacgacacaggagggaaagattatcgaactagagcagaagtgcaccgggattttggaacaaggcagatttgaacgggaaaaactattaaacatccagcagcagctgacctgctctctgaggaaagtggaagaggagaatcagggagctctggagatgattaagcgcctgaaagaggagaacgagaaactaaacgaatttctggagttggagcgccacaacaataatatgatggctaagacgctggaggaatgccgcgttactctggagggacttaaaatggagaacggatcgcttaagtcacacttacaaggggaaaagcaaaaagctactgaagctagtgccgttgaacagactgcagaatcgtgtgaggttcaggaaatgcttaaagtggccagggcagagaaggatctcctcgaacttagctgcaatgagcttaggcaggagctgctaaaagccaacggcgaaataaaacacgtgagttcccttcttgccaaagtcgaaaaagactattcttacctcaaagagatttgcgatcaccaggctgagcaattgagtagaaccagtctgaaactgcaggaaaaggcatcagaaagcgacgcagagatcaaggacatgaaagagactatcttcgagttagaagaccaagtggagcagcaccgcgcagtgaagctgcataacaaccagcttatcagcgagctggagtctagcgtgattaagctagaggagcagaaatcagacctcgagaggcaattgaagaccctcaccaagcagatgaaggaggaaaccgaggaatggcgccgttttcaggcagacctccagacagcagtagtcgtagctaatgatattaaatgtgaggctcaacaggaacttcgaacagtgaagcgaaagctattggaagaggaagagaagaacgctagactccagaaagagctcggcgacgtgcaggggcacgggagagtagtgacttcacgagccgctccacccccagtggatgaagagcctgagagctcagaggtagacgctgccggtcgctggccaggggtttgtgtttccagaaccagccccacacctcctgagtcggctaccaccgtgaagagcctgattaaatcttttgatttgggaagacccggaggtgccggtcagaatatcagtgtgcataagacgcctaggtctccactgtctggcatccccgtgcgcacagcccctgcagctgctgtctcacccatgcaacggcacagtacatactcctcagtgcgcccagcatcccgaggtgtcacacagcgcctagacctcccagacttgccgttgtcagatatacttaagggtcgaactgagaccctcaagcccgatccgcaccttcgaaaatctccttcactcgaaagcctgtcacggcctccttcccttggcttcggcgacacacggctgctatctgcttcgacacgcgcatggaaacctcagtcaaaactttccgtcgaacgaaaggatccactggccgctctggccagggagtatggcggttccaagagaaatgcgctgctgaaatggtgccagaagaagacccaagggtacgctaatattgacattacgaatttctcatccagttggtccgatggtctcgctttctgcgccttgcttcatacatatttgccggcacacataccttaccaggagctgaatagccaagagaagaagcggaatctgttacttgccttcgaggcagccgagtctgtggggattaaaccctcccttgagctgtcagagatgctttacaccgatagacctgattggcagtcagtaatgcagtatgtagcccaaatctataaatactttgagacgtag

SEQ ID NO: 86267 - DNA, 3948 bp, Artificial Sequence
  derived and/or modified sequence
agaagcagaaaaggttggataaaagataaggacagacccacgaagtcaagcatgcggagtgcagccaagccctggaacccagccatcagagcagggggccacggcccagaccgggtgcggcctctgcctgcagcctcttccggcatgaagagttctaagtcttcaacttccttggcttttgagtcccgactcagcaggctcaagagggccagcagtgaggacacgctcaacaagccaggaagtaccgctgcatcgggggtggttcgcctgaagaagaccgccactgccggagccatctcggagctcacggagagccgcctgaggagcggcacaggggcctttacaacaactaaacggacaggcattccagccccacgggaattttcagtaactgtctcaagagagaggtctgtgccacgtggtccctccaaccccaggaaatcagtgtccagtccaacttcttccaacactcccactcctacgaaacacctgaggaccccttccacaaagcccaagcaagagaatgaaggtggagaaaaggctgcgcttgagtcccaagttcgggaacttttggcagaagccaaagcaaaagatagtgaaattaacaggcttcgaagtgaactaaagaaatacaaagagaaaaggactctgaacgctgaggggactgatgctttgggcccaaatgtcgatggaacatcagtctccccaggtgacacggaacctatgataagagctcttgaggagaagaacaagaactttcagaaagagctttccgatctagaggaagaaaaccgggtcctgaaggagaaactgatctatcttgagcactccccaaattcagaaggggcagcaagtcacactggcgacagcagctgcccaacatccataactcaagagtcaagcttcggaagcccaactggaaatcagatgtccagtgacattgatgagtataaaaaaaacatacatggaaatgcattacggacatcaggctcctcaagtagcgatgttaccaaagcttctttgtcgccagatgcttccgactttgagcacattacagcagagacaccctcaaggcccctgtcctccaccagtaacccctttaagagttcaaagtgttctactgctgggagttccccaaacagcgtaagtgaattgtccctggcttccctcacagagaagatacaaaagatggaagaaaaccaccatagcactgcagaagaactacaggctactctacaagaattatcagaccagcaacaaatggtacaggaattgacagctgaaaatgagaagctggtggatgaaaagacgattttagagacatcctttcatcagcatcgagagagggcagagcagctaagtcaagaaaatgagaagctgatgaatcttttacaagagcgagtaaagaatgaagagcccaccactcaggaaggaaaaattattgaactggagcagaagtgcacaggtattcttgaacagggccgctttgaaagagagaagctactcaacattcagcagcagttgacctgtagcttgcggaaggttgaggaagaaaaccaaggagctttagaaatgattaaacgtctgaaggaagaaaatgaaaaactgaatgagtttctagaactggaacggcataataataacatgatggccaaaactttggaagagtgtagagttaccttggaagggctaaaaatggagaatggatctttgaagtctcatttgcagggtgagaagcagaaagccacagaggccagtgctgtggagcagacggcagagagctgcgaagttcaagaaatgttgaaagtagcccgagcagagaaagatctactggaactgtcttgcaatgagctcagacaagaattactaaaggcaaacggtgaaattaaacatgtttccagtctgctggccaaggtggaaaaggattattcatacctgaaggagatatgtgatcaccaagccgaacagctgagcagaaccagcctaaagctgcaagaaaaagcatcagagagtgatgcagagatcaaagacatgaaagaaaccatatttgaattggaagatcaggtggaacagcaccgggctgtcaagttacacaataatcaactcatcagtgagctagaaagtagtgtgatcaagctggaggaacagaagtcagacctggagaggcagctgaagactctgaccaagcagatgaaggaggagaccgaggaatggaggcggttccaggcggatctgcagaccgcagtggtggtggccaatgacatcaagtgtgaggcccagcaggagctgcgcaccgtgaagaggaaactgctggaggaggaggagaagaatgcccggttgcagaaggagctgggggatgtgcagggccacggcagggtggtcaccagcagagccgcccctccacctgtggatgaagagccagagtcctctgaggtcgatgctgctggtcggtggcctggtgtctgtgttagcagaacatctccaacacccccagagtcggcaaccaccgttaagtcacttatcaagtcatttgacttgggacgcccaggtggagctggacagaatatttctgtccataagacccccagaagtcccctaagtgggataccagtgaggactgctccagcagctgctgtctctccaatgcagaggcattcgacttacagcagtgtgcggccagccagcagaggggtgactcaacgcttggaccttcctgaccttcccctctcagatattctaaagggaaggactgagaccctgaagccagacccccacctccgcaagagtccctcactagagtcactgagcagacccccgtctctgggctttggggacacaagactgctgagtgcttccacccgggcatggaaaccacaaagcaaactcagtgtggaaagaaaagaccctctggcagccttggcccgggaatacggtggttccaagcgcaatgctctactgaaatggtgccagaagaagacacaaggttatgcgaacattgacatcaccaatttcagcagcagctggagcgatggcctggccttctgtgctctgctccacacctacctgcctgcccacatcccctaccaggagctgaatagtcaggagaaaaagaggaatctcttgttggcatttgaagcggctgaaagtgtaggcatcaaacccagcctggaactcagcgagatgctgtacacagaccggcccgactggcagagtgtgatgcagtacgtggcccaaatctacaagtactttgagacgtaaccctggagggcctggggcagccaccattgccacctactgcagcttttcctggaagcgcctgattactgtccactgaccctgctctgcccaccacccagctgcctagacttcaaagacaggctcaatccaagtggaccaacacccaaataagaaacagagtgggtcccacgatgtacctgtctgaaatgcaaatgcagctggactgtaaattggggactctttgatctcttgtgggatgcttctaaagagggcagcctccctccttccagaccaagaccccacacccaggcttgttttgctgattatattgggtggctgaacgaacacattatctgcagaaattcagacaaagaacatctccaaatcagtcttttggttgctgttgttaaaaatatcccggctttgcctttatgaaacctttgcccttggctgggtgtggtagctcgtggctgtaatcccagcactttaggaagccaaggcagtaggatcgtttgagcccaggagttcgaggctgcagtgagctatgagcataccactgcactccagcctgtgtgaaagagccagaccctgtctcaaaaaaatgataaaacccaaaactttgcccttgtgaaccctcccttcccccctccccccccaaaaaaaaacaacaaaacacaaaaaataaacatttgttccagggcaacctggaaa

SEQ ID NO: 86268 - DNA, 2064 bp, Artificial Sequence
  derived and/or modified sequence
atgctggagcccagcagcgtgctgcacgccaacgtgaaccaggcccccctgtggtgcctggtgctgagatggtgcagagagtgcaaggacaccgtgtgcggcggcaagcagaagagcagagtgaaccacaccttccagagaagagagatcgaggccaaggaggcctgcgactggctgagagccgccggcttcccccagtacgcccagctgtacgaggacagccagttccccatcaacatcgtggccgtgaagaacgaccacgacttcctggagaaggacctggtggagcccctgtgcagaagactgaacaccctgaacaagtgcgccagcatgaagctggacgtgaacttccagagaaagaagggcgacgacagcgacgaggaggacctgtgcatcagcaacaagtggaccttccagagaaccagcagaagatggagcagagtggacgacctgtacaccctgctgcccagaggcgacagaaacggcagccccggcggcaccggcatgagaaacaccaccagcagcgagagcgtgctgaccgacctgagcgagcccgaggtgtgcagcatccacagcgagagcagcggcggcagcgacagcagaagccagcccggccagtgctgcaccgacaaccccgtgatgctggacgcccccctggtgagcagcagcctgccccagccccccagagacgtgctgaaccaccccttccaccccaagaacgagaagcccaccagagccagagccaagagcttcctgaagagaatggagaccctgagaggcaagggcgcccacggcagacacaagggcagcggcagaaccggcggcctggtgatcagcggccccatgctgcagcaggagcccgagagcttcaaggccatgcagtgcatccagatccccaacggcgacctgcagaacagccccccccccgcctgcagaaagggcctgccctgcagcggcaagagcagcggcgagagcagccccagcgagcacagcagcagcggcgtgagcaccccctgcctgaaggagagaaagtgccacgaggccaacaagagaggcggcatgtacctggaggacctggacgtgctggccggcaccgccctgcccgacgccggcgaccagagcagaatgcacgagttccacagccaggagaacctggtggtgcacatccccaaggaccacaagcccggcaccttccccaaggccctgagcatcgagagcctgagccccaccgacagcagcaacggcgtgaactggagaaccggcagcatcagcctgggcagagagcaggtgcccggcgccagagagcccagactgatggccagctgccacagagccagcagagtgagcatctacgacaacgtgcccggcagccacctgtacgccagcaccggcgacctgctggacctggagaaggacgacctgttcccccacctggacgacatcctgcagcacgtgaacggcctgcaggaggtggtggacgactggagcaaggacgtgctgcccgagctgcagacccacgacaccctggtgggcgagcccggcctgagcaccttccccagccccaaccagatcaccctggacttcgagggcaacagcgtgagcgagggcagaaccacccccagcgacgtggagagagacgtgaccagcctgaacgagagcgagccccccggcgtgagagacagaagagacagcggcgtgggcgccagcctgaccagacccaacagaagactgagatggaacagcttccagctgagccaccagcccagacccgcccccgccagcccccacatcagcagccagaccgccagccagctgagcctgctgcagagattcagcctgctgagactgaccgccatcatggagaagcacagcatgagcaacaagcacggctggacctggagcgtgcccaagttcatgaagagaatgaaggtgcccgactacaaggacaaggccgtgttcggcgtgcccctgatcgtgcacgtgcagagaaccggccagcccctgccccagagcatccagcaggccctgagatacctgagaagcaactgcctggaccaggagtag

SEQ ID NO: 86269 - DNA, 2064 bp, Artificial Sequence
  derived and/or modified sequence
atgctggagccttcaagcgttcttcatgccaatgttaaccaggcccctctctggtgtctcgtgctccgatggtgccgcgaatgcaaggacactgtgtgcggaggcaaacagaagtcccgtgtcaatcatacctttcaacggagagagatcgaggccaaggaggcctgtgactggttgagagccgccggcttcccccaatacgctcagctctatgaggactcccagttcccgattaatattgtggctgtgaagaacgaccacgattttctagagaaggacctggtggagccgctctgccgacgtctgaatactctaaacaagtgtgcctccatgaagttagatgtgaactttcaacgcaagaagggagacgactccgacgaagaggacctatgtatcagtaacaagtggacatttcaaaggacgtcaagacggtggtctagggtggacgacctgtatactttattgccaagaggggatcggaatggctcgccggggggcacaggcatgcgaaacacaaccagcagcgagagtgtactgactgatctgtctgaacctgaagtgtgttccattcatagcgagtccagtgggggttcggattctcggagccagccaggccagtgctgcactgataatcctgtaatgttagatgcaccgctggtgtcctccagcttgcctcaaccgcctagggacgtcctgaatcatccattccaccctaagaacgagaaacctacgagggctcgggctaaaagcttcctcaaacgcatggagacactgagagggaaaggggcccacggcaggcacaaaggcagcgggagaactggagggttggtcatttcgggaccaatgttgcagcaggagccagagtcattcaaggctatgcagtgtatacaaatcccgaacggcgacctccaaaacagtccaccgcccgcatgccgaaaagggttaccctgcagcggcaagtcctcgggagagtctagtccgtccgaacactccagctccggcgtttccactccttgcctgaaggagcgaaagtgtcacgaagccaacaaaagaggcggcatgtacctcgaggacctggacgtgctggcaggcacagctttgccagacgcaggagaccaaagtcgaatgcatgagttccattcgcaggaaaacttggtggtccacatccctaaggatcacaaacctggcacattccccaaggccttgtctatcgaaagcctctcccctacggactcgtcaaacggggtgaactggaggacagggagtatctctcttggccgagagcaggtacccggggcgagagagccgcggctcatggccagctgccatcgcgccagcagggtttctatctacgacaacgtgcccggaagtcatctatatgcctcaaccggtgatctactggatttggagaaagacgatttattccctcacctggacgatatcttgcagcacgtgaacggtctgcaggaggtggtggatgactggtctaaggatgttctgcccgagctgcaaactcatgatacgctggtgggcgagcccggattgtctacatttccctcgccaaaccagatcacgctcgattttgagggaaacagtgttagcgaaggtcggacaacacccagtgacgtggaaagggatgtaacttcccttaacgaatccgagcccccgggcgtgcgggataggagagactcgggcgttggggcaagcctcacaagaccgaaccggagactgcggtggaactcgttccagctgagccaccaaccgcgtcctgctcctgcctcacctcacatctcatcccagaccgcctcccagctctccctgctccagcgtttctccctgctgagactgacagcgattatggaaaagcacagtatgagcaataagcatgggtggacctggtctgtcccgaaattcatgaaacgaatgaaggtcccagactacaaggataaagctgtttttggtgtgcccttgatagttcacgtccaacgcaccggtcagccactgccccagtccatccaacaggcactgagatatctccgcagcaattgcctggatcaggaatag

SEQ ID NO: 86270 - DNA, 2064 bp, Artificial Sequence
  derived and/or modified sequence
atgctggagcccagctctgtgctgcacgccaacgtgaaccaggcccccctgtggtgcctggtgctgcgctggtgccgggagtgcaaggacacagtgtgtggcggcaagcagaagagccgggtgaaccacaccttccagaggcgggagattgaggccaaggaggcctgtgactggctgcgggccgccggcttcccccagtatgcccagctgtatgaggacagccagttccccatcaacatcgtggccgtgaagaatgaccatgacttcctggagaaggacctggtggagcccctgtgccggcggctgaacaccctgaacaagtgtgcctccatgaagctggatgtgaacttccagaggaagaagggagatgacagtgatgaggaggacctgtgcatcagcaacaagtggaccttccagaggaccagccgccgctggagccgggtggatgacctgtacaccctgctgcccaggggggacagaaatggcagccctgggggcaccggcatgaggaacaccaccagcagcgagagcgtgctgacagacctgtctgagcctgaggtgtgcagcatccacagcgagagcagcggcggcagtgacagccgcagccagcccggccagtgctgcacagacaaccctgtgatgctggatgcccccctggtgagcagcagcctgccccagcccccaagagatgtgctgaaccaccccttccaccccaagaatgagaagcccacccgggcccgggccaagagcttcctgaagaggatggagaccctgcggggcaaaggagcccacggccgccacaagggcagcggccgcactggaggcctggtgatcagcggccccatgctgcagcaggagcctgagagcttcaaggccatgcagtgcatccagatccccaacggggacctgcagaacagccccccaccagcctgcaggaagggcctgccctgcagcggcaagagcagcggggagagcagccccagcgagcacagcagcagtggagtgtccaccccctgcctgaaggagaggaagtgccacgaggccaacaagaggggcggcatgtacctggaggacctggatgtgctggccggcacagccctgcctgatgctggggaccagagcaggatgcatgagttccacagccaggagaacctggtggtgcacatccccaaggaccacaagccaggcaccttccccaaggccctgagcattgagagcctgagccccacagacagcagcaatggagtgaactggaggacaggcagcatcagcctgggccgggagcaggtgcctggggcccgggagccccggctgatggccagctgccaccgggccagccgggtgtccatctatgacaacgtgcccggcagccacctgtatgccagcactggagacctgctggacctggagaaggatgacctcttcccccacctggatgacatcctgcagcacgtgaatggcctgcaggaggtggtggatgactggagcaaggatgtgctgcctgagctgcagacccatgacaccctggtgggggagcccggcctgagcaccttccccagccccaaccagatcaccctggactttgagggcaacagcgtgtctgagggccgcaccacccccagtgatgtggagagagatgtgaccagcctgaatgaaagtgagcccccaggagtgcgggacagaagagacagcggcgtgggcgccagcctgacccggcccaacagaaggctgcgctggaacagcttccagctgagccaccagcccaggcctgccccagccagcccccacatcagcagccagacagccagccagctgagcctgctgcagcgcttcagcctgctgcggctgacagccatcatggagaagcacagcatgagcaacaagcacggctggacctggagcgtgcccaagttcatgaagaggatgaaggtgcctgactacaaggacaaggctgtgtttggagtgcccctcatcgtgcacgtgcagaggacaggccagcccctgccccagagcatccagcaggccctgcgctacctgcggagcaactgcctggaccaggagtag

SEQ ID NO: 86271 - DNA, 2064 bp, Artificial Sequence
  derived and/or modified sequence
atgctggagcccagcagcgtgctgcacgccaacgtgaaccaggccccactgtggtgtttggttttgcgctggtgcagagagtgcaaggacacagtatgtggcggcaaacaaaaaagccgtgttaaccacacttttcagaggagagaaatcgaggccaaggaggcttgtgattggctgcgcgcggctggtttcccccagtacgcccaattgtacgaagattcacagtttcctatcaacatagtcgccgtgaagaatgatcatgacttcctcgaaaaggacctggtggaaccactgtgtcgcaggctcaacaccttgaataaatgtgcttctatgaaactggatgtcaacttccaaaggaaaaagggtgatgattccgatgaggaagatttgtgtataagtaacaaatggaccttccagagaaccagtcgcagatggagtagggtggacgacctctatactctgttacctcggggagatagaaacgggtcgcctggtggcacagggatgcgaaacacgacatcttctgagagcgtgctgacggacctgtcagagcctgaagtgtgcagcatccactccgagtctagcggggggtccgacagtcggagccaacccggtcagtgctgcacagataatcctgtgatgctggacgcccccctcgttagttctagtctcccccagccacctcgtgatgttctgaatcatccattccatcctaagaatgaaaagcctacccgggccagagctaaatccttcctcaagagaatggagaccctcagagggaaaggggctcacgggagacataaaggctccggacgaacggggggtctggtgataagcggacccatgctgcagcaggagcctgaatcttttaaggctatgcagtgtatacagattcccaacggagacctccagaattcccctccccccgcctgccgcaaaggcttaccgtgctcaggaaagagtagtggtgagagcagtccatctgagcactcgagctccggagtgtcgaccccatgtctgaaggagcgcaaatgccatgaggcaaacaagcggggggggatgtacctggaggaccttgatgttttggctggcaccgctctacccgatgctggcgaccagagcaggatgcacgagttccactcccaggagaacttagtggtgcacattcccaaagaccacaagcccggtactttcccgaaagccctttcgatcgagtcactcagccccaccgacagttcgaacggagtaaattggcgcaccgggagtatatctctgggcagagagcaggtacccggagcccgcgaaccacgcctgatggcgtcgtgtcaccgggcgtcaagagtatctatctatgataatgtgcctggctctcatctgtatgcaagtaccggcgatctactagatctggagaaggacgatctatttccccacctcgacgatatcctccagcacgtcaatggcctgcaggaagtagtggatgattggagcaaggacgtactgcctgagcttcagactcacgacacgctcgttggcgaacccggactgtctacctttccgagcccaaatcagataacactggacttcgagggaaattctgtaagcgaaggacgaacgactccctccgatgtggaaagggatgtcacatcactcaacgaaagcgaaccacctggtgtccgcgaccggagagatagtggtgtgggggcatcccttacacggcctaaccggcggttacggtggaattctttccagctgtcccaccaacctagaccagctcctgcctctcctcacatctcttctcaaaccgccagccaactgagcctacttcagcggtttagcttgctgcgccttacagccattatggagaagcactccatgagcaacaaacatggctggacctggtcagtacctaagttcatgaaacggatgaaggtgccagattataaagacaaagctgtgttcggggtgccattaatcgtgcacgtgcagcgtacagggcagcccctgccacaaagcatccagcaagcactcaggtatctccgcagtaactgccttgaccaggagtag

SEQ ID NO: 86272 - DNA, 2064 bp, Artificial Sequence
  derived and/or modified sequence
atgcttgaaccgagcagcgttctacacgccaatgtaaatcaggcccctttatggtgtttagtgttgcggtggtgtcgcgagtgtaaagacaccgtctgtggaggcaaacagaagtccagggtcaaccacacattccagaggcgcgaaattgaggcaaaggaggcctgtgactggttgagagctgctggctttcctcaatatgcgcagctctatgaggacagccagtttcccattaatatcgtggccgttaagaatgaccacgacttcctcgagaaagacctcgtggaacctctgtgccggcgactaaatactctgaataagtgcgcttccatgaagcttgacgttaattttcaacgaaagaagggtgacgactccgatgaggaggacctctgcataagcaataagtggacctttcagagaacaagtcgcaggtggagccgggtggatgatctatacaccctcctacctcgcggagaccgcaacggttctcctggaggcacaggtatgagaaacacaacaagtagcgaatccgtgctgactgacttgagtgagcccgaagtttgctcgatccactcggaatcctctggtggcagcgactctcgcagccagccaggtcagtgttgcactgacaacccagtgatgctcgatgcacccctcgtgagcagctccttgccccagcccccacgcgacgttttaaaccatcctttccatcctaaaaacgagaaacctacacgtgcccgagctaagtcttttttgaaaaggatggagacattgcgcggaaagggtgctcacggcagacataaaggttccggtagaacaggcggactggtgataagtgggccaatgctgcaacaagagccagagagctttaaagccatgcagtgtatacagatccccaatggagacttgcagaacagtcctcctccggcttgcaggaagggcctgccctgctctgggaagtccagcggcgaaagtagcccatccgaacattcttcaagtggcgtgagtaccccttgtctgaaagagcgaaagtgtcacgaggccaacaagcggggaggcatgtacctcgaagatctggatgtcctggccggaacggcgctgccagatgctggcgaccagagcaggatgcacgagtttcattcacaggaaaacctcgtcgtgcacatccccaaggaccacaaaccgggtacattccctaaggcactgagcattgaatccctctccccaaccgattctagtaatggagttaattggcggacagggagcatttccctgggtcgcgaacaagtacctggtgctcgcgaaccaagattgatggcatcatgccatcgggctagtagagtgtccatatatgataacgttcctggctcccacctgtacgcctctaccggggatcttctggacctcgagaaagacgatttattcccgcaccttgatgatatattgcagcacgtgaacggcttgcaggaagttgtggacgattggtcaaaggacgtgttgcccgagctccagacacatgacaccctggttggcgaacctggactgtctacctttccctctccaaatcagattaccctggattttgaggggaatagcgttagcgagggtcgcacaacaccttccgacgtggaacgcgacgtaactagccttaacgagtccgagcccccaggcgtgagggaccgtcgagattctggcgtgggggcaagtttgactcgccctaacaggcggctgcggtggaactcttttcagttatctcatcagcctcggcctgctcctgcctcccctcacatttcctcacaaactgcctcacagctgtctcttcttcagcgttttagtcttctgaggttaaccgccattatggagaagcactcaatgtccaataagcatggctggacctggtcagtgcccaaattcatgaaacgaatgaaggtgccagactacaaggataaagctgtgtttggggtcccactgattgttcacgtgcagagaacaggccagccacttcctcaatccattcaacaggctttacgctacctgcgatctaactgtttagaccaggaatag

SEQ ID NO: 86273 - DNA, 2118 bp, Artificial Sequence
  derived and/or modified sequence
cggaaacatgagagaggactatcatctgctccttgctctgaatttctttgaacctccatgctggaaccctcctcagttctccatgcaaacgttaaccaggcccctttgtggtgcttggtgctgcgctggtgcagagaatgcaaagacactgtctgtggtgggaaacagaaaagcagagtgaaccacacattccagcgccgggaaattgaggcaaaagaagcatgtgactggctccgtgctgccgggttcccgcaatacgctcagttatatgaggattcacaatttcccatcaacattgtggctgtcaagaatgatcatgattttcttgaaaaggaccttgtagaacctctttgcagacgactaaatacgttgaacaagtgtgcctcaatgaaacttgatgtgaacttccaaaggaaaaagggtgacgactccgatgaggaagatctttgtatcagcaacaaatggactttccaaagaaccagtcgcaggtggtctcgtgtggacgacctctacacgctgctccctcgaggagacagaaatgggtcaccgggaggcacggggatgaggaacacgaccagcagtgagagcgtcctcacagacctgagcgagcctgaggtctgctccattcacagcgaaagcagtggaggcagcgacagtcgcagccagccgggccagtgctgtacagacaacccggtcatgctggatgccccactcgtcagcagcagcctcccacagccccccagagatgtcctcaaccaccccttccaccccaagaatgagaagcccacgagggctagggccaaatcatttttgaaacgcatggaaacactccgagggaagggagcccacgggaggcataaggggtctgggcggacaggtggcctggtgatcagtgggcccatgttgcagcaggagccagagtcctttaaggctatgcagtgcatccaaataccaaatggagatctccagaattcgccgccacctgcctgcagaaaagggctcccatgctctggcaagtcgagtggcgagagcagcccgtcggagcacagcagcagcggggtgagcacgccctgcctgaaggaacgcaagtgccacgaggccaacaagcgcgggggcatgtacttggaggacctagatgtgctggcggggacagcactgccggatgcaggggaccaaagccgtatgcatgaatttcactcccaagagaatttggtggtgcatattcccaaggatcacaaaccaggaacattccccaaggcactttctattgaaagcctctctcccacagatagtagcaatggggttaattggaggaccggtagcatctccctgggcagagagcaggtccctggtgccagggagccccggctcatggcgtcctgccacagagccagccgagtcagtatctatgacaatgtccctggctcccatctgtatgccagcacaggagatcttttggacttggagaaagatgaccttttccctcacttggatgacattctgcagcatgtcaatgggctccaagaggtagtcgatgactggtccaaagatgtcttgcctgaactgcaaactcatgatacattggttggggaacctggcttatccacctttccatctcctaatcagatcaccttagattttgaaggtaactctgtctcagaaggtcggacgacacccagtgatgtggaaagagatgtaacatctcttaatgaatctgagcctcctggggtcagagacaggagggattctggtgtaggggcctctctgaccaggccaaacaggcgactccgatggaacagtttccagctgtcgcaccagccccggccggccccagcatcgccccacatcagcagccagacggccagccagctgagcctgctccagcgcttctcactgctccgcctcacggccatcatggagaagcactccatgtccaacaagcacggctggacatggtcagttccaaagttcatgaagaggatgaaagttcccgactacaaagacaaggctgtctttggcgttcctctcatagtccacgtccaaagaacgggacagcccctgcctcaaagtattcagcaagcactgagatatctacgcagcaactgcctcgatcaggaa

SEQ ID NO: 86274 - protein, 526 aa, Artificial Sequence
  derived and/or modified sequence
MAAGETQLYAKVSNKLKSRSSPSLLEPLLAMGFPVHTALKALAATGRKTAEEALAWLHDHCNDPSLDDPIPQEYALFLCPTGPLLEKLQEFWRESKRQCAKNRAHEVFPHVTLCDFFTCEDQKVECLYEALKRAGDRLLGSFPTAVPLALHSSISYLGFFVSGSPADVIREFAMTFATEASLLADCSVKPCTKQLHLTLAHKFYPHHQRTLEQLARAIPLGHSCQWTAALYSRDMRFVHYQTLRALFQYKPQNVDELTLSPGDYIFVDPTQQDEASEGWVIGISQRTGCRGFLPENYTDRASESDTWVKHRMYTFSLATDLNSRKDGEASSRCSGEFLPQTARSLSSLQALQATVARKSVLVVRHGERVDQIFGKAWLQQCSTPDGKYYRPDLNFPCSLPRRSRGIKDFENDPPLSSCGIFQSRIAGDALLDSGIRISSVFASPALRCVQTAKLILEELKLEKKIKIRVEPGIFEWTKWEAGKTTPTLMSLEELKEANFNIDTDYRSLPWACASVKKIKRKENGSW

SEQ ID NO: 86275 - DNA, 1581 bp, Artificial Sequence
  derived and/or modified sequence
atggccgccggcgagacccagctgtacgccaaggtgagcaacaagctgaagagcagaagcagccccagcctgctggagcccctgctggccatgggcttccccgtgcacaccgccctgaaggccctggccgccaccggcagaaagaccgccgaggaggccctggcctggctgcacgaccactgcaacgaccccagcctggacgaccccatcccccaggagtacgccctgttcctgtgccccaccggccccctgctggagaagctgcaggagttctggagagagagcaagagacagtgcgccaagaacagagcccacgaggtgttcccccacgtgaccctgtgcgacttcttcacctgcgaggaccagaaggtggagtgcctgtacgaggccctgaagagagccggcgacagactgctgggcagcttccccaccgccgtgcccctggccctgcacagcagcatcagctacctgggcttcttcgtgagcggcagccccgccgacgtgatcagagagttcgccatgaccttcgccaccgaggccagcctgctggccgactgcagcgtgaagccctgcaccaagcagctgcacctgaccctggcccacaagttctacccccaccaccagagaaccctggagcagctggccagagccatccccctgggccacagctgccagtggaccgccgccctgtacagcagagacatgagattcgtgcactaccagaccctgagagccctgttccagtacaagccccagaacgtggacgagctgaccctgagccccggcgactacatcttcgtggaccccacccagcaggacgaggccagcgagggctgggtgatcggcatcagccagagaaccggctgcagaggcttcctgcccgagaactacaccgacagagccagcgagagcgacacctgggtgaagcacagaatgtacaccttcagcctggccaccgacctgaacagcagaaaggacggcgaggccagcagcagatgcagcggcgagttcctgccccagaccgccagaagcctgagcagcctgcaggccctgcaggccaccgtggccagaaagagcgtgctggtggtgagacacggcgagagagtggaccagatcttcggcaaggcctggctgcagcagtgcagcacccccgacggcaagtactacagacccgacctgaacttcccctgcagcctgcccagaagaagcagaggcatcaaggacttcgagaacgacccccccctgagcagctgcggcatcttccagagcagaatcgccggcgacgccctgctggacagcggcatcagaatcagcagcgtgttcgccagccccgccctgagatgcgtgcagaccgccaagctgatcctggaggagctgaagctggagaagaagatcaagatcagagtggagcccggcatcttcgagtggaccaagtgggaggccggcaagaccacccccaccctgatgagcctggaggagctgaaggaggccaacttcaacatcgacaccgactacagaagcctgccctgggcctgcgccagcgtgaagaagatcaagagaaaggagaacggcagctggtag

SEQ ID NO: 86276 - DNA, 1581 bp, Artificial Sequence
  derived and/or modified sequence
atggcggcaggtgagacccagctctatgctaaagtgtcaaacaaattaaagagcaggagtagcccctcactcttagaacccctactggccatgggcttcccagttcacacagccctgaaagcgctagccgctaccgggaggaaaacggccgaggaggctctggcttggcttcatgaccattgcaacgatccgagtctggatgatccgatcccccaggaatatgcactgttcctgtgcccaactggacccctgctcgaaaagctgcaggagttctggagggaatcgaagcgccaatgcgccaaaaaccgtgcccacgaggtcttcccacacgtgactttgtgtgacttcttcacctgcgaagaccaaaaagtggagtgcctgtacgaggcactcaagcgagctggcgacagattgcttgggtcatttcccactgctgtccctctcgccctgcattcttcaataagttatcttggcttcttcgtgtccggttcccccgctgatgtcatccgcgagttcgcaatgacattcgcaaccgaggcatccctgctcgccgactgttccgtcaagccttgtaccaaacagctccacttaacccttgcccacaagttctatcctcatcatcaaaggactttggaacaacttgcacgcgctatccccctgggccactcctgccaatggaccgccgctctgtacagcagggatatgcggtttgtgcattaccaaaccctgcgagctctcttccagtacaagccacagaacgtcgatgaattgaccctatctcctggagattacatttttgttgacccaacccagcaggacgaagcatcagaaggatgggtaatcggcatttcccagaggaccgggtgtaggggtttccttcctgagaactatacagatagggccagtgaaagtgacacatgggtcaaacaccggatgtacacattcagtctcgcgacagaccttaatagccgcaaggacggagaagccagttcccgctgctctggcgagtttctgccccagaccgcaagaagcctaagttctttacaggccctgcaggccacagtggctaggaaaagtgtgctggtggtgcgacatggcgaaagggtagatcagatatttggtaaggcatggctgcagcaatgcagcacacccgatggtaagtactaccgaccagaccttaatttcccttgtagtctgccgcgacgatctcggggcattaaggatttcgaaaatgatccccccttgtccagctgtggtatcttccaatcaagaatcgccggcgatgccctcttagatagcggcatcagaatcagtagcgtattcgctagccctgctctcaggtgcgtgcaaaccgccaagctgatattagaggaacttaagttggagaagaagatcaaaatccgggtggagcccgggatctttgagtggactaagtgggaggccgggaaaactacgccaacccttatgtccttggaagagctgaaagaggccaatttcaacattgacaccgattatcggtcccttccttgggcttgcgctagcgtcaagaagatcaaaaggaaagaaaatggatcgtggtag

SEQ ID NO: 86277 - DNA, 1581 bp, Artificial Sequence
  derived and/or modified sequence
atggctgctggggagacccagctgtatgccaaggtgagcaacaagctgaagagccgcagcagccccagcctgctggagcccctgctggccatgggcttccctgtgcacacagccctgaaggccctggccgccactggaaggaagacagctgaggaggccctggcctggctgcatgaccactgcaatgaccccagcctggatgaccccatcccccaggagtatgccctcttcctgtgccccaccggccccctgctggagaagctgcaggagttctggagggagagcaagaggcagtgtgccaagaacagagcccacgaggtgttcccccacgtgaccctgtgtgacttcttcacctgtgaggaccagaaggtggagtgcctgtatgaggccctgaagagagctggggaccggctgctgggcagcttccccacagctgtgcccctggccctgcacagcagcatctcctacctgggcttctttgtgtctggcagccctgcagatgtgatccgggagtttgccatgacctttgccacagaggccagcctgctggccgactgcagcgtgaagccctgcaccaagcagctgcacctgaccctggcccacaagttctacccccaccaccagaggaccctggagcagctggcccgggccatccccctgggccacagctgccagtggacagctgccctgtacagccgggacatgagatttgtgcactaccagaccctgcgggccctcttccagtacaagccccagaatgtggatgagctgaccctgagccctggggactacatctttgtggaccccacccagcaggatgaggccagcgagggctgggtgattggcatcagccagaggacaggctgccggggcttcctgcctgagaactacacagaccgggccagcgagagtgacacctgggtgaagcacaggatgtacaccttcagcctggccacagacctgaacagcaggaaggatggagaggccagcagccgctgcagcggggagttcctgccccagacagcccggagcctgagcagcctgcaggccctgcaggccaccgtggccaggaagtctgtgctggtggtgagacatggagagcgggtggaccagatctttgggaaggcctggctgcagcagtgcagcaccccagatggcaagtactacagaccagacctgaacttcccctgcagcctgcccaggaggagccggggcatcaaggactttgaaaatgacccccccctgagcagctgtggcatcttccagagcagaattgctggagatgccctgctggacagcggcatccgcatcagctctgtgtttgccagccctgccctgcgctgtgtgcagacagccaagctgatcctggaggagctgaagctggagaagaagatcaagatccgggtggagcccggcatctttgagtggaccaagtgggaggccggcaagaccacccccaccctgatgagcctggaggagctgaaggaggccaacttcaacatcgacacagactaccgcagcctgccctgggcctgtgcctctgtgaagaagatcaagaggaaagaaaatggctcctggtag

SEQ ID NO: 86278 - DNA, 1581 bp, Artificial Sequence
  derived and/or modified sequence
atggccgccggcgagacccagctgtacgccaaggtgagcaacaagctgaaatctcgaagttccccttctctgctcgaacctctgttggctatgggttttccagtgcataccgccctcaaggcgttggcagcgacggggcgtaaaactgccgaggaggcactggcatggctccatgaccattgtaacgatccctccctggatgatccgatccctcaagaatatgcgctcttcctctgcccgacggggccgcttttggagaagttgcaggagttctggcgcgagagcaaacgccagtgtgccaaaaacagagcgcatgaagtctttccccacgtaacactctgtgacttttttacctgtgaagatcagaaggtcgaatgtctgtatgaggcactgaagcgggcaggggatcgactcctagggtcctttcccaccgccgttcctctcgctttgcattcctcaatttcctacttaggattctttgtgtcaggtagcccggccgatgttatcagagagttcgctatgacgttcgcaactgaagcctcactactggccgattgtagtgtcaaaccgtgtactaagcagttgcatctgacattggcccataagttttatccacaccatcagagaactcttgagcagctggcccgcgctatccctctaggccacagctgtcagtggaccgccgctctctacagcagagacatgcggtttgtccactaccagactctcagggccctgtttcagtataagccgcaaaatgttgacgaactgacactaagtcctggagactacatctttgtggatccgacacaacaagacgaagcgtccgaaggatgggtgatcgggatcagccagagaactggatgcagaggtttcctgcctgaaaactacacagatagagctagcgagagcgatacatgggtaaaacacagaatgtacaccttttcactggccactgatctgaactctcggaaggatggagaggccagcagtagatgcagcggggaattcctgccacagaccgccaggtcacttagcagccttcaggcgcttcaggcaacagtggcgcgaaagtccgtcctcgtcgtaaggcatggggagcgagtggatcagatctttgggaaggcttggctgcagcaatgtagtactccagacgggaagtactatagaccagatctgaacttcccatgctctctgccaagaaggtctcgcggcattaaggactttgagaacgacccgccactctcatcttgtggtatttttcagtcacggattgccggggacgccctgctggattcgggcattcgcatctcttcagtttttgcctctccagcactccgatgtgtgcaaacggctaagctcattctggaggaactgaaactggagaagaagataaagatacgcgtggagcccggtatttttgagtggacaaagtgggaggcgggaaagacaactccgacgctgatgtctttggaggagttgaaggaggctaattttaacatcgatacagattatcgcagtctgccttgggcctgtgcctctgtcaaaaaaattaagcggaaagagaacggatcctggtag

SEQ ID NO: 86279 - DNA, 1581 bp, Artificial Sequence
  derived and/or modified sequence
atggcagccggagaaacgcagctgtacgccaaggtgagcaacaagcttaaatctcgcagtagcccatctctcctggaaccgctgctggccatgggatttccggtgcacacggctctcaaggccctggccgctaccggaagaaaaactgccgaagaagccctggcctggcttcatgatcactgcaacgatccttctctggatgacccaattccccaggaatacgccctcttcttatgtcccactggcccattgctggagaaattacaggaattttggagagaaagcaagagacagtgcgcaaaaaatagagcccacgaggttttcccgcacgtgaccttgtgtgatttcttcacttgcgaggatcaaaaggtagaatgtctctatgaagctctgaaaagggcgggagatcgcttactggggtcattcccgaccgccgtgcccctggctttgcactcttccatctcctacctggggtttttcgtgagcggctcaccggctgatgtgatccgggagttcgcaatgacatttgccacagaagcttctctcctggcagactgttccgtgaaaccctgtacaaagcagttgcatctgactcttgctcacaaattttaccctcatcaccagcgaacgctggagcaattggcccgagcaataccccttggccactcttgtcagtggaccgccgctctgtactcacgggatatgcggttcgtgcactatcagaccctgcgcgctctgttccagtacaagccacagaacgtggatgaattgaccctcagtcccggagactacatcttcgttgatccaacacagcaggatgaggccagcgaaggctgggtgattggcatctctcagcgtaccggctgtagaggctttctgcccgaaaattatacagaccgggctagcgagagtgatacctgggttaagcatcgcatgtacaccttcagcctggccaccgatctgaacagtagaaaagatggggaggcttcctctaggtgtagtggtgagtttttgccccaaactgcacgctccttgagctcgctccaagccctgcaagcgacagtggctagaaaatcagtgctggttgttaggcacggcgaacgggttgatcagatttttggcaaggcctggcttcagcaatgtagtacgcctgatgggaaatactatcgcccagaccttaacttcccctgtagcctaccacgcaggtctagaggaataaaggatttcgaaaacgatcctcctctgagcagttgcggtatattccagtcccgcatcgcaggggacgccctcctggacagcgggattcggatcagttccgtattcgcctctcccgctcttcgctgcgtgcagacggccaagctcattttggaagagctgaaactagagaagaaaatcaaaatccgcgttgagccaggcatattcgaatggacgaagtgggaggcaggaaaaaccacgcccaccctcatgtccctggaggaacttaaagaggccaattttaatattgacacagactaccggtccctcccatgggcttgtgccagtgtcaaaaaaataaagagaaaggaaaacggctcatggtag

SEQ ID NO: 86280 - DNA, 1733 bp, Artificial Sequence
  derived and/or modified sequence
cgagcttcttggcctaagggcaggaagagatggcagcgggggagacgcagctctacgccaaggtctccaacaagctcaagagccgcagcagcccctcgctcctggagcccctcctggccatgggcttcccggtgcacaccgcgctgaaagcgttggcagccacggggaggaagacggcggaggaggccttggcctggctgcatgatcattgcaatgacccttccctagacgaccccatcccccaggagtatgcccttttcctctgtccaacggggcccctgctggaaaaacttcaagagttctggagagagagcaagcgccagtgtgcaaagaacagagctcatgaggtcttcccacacgtgacactctgtgacttcttcacgtgtgaagaccagaaggtggaatgcctgtacgaggcgctgaagagagctggagacaggctcctgggctccttccccacggccgtgcctctggctctccactcctccatcagctacctcggcttcttcgtcagtggcagccccgcagacgtcatccgggaattcgccatgaccttcgccacggaagcatctctcttagcagactgctccgtgaagccttgcaccaaacagctgcatctgaccttggcccacaagttctacccccaccaccagaggacgctggagcagctggccagagccatccccctgggccacagctgccagtggaccgcagcactctactcccgagacatgcgctttgtgcactaccagaccctgagagccctattccagtacaaaccccagaacgtggatgagctgacgctaagtcctggtgactacatctttgtggaccccacgcagcaggacgaagccagcgagggctgggtgattgggatctcacagcggacgggctgccggggcttcctgccggaaaactacacggatcgagccagtgagtctgacacgtgggtgaagcacaggatgtacaccttcagtctagccacagacctgaactccagaaaggatggtgaagccagcagcagatgcagcggggaatttcttccacaaacggcaaggagtcttagcagcttacaggccttgcaggctaccgttgcaaggaagagcgtgctggtggttcgccacggggagagagtggatcagatcttcgggaaggcatggctgcagcaatgctccactcctgatgggaaatactacaggccagacctgaatttcccctgcagtctgccaagacggagtcgtgggatcaaagactttgaaaacgatcccccattatcatcgtgtggcattttccagtccagaattgcaggggacgcgctactggacagtggtatcagaatcagctctgtgtttgcctccccagccctccgctgtgtgcagacggccaaactcatcctggaagaactcaaactggagaaaaaaatcaagatacgagtggaacctggaatctttgaatggacaaaatgggaagctggcaaaaccaccccaaccctcatgagcctggaagagctgaaagaggcaaatttcaacattgacactgattacagatcccttccctgggcatgtgcttctgtgaagaaaataaagaggaaggaaaatgggagttggtgaacccaccggtgaagaccctgacccacggggcgaacgcagcatttaactggaggaactggatctcaggcaactgagagccacggtgatgttgtcataacctcagagtggagaggcagaaaccat

SEQ ID NO: 86281 - protein, 147 aa, Artificial Sequence
  derived and/or modified sequence
MMTSTASTALCTARTGPPQRVWRRGSHRSHPRAKMCGKHWCGTSPLMSPLKAPTPTAGHRSCSACMDQMCSGTMWFEAMGPCTCPSHLAGTKGPSPCLSQNLRLNCRSLQAGSWGGGPSTQTPRWWLRVKAGKPPSGLSVKDSSVSR

SEQ ID NO: 86282 - DNA, 444 bp, Artificial Sequence
  derived and/or modified sequence
atgatgacctcaaccgcctctaccgccctgtgtaccgctagaacgggacctcctcagcgggtgtggcgccgggggagccataggagccaccctcgggccaaaatgtgcggtaaacactggtgtggaacttcccccctcatgagtccccttaaagcaccaactcccacagcaggacaccgctcctgcagcgcatgtatggatcagatgtgctctgggacgatgtggttcgaagcgatgggaccttgcacttgtccttcacatttggcgggtaccaaagggcccagcccatgtctgtcacaaaacctgcgtctgaactgtagaagccttcaggccggctcatggggaggcggccccagcacccagacacctcggtggtggctcagagtgaaagcgggtaagcctccctctggactaagtgtcaaagacagctcagttagcagatag

SEQ ID NO: 86283 - DNA, 444 bp, Artificial Sequence
  derived and/or modified sequence
atgatgaccagcacagccagcacagccctgtgcacagccaggactggaccaccccagagggtgtggaggcggggcagccacaggagccacccccgggccaagatgtgtgggaagcactggtgtggcaccagccccctgatgagccccctgaaggcccccacccccacagctggccacaggagctgcagcgcctgcatggaccagatgtgcagcggcaccatgtggtttgaggccatgggcccctgcacctgccccagccacctggccggcaccaagggccccagcccctgcctgagccagaacctgcggctgaactgccgcagcctgcaggccggctcctggggcggcggccccagcacccagaccccccgctggtggctgcgggtgaaggccggcaagccacccagcggcctgtctgtgaaggacagctctgtgtccaggtag

SEQ ID NO: 86284 - DNA, 444 bp, Artificial Sequence
  derived and/or modified sequence
atgatgaccagcaccgccagcaccgccctgtgcaccgcccggaccggtcctccgcagagggtgtggaggcggggtagtcaccggtctcaccccagggctaagatgtgcggcaaacactggtgcggtacaagccccctgatgagccccctcaaggcccccacccctactgctggccacaggtcatgctcagcctgcatggaccaaatgtgcagtgggacaatgtggtttgaagcaatgggtccgtgtacttgtccatcacacttagcgggcacaaaggggccgtctccttgtctctcgcagaatcttaggctcaattgtaggtccctgcaggccggatcctggggaggtgggccatccactcagacgccaagatggtggctccgagttaaggcagggaagccgcccagcgggttgagcgtaaaagattcatcagtgtcgagatag

SEQ ID NO: 86285 - DNA, 444 bp, Artificial Sequence
  derived and/or modified sequence
atgatgacttccaccgcctctacagctctgtgcacggccagaaccggacctccacagcgggtgtggagacggggttcgcaccgatcacacccacgcgctaagatgtgcggcaaacactggtgcggcacttccccactgatgtcccccctgaaagctcccacacccacagcaggccataggtcatgcagcgcctgcatggatcagatgtgctcaggtacaatgtggttcgaagccatgggaccatgtacctgtccgtcacacctggcaggcaccaaggggccaagtccgtgcctaagccagaatctgagactgaactgtaggtccctccaggcgggatcttggggaggaggcccaagcacacagacacctaggtggtggctgcgcgtgaaggccggaaagccaccatcaggactgtctgtaaaggacagcagcgtatcgaggtag

SEQ ID NO: 86286 - DNA, 444 bp, Artificial Sequence
  derived and/or modified sequence
atgatgaccagcaccgccagcaccgccctgtgcaccgccagaaccggccccccccagagagtgtggagaagaggcagccacagaagccaccccagagccaagatgtgcggcaagcactggtgcggcaccagccccctgatgagccccctgaaggcccccacccccaccgccggccacagaagctgcagcgcctgcatggaccagatgtgcagcggcaccatgtggttcgaggccatgggcccctgcacctgccccagccacctggccggcaccaagggccccagcccctgcctgagccagaacctgagactgaactgcagaagcctgcaggccggcagctggggcggcggccccagcacccagacccccagatggtggctgagagtgaaggccggcaagccccccagcggcctgagcgtgaaggacagcagcgtgagcagatag

SEQ ID NO: 86287 - protein, 50 aa, Artificial Sequence
  derived and/or modified sequence
MSNKDRHIDSSCSSFIKTEPSSPASLTDSVNHHSPGGSSDASGSYSSTMN

SEQ ID NO: 86288 - DNA, 171 bp, Artificial Sequence
  derived and/or modified sequence
atgagcaacaaggacaggcatattgactcaagctgctcatccttcattaaaaccgaaccctcgtctcctgcatctttaactgatagcgtaaaccatcattctcccggcgggagctctgatgcctctggaagttactcatccaccatgaacggtcatcagaacggtttgtag

SEQ ID NO: 86289 - DNA, 279 bp, Artificial Sequence
  derived and/or modified sequence
atgagtaacaaagaccggcacattgacagtagctgctctagttttataaagacagagccttcaagtccagcctctctgactgattctgttaaccatcactccccaggcggcagcagtgacgcctcaggctcatattcgagtaccatgaatgggcaccagaatgggctggattcccctccattgtaccctagcgccccaatcctgggcgggagcggacctgtgaggaagctgtatgacgactgttcttccacaattgtcgaggatccacagaccaagtag

SEQ ID NO: 86290 - DNA, 153 bp, Artificial Sequence
  derived and/or modified sequence
atgtccaacaaggaccggcacatcgacagttcctgctctagcttcattaagacagaaccttctagccccgcaagtctgaccgattctgtgaatcaccactccccggggggctcatccgacgcatccgggtcctacagttctactatgaactag

SEQ ID NO: 86291 - DNA, 171 bp, Artificial Sequence
  derived and/or modified sequence
atgagcaacaaggacagacacatcgacagcagctgcagcagcttcatcaagacagagcccagcagccctgccagcctgacagattctgtgaaccaccacagccctgggggcagcagtgatgccagcggcagctacagcagcaccatgaatggccaccagaatggcctgtag

SEQ ID NO: 86292 - DNA, 279 bp, Artificial Sequence
  derived and/or modified sequence
atgagcaacaaggacagacacatcgacagcagctgcagcagcttcatcaagacagagcccagcagccctgccagcctgacagattctgtgaaccaccacagccctgggggcagcagtgatgccagcggcagctacagcagcaccatgaatggccaccagaatggcctggacagcccccccctgtaccccagcgcccccatcctgggcggcagcggccctgtgaggaagctgtatgatgactgcagcagcaccatcgtggaggacccccagaccaagtag

SEQ ID NO: 86293 - DNA, 153 bp, Artificial Sequence
  derived and/or modified sequence
atgagcaacaaggacagacacatcgacagcagctgcagcagcttcatcaagacagagcccagcagccctgccagcctgacagattctgtgaaccaccacagccctgggggcagcagtgatgccagcggcagctacagcagcaccatgaactag

SEQ ID NO: 86294 - DNA, 171 bp, Artificial Sequence
  derived and/or modified sequence
atgagcaacaaggaccggcacatcgacagcagctgcagcagcttcataaaaacggagccgtcttcaccagcatccctgaccgactcagtcaaccaccatagccctggggggagttcagatgctagtgggtcctacagctccacaatgaatggacaccagaacgggctgtag

SEQ ID NO: 86295 - DNA, 279 bp, Artificial Sequence
  derived and/or modified sequence
atgagcaacaaggaccggcacatcgacagcagctgcagcagcttcatcaagaccgaaccctcctctccggccagcctaactgactctgttaaccaccactccccaggcggctcatcagatgcgagtgggagctatagcagcaccatgaacgggcaccagaatggtcttgattcacctccattgtacccctctgccccgattctgggagggtccggtccagtccgtaagctctatgacgattgttcttccacaatagtggaggaccctcaaaccaaatag

SEQ ID NO: 86296 - DNA, 153 bp, Artificial Sequence
  derived and/or modified sequence
atgagcaacaaggaccggcacatcgacagcagctgcagcagcttcattaagacagagccgtcatctccagcctccttgacagatagcgtcaatcatcactctccagggggatcgtctgacgccagtggttcctattccagtaccatgaactag

SEQ ID NO: 86297 - DNA, 171 bp, Artificial Sequence
  derived and/or modified sequence
atgtctaacaaggacagacacatcgatagcagctgctcctccttcataaaaacagagcctagctctcccgcatccttaactgatagtgtcaaccatcattcacctgggggaagcagcgatgcgtctggttcctactcctctacgatgaatggccaccagaacggcctctag

SEQ ID NO: 86298 - DNA, 279 bp, Artificial Sequence
  derived and/or modified sequence
atgagcaataaggatagacacatcgatagtagctgttcaagctttattaagaccgaaccatccagcccggcatctctgacagactcggtcaaccaccactccccgggaggaagcagtgatgcctcagggtcctattcaagcaccatgaacggacatcagaacggccttgactcacccccactatacccctctgctcccattttggggggttccgggccagtgaggaagttatatgatgattgtagttccacaatcgttgaggacccacaaacgaagtag

SEQ ID NO: 86299 - DNA, 153 bp, Artificial Sequence
  derived and/or modified sequence
atgtccaataaggatagacacattgactcatcatgctcaagcttcatcaagaccgagccttctagccccgcttccttaacagacagtgtgaatcatcactcccctggaggctctagtgatgccagtgggtcttacagcagtacaatgaattag

SEQ ID NO: 86300 - DNA, 171 bp, Artificial Sequence
  derived and/or modified sequence
atgagcaacaaggacagacacatcgacagcagctgcagcagcttcatcaagaccgagcccagcagccccgccagcctgaccgacagcgtgaaccaccacagccccggcggcagcagcgacgccagcggcagctacagcagcaccatgaacggccaccagaacggcctgtag

SEQ ID NO: 86301 - DNA, 279 bp, Artificial Sequence
  derived and/or modified sequence
atgagcaacaaggacagacacatcgacagcagctgcagcagcttcatcaagaccgagcccagcagccccgccagcctgaccgacagcgtgaaccaccacagccccggcggcagcagcgacgccagcggcagctacagcagcaccatgaacggccaccagaacggcctggacagcccccccctgtaccccagcgcccccatcctgggcggcagcggccccgtgagaaagctgtacgacgactgcagcagcaccatcgtggaggacccccagaccaagtag

SEQ ID NO: 86302 - DNA, 153 bp, Artificial Sequence
  derived and/or modified sequence
atgagcaacaaggacagacacatcgacagcagctgcagcagcttcatcaagaccgagcccagcagccccgccagcctgaccgacagcgtgaaccaccacagccccggcggcagcagcgacgccagcggcagctacagcagcaccatgaactag

SEQ ID NO: 86303 - protein, 470 aa, Artificial Sequence
  derived and/or modified sequence
MWRECDWGLGAVKSDLACVPSAKRLLCRMSNKDRHIDSSCSSFIKTEPSSPASLTDSVNHHSPGGSSDASGSYSSTMNGHQNGLDSPPLYPSAPILGGSGPVRKLYDDCSSTIVEDPQTKCEYMLNSMPKRLCLVCGDIASGYHYGVASCEACKAFFKRTIQGNIEYSCPATNECEITKRRRKSCQACRFMKCLKVGMLKEGVRLDRVRGGRQKYKRRIDAENSPYLNPQLVQPAKKPLLWSDPADNKIVSHLLVAEPEKIYAMPDPTVPDSDIKALTTLCDLADRELVVIIGWAKHIPGFSTLSLADQMSLLQSAWMEILILGVVYRSLSFEDELVYADDYIMDEDQSKLAGLLDLNNAILQLVKKYKSMKLEKEEFVTLKAIALANSDSMHIEDVEAVQKLQDVLHEALQDYEAGQHMEDPRRAGKMLMTLPLLRQTSTKAVQHFYNIKLEGKVPMHKLFLEMLEAKV

SEQ ID NO: 86304 - DNA, 1413 bp, Artificial Sequence
  derived and/or modified sequence
atgtggagagagtgcgattggggtctcggcgcggttaagtcagatctcgcatgtgtgccatcagccaaacggcttctatgccgaatgagtaataaagatagacacatcgactcctcctgcagcagttttatcaagaccgaacccagctccccagcatcccttaccgatagcgtgaatcaccacagtcctggtggtagttcggacgcctcaggcagctattcatccacgatgaatggccaccagaatggactcgactccccaccactttatccttcagctccaattttgggcggtagcggtccagtccgcaagctgtacgacgactgttcatccaccatcgtggaagatccacagacaaaatgtgaatacatgctgaatagcatgcccaagagactgtgcctggtatgcggtgatatcgcctccgggtatcactacggggtcgcttcctgcgaggcctgcaaggcttttttcaagcgcacaatccagggcaacattgagtactcttgcccggctactaacgagtgcgaaataacgaaaaggcgacgcaaatcctgtcaggcgtgccggttcatgaagtgcttgaaggtgggcatgctgaaggagggagtccgcctcgatcgcgtacgtggcgggagacaaaaatataaacggagaattgatgccgaaaactcaccgtacctgaatccacaattagttcagcctgcgaagaagccattgctgtggagcgaccccgccgataataagatcgtcagccacttgcttgtcgcagaacccgaaaagatctatgccatgcctgatcctacagtacccgatagcgacatcaaggccctaacaaccctatgcgatttggccgaccgggagctggtggtcatcatcgggtgggcaaagcacattcccggtttcagcacgctctctcttgctgaccagatgagcctgctccagtcggcttggatggagatactcattttaggcgtggtttacagaagtctgtccttcgaggatgaactggtatatgcggatgactatatcatggacgaagatcagtcaaaacttgcgggtttattggatctcaacaatgctattctgcaactggttaagaaatataaatccatgaagctcgaaaaggaggaatttgttacactgaaagcaatcgccctggccaattccgactcaatgcatatagaagatgtcgaggcggtccagaagcttcaggacgtgcttcacgaagcattgcaggattatgaggctggccaacatatggaagatcctcggcgagcaggcaagatgcttatgaccctccccctcctcaggcagacgagcacaaaggccgtgcagcacttttacaacatcaagctagagggtaaggtgccgatgcacaagttatttcttgagatgttggaggctaaggtctag

SEQ ID NO: 86305 - DNA, 1413 bp, Artificial Sequence
  derived and/or modified sequence
atgtggagagaatgtgactggggcctgggcgctgtgaagagtgacctggcctgtgtgcccagcgccaagaggctgctgtgcaggatgagcaacaaggacagacacatcgacagcagctgcagcagcttcatcaagacagagcccagcagccctgccagcctgacagattctgtgaaccaccacagccctgggggcagcagtgatgccagcggcagctacagcagcaccatgaatggccaccagaatggcctggacagcccccccctgtaccccagcgcccccatcctgggcggcagcggccctgtgaggaagctgtatgatgactgcagcagcaccatcgtggaggacccccagaccaagtgtgagtacatgctgaacagcatgcccaagaggctgtgcctggtgtgtggggacatcgccagcggctaccactatggagtggccagctgtgaggcctgcaaggccttcttcaagaggaccatccagggcaacatcgagtacagctgcccagccaccaatgaatgtgagatcaccaagagaagaaggaagagctgccaggcctgccgcttcatgaagtgcctgaaggtgggcatgctgaaggagggcgtgcggctggacagagtgcggggcggccggcagaagtacaagagaagaattgatgctgagaacagcccctacctgaacccccagctggtgcagcctgccaagaagcccctgctgtggagcgaccctgctgacaacaagatcgtgagccacctgctggtggccgagcctgagaagatctatgccatgccagaccccaccgtgcctgacagcgacatcaaggccctgaccaccctgtgtgacctggccgaccgggagctggtggtgatcatcggctgggccaagcacatccctggcttcagcaccctgagcctggccgaccagatgagcctgctgcagagcgcctggatggagatcctgatcctgggcgtggtgtaccgcagcctgagctttgaagatgagctggtgtatgcagatgactacatcatggatgaggaccagagcaagctggccggcctgctggacctgaacaatgccatcctgcagctggtgaagaagtacaagtccatgaagctggagaaggaggagtttgtgaccctgaaggccatcgccctggccaacagcgacagcatgcacattgaagatgtggaggccgtgcagaagctgcaggatgtgctgcacgaggccctgcaggactatgaggccggccagcacatggaggacccccggcgggccggcaagatgctgatgaccctgcccctgctgcggcagaccagcaccaaggctgtgcagcacttctacaacatcaagctggagggcaaggtgcccatgcacaagctgttcctggagatgctggaggccaaggtgtag

SEQ ID NO: 86306 - DNA, 1413 bp, Artificial Sequence
  derived and/or modified sequence
atgtggcgggagtgcgactggggcctgggcgccgtgaagagcgaccttgcctgtgtcccctcagctaagcgcctgctgtgcagaatgtcaaacaaggacagacacatcgatagcagttgcagcagcttcataaagaccgagccctccagccccgcaagtctgacagacagtgtcaaccatcatagtcccggagggtcatcagatgccagcgggtcttattctagtactatgaacgggcaccagaatggcctggactcacccccactttatccctcagcacctatcctgggcggctctggtccagtcaggaagctttacgatgactgttcttctactatcgtggaagaccctcagacaaagtgtgagtatatgctcaactccatgcccaagaggctctgcctagtctgtggcgacatcgcttctggttatcactacggtgtggcttcatgcgaagcttgcaaggccttcttcaagaggaccatccagggcaacatcgagtatagctgccctgctaccaacgagtgcgagataaccaaaaggcgtcggaaaagctgtcaggcctgccgctttatgaaatgtctgaaggttgggatgctaaaagagggcgtacggcttgatcgggttcgcggagggcggcagaagtataagaggcggatcgatgcagagaactctccctacctaaatccccaacttgtgcagcctgctaagaaaccattgctctggtctgatccagccgataataaaatcgtgtcccacctgcttgtcgctgaaccagagaagatttatgccatgcctgatcccaccgtgcccgatagcgatattaaggctctgaccaccctctgtgatctggcggacagagagcttgtcgttatcataggttgggcaaagcacatacccggcttttcgactctttcccttgctgatcaaatgtcattgctgcagtctgcctggatggagattttgatcctcggagtcgtttacagatcattgagcttcgaagatgaacttgtctatgcagacgactacattatggacgaagaccaaagcaagctggccgggttgctggacctgaacaatgctatcttacaactcgtgaaaaaatacaagagcatgaaactggagaaagaggaattcgtgactctgaaggcaatagcactcgctaattccgatagcatgcacatagaggatgttgaggccgtccagaaactgcaggatgttctgcacgaagcactgcaggattatgaggccggacaacacatggaagatcccaggcgggccgggaagatgctcatgacactgcctctcttacgccaaacctccacgaaggcggttcagcatttctataacattaagctggaggggaaagttccgatgcacaagctgtttttggaaatgttggaagccaaagtttag

SEQ ID NO: 86307 - DNA, 1413 bp, Artificial Sequence
  derived and/or modified sequence
atgtggcgcgagtgcgattgggggcttggcgcagtgaaatccgatctcgcttgcgtcccatccgctaaaaggttgctgtgtcggatgtccaacaaagaccggcacatcgattcttcatgttccagctttattaagacagagccaagcagtccagcttccctgacagacagtgtgaatcatcatagccccggaggctcctctgacgcctcggggagctatagttcaactatgaatggacaccagaacggactcgatagcccacccttatacccatccgctcctattctgggaggcagcggacctgtgcggaagttgtacgatgattgcagttcgacgatcgtggaggatccacagactaagtgcgagtatatgctcaattctatgcccaagaggctgtgtcttgtttgtggtgatatcgcctcgggctatcactatggggtggctagctgtgaggcctgcaaggccttcttcaagagaaccatccaaggtaacatcgaatatagctgtcctgccaccaacgagtgtgagatcacgaagagaagaaggaaatcatgtcaagcatgccggttcatgaaatgtctgaaggtgggaatgctaaaggagggcgtgaggctggaccgggtgcgtggcggtagacagaaatataaaagacggatcgatgctgagaatagtccttacctcaacccccaacttgttcagcccgctaagaagccgctgctttggtcagatcctgccgacaataagattgtttcccatttactagtggctgaacctgagaaaatttacgccatgccagacccaacggttcccgactcagacatcaaggcactgactaccctgtgcgatttagctgaccgagaactggttgtgataatcggctgggccaagcacattcctggcttctctactctctcgctagcagatcagatgtccttacttcaatcagcctggatggaaatcctaattctgggggttgtgtataggtctctctccttcgaggacgagctcgtttacgccgacgattacattatggacgaggatcagagcaaacttgccggacttcttgatctgaacaacgccattctgcagctggttaaaaaatacaagtccatgaagctcgaaaaagaggaattcgtaaccctgaaggccattgcattggctaactcggactccatgcatatcgaggacgtggaggcggtgcaaaagttgcaggacgtcctccacgaggctttgcaggattacgaagcagggcagcacatggaggatccgagacgggcaggaaagatgctcatgacactccccctgttaaggcagacatcaacgaaggccgtccagcacttctataacattaaactggaggggaaggtgcccatgcacaagttgttcttggaaatgctggaggcgaaggtgtag

SEQ ID NO: 86308 - DNA, 1413 bp, Artificial Sequence
  derived and/or modified sequence
atgtggagagagtgcgactggggcctgggcgccgtgaagagcgacctggcctgcgtgcccagcgccaagagactgctgtgcagaatgagcaacaaggacagacacatcgacagcagctgcagcagcttcatcaagaccgagcccagcagccccgccagcctgaccgacagcgtgaaccaccacagccccggcggcagcagcgacgccagcggcagctacagcagcaccatgaacggccaccagaacggcctggacagcccccccctgtaccccagcgcccccatcctgggcggcagcggccccgtgagaaagctgtacgacgactgcagcagcaccatcgtggaggacccccagaccaagtgcgagtacatgctgaacagcatgcccaagagactgtgcctggtgtgcggcgacatcgccagcggctaccactacggcgtggccagctgcgaggcctgcaaggccttcttcaagagaaccatccagggcaacatcgagtacagctgccccgccaccaacgagtgcgagatcaccaagagaagaagaaagagctgccaggcctgcagattcatgaagtgcctgaaggtgggcatgctgaaggagggcgtgagactggacagagtgagaggcggcagacagaagtacaagagaagaatcgacgccgagaacagcccctacctgaacccccagctggtgcagcccgccaagaagcccctgctgtggagcgaccccgccgacaacaagatcgtgagccacctgctggtggccgagcccgagaagatctacgccatgcccgaccccaccgtgcccgacagcgacatcaaggccctgaccaccctgtgcgacctggccgacagagagctggtggtgatcatcggctgggccaagcacatccccggcttcagcaccctgagcctggccgaccagatgagcctgctgcagagcgcctggatggagatcctgatcctgggcgtggtgtacagaagcctgagcttcgaggacgagctggtgtacgccgacgactacatcatggacgaggaccagagcaagctggccggcctgctggacctgaacaacgccatcctgcagctggtgaagaagtacaagagcatgaagctggagaaggaggagttcgtgaccctgaaggccatcgccctggccaacagcgacagcatgcacatcgaggacgtggaggccgtgcagaagctgcaggacgtgctgcacgaggccctgcaggactacgaggccggccagcacatggaggaccccagaagagccggcaagatgctgatgaccctgcccctgctgagacagaccagcaccaaggccgtgcagcacttctacaacatcaagctggagggcaaggtgcccatgcacaagctgttcctggagatgctggaggccaaggtgtag

SEQ ID NO: 86309 - DNA, 565 bp, Artificial Sequence
  derived and/or modified sequence
agtccttgattaggagagtgtgagagctttggtcccaactggctgtgcctataggcttgtcactaggagaacatttgtgttaattgcactgtgctctgtcaaggaaactttgatttatagctggggtgcacaaataatggttgccggtcgcacatggattcggtagaactttgccttcctgaatctttttccctgcactacgaggaagaacttgaatgagacctgcctcatcagtcatgggatcatagtgtcacagatggaaaagcaactatcagctgaattgtactgaactacacacttggctaattcatcttattgctctacacatctaaaggaaggctcattctgttcttggagtctagacagcatcaggagttgggctcaggcttctctgcagaatgtcaaacaaagatcgacacattgattccagctgttcgtccttcatcaagacggaaccttccagcccagcctccctgacggacagcgtcaaccaccacagccctggtggctcttcagacgccagtgggagctacagttcaaccatgaatggccatcagaacggact

SEQ ID NO: 86310 - DNA, 5365 bp, Artificial Sequence
  derived and/or modified sequence
aagtccttgattaggagagtgtgagagctttggtcccaactggctgtgcctataggcttgtcactaggagaacatttgtgttaattgcactgtgctctgtcaaggaaactttgatttatagctggggtgcacaaataatggttgccggtcgcacatggattcggtagaactttgccttcctgaatctttttccctgcactacgaggaagaaactgatgtaaagttcccatcatgaatgtaattaggaattgtgcatttagatcctgaatgtggcgagaatgtgattggggtcttggagcagtcaagtctgatctggcctgtgttccttcagctaaaaggcttctctgcagaatgtcaaacaaagatcgacacattgattccagctgttcgtccttcatcaagacggaaccttccagcccagcctccctgacggacagcgtcaaccaccacagccctggtggctcttcagacgccagtgggagctacagttcaaccatgaatggccatcagaacggacttgactcgccacctctctacccttctgctcctatcctgggaggtagtgggcctgtcaggaaactgtatgatgactgctccagcaccattgttgaagatccccagaccaagtgtgaatacatgctcaactcgatgcccaagagactgtgtttagtgtgtggtgacatcgcttctgggtaccactatggggtagcatcatgtgaagcctgcaaggcattcttcaagaggacaattcaaggcaatatagaatacagctgccctgccacgaatgaatgtgaaatcacaaagcgcagacgtaaatcctgccaggcttgccgcttcatgaagtgtttaaaagtgggcatgctgaaagaaggggtgcgtcttgacagagtacgtggaggtcggcagaagtacaagcgcaggatagatgcggagaacagcccatacctgaaccctcagctggttcagccagccaaaaagccattgctctggtctgatcctgcagataacaagattgtctcacatttgttggtggctgaaccggagaagatctatgccatgcctgaccctactgtccccgacagtgacatcaaagccctcactacactgtgtgacttggccgaccgagagttggtggttatcattggatgggcgaagcatattccaggcttctccacgctgtccctggcggaccagatgagccttctgcagagtgcttggatggaaattttgatccttggtgtcgtataccggtctctttcgtttgaggatgaacttgtctatgcagacgattatataatggacgaagaccagtccaaattagcaggccttcttgatctaaataatgctatcctgcagctggtaaagaaatacaagagcatgaagctggaaaaagaagaatttgtcaccctcaaagctatagctcttgctaattcagactccatgcacatagaagatgttgaagccgttcagaagcttcaggatgtcttacatgaagcgctgcaggattatgaagctggccagcacatggaagaccctcgtcgagctggcaagatgctgatgacactgccactcctgaggcagacctctaccaaggccgtgcagcatttctacaacatcaaactagaaggcaaagtcccaatgcacaaactttttttggaaatgttggaggccaaggtctgactaaaagctccctgggccttcccatccttcatgttgaaaaagggaaaataaacccaagagtgatgtcgaagaaacttagagtttagttaacaacatcaaaaatcaacagactgcactgataatttagcagcaagactatgaagcagctttcagattcctccataggttcctgatgagtttctttctactttctccatcatcttctttcctctttcttcccacatttctctttctctttattttttctccttttcttctttcacctcccttatttctttgcttctttcattcctagttcccattctcctttattttcttcccgtctgcctgccttctttcttttctttacctactctcattcctctcttttctcatccttccccttttttctaaatttgaaatagctttagtttaaaaaaaaatcctcccttccccctttcctttccctttctttcctttttccctttccttttccctttcctttcctttcctcttgaccttctttccatctttctttttcttccttctgctgctgaacttttaaaagaggtctctaactgaagagagatggaagccagccctgccaaaggatggagatccataatatggatgccagtgaacttattgtgaaccatactgtccccaatgactaaggaatcaaagagagagaaccaacgttcctaaaagtacagtgcaacatatacaaattgactgagtgcagtattagatttcatgggagcagcctctaattagacaacttaagcaacgttgcatcggctgcttcttatcattgcttttccatctagatcagttacagccatttgattccttaattgttttttcaagtcttccaggtatttgttagtttagctactatgtaactttttcagggaatagtttaagctttattcattcatgcaatactaaagagaaataagaatactgcaattttgtgctggctttgaacaattacgaacaataatgaaggacaaatgaatcctgaaggaagatttttaaaaatgttttgtttcttcttacaaatggagatttttttgtaccagctttaccacttttcagccatttattaatatgggaatttaacttactcaagcaatagttgaagggaaggtgcatattatcacggatgcaatttatgttgtgtgccagtctggtcccaaacatcaatttcttaacatgagctccagtttacctaaatgttcactgacacaaaggatgagattacacctacagtgactctgagtagtcacatatataagcactgcacatgagatatagatccgtagaattgtcaggagtgcacctctctacttgggaggtacaattgccatatgatttctagctgccatggtggttaggaatgtgatactgcctgtttgcaaagtcacagaccttgcctcagaaggagctgtgagccagtattcatttaagaggcaataaggcaaatgccagaattaaaaaaaaaaatcatcaaagacagaaaatgcctgaccaaattctaaaacctaatccatataagtttattcatttaggaatgttcgtttaaattaatctgcagtttttaccaagagctaagccaatatatgtgcttttcaaccagtattgtcacagcatgaaagtcaagtcaggttccagactgttaagaggtgtaatctaatgaagaaatcaattagatgccccgaaatctacagtcgctgaataaccaataaacagtaacctccatcaaatgctataccaatggaccagtgttagtagctgctccctgtattatgtgaacagtcttattctatgtacacagatgtaattaaaattgtaatcctaacaaacaaaagaaatgtagttcagcttttcaatgtttcatgtttgctgtgcttttctgaattttatgttgcattcaaagactgttgtcttgttcttgtggtgtttggattcttgtggtgtgtgcttttagacacagggtagaattagagacaatattggatgtacaattcctcaggagactacagtagtatattctattccttaccagtaataaggttcttcctaataataattaagagattgaaactccaaacaagtattcattatgaacagatacacatcaaaatcataataatattttcaaaacaaggaataatttctctaatggtttattatagaataccaatgtatagcttagaaataaaactttgaatatttcaagaatatagataagtctaatttttaaatgctgtatatatggctttcactcaatcatctctcagatgttgttattaactcgctctgtgttgttgcaaaactttttggtgcagattcgtttccaaaactattgctactttgtgtgctttaaacaaaataccttgggttgatgaaacatcaacccagtgctaggaatactgtgtatctatcattagctatatgggactatattgtagattgtggtttctcagtagagaagtgactgtagtgtgattctagataaatcatcattagcaattcattcagatggtcaataacttgaaatttatagctgtgataggagttcagaaattggcacatccctttaaaaataacaacagaaaatacaactcctgggaaaaaaggtgctgattctataagattatttatatatgtaagtgtttaaaaagattattttccagaaagtttgtgcagggtttaagttgctactattcaactacactatatataaataaaatatatacaatatatacattgttttcactgtatcacattaaagtacttgggcttcagaagtaagagccaaccaactgaaaacctgagatggagatatgttcaaagaatgagatacaattttttagttttcagtttaagtaactctcagcattacaaaagagtaagtatctcacaaataggaaataaaactaaaacgtggatttaaaaagaactgcacgggctttagggtaaatgctcatcttaaacctcactagagggaagtcttctcaagtttcaagcaagaccatttacttaatgtgaagttttggaaagttataaaggtgtatgttttagccatatgattttaattttaattttgcttcttttaggttcgttcttatttaaagcaatatgattgtgtgactccttgtagttacacttgtgtttcaatcagatcagattgttgtatttattccactattttgcatttaaatgataacataaaagatataaaaaatttaaaactgctatttttcttatagaagagaaaatgggtgttggtgattgtattttaattatttaagcgtctctgtttacctgcctaggaaaacattttatggcagtcttatgtgcaaagatcgtaaaaggacaaaaaatttaaactgcttataataatccaggagttgcattatagccagtagtaaaaataataataataataataaaaccatgtctatagctgtagatgggcttcacatctgtaaagcaatcaattgtatatttttgtgatgtgtaccatactgtgtgctccagcaaatgtccatttgtgtaaatgtatttattttatattgtatatattgttaaatgcaaaaaggagatatgattctgtaactccaatcagttcagatgtgtaactcaaattattatgcctttcaggatgatggtagagcaatattaaacaagcttccacttt

SEQ ID NO: 86311 - protein, 231 aa, Artificial Sequence
  derived and/or modified sequence
MSVEHADIWVKSYSLYSRERYICNSGFKRKAGTSSLTECVLNKATNVAHWTTPSLKCIRDPALVHQRPAPPSTVTTAGVTPQPESLSPSGKEPAASSPSSNNTAATTAAIVPGSQLMPSKSPSTGTTEISSHESSHGTPSQTTAKNWELTASASHQPPGVYPQGHSDTTVAISTSTVLLCGLSAVSLLACYLKSRQTPPLASVEMEAMEALPVTWGTSSRDEDLENCSHHL

SEQ ID NO: 86312 - protein, 202 aa, Artificial Sequence
  derived and/or modified sequence
MAPRRARGCRTLGLPALLLLLLLRPPATRGDPALVHQRPAPPSTVTTAGVTPQPESLSPSGKEPAASSPSSNNTAATTAAIVPGSQLMPSKSPSTGTTEISSHESSHGTPSQTTAKNWELTASASHQPPGVYPQGHSDTTVAISTSTVLLCGLSAVSLLACYLKSRQTPPLASVEMEAMEALPVTWGTSSRDEDLENCSHHL

SEQ ID NO: 86313 - DNA, 696 bp, Artificial Sequence
  derived and/or modified sequence
atgtctgtagagcatgccgacatttgggtcaaatcctattcattatatagtagggaaaggtatatctgtaacagtggattcaaaagaaaagccggcacatccagcctgactgaatgtgtgctgaataaagctactaatgttgcccattggaccacccctagcttgaaatgcatacgggaccctgccctcgtgcaccagcgtccagcacccccgtccaccgtgacaacagctggagtgacaccccaacccgagtctctctcacctagtggtaaggaaccagctgcctccagcccttcatctaataacaccgccgcaacaacggccgccatcgtgcctggctctcagctgatgccgtccaaatcccctagcacaggcactaccgagatcagtagtcatgagagctctcatggaacccccagtcagacaaccgccaagaattgggagctgacggcaagcgcatcgcaccagcccccgggcgtgtacccacagggacacagcgatacaactgtggcaatttccacgtccacagtcctgttgtgcggcctttcggcagtttcactcttggcatgctacttgaagtccagacagacccctcctctggcctcagtggagatggaggctatggaggccctgcctgttacctgggggacatctagtagggacgaagacctggaaaactgttcgcaccacttgtag

SEQ ID NO: 86314 - DNA, 609 bp, Artificial Sequence
  derived and/or modified sequence
atggcaccaagaagggctagggggtgccgcaccttggggctccctgctttgctcctattgctactgttaaggccccctgccacgaggggggatcctgctctagtgcatcagaggccagcacccccctcaaccgtcacaacagcaggcgtaaccccacagcccgaatcactgagccccagtggcaaagagcccgctgcctcttctcccagctcaaataacactgccgccactaccgccgccatcgtccctggatcccagttgatgccctccaaatcgccgagcactgggacaaccgagatctcatcgcatgagtctagccacggtactccaagccagacaactgccaaaaattgggaactgaccgcatccgcttctcaccagccacctggcgtttatccacagggccacagtgacactaccgtggccattagcaccagcaccgtgcttctttgcggcctctctgctgtaagccttctggcatgttacttaaaaagtaggcagactcccccgttggcatccgttgagatggaggccatggaggcccttccagtaacgtggggcaccagctctagggatgaggatctcgaaaattgcagtcaccatctctag

SEQ ID NO: 86315 - DNA, 1333 bp, Artificial Sequence
  derived and/or modified sequence
atggccccgcggcgggcgcgcggctgccggaccctcggtctcccggcgctgctactgctgctgctgctccggccgccggcgacgcggggagaccctgccctggttcaccaaaggccagcgccaccctccacagtaacgacggcaggggtgaccccacagccagagagcctctccccttctggaaaagagcccgcagcttcatctcccagctcaaacaacacagcggccacaacagcagctattgtcccgggctcccagctgatgccttcaaaatcaccttccacaggaaccacagagataagcagtcatgagtcctcccacggcaccccctctcagacaacagccaagaactgggaactcacagcatccgcctcccaccagccgccaggtgtgtatccacagggccacagcgacaccactgtggctatctccacgtccactgtcctgctgtgtgggctgagcgctgtgtctctcctggcatgctacctcaagtcaaggcaaactcccccgctggccagcgttgaaatggaagccatggaggctctgccggtgacttgggggaccagcagcagagatgaagacttggaaaactgctctcaccacctatgaaactcggggaaaccagcccagctaagtccggagtgaaggagcctctctgctttagctaaagacgactgagaagaggtgcaaggaagcgggctccaggagcaagctcaccaggcctctcagaagtcccagcaggatctcacggactgccgggtcggcgcctcctgcgcgagggagcaggttctccgcattcccatgggcaccacctgcctgcctgtcgtgccttggacccagggcccagcttcccaggagagaccaaaggcttctgagcaggatttttatttcattacagtgtgagctgcctggaatacatgtggtaatgaaataaaaaccctgccccgaatcttccgtccctcatcctaactttcagttcacagagaaaagtgacatacccaaagctctctgtcaattacaaggcttctcctggcgtgggagacgtctacagggaagacaccagcgtttgggcttctaaccaccctgtctccagctgctctgcacacatggacagggacctgggaaaggtgggagagatgctgagcccagcgaatcctctccattgaaggattcaggaagaagaaaactcaactcagtgccattttacgaatatatgcgtttatatttatacttccttgtctattatatctatacattatatattatttgtattttgacattgtaccttgtataaacaaaataaaacatctattttcaatatttttaaaatgca

SEQ ID NO: 86316 - DNA, 696 bp, Artificial Sequence
  derived and/or modified sequence
atgtctgtggagcacgccgacatctgggtgaagagctacagcctgtacagccgggagcgctacatctgcaacagcggcttcaagaggaaggccggcaccagcagcctgacagaatgtgtgctgaacaaggccaccaacgtggcccactggaccacccccagcctgaagtgcatccgggaccctgccctggtgcaccagaggcctgccccacccagcacagtgaccacagctggggtgaccccccagcctgagagcctgagccccagcggcaaggagcctgctgccagcagccccagcagcaacaacacagctgccaccacagctgccatcgtgcccggcagccagctgatgcccagcaagagccccagcacaggcaccacagagatcagcagccatgagagcagccacggcacccccagccagaccacagccaagaactgggagctgacagccagcgccagccaccagcccccaggagtgtacccccagggccacagcgacaccaccgtggccatcagcaccagcacagtgctgctgtgtggcctgtctgctgtgtccctgctggcctgctacctgaagagccggcagaccccacccctggcctctgtggagatggaggccatggaggccctgcctgtgacctggggcaccagcagcagagatgaggacctggagaactgcagccaccacctgtag

SEQ ID NO: 86317 - DNA, 609 bp, Artificial Sequence
  derived and/or modified sequence
atggccccccggcgggcccggggctgcaggaccctgggcctgcctgccctgctgctgctgctgctgctgcggcccccagccaccaggggggaccctgccctggtgcaccagaggcctgccccacccagcacagtgaccacagctggggtgaccccccagcctgagagcctgagccccagcggcaaggagcctgctgccagcagccccagcagcaacaacacagctgccaccacagctgccatcgtgcccggcagccagctgatgcccagcaagagccccagcacaggcaccacagagatcagcagccatgagagcagccacggcacccccagccagaccacagccaagaactgggagctgacagccagcgccagccaccagcccccaggagtgtacccccagggccacagcgacaccaccgtggccatcagcaccagcacagtgctgctgtgtggcctgtctgctgtgtccctgctggcctgctacctgaagagccggcagaccccacccctggcctctgtggagatggaggccatggaggccctgcctgtgacctggggcaccagcagcagagatgaggacctggagaactgcagccaccacctgtag

SEQ ID NO: 86318 - DNA, 696 bp, Artificial Sequence
  derived and/or modified sequence
atgagcgtggagcacgccgacatctgggtgaagagctacagcctgtattccagagagagatacatctgcaactccgggttcaagagaaaagcaggcacgtctagcttgactgaatgcgtcctcaacaaggccacaaatgtagcccattggacgactccaagccttaagtgcattcgcgaccctgccttggtgcaccagagaccagccccgccctcaaccgtaactactgctggggtgactccgcagccggagagtttgagcccaagcggcaaggagcccgccgcgtcgtcccctagctcaaataatacagctgctacaacagcagcaattgtgccaggatcccagctgatgccgtcaaagtcgcctagcacgggtactactgagatcagtagtcacgagtctagccacggcaccccaagccagaccactgccaaaaactgggagctcaccgcctccgcctcacaccaaccaccaggagtttacccccagggacattccgacacaaccgtggcaatcagcacatcgaccgtgcttctgtgtggtctgtctgctgtttcattactggcctgctacctcaagagccgacagacacccccactggccagcgtggaaatggaggccatggaagctctccccgtgacctggggcacatcttccagagacgaagatcttgagaattgttcccatcacctctag

SEQ ID NO: 86319 - DNA, 609 bp, Artificial Sequence
  derived and/or modified sequence
atggccccccggcgggcccggggctgccggaccctgggcctgcccgccctcctccttttgcttcttcttcgcccccccgccaccaggggggatcctgcccttgtacaccagcgacccgcgccaccttccactgtgactactgcaggggttacgccccagcctgaatcgctttcaccatcagggaaagagccagccgccagtagcccaagctctaacaacacggccgccaccaccgcggcaattgttcccggtagccagctgatgccttcaaaatctcccagcaccggtacaacggagatctcctctcatgaatccagccatggcactccttcacagaccactgctaagaactgggaactcaccgcatccgcttcacatcaaccacctggtgtataccctcagggacattccgataccacagtcgccatctccacatccacagtcctgctgtgtgggctttctgcagtgtcactgctggcgtgctacctcaaatctcgccagactcctcccttggcctcagtcgagatggaggccatggaggcactgcccgtgacctgggggacaagtagtcgcgacgaagatctcgaaaactgcagtcatcacctctag

SEQ ID NO: 86320 - DNA, 696 bp, Artificial Sequence
  derived and/or modified sequence
atgtcagtcgagcacgctgatatctgggttaaatcctatagcttgtatagtagggaaagatacatttgtaatagcggttttaagagaaaagccggtacctcctcgctaaccgaatgtgtgctgaacaaggctacaaatgtggctcactggactactccatctctcaagtgtatccgcgatccagcattggtgcaccagcggcctgcccctccaagtaccgtaactactgcaggggtcaccccacagccagagtccctttctccatccggaaaagagccagctgctagcagccctagtagcaacaataccgccgcaacaacggccgcaattgtaccagggagtcagctgatgccttccaagtccccttctacgggcaccacagaaattagcagccacgagtccagccatgggactccctcacaaaccacagccaagaactgggaactcacggcttcggcctctcaccagccccctggggtctatcctcagggccatagcgacacaactgtggccataagcaccagcacagtgctgctttgcggactgtcagctgtgtcacttctcgcttgttatttgaagagcaggcagaccccgccactagcatccgtcgaaatggaggcaatggaggctctgcctgtcacctggggaacttcatcacgcgacgaggacttagagaactgttctcatcacctgtag

SEQ ID NO: 86321 - DNA, 609 bp, Artificial Sequence
  derived and/or modified sequence
atggcccctcgtcgagctaggggctgtcgcacgttgggtctccctgcccttcttctgctgctgctacttaggccacctgcaacccggggagatcccgctttggtacaccagaggcccgcacctccctcgaccgtgaccacagcgggagtcaccccccagccagagtcgcttagtcccagcggtaaagagccagccgcttcctccccctcaagtaataatactgccgctactaccgcggctatcgtgcccggatcccagctgatgcctagtaagtcaccttctacaggcaccactgagatttcctcgcacgaaagctctcatgggacccctagccaaactaccgccaagaattgggagctgacggcaagcgctagtcaccagccaccaggtgtctatcctcaggggcattctgacacaacagtagctataagtaccagtaccgtactactttgtggcctgagcgccgtgtccctcctggcctgctatcttaaaagcaggcagaccccacctctggcctctgtcgaaatggaggccatggaggccctcccagttacgtgggggacttcctcacgtgacgaggatctggagaactgcagccaccacctctag

SEQ ID NO: 86322 - DNA, 696 bp, Artificial Sequence
  derived and/or modified sequence
atgagcgtggagcacgccgacatctgggtgaagagctacagcctgtacagcagagagagatacatctgcaacagcggcttcaagagaaaggccggcaccagcagcctgaccgagtgcgtgctgaacaaggccaccaacgtggcccactggaccacccccagcctgaagtgcatcagagaccccgccctggtgcaccagagacccgccccccccagcaccgtgaccaccgccggcgtgaccccccagcccgagagcctgagccccagcggcaaggagcccgccgccagcagccccagcagcaacaacaccgccgccaccaccgccgccatcgtgcccggcagccagctgatgcccagcaagagccccagcaccggcaccaccgagatcagcagccacgagagcagccacggcacccccagccagaccaccgccaagaactgggagctgaccgccagcgccagccaccagccccccggcgtgtacccccagggccacagcgacaccaccgtggccatcagcaccagcaccgtgctgctgtgcggcctgagcgccgtgagcctgctggcctgctacctgaagagcagacagaccccccccctggccagcgtggagatggaggccatggaggccctgcccgtgacctggggcaccagcagcagagacgaggacctggagaactgcagccaccacctgtag

SEQ ID NO: 86323 - DNA, 609 bp, Artificial Sequence
  derived and/or modified sequence
atggcccccagaagagccagaggctgcagaaccctgggcctgcccgccctgctgctgctgctgctgctgagaccccccgccaccagaggcgaccccgccctggtgcaccagagacccgccccccccagcaccgtgaccaccgccggcgtgaccccccagcccgagagcctgagccccagcggcaaggagcccgccgccagcagccccagcagcaacaacaccgccgccaccaccgccgccatcgtgcccggcagccagctgatgcccagcaagagccccagcaccggcaccaccgagatcagcagccacgagagcagccacggcacccccagccagaccaccgccaagaactgggagctgaccgccagcgccagccaccagccccccggcgtgtacccccagggccacagcgacaccaccgtggccatcagcaccagcaccgtgctgctgtgcggcctgagcgccgtgagcctgctggcctgctacctgaagagcagacagaccccccccctggccagcgtggagatggaggccatggaggccctgcccgtgacctggggcaccagcagcagagacgaggacctggagaactgcagccaccacctgtag

SEQ ID NO: 86324 - protein, 156 aa, Artificial Sequence
  derived and/or modified sequence
MQKKEKSFGIQMLSVQPDTKPKGCAGCNRKIKDRYLLKALDKYWHEDCLKCACCDCRLGEVGSTLYTKANLILCRRDYLRLFGVTGNCAACSKLIPAFEMVMRAKDNVYHLDCFACQLCNQRFCVGDKFFLKNNMILCQTDYEEGLMKEGYAPQVR

SEQ ID NO: 86325 - DNA, 3727 bp, Artificial Sequence
  derived and/or modified sequence
gcttctctgtggtcttgacaagcgctgcctgggctccgccggctcactaataactgagtgaccttttctttggctgtattatgtctggctgggaagggattgcattttgcagctgagagccggagcttccttcagctcggctcctcgcacgctgctggggtaagttgtcttgaaccaggacggagagagacagcctcggactgcagttgcctaaaaggaggacacctgtggctcagatgcggtcaacaccattgcttggcgtatccttgaggacctcattattttaaacttaaaaaaaaatagacattccctcccccgtcttttttttttttttcaaacaatgcttctttttgacctttcccaaggagaagcgctacaaagcagccactgtgcttactgaacggcctccccctgtatcgcttaattgagaaggtatacaaatgctctcagtccagccagacaccaagccgaaaggttgtgctggctgcaaccgaaagatcaaggaccggtatcttctaaaggcactggacaaatactggcatgaagactgcctgaagtgtgcctgctgtgactgtcgcttgggagaggtgggctccaccctgtacactaaagctaatcttatcctttgtcgcagagactatctgaggctctttggtgtaacgggaaactgcgctgcctgtagtaagctcatccctgcctttgagatggtgatgcgtgccaaggacaatgtttaccacctggactgctttgcatgtcagctttgtaatcagagattttgtgttggagacaaatttttcctaaagaataacatgatcctttgccagacggactacgaggaaggtttaatgaaagaaggttatgcaccccaggttcgctgatctatcaacatcaccccattaagaatacaaagcactacattcttttatcttttttgctccacatgtacataagaattgacacaggaacctactgaatagcgtagatataggaaggcaggatggttatatggaataaaaggcggactgcatctgtatgtagtgaaattgccccagttcagagttgaatgtttattattaaagaaaaaagtaatgtacatatggctggatttttttgcttgctattcgtttttgtgtcacttggcatgagatgtttattttggactattgtatataatgtattgtaatatttgaagcacaaatgtaatacagttttattgtgttaccatttgtgttccatttgcttctttgtattgttgcatttagtacaatcagtgtttaaacttactgtatatttatgctttctgtatttaccagctattttaaatgagctgtaactttctagtaaagaattgaaaagcaaatctcactaatgatacacagatagataaagcaagtctatcaacattaaaaatactaaaaaataaagacacacacagagcattttagtgacatccactacttattgccgctatgagttagagtctatcagtgttcttgttataaccccctattttcagggggttaaaaatcagctttaaaaaaatacataaaaatttcatcttaaagcactttcattttataccaacgtgaaaagtgccatttttagaataactttaaagcttaacaggtttccttttaatatcctttttttgtgtgctctttacttacacaatggctttgttttgctttttcagccacaccccttatgtgaactagtgcctttgggtatcacgtaaaattttttccaaagggttactttaaaaatctgttaccacaattatgagatgatttttaagtgataaattaaacttcttcttgtataaattctgcccagatctctccacaagagctgagggtttcataactttatggcttaataaatgtatgacactgaaaagatttgagtgtgaatctactgaaatcactataatgcacattgaagctatgatggtatttgagtagtgaggttacttttgatcggagcaacataatgctcatagaatcttctagaagaagagaaacaaagggattgataaaatgctgagaactagtgattatatatttttctgtatttacctgacatttattttaatgttcaaaaagtaaacactttaagtttgatgtgttttactctctcattgttttaagtaattgccaactcagaatacatcattcttaggctgaaatttgtctttccattttttaaggtgaaatagtactaccttacgtgatagcatacaaagaagaaagctctagaaagagaaattatggagaatgattatttaaattacaattaaggaaatgagaatatgatcccctcttccgagttgcccacaaacttgcttctttgcttttgctccctgtaatagaactacttttcaacaaatctaattttgcacggcaccgttaaccatattttcactacagcaaacttagtgctatgggttttctttttctttgtttttttcttgatcacttgtataggaaacaatattttccagtgttatttgcatatatattttgtccttccaatatatgcattacagatgaaaattaaatgttatacctgaattcttgggttggggccaaaatattaagctgaaaataatgctggtgtggatttgttttaaaacaaagctttattatgaacatgcatgtgaatctggatattgcctcttatttttaagaaaatggttctgtgaaaagtgaatgatatgtatttttccaaatgcttcatggttaggagtcttcaagttccatgttccccagatttgagatatactaaagaaagaaattcaaaagtagctatttggggcccacaaaaataactattattttagccttagagccttacacttgtttcatgaagagaaaggacttgcataaccaaaataaacaaagcaagacaaattaaaaatatgtgggggagagatcagtgaaaagtggttttcttaatgcagccctgctggtccccattaacaattgcttgaaattcacatggatgtaaaattataattgtcaggatcttattcagatgatcttttaaggtttaactggttttgcttttgtttatctatatgtcaaaatacttgtaaattgggaacaaacttctctcagcttcttgaagttgttcaactatccttgccactggaagaccaaacaaggttttcactgctttttcttttacataatatgctgagaattatttcttatgctttttactacaaacaaaattactcacctggattaaagattaaggccttaatctgtttagattatctttaatctccatgaaatcgtgaaataagacaagaatagtgtttcagctgtaggccattttacagctaattgcccataaattgtagcatttattgacctgaagtactaagctaattgtcttgactactcaaagcccctgaattgttgtcaactttcccctttgtgttgtgtagccctaacgtcatttagcttgttgtctgatgcctccagtaggacacctccgatggagctttgatttctgagcagcgaaagctcccttcctaagatgcatctcgcataggctgcctatgatgaaggaccgtgcacctccactccaacagagtgctgagtttaaaagttgacctgtgtttgtaatttcactttcatcttgcttaataaatatctgctggattctttcattcacttttttacatttggatttatgtttttaataaaaggggtgttacact

SEQ ID NO: 86326 - DNA, 471 bp, Artificial Sequence
  derived and/or modified sequence
atgcagaagaaagaaaagtcttttggcatccagatgttaagtgtccagcctgataccaaaccaaaagggtgcgcgggatgtaacaggaaaataaaagaccggtatctcctgaaggccctggacaagtactggcatgaggattgtctcaagtgcgcctgctgcgattgtcgcctgggagaggtgggtagtaccctttatacaaaagccaatctcatcctatgtcggcgcgactatctaagattgtttggcgtgactggaaactgcgctgcctgctctaagctgattccagcgttcgagatggtgatgagggctaaggacaatgtgtatcatttggactgttttgcctgtcagttgtgtaatcagcggttctgcgttggcgacaagtttttcttgaaaaataacatgatcctctgccagactgactacgaggagggtctgatgaaagaggggtacgctccacaagttcgctag

SEQ ID NO: 86327 - DNA, 471 bp, Artificial Sequence
  derived and/or modified sequence
atgcagaagaaggagaagagctttggcatccagatgctgtctgtgcagcctgacaccaagcccaagggctgtgccggctgcaacaggaagatcaaggaccgctacctgctgaaggccctggacaagtactggcatgaggactgcctgaagtgtgcctgctgtgactgccgcctgggggaggtgggcagcaccctgtacaccaaggccaacctgatcctgtgcagaagagactacctgcggctgtttggagtgactggaaactgtgccgcctgcagcaagctgatcccagcctttgagatggtgatgagggccaaggacaacgtgtaccacctggactgctttgcctgccagctgtgcaaccagcgcttctgtgtgggggacaagttcttcctgaagaacaacatgatcctgtgccagacagattatgaggagggcctgatgaaggagggctacgccccccaggtgaggtag

SEQ ID NO: 86328 - DNA, 3526 bp, Artificial Sequence
  derived and/or modified sequence
attcgccatcattttgcacactgcgaggggctccgtgtgtgcgccctgtcttgtctggccgtcctcatcccttcccccaccccctgccgccactccgacccgctcccaaagtggcttcacaatagtcggtcctcggcggtgtaggctgcgcaccaggtccacacttaagcgaaatcaaggagacccccttctacttctacctttgggtttggtgctcaatgcgaagctgctgcaactcagacacgcctaagtcaactcatgcagaaaaaggagaaaagttttggtatacaaatgctctcagtccagccagacaccaagccgaaaggttgtgctggctgcaaccgaaagatcaaggaccggtatcttctaaaggcactggacaaatactggcatgaagactgcctgaagtgtgcctgctgtgactgtcgcttgggagaggtgggctccaccctgtacactaaagctaatcttatcctttgtcgcagagactatctgaggctctttggtgtaacgggaaactgcgctgcctgtagtaagctcatccctgcctttgagatggtgatgcgtgccaaggacaatgtttaccacctggactgctttgcatgtcagctttgtaatcagagattttgtgttggagacaaatttttcctaaagaataacatgatcctttgccagacggactacgaggaaggtttaatgaaagaaggttatgcaccccaggttcgctgatctatcaacatcaccccattaagaatacaaagcactacattcttttatcttttttgctccacatgtacataagaattgacacaggaacctactgaatagcgtagatataggaaggcaggatggttatatggaataaaaggcggactgcatctgtatgtagtgaaattgccccagttcagagttgaatgtttattattaaagaaaaaagtaatgtacatatggctggatttttttgcttgctattcgtttttgtgtcacttggcatgagatgtttattttggactattgtatataatgtattgtaatatttgaagcacaaatgtaatacagttttattgtgttaccatttgtgttccatttgcttctttgtattgttgcatttagtacaatcagtgtttaaacttactgtatatttatgctttctgtatttaccagctattttaaatgagctgtaactttctagtaaagaattgaaaagcaaatctcactaatgatacacagatagataaagcaagtctatcaacattaaaaatactaaaaaataaagacacacacagagcattttagtgacatccactacttattgccgctatgagttagagtctatcagtgttcttgttataaccccctattttcagggggttaaaaatcagctttaaaaaaatacataaaaatttcatcttaaagcactttcattttataccaacgtgaaaagtgccatttttagaataactttaaagcttaacaggtttccttttaatatcctttttttgtgtgctctttacttacacaatggctttgttttgctttttcagccacaccccttatgtgaactagtgcctttgggtatcacgtaaaattttttccaaagggttactttaaaaatctgttaccacaattatgagatgatttttaagtgataaattaaacttcttcttgtataaattctgcccagatctctccacaagagctgagggtttcataactttatggcttaataaatgtatgacactgaaaagatttgagtgtgaatctactgaaatcactataatgcacattgaagctatgatggtatttgagtagtgaggttacttttgatcggagcaacataatgctcatagaatcttctagaagaagagaaacaaagggattgataaaatgctgagaactagtgattatatatttttctgtatttacctgacatttattttaatgttcaaaaagtaaacactttaagtttgatgtgttttactctctcattgttttaagtaattgccaactcagaatacatcattcttaggctgaaatttgtctttccattttttaaggtgaaatagtactaccttacgtgatagcatacaaagaagaaagctctagaaagagaaattatggagaatgattatttaaattacaattaaggaaatgagaatatgatcccctcttccgagttgcccacaaacttgcttctttgcttttgctccctgtaatagaactacttttcaacaaatctaattttgcacggcaccgttaaccatattttcactacagcaaacttagtgctatgggttttctttttctttgtttttttcttgatcacttgtataggaaacaatattttccagtgttatttgcatatatattttgtccttccaatatatgcattacagatgaaaattaaatgttatacctgaattcttgggttggggccaaaatattaagctgaaaataatgctggtgtggatttgttttaaaacaaagctttattatgaacatgcatgtgaatctggatattgcctcttatttttaagaaaatggttctgtgaaaagtgaatgatatgtatttttccaaatgcttcatggttaggagtcttcaagttccatgttccccagatttgagatatactaaagaaagaaattcaaaagtagctatttggggcccacaaaaataactattattttagccttagagccttacacttgtttcatgaagagaaaggacttgcataaccaaaataaacaaagcaagacaaattaaaaatatgtgggggagagatcagtgaaaagtggttttcttaatgcagccctgctggtccccattaacaattgcttgaaattcacatggatgtaaaattataattgtcaggatcttattcagatgatcttttaaggtttaactggttttgcttttgtttatctatatgtcaaaatacttgtaaattgggaacaaacttctctcagcttcttgaagttgttcaactatccttgccactggaagaccaaacaaggttttcactgctttttcttttacataatatgctgagaattatttcttatgctttttactacaaacaaaattactcacctggattaaagattaaggccttaatctgtttagattatctttaatctccatgaaatcgtgaaataagacaagaatagtgtttcagctgtaggccattttacagctaattgcccataaattgtagcatttattgacctgaagtactaagctaattgtcttgactactcaaagcccctgaattgttgtcaactttcccctttgtgttgtgtagccctaacgtcatttagcttgttgtctgatgcctccagtaggacacctccgatggagctttgatttctgagcagcgaaagctcccttcctaagatgcatctcgcataggctgcctatgatgaaggaccgtgcacctccactccaacagagtgctgagtttaaaagttgacctgtgtttgtaatttcactttcatcttgcttaataaatatctgctggattctttc

SEQ ID NO: 86329 - DNA, 3759 bp, Artificial Sequence
  derived and/or modified sequence
atatcctaatagattgagattcaaactgatgcagcacattttttacggggactactcagattgctgttatgaaatacaagtcagatttatgatctttttcatattgaacatgatatgctatgctaacgctgcatgtgacagtttaatcaaatccatttgttaccaggaagctaaaaggggccgctgggattttaggattacgggcagagttagggaagcatgtggctttgtcattcgccatcattttgcacactgcgaggggctccgtgtgtgcgccctgtcttgtctggccgtcctcatcccttcccccaccccctgccgccactccgacccgctcccaaagtggcttcacaatagtcggtcctcggcggtgtaggctgcgcaccaggtccacacttaagcgaaatcaaggagacccccttctacttctacctttgggtttggtgctcaatgcgaagctgctgcaactcagacacgcctaagtcaactcatgcagaaaaaggagaaaagttttggtatacaaatgctctcagtccagccagacaccaagccgaaaggttgtgctggctgcaaccgaaagatcaaggaccggtatcttctaaaggcactggacaaatactggcatgaagactgcctgaagtgtgcctgctgtgactgtcgcttgggagaggtgggctccaccctgtacactaaagctaatcttatcctttgtcgcagagactatctgaggctctttggtgtaacgggaaactgcgctgcctgtagtaagctcatccctgcctttgagatggtgatgcgtgccaaggacaatgtttaccacctggactgctttgcatgtcagctttgtaatcagagattttgtgttggagacaaatttttcctaaagaataacatgatcctttgccagacggactacgaggaaggtttaatgaaagaaggttatgcaccccaggttcgctgatctatcaacatcaccccattaagaatacaaagcactacattcttttatcttttttgctccacatgtacataagaattgacacaggaacctactgaatagcgtagatataggaaggcaggatggttatatggaataaaaggcggactgcatctgtatgtagtgaaattgccccagttcagagttgaatgtttattattaaagaaaaaagtaatgtacatatggctggatttttttgcttgctattcgtttttgtgtcacttggcatgagatgtttattttggactattgtatataatgtattgtaatatttgaagcacaaatgtaatacagttttattgtgttaccatttgtgttccatttgcttctttgtattgttgcatttagtacaatcagtgtttaaacttactgtatatttatgctttctgtatttaccagctattttaaatgagctgtaactttctagtaaagaattgaaaagcaaatctcactaatgatacacagatagataaagcaagtctatcaacattaaaaatactaaaaaataaagacacacacagagcattttagtgacatccactacttattgccgctatgagttagagtctatcagtgttcttgttataaccccctattttcagggggttaaaaatcagctttaaaaaaatacataaaaatttcatcttaaagcactttcattttataccaacgtgaaaagtgccatttttagaataactttaaagcttaacaggtttccttttaatatcctttttttgtgtgctctttacttacacaatggctttgttttgctttttcagccacaccccttatgtgaactagtgcctttgggtatcacgtaaaattttttccaaagggttactttaaaaatctgttaccacaattatgagatgatttttaagtgataaattaaacttcttcttgtataaattctgcccagatctctccacaagagctgagggtttcataactttatggcttaataaatgtatgacactgaaaagatttgagtgtgaatctactgaaatcactataatgcacattgaagctatgatggtatttgagtagtgaggttacttttgatcggagcaacataatgctcatagaatcttctagaagaagagaaacaaagggattgataaaatgctgagaactagtgattatatatttttctgtatttacctgacatttattttaatgttcaaaaagtaaacactttaagtttgatgtgttttactctctcattgttttaagtaattgccaactcagaatacatcattcttaggctgaaatttgtctttccattttttaaggtgaaatagtactaccttacgtgatagcatacaaagaagaaagctctagaaagagaaattatggagaatgattatttaaattacaattaaggaaatgagaatatgatcccctcttccgagttgcccacaaacttgcttctttgcttttgctccctgtaatagaactacttttcaacaaatctaattttgcacggcaccgttaaccatattttcactacagcaaacttagtgctatgggttttctttttctttgtttttttcttgatcacttgtataggaaacaatattttccagtgttatttgcatatatattttgtccttccaatatatgcattacagatgaaaattaaatgttatacctgaattcttgggttggggccaaaatattaagctgaaaataatgctggtgtggatttgttttaaaacaaagctttattatgaacatgcatgtgaatctggatattgcctcttatttttaagaaaatggttctgtgaaaagtgaatgatatgtatttttccaaatgcttcatggttaggagtcttcaagttccatgttccccagatttgagatatactaaagaaagaaattcaaaagtagctatttggggcccacaaaaataactattattttagccttagagccttacacttgtttcatgaagagaaaggacttgcataaccaaaataaacaaagcaagacaaattaaaaatatgtgggggagagatcagtgaaaagtggttttcttaatgcagccctgctggtccccattaacaattgcttgaaattcacatggatgtaaaattataattgtcaggatcttattcagatgatcttttaaggtttaactggttttgcttttgtttatctatatgtcaaaatacttgtaaattgggaacaaacttctctcagcttcttgaagttgttcaactatccttgccactggaagaccaaacaaggttttcactgctttttcttttacataatatgctgagaattatttcttatgctttttactacaaacaaaattactcacctggattaaagattaaggccttaatctgtttagattatctttaatctccatgaaatcgtgaaataagacaagaatagtgtttcagctgtaggccattttacagctaattgcccataaattgtagcatttattgacctgaagtactaagctaattgtcttgactactcaaagcccctgaattgttgtcaactttcccctttgtgttgtgtagccctaacgtcatttagcttgttgtctgatgcctccagtaggacacctccgatggagctttgatttctgagcagcgaaagctcccttcctaagatgcatctcgcataggctgcctatgatgaaggaccgtgcacctccactccaacagagtgctgagtttaaaagttgacctgtgtttgtaatttcactttcatcttgcttaataaatatctgctggattctttca

SEQ ID NO: 86330 - DNA, 3450 bp, Artificial Sequence
  derived and/or modified sequence
gtagaacagtggggagctgtgcggatgggtgaagtgcatgtatgcctgcctagacgggccagaaaagccaaacttaagaaatctgcctatgtacagaacaagtcaactaaggggttctcattaatctaccgtctgtgaatatcgttatttttcaggtatacaaatgctctcagtccagccagacaccaagccgaaaggttgtgctggctgcaaccgaaagatcaaggaccggtatcttctaaaggcactggacaaatactggcatgaagactgcctgaagtgtgcctgctgtgactgtcgcttgggagaggtgggctccaccctgtacactaaagctaatcttatcctttgtcgcagagactatctgaggctctttggtgtaacgggaaactgcgctgcctgtagtaagctcatccctgcctttgagatggtgatgcgtgccaaggacaatgtttaccacctggactgctttgcatgtcagctttgtaatcagagattttgtgttggagacaaatttttcctaaagaataacatgatcctttgccagacggactacgaggaaggtttaatgaaagaaggttatgcaccccaggttcgctgatctatcaacatcaccccattaagaatacaaagcactacattcttttatcttttttgctccacatgtacataagaattgacacaggaacctactgaatagcgtagatataggaaggcaggatggttatatggaataaaaggcggactgcatctgtatgtagtgaaattgccccagttcagagttgaatgtttattattaaagaaaaaagtaatgtacatatggctggatttttttgcttgctattcgtttttgtgtcacttggcatgagatgtttattttggactattgtatataatgtattgtaatatttgaagcacaaatgtaatacagttttattgtgttaccatttgtgttccatttgcttctttgtattgttgcatttagtacaatcagtgtttaaacttactgtatatttatgctttctgtatttaccagctattttaaatgagctgtaactttctagtaaagaattgaaaagcaaatctcactaatgatacacagatagataaagcaagtctatcaacattaaaaatactaaaaaataaagacacacacagagcattttagtgacatccactacttattgccgctatgagttagagtctatcagtgttcttgttataaccccctattttcagggggttaaaaatcagctttaaaaaaatacataaaaatttcatcttaaagcactttcattttataccaacgtgaaaagtgccatttttagaataactttaaagcttaacaggtttccttttaatatcctttttttgtgtgctctttacttacacaatggctttgttttgctttttcagccacaccccttatgtgaactagtgcctttgggtatcacgtaaaattttttccaaagggttactttaaaaatctgttaccacaattatgagatgatttttaagtgataaattaaacttcttcttgtataaattctgcccagatctctccacaagagctgagggtttcataactttatggcttaataaatgtatgacactgaaaagatttgagtgtgaatctactgaaatcactataatgcacattgaagctatgatggtatttgagtagtgaggttacttttgatcggagcaacataatgctcatagaatcttctagaagaagagaaacaaagggattgataaaatgctgagaactagtgattatatatttttctgtatttacctgacatttattttaatgttcaaaaagtaaacactttaagtttgatgtgttttactctctcattgttttaagtaattgccaactcagaatacatcattcttaggctgaaatttgtctttccattttttaaggtgaaatagtactaccttacgtgatagcatacaaagaagaaagctctagaaagagaaattatggagaatgattatttaaattacaattaaggaaatgagaatatgatcccctcttccgagttgcccacaaacttgcttctttgcttttgctccctgtaatagaactacttttcaacaaatctaattttgcacggcaccgttaaccatattttcactacagcaaacttagtgctatgggttttctttttctttgtttttttcttgatcacttgtataggaaacaatattttccagtgttatttgcatatatattttgtccttccaatatatgcattacagatgaaaattaaatgttatacctgaattcttgggttggggccaaaatattaagctgaaaataatgctggtgtggatttgttttaaaacaaagctttattatgaacatgcatgtgaatctggatattgcctcttatttttaagaaaatggttctgtgaaaagtgaatgatatgtatttttccaaatgcttcatggttaggagtcttcaagttccatgttccccagatttgagatatactaaagaaagaaattcaaaagtagctatttggggcccacaaaaataactattattttagccttagagccttacacttgtttcatgaagagaaaggacttgcataaccaaaataaacaaagcaagacaaattaaaaatatgtgggggagagatcagtgaaaagtggttttcttaatgcagccctgctggtccccattaacaattgcttgaaattcacatggatgtaaaattataattgtcaggatcttattcagatgatcttttaaggtttaactggttttgcttttgtttatctatatgtcaaaatacttgtaaattgggaacaaacttctctcagcttcttgaagttgttcaactatccttgccactggaagaccaaacaaggttttcactgctttttcttttacataatatgctgagaattatttcttatgctttttactacaaacaaaattactcacctggattaaagattaaggccttaatctgtttagattatctttaatctccatgaaatcgtgaaataagacaagaatagtgtttcagctgtaggccattttacagctaattgcccataaattgtagcatttattgacctgaagtactaagctaattgtcttgactactcaaagcccctgaattgttgtcaactttcccctttgtgttgtgtagccctaacgtcatttagcttgttgtctgatgcctccagtaggacacctccgatggagctttgatttctgagcagcgaaagctcccttcctaagatgcatctcgcataggctgcctatgatgaaggaccgtgcacctccactccaacagagtgctgagtttaaaagttgacctgtgtttgtaatttcactttcatcttgcttaataaatatctgctggattctttcattcacttttttacatttggatttatgtttttaataaaaggggtgttacact

SEQ ID NO: 86331 - DNA, 3515 bp, Artificial Sequence
  derived and/or modified sequence
acacatactggggtgttttcagagtggctgtagcagagaggtggggtagaacagtggggagctgtgcggatgggtgaagtgcatgtatgcctgcctagacgggccagaaaagccaaacttaagaaatctgcctatgtacagaacaagtcaactaaggggttctcattaatctaccgtctgtgaatatcgttatttttcaggagaagcgctacaaagcagccactgtgcttactgaacggcctccccctgtatcgcttaattgagaaggtatacaaatgctctcagtccagccagacaccaagccgaaaggttgtgctggctgcaaccgaaagatcaaggaccggtatcttctaaaggcactggacaaatactggcatgaagactgcctgaagtgtgcctgctgtgactgtcgcttgggagaggtgggctccaccctgtacactaaagctaatcttatcctttgtcgcagagactatctgaggctctttggtgtaacgggaaactgcgctgcctgtagtaagctcatccctgcctttgagatggtgatgcgtgccaaggacaatgtttaccacctggactgctttgcatgtcagctttgtaatcagagattttgtgttggagacaaatttttcctaaagaataacatgatcctttgccagacggactacgaggaaggtttaatgaaagaaggttatgcaccccaggttcgctgatctatcaacatcaccccattaagaatacaaagcactacattcttttatcttttttgctccacatgtacataagaattgacacaggaacctactgaatagcgtagatataggaaggcaggatggttatatggaataaaaggcggactgcatctgtatgtagtgaaattgccccagttcagagttgaatgtttattattaaagaaaaaagtaatgtacatatggctggatttttttgcttgctattcgtttttgtgtcacttggcatgagatgtttattttggactattgtatataatgtattgtaatatttgaagcacaaatgtaatacagttttattgtgttaccatttgtgttccatttgcttctttgtattgttgcatttagtacaatcagtgtttaaacttactgtatatttatgctttctgtatttaccagctattttaaatgagctgtaactttctagtaaagaattgaaaagcaaatctcactaatgatacacagatagataaagcaagtctatcaacattaaaaatactaaaaaataaagacacacacagagcattttagtgacatccactacttattgccgctatgagttagagtctatcagtgttcttgttataaccccctattttcagggggttaaaaatcagctttaaaaaaatacataaaaatttcatcttaaagcactttcattttataccaacgtgaaaagtgccatttttagaataactttaaagcttaacaggtttccttttaatatcctttttttgtgtgctctttacttacacaatggctttgttttgctttttcagccacaccccttatgtgaactagtgcctttgggtatcacgtaaaattttttccaaagggttactttaaaaatctgttaccacaattatgagatgatttttaagtgataaattaaacttcttcttgtataaattctgcccagatctctccacaagagctgagggtttcataactttatggcttaataaatgtatgacactgaaaagatttgagtgtgaatctactgaaatcactataatgcacattgaagctatgatggtatttgagtagtgaggttacttttgatcggagcaacataatgctcatagaatcttctagaagaagagaaacaaagggattgataaaatgctgagaactagtgattatatatttttctgtatttacctgacatttattttaatgttcaaaaagtaaacactttaagtttgatgtgttttactctctcattgttttaagtaattgccaactcagaatacatcattcttaggctgaaatttgtctttccattttttaaggtgaaatagtactaccttacgtgatagcatacaaagaagaaagctctagaaagagaaattatggagaatgattatttaaattacaattaaggaaatgagaatatgatcccctcttccgagttgcccacaaacttgcttctttgcttttgctccctgtaatagaactacttttcaacaaatctaattttgcacggcaccgttaaccatattttcactacagcaaacttagtgctatgggttttctttttctttgtttttttcttgatcacttgtataggaaacaatattttccagtgttatttgcatatatattttgtccttccaatatatgcattacagatgaaaattaaatgttatacctgaattcttgggttggggccaaaatattaagctgaaaataatgctggtgtggatttgttttaaaacaaagctttattatgaacatgcatgtgaatctggatattgcctcttatttttaagaaaatggttctgtgaaaagtgaatgatatgtatttttccaaatgcttcatggttaggagtcttcaagttccatgttccccagatttgagatatactaaagaaagaaattcaaaagtagctatttggggcccacaaaaataactattattttagccttagagccttacacttgtttcatgaagagaaaggacttgcataaccaaaataaacaaagcaagacaaattaaaaatatgtgggggagagatcagtgaaaagtggttttcttaatgcagccctgctggtccccattaacaattgcttgaaattcacatggatgtaaaattataattgtcaggatcttattcagatgatcttttaaggtttaactggttttgcttttgtttatctatatgtcaaaatacttgtaaattgggaacaaacttctctcagcttcttgaagttgttcaactatccttgccactggaagaccaaacaaggttttcactgctttttcttttacataatatgctgagaattatttcttatgctttttactacaaacaaaattactcacctggattaaagattaaggccttaatctgtttagattatctttaatctccatgaaatcgtgaaataagacaagaatagtgtttcagctgtaggccattttacagctaattgcccataaattgtagcatttattgacctgaagtactaagctaattgtcttgactactcaaagcccctgaattgttgtcaactttcccctttgtgttgtgtagccctaacgtcatttagcttgttgtctgatgcctccagtaggacacctccgatggagctttgatttctgagcagcgaaagctcccttcctaagatgcatctcgcataggctgcctatgatgaaggaccgtgcacctccactccaacagagtgctgagtttaaaagttgacctgtgtttgtaatttcactttcatcttgcttaataaatatctgctggattctttcattca

SEQ ID NO: 86332 - DNA, 3365 bp, Artificial Sequence
  derived and/or modified sequence
gtcgactcctgcagaggtcacattttgtgtgcgggtttgtccccagcgtttgagaagcgctacaaagcagccactgtgcttactgaacggcctccccctgtatcgcttaattgagaaggtatacaaatgctctcagtccagccagacaccaagccgaaaggttgtgctggctgcaaccgaaagatcaaggaccggtatcttctaaaggcactggacaaatactggcatgaagactgcctgaagtgtgcctgctgtgactgtcgcttgggagaggtgggctccaccctgtacactaaagctaatcttatcctttgtcgcagagactatctgaggctctttggtgtaacgggaaactgcgctgcctgtagtaagctcatccctgcctttgagatggtgatgcgtgccaaggacaatgtttaccacctggactgctttgcatgtcagctttgtaatcagagattttgtgttggagacaaatttttcctaaagaataacatgatcctttgccagacggactacgaggaaggtttaatgaaagaaggttatgcaccccaggttcgctgatctatcaacatcaccccattaagaatacaaagcactacattcttttatcttttttgctccacatgtacataagaattgacacaggaacctactgaatagcgtagatataggaaggcaggatggttatatggaataaaaggcggactgcatctgtatgtagtgaaattgccccagttcagagttgaatgtttattattaaagaaaaaagtaatgtacatatggctggatttttttgcttgctattcgtttttgtgtcacttggcatgagatgtttattttggactattgtatataatgtattgtaatatttgaagcacaaatgtaatacagttttattgtgttaccatttgtgttccatttgcttctttgtattgttgcatttagtacaatcagtgtttaaacttactgtatatttatgctttctgtatttaccagctattttaaatgagctgtaactttctagtaaagaattgaaaagcaaatctcactaatgatacacagatagataaagcaagtctatcaacattaaaaatactaaaaaataaagacacacacagagcattttagtgacatccactacttattgccgctatgagttagagtctatcagtgttcttgttataaccccctattttcagggggttaaaaatcagctttaaaaaaatacataaaaatttcatcttaaagcactttcattttataccaacgtgaaaagtgccatttttagaataactttaaagcttaacaggtttccttttaatatcctttttttgtgtgctctttacttacacaatggctttgttttgctttttcagccacaccccttatgtgaactagtgcctttgggtatcacgtaaaattttttccaaagggttactttaaaaatctgttaccacaattatgagatgatttttaagtgataaattaaacttcttcttgtataaattctgcccagatctctccacaagagctgagggtttcataactttatggcttaataaatgtatgacactgaaaagatttgagtgtgaatctactgaaatcactataatgcacattgaagctatgatggtatttgagtagtgaggttacttttgatcggagcaacataatgctcatagaatcttctagaagaagagaaacaaagggattgataaaatgctgagaactagtgattatatatttttctgtatttacctgacatttattttaatgttcaaaaagtaaacactttaagtttgatgtgttttactctctcattgttttaagtaattgccaactcagaatacatcattcttaggctgaaatttgtctttccattttttaaggtgaaatagtactaccttacgtgatagcatacaaagaagaaagctctagaaagagaaattatggagaatgattatttaaattacaattaaggaaatgagaatatgatcccctcttccgagttgcccacaaacttgcttctttgcttttgctccctgtaatagaactacttttcaacaaatctaattttgcacggcaccgttaaccatattttcactacagcaaacttagtgctatgggttttctttttctttgtttttttcttgatcacttgtataggaaacaatattttccagtgttatttgcatatatattttgtccttccaatatatgcattacagatgaaaattaaatgttatacctgaattcttgggttggggccaaaatattaagctgaaaataatgctggtgtggatttgttttaaaacaaagctttattatgaacatgcatgtgaatctggatattgcctcttatttttaagaaaatggttctgtgaaaagtgaatgatatgtatttttccaaatgcttcatggttaggagtcttcaagttccatgttccccagatttgagatatactaaagaaagaaattcaaaagtagctatttggggcccacaaaaataactattattttagccttagagccttacacttgtttcatgaagagaaaggacttgcataaccaaaataaacaaagcaagacaaattaaaaatatgtgggggagagatcagtgaaaagtggttttcttaatgcagccctgctggtccccattaacaattgcttgaaattcacatggatgtaaaattataattgtcaggatcttattcagatgatcttttaaggtttaactggttttgcttttgtttatctatatgtcaaaatacttgtaaattgggaacaaacttctctcagcttcttgaagttgttcaactatccttgccactggaagaccaaacaaggttttcactgctttttcttttacataatatgctgagaattatttcttatgctttttactacaaacaaaattactcacctggattaaagattaaggccttaatctgtttagattatctttaatctccatgaaatcgtgaaataagacaagaatagtgtttcagctgtaggccattttacagctaattgcccataaattgtagcatttattgacctgaagtactaagctaattgtcttgactactcaaagcccctgaattgttgtcaactttcccctttgtgttgtgtagccctaacgtcatttagcttgttgtctgatgcctccagtaggacacctccgatggagctttgatttctgagcagcgaaagctcccttcctaagatgcatctcgcataggctgcctatgatgaaggaccgtgcacctccactccaacagagtgctgagtttaaaagttgacctgtgtttgtaatttcactttcatcttgcttaataaatatctgctggattctttcattc

SEQ ID NO: 86333 - DNA, 1016 bp, Artificial Sequence
  derived and/or modified sequence
tctgggacgccacagaaatcgtaactgaacacccgcacacaaaagtaatctgtgaggtgtgttttaaagaaagaaacagctgaaaacttgaagacgtgtttagaaatatacatatatacacactattttcttgtgggagatctcctttgggcaaaggagaagcgctacaaagcagccactgtgcttactgaacggcctccccctgtatcgcttaattgagaaggtatacaaatgctctcagtccagccagacaccaagccgaaaggttgtgctggctgcaaccgaaagatcaaggaccggtatcttctaaaggcactggacaaatactggcatgaagactgcctgaagtgtgcctgctgtgactgtcgcttgggagaggtgggctccaccctgtacactaaagctaatcttatcctttgtcgcagagactatctgaggctctttggtgtaacgggaaactgcgctgcctgtagtaagctcatccctgcctttgagatggtgatgcgtgccaaggacaatgtttaccacctggactgctttgcatgtcagctttgtaatcagagattttgtgttggagacaaatttttcctaaagaataacatgatcctttgccagacggactacgaggaaggtttaatgaaagaaggttatgcaccccaggttcgctgatctatcaacatcaccccattaagaatacaaagcactacattcttttatcttttttgctccacatgtacataagaattgacacaggaacctactgaatagcgtagatataggaaggcaggatggttatatggaataaaaggcggactgcatctgtatgtagtgaaattgccccagttcagagttgaatgtttattattaaagaaaaaagtaatgtacatatggctggatttttttgcttgctattcgtttttgtgtcacttggcatgagatgtttattttggactattgtatataatgtattgtaatatttgaagcacaaatgtaatacagttttattgtgttaccat

SEQ ID NO: 86334 - DNA, 1685 bp, Artificial Sequence
  derived and/or modified sequence
cgagaggtaaatagtcttaaatcggaagggagctgcttctctgtggtcttgacaagcgctgcctgggctccgccggctcactaataactgagtgaccttttctttggctgtattatgtctggctgggaagggattgcattttgcagctgagagccggagcttccttcagctcggctcctcgcacgctgctggggtaagttgtcttgaaccaggacggagagagacagcctcggactgcagttgcctaaaaggaggacacctgtggctcagatgcggtcaacaccattgcttggcgtatccttgaggacctcattattttaaacttaaaaaaaaatagacattccctcccccgtcttttttttttttttcaaacaatgcttctttttgacctttcccaaggagaagcgctacaaagcagccactgtgcttactgaacggcctccccctgtatcgcttaattgagaaggtatacaaatgctctcagtccagccagacaccaagccgaaaggttgtgctggctgcaaccgaaagatcaaggaccggtatcttctaaaggcactggacaaatactggcatgaagactgcctgaagtgtgcctgctgtgactgtcgcttgggagaggtgggctccaccctgtacactaaagctaatcttatcctttgtcgcagagactatctgaggctctttggtgtaacgggaaactgcgctgcctgtagtaagctcatccctgcctttgagatggtgatgcgtgccaaggacaatgtttaccacctggactgctttgcatgtcagctttgtaatcagagattttgtgttggagacaaatttttcctaaagaataacatgatcctttgccagacggactacgaggaaggtttaatgaaagaaggttatgcaccccaggttcgctgatctatcaacatcaccccattaagaatacaaagcactacattcttttatcttttttgctccacatgtacataagaattgacacaggaacctactgaatagcgtagatataggaaggcaggatggttatatggaataaaaggcggactgcatctgtatgtagtgaaattgccccagttcagagttgaatgtttattattaaagaaaaaagtaatgtacatatggctggatttttttgcttgctattcgtttttgtgtcacttggcatgagatgtttattttggactattgtatataatgtattgtaatatttgaagcacaaatgtaatacagttttattgtgttaccatttgtgttccatttgcttctttgtattgttgcatttagtacaatcagtgtttaaacttactgtatatttatgctttctgtatttaccagctattttaaatgagctgtaactttctagtaaagaattgaaaagcaaatctcactaatgatacacagatagataaagcaagtctatcaacattaaaaatactaaaaaataaagacacacacagagcattttagtgacatccactacttattgccgctatgagttagagtctatcagtgttcttgttataaccccctattttcagggggttaaaaatcagctttaaaaaaatacataaaaatttcatcttaaagcactttcattttataccaacgtgaaaagtgccatttttagaataactttaaagcttaacaggtttccttttaatatcctttttttg

SEQ ID NO: 86335 - DNA, 516 bp, Artificial Sequence
  derived and/or modified sequence
aatggtgcagaaactatggttctttgaccaagttagtcctgaaaacatgtttctcagtgctgttggctgtttttcattggagcgtgagaagcgctacaaagcagccactgtgcttactgaacggcctccccctgtatcgcttaattgagaaggtatacaaatgctctcagtccagccagacaccaagccgaaaggttgtgctggctgcaaccgaaagatcaaggaccggtatcttctaaaggcactggacaaatactggcatgaagactgcctgaagtgtgcctgctgtgactgtcgcttgggagaggtgggctccaccctgtacactaaagctaatcttatcctttgtcgcagagactatctgaggctctttggtgtaacgggaaactgcgctgcctgtagtaagctcatccctgcctttgagatggtgatgcgtgccaaggacaatgtttaccacctggactgctttgcatgtcagctttgtaatcagagattttgtgttggagacaaattttt

SEQ ID NO: 86336 - DNA, 622 bp, Artificial Sequence
  derived and/or modified sequence
atcataagatatcagaggaaactggaggaggtttagctgttttggagaaggaaaatgtacaaaagtgcagattatagcttgacatttcttatcctataatgcatgcacatttggtgttttgtatccttctacatgcaagtttaaaactttatgcctaggagagcaaacataatgcagcagaagggtctctggactgtaagaaggccatttggctggagtctatagcgtaactgtctttcagctttgagcaagtctctgaacctctcttgggcctcggtaacataatttgtaaaatgagggaatttggaattgatgatgtctgcagtactttatagtgcttaaaatgagttatttgataaatatgaggcattggatagttggtccagcttcttgctaaagctgggtgttttaatacctaggaaataagaagacactcaaggtatacaaatgctctcagtccagccagacaccaagccgaaaggttgtgctggctgcaaccgaaagatcaaggaccggtatcttctaaaggcactggacaaatactggcatgaagactgcctgaagtgtgcctgctgtgactgtcgcttgggagaggtgggctccaccctgtacactaaagcta

SEQ ID NO: 86337 - DNA, 579 bp, Artificial Sequence
  derived and/or modified sequence
ttcttctcagtgcattggctgagacagagcgcacgagacacacacacatgcatgcacacatatgcacacacacacactcacacatactggggtgttttcagagtggctgtagcagagaggtggggtagaacagtggggagctgtgcggatgggtgaagtgcatgtatgcctgcctagacgggccagaaaagccaaacttaagaaatctgcctatgtacagaacaagtcaactaaggggttctcattaatctaccgtctgtgaatatcgttatttttcaggtatacaaatgctctcagtccagccagacaccaagccgaaaggttgtgctggctgcaaccgaaagatcaaggaccggtatcttctaaaggcactggacaaatactggcatgaagactgcctgaagtgtgcctgctgtgactgtcgcttgggagaggtgggctccaccctgtacactaaagctaatcttatcctttgtcgcagagactatctgaggctctttggtgtaacgggaaactgcgctgcctgtagtaagctcatccctgcctttgagatggtgatgcgtgccaaggacaatgttt

SEQ ID NO: 86338 - DNA, 543 bp, Artificial Sequence
  derived and/or modified sequence
aatgcatgcacatttggtgttttgtatccttctacatgcaagtttaaaactttatgcctaggagagcaaacataatgcagcagaagggtctctggactgtaagaaggccatttggctggagtctatagcgtaactgtctttcagctttgagcaagtctctgaacctctcttgggcctcggtatacaaatgctctcagtccagccagacaccaagccgaaaggttgtgctggctgcaaccgaaagatcaaggaccggtatcttctaaaggcactggacaaatactggcatgaagactgcctgaagtgtgcctgctgtgactgtcgcttgggagaggtgggctccaccctgtacactaaagctaatcttatcctttgtcgcagagactatctgaggctctttggtgtaacgggaaactgcgctgcctgtagtaagctcatccctgcctttgagatggtgatgcgtgccaaggacaatgtttaccacctggactgctttgcatgtcagctttgtaatcagagattttgtgttggagacaaattttt

SEQ ID NO: 86339 - DNA, 565 bp, Artificial Sequence
  derived and/or modified sequence
agtatcaacctcatccttcccttgaccgagacctttcactgctcctggactttcagggtgtgctatcctttgcctccccccaacaacctgtctgctgccctaaaaaaaaaattaaaaaaaaaaaagacggcaacctaaccggagcatctctgggacgccacagaaatcgtaactgaacacccgcacacaaaagtaatctgtgaggtgtgttttaaagaaagaaacagctgaaaacttgaagacgtgtttagaaatatacatatatacacactattttcttgtgggagatctcctttgggcaaaggtatacaaatgctctcagtccagccagacaccaagccgaaaggttgtgctggctgcaaccgaaagatcaaggaccggtatcttctaaaggcactggacaaatactggcatgaagactgcctgaagtgtgcctgctgtgactgtcgcttgggagaggtgggctccaccctgtacactaaagctaatcttatcctttgtcgcagagactatctgaggctctttggtgtaacgggaaactgcgctgcctgtagtaagctcatcc

SEQ ID NO: 86340 - DNA, 1574 bp, Artificial Sequence
  derived and/or modified sequence
agatctaactgtcaatacagtgagtagagtggagtccggagaagcgctacaaagcagccactgtgcttactgaacggcctccccctgtatcgcttaattgagaaggtatacaaatgctctcagtccagccagacaccaagccgaaaggttgtgctggctgcaaccgaaagatcaaggaccggtatcttctaaaggcactggacaaatactggcatgaagactgcctgaagtgtgcctgctgtgactgtcgcttgggagaggtgggctccaccctgtacactaaagctaatcttatcctttgtcgcagagactatctgaggctctttggtgtaacgggaaactgcgctgcctgtagtaagctcatccctgcctttgagatggtgatgcgtgccaaggacaatgtttaccacctggactgctttgcatgtcagctttgtaatcagagattttgtgttggagacaaatttttcctaaagaataacatgatcctttgccagacggactacgaggaaggtttaatgaaagaaggttatgcaccccaggttcgctgatctatcaacatcaccccattaagaatacaaagcactacattcttttatcttttttgctccacatgtacataagaattgacacaggaacctactgaatagcgtagatataggaaggcaggatggttatatggaataaaaggcggactgcatctgtatgtagtgaaattgccccagttcagagttgaatgtttattattaaagaaaaaagtaatgtacatatggctggatttttttgcttgctattcgtttttgtgtcacttggcatgagatgtttattttggactattgtatataatgtattgtaatatttgaagcacaaatgtaatacagttttattgtgttaccatttgtgttccatttgcttctttgtattgttgcatttagtacaatcagtgtttaaacttactgtatatttatgctttctgtatttaccagctattttaaatgagctgtaactttctagtaaagaattgaaaagcaaatctcactaatgatacacagatagataaagcaagtctatcaacattaaaaatactaaaaaataaagacacacacagagcattttagtgacatccactacttattgccgctatgagttagagtctatcagtgttcttgttataaccccctattttcagggggttaaaaatcagctttaaaaaaatacataaaaatttcatcttaaagcactttcattttataccaacgtgaaaagtgccatttttagaataactttaaagcttaacaggtttccttttaatatcctttttttgtgtgctctttacttacacaatggctttgttttgctttttcagccacaccccttatgtgaactagtgcctttgggtatcacgtaaaattttttccaaagggttactttaaaaatctgttaccacaattatgagatgatttttaagtgataaattaaacttcttcttgtataaattctgcccagatctctccacaagagctgagggtttcataactttatggcttaataaatgtatgacactgaaaagattt

SEQ ID NO: 86341 - DNA, 1762 bp, Artificial Sequence
  derived and/or modified sequence
atgtacagaacaagtcaactaaggggttctcattaatctaccgtctgtgaatatcgttatttttcaggagaagcgctacaaagcagccactgtgcttactgaacggcctccccctgtatcgcttaattgagaaggtatacaaatgctctcagtccagccagacaccaagccgaaaggttgtgctggctgcaaccgaaagatcaaggaccggtatcttctaaaggcactggacaaatactggcatgaagactgcctgaagtgtgcctgctgtgactgtcgctgggagaggctctttggtgtaacgggaaactgcgctgcctgtagtaagctcatccctgcctttgagatggtgatgcgtgccaaggacaatgtttaccacctggactgctttgcatgtcagctttgtaatcagagattttgtgttggagacaaatttttcctaaagaataacatgatcctttgccagacggactacgaggaaggtttaatgaaagaaggttatgcaccccaggttcgctgatctatcaacatcaccccattaagaatacaaagcactacattcttttatcttttttgctccacatgtacataagaattgacacaggaacctactgaatagcgtagatataggaaggcaggatggttatatggaataaaaggcggactgcatctgtatgtagtgaaattgccccagttcagagttgaatgtttattattaaagaaaaaagtaatgtacatatggctggatttttttgcttgctattcgtttttgtgtcacttggcatgagatgtttattttggactattgtatataatgtattgtaatatttgaagcacaaatgtaatacagttttattgtgttaccatttgtgttccatttgcttctttgtattgttgcatttagtacaatcagtgtttaaacttactgtatatttatgctttctgtatttaccagctattttaaatgagctgtaactttctagtaaagaattgaaaagcaaatctcactaatgatacacagatagataaagcaagtctatcaacattaaaaatactaaaaaataaagacacacacagagcattttagtgacatccactacttattgccgctatgagttagagtctatcagtgttcttgttataaccccctattttcagggggttaaaaatcagctttaaaaaaatacataaaaatttcatcttaaagcactttcattttataccaacgtgaaaagtgccatttttagaataactttaaagcttaacaggtttccttttaatatcctttttttgtgtgctctttacttacacaatggctttgttttgctttttcagccacaccccttatgtgaactagtgcctttgggtatcacgtaaaattttttccaaagggttactttaaaaatctgttaccacaattatgagatgatttttaagtgataaattaaacttcttcttgtataaattctgcccagatctctccacaagagctgagggtttcataactttatggcttaataaatgtatgacactgaaaagatttgagtgtgaatctactgaaatcactataatgcacattgaagctatgatggtatttgagtagtgaggttacttttgatcggagcaacataatgctcatagaatcttctagaagaagagaaacaaagggattgataaaatgctgagaactagtgattatatatttttctgtatttacctgacatttattttaatgttcaaaaagtaaacactttaagtttga

SEQ ID NO: 86342 - DNA, 530 bp, Artificial Sequence
  derived and/or modified sequence
atcatagatgcactttgctggcgctctgcactcctggccgctcaaaagcctttctgcttttccgctgcttttgtgtctttctgaaagaaccgaaatattattgttgtaactgctttgaaagactgctgcttaaaccaattaatcttgctagatgcaacaaatactgctacattctttgcaaaccatccctgtgtggctgcaaagacacaaccacaaaaggctggagcataaactccgcaagggattctttgttagagtgtatacaaatgctctcagtccagccagacaccaagccgaaaggttgtgctggctgcaaccgaaagatcaaggaccggtatcttctaaaggcactggacaaatactggcatgaagactgcctgaagtgtgcctgctgtgactgtcgcttgggagaggtgggctccaccctgtacactaaagctaatcttatcctttgtcgcagagactatctgaggctctttggtgtaacgggaaactgcgctgcctgtagtaagctcatccctgcctttgag

SEQ ID NO: 86343 - DNA, 590 bp, Artificial Sequence
  derived and/or modified sequence
ctctccttctctctctctctctcctccttgcttggcagtattacttgcttataagtgtgggggaaatggtaaaattgagaggaaaaggaagattggggaaaaaggaagaggatgggatgcacttagagatctgggtgtttgtcccttaagaaaaaggtgacaaagtggttaatgtctttgcaggagaagcgctacaaagcagccactgtgcttactgaacggcctccccctgtatcgcttaattgagaaggtatacaaatgctctcagtccagccagacaccaagccgaaaggttgtgctggctgcaaccgaaagatcaaggaccggtatcttctaaaggcactggacaaatactggcatgaagactgcctgaagtgtgcctgctgtgactgtcgcttgggagaggtgggctccaccctgtacactaaagctaatcttatcctttgtcgcagagactatctgaggctctttggtgtaacgggaaactgcgctgcctgtagtaagctcatccctgcctttgagatggtgatgcgtgccaaggacaatgtttaccacctggactgctttgcatgtcagctttgtaatcagag

SEQ ID NO: 86344 - DNA, 496 bp, Artificial Sequence
  derived and/or modified sequence
agtcctgaaaacatgtttctcagtgctgttggctgtttttcattggagcgtgtgagttttaaatagagaagcgctacaaagcagccactgtgcttactgaacggcctccccctgtatcgcttaattgagaaggtatacaaatgctctcagtccagccagacaccaagccgaaaggttgtgctggctgcaaccgaaagatcaaggaccggtatcttctaaaggcactggacaaatactggcatgaagactgcctgaagtgtgcctgctgtgactgtcgcttgggagaggtgggctccaccctgtacactaaagctaatcttatcctttgtcgcagagactatctgaggctctttggtgtaacgggaaactgcgctgcctgtagtaagctcatccctgcctttgagatggtgatgcgtgccaaggacaatgtttaccacctggactgctttgcatgtcagctttgtaatcagagattttgtgttggagacaaattttt

SEQ ID NO: 86345 - DNA, 471 bp, Artificial Sequence
  derived and/or modified sequence
atgcagaagaaggagaagagcttcggcatccagatgctgagcgtgcagccagacacgaaacctaagggctgcgccgggtgcaataggaaaattaaggatcggtatctcctgaaagcgctggataagtactggcatgaggactgcctcaagtgtgcctgctgcgattgtagactcggtgaggtgggtagcaccctgtacacaaaagctaacctcatcttatgcaggagagattacctccgtctcttcggagtgacaggtaactgcgctgcctgttctaagcttataccagccttcgaaatggtaatgagagctaaggacaacgtgtaccacctggattgcttcgcttgccaactttgcaaccaaaggttttgtgttggcgataagtttttcctcaagaacaacatgattctgtgccaaacagactacgaggaaggactcatgaaagaggggtatgccccacaagtgagatag

SEQ ID NO: 86346 - DNA, 471 bp, Artificial Sequence
  derived and/or modified sequence
atgcagaagaaggagaaatcatttggcattcagatgttgtctgttcaaccagatacaaagccgaagggctgcgccggatgtaataggaagatcaaagaccgatacttgctcaaggctttggacaaatactggcacgaagactgcctgaaatgcgcctgctgcgattgtcgcttaggggaggtgggttccactctatataccaaggctaacttgattctctgcaggagggactatcttcggctgttcggagtgacggggaattgtgctgcttgcagcaagcttattcccgcttttgaaatggtgatgagggccaaggacaatgtgtaccacctcgattgcttcgcctgtcagttgtgcaaccagaggttttgcgtgggggataagttctttcttaagaataacatgattctgtgtcagaccgattacgaagaggggttaatgaaggaagggtatgcccctcaggtacggtag

SEQ ID NO: 86347 - DNA, 471 bp, Artificial Sequence
  derived and/or modified sequence
atgcagaagaaggagaagagcttcggcatccagatgctgagcgtgcagcccgacaccaagcccaagggctgcgccggctgcaacagaaagatcaaggacagatacctgctgaaggccctggacaagtactggcacgaggactgcctgaagtgcgcctgctgcgactgcagactgggcgaggtgggcagcaccctgtacaccaaggccaacctgatcctgtgcagaagagactacctgagactgttcggcgtgaccggcaactgcgccgcctgcagcaagctgatccccgccttcgagatggtgatgagagccaaggacaacgtgtaccacctggactgcttcgcctgccagctgtgcaaccagagattctgcgtgggcgacaagttcttcctgaagaacaacatgatcctgtgccagaccgactacgaggagggcctgatgaaggagggctacgccccccaggtgagatag

SEQ ID NO: 86348 - protein, 145 aa, Artificial Sequence
  derived and/or modified sequence
MLSVQPDTKPKGCAGCNRKIKDRYLLKALDKYWHEDCLKCACCDCRLGEVGSTLYTKANLILCRRDYLRLFGVTGNCAACSKLIPAFEMVMRAKDNVYHLDCFACQLCNQRFCVGDKFFLKNNMILCQTDYEEGLMKEGYAPQVR

SEQ ID NO: 86349 - protein, 118 aa, Artificial Sequence
  derived and/or modified sequence
MLSVQPDTKPKGCAGCNRKIKDRYLLKALDKYWHEDCLKCACCDCRLGEVGSTLYTKANLILCRRDYLRLFGVTGNCAACSKLIPAFEMVMRAKDNVYHLDCFACQLCNQRFCVGDKF

SEQ ID NO: 86350 - protein, 58 aa, Artificial Sequence
  derived and/or modified sequence
MLSVQPDTKPKGCAGCNRKIKDRYLLKALDKYWHEDCLKCACCDCRLGEVGSTLYTKA

SEQ ID NO: 86351 - protein, 97 aa, Artificial Sequence
  derived and/or modified sequence
MLSVQPDTKPKGCAGCNRKIKDRYLLKALDKYWHEDCLKCACCDCRLGEVGSTLYTKANLILCRRDYLRLFGVTGNCAACSKLIPAFEMVMRAKDNV

SEQ ID NO: 86352 - protein, 84 aa, Artificial Sequence
  derived and/or modified sequence
MLSVQPDTKPKGCAGCNRKIKDRYLLKALDKYWHEDCLKCACCDCRLGEVGSTLYTKANLILCRRDYLRLFGVTGNCAACSKLI

SEQ ID NO: 86353 - protein, 163 aa, Artificial Sequence
  derived and/or modified sequence
MLMEGGRAAAARNVSSIQMLSVQPDTKPKGCAGCNRKIKDRYLLKALDKYWHEDCLKCACCDCRLGEVGSTLYTKANLILCRRDYLRLFGVTGNCAACSKLIPAFEMVMRAKDNVYHLDCFACQLCNQRFCVGDKFFLKNNMILCQTDYEEGLMKEGYAPQVR

SEQ ID NO: 86354 - protein, 125 aa, Artificial Sequence [sequence omitted]

SEQ ID NO: 86355 - protein, 88 aa, Artificial Sequence
  derived and/or modified sequence
MLSVQPDTKPKGCAGCNRKIKDRYLLKALDKYWHEDCLKCACCDCRLGEVGSTLYTKANLILCRRDYLRLFGVTGNCAACSKLIPAFE

SEQ ID NO: 86356 - protein, 110 aa, Artificial Sequence
  derived and/or modified sequence
MLSVQPDTKPKGCAGCNRKIKDRYLLKALDKYWHEDCLKCACCDCRLGEVGSTLYTKANLILCRRDYLRLFGVTGNCAACSKLIPAFEMVMRAKDNVYHLDCFACQLCNQ

SEQ ID NO: 86357 - DNA, 492 bp, Artificial Sequence
  derived and/or modified sequence
atgctcatggaaggcggaagagcagccgcagcccgcaatgtgagctccattcagatgctgagtgtgcagccagacactaagcctaagggttgtgccggctgcaatagaaaaatcaaggatcgctacctcctgaaagcactcgataagtactggcacgaggactgccttaagtgcgcctgttgtgactgtcgcctgggcgaagttggatcaactttgtacactaaggcaaatctgattctctgccgcagagactatctgcggcttttcggtgtcactgggaattgtgcggcctgctcaaagctgatccccgccttcgagatggtgatgcgcgccaaggacaatgtttaccacttagactgttttgcctgtcagctctgcaaccagagattctgcgtgggagacaaattcttcctgaagaacaacatgatcctttgtcagaccgactacgaagagggactaatgaaggagggctacgccccccaggtccgatag

SEQ ID NO: 86358 - DNA, 492 bp, Artificial Sequence
  derived and/or modified sequence
atgctgatggagggcggccgggctgctgctgccagaaatgtgagcagcatccagatgctgtctgtgcagcctgacaccaagcccaagggctgtgccggctgcaacaggaagatcaaggaccgctacctgctgaaggccctggacaagtactggcatgaggactgcctgaagtgtgcctgctgtgactgccgcctgggggaggtgggcagcaccctgtacaccaaggccaacctgatcctgtgccggcgggactacctgcggctgtttggagtgacaggcaactgtgccgcctgcagcaagctgatcccagcctttgagatggtgatgagggccaaggacaacgtgtaccacctggactgctttgcctgccagctgtgcaaccagcgcttctgtgtgggggacaagttcttcctgaagaacaacatgatcctgtgccagacagattatgaggagggcctgatgaaggagggctacgccccccaggtgaggtag

SEQ ID NO: 86359 - DNA, 1488 bp, Artificial Sequence
  derived and/or modified sequence
ttccccaacctctgctaatgaggcataaactggagctgcaacccagctccgcactgcaactttcactcgggctgcagctctactgagacggttttgtttaaatcatgtgaggcttcattatttttatgatgagacatgaaatagatgcaggcggaagatgttgatggaaggagggagagcggctgcggcgcggaacgtctcaagtatacaaatgctctcagtccagccagacaccaagccgaaaggttgtgctggctgcaaccgaaagatcaaggaccggtatcttctaaaggcactggacaaatactggcatgaagactgcctgaagtgtgcctgctgtgactgtcgcttgggagaggtgggctccaccctgtacactaaagctaatcttatcctttgtcgcagagactatctgaggctctttggtgtaacgggaaactgcgctgcctgtagtaagctcatccctgcctttgagatggtgatgcgtgccaaggacaatgtttaccacctggactgctttgcatgtcagctttgtaatcagagattttgtgttggagacaaatttttcctaaagaataacatgatcctttgccagacggactacgaggaaggtttaatgaaagaaggttatgcaccccaggttcgctgatctatcaacatcaccccattaagaatacaaagcactacattcttttatcttttttgctccacatgtacataagaattgacacaggaacctactgaatagcgtagatataggaaggcaggatggttatatggaataaaaggcggactgcatctgtatgtagtgaaattgccccagttcagagttgaatgtttattattaaagaaaaaagtaatgtacatatggctggatttttttgcttgctattcgtttttgtgtcacttggcatgagatgtttattttggactattgtatataatgtattgtaatatttgaagcacaaatgtaatacagttttattgtgttaccatttgtgttccatttgcttctttgtattgttgcatttagtacaatcagtgtttaaacttactgtatatttatgctttctgtatttaccagctattttaaatgagctgtaactttctagtaaagaattgaaaagcaaatctcactaatgatacacagatagataaagcaagtctatcaacattaaaaatactaaaaaataaagacacacacagagcattttagtgacatccactacttattgccgctatgagttagagtctatcagtgttcttgttataaccccctattttcagggggttaaaaatcagctttaaaaaaatacataaaaatttcatcttaaagcactttcattttataccaacgtgaaaagtgccatttttagaataactttaaagcttaacaggtttccttttaatatcctttttttgtgtgctctttacttacacaatggctttgttttgctttttcagccacaccccttatgtgaactagtg

SEQ ID NO: 86360 - DNA, 983 bp, Artificial Sequence
  derived and/or modified sequence
actcgggctgcagctctactgagacggttttgtttaaatcatgtgaggcttcattatttttatgatgagacatgaaatagatgcaggcggaagatgttgatggaaggagggagagcggctgcggcgcggaacgtctcaagtatacaaatgctctcagtccagccagacaccaagccgaaaggttgtgctggctgcaaccgaaagatcaaggaccggtatcttctaaaggcactggacaaatactggcatgaagactgcctgaagtgtgcctgctgtgactgtcgcttgggagaggtgggctccaccctgtacactaaagctaatcttatcctttgtcgcagagactatctgaggctctttggtgtaacgggaaactgcgctgcctgtagtaagctcatccctgcctttgagatggtgatgcgtgccaaggacaatgtttaccacctggactgctttgcatgtcagctttgtaatcagagattttgtgttggagacaaatttttcctaaagaataacatgatcctttgccagacggactacgaggaaggtttaatgaaagaaggttatgcaccccaggttcgctgatctatcaacatcaccccattaagaatacaaagcactacattcttttatcttttttgctccacatgtacataagaattgacacaggaacctactgaatagcgtagatataggaaggcaggatggttatatggaataaaaggcggactgcatctgtatgtagtgaaattgccccagttcagagttgaatgtttattattaaagaaaaaagtaatgtacatatggctggatttttttgcttgctattcgtttttgtgtcacttggcatgagatgtttattttggactattgtatataatgtattgtaatatttgaagcacaaatgtaatacagttttattgtgttaccatttgtgttccatttgcttctttgtattgttgcatttagtacaatcagtgttt

SEQ ID NO: 86361 - DNA, 573 bp, Artificial Sequence
  derived and/or modified sequence
gagaaaacacagctctgtcaatggactgaatgcaccattaaaactggcgtcactacaaaggttagagcagatctaactgtcaatacagtatacaaatgctctcagtccagccagacaccaagccgaaaggttgtgctggctgcaaccgaaagatcaaggaccggtatcttctaaaggcactggacaaatactggcatgaagactgcctgaagtgtgcctgctgtgactgtcgcttgggagaggtgggctccaccctgtacactaaagctaatcttatcctttgtcgcagagactatctgaggctctttggtgtaacgggaaactgcgctgcctgtagtaagctcatccctgcctttgagatggtgatgcgtgccaaggacaatgtttaccacctggactgctttgcatgtcagctttgtaatcagagattttgtgttggagacaaatttttcctaaagaataacatgatcctttgccagacggactacgaggaaggtttaatgaaagaaggttatgcaccccaggttcgctgatctatcaacatcaccccattaagaatacaaagcactacat

SEQ ID NO: 86362 - DNA, 492 bp, Artificial Sequence
  derived and/or modified sequence
atgctgatggagggcggccgggccgccgccgcccggaacgtgagcagtatccagatgctgtcagtgcagcccgatacaaaacccaagggatgtgctggttgcaatcggaaaataaaggaccgctacttacttaaggccttggataaatactggcatgaggactgtctgaagtgtgcctgttgtgactgcagattgggcgaggtaggctccaccctgtacactaaggcaaatcttattctctgcagaagagactatcttaggctattcggcgtgaccgggaattgtgctgcatgctcaaagctcatcccagcattcgaaatggtgatgagagccaaggacaacgtctatcacctggactgtttcgcttgtcagctgtgcaatcagaggttctgcgtgggggacaaatttttcctgaagaataacatgatcttatgtcagactgactatgaagaaggcttgatgaaggagggttatgctccacaggtcagatag

SEQ ID NO: 86363 - DNA, 492 bp, Artificial Sequence
  derived and/or modified sequence
atgcttatggagggcggacgcgcagcagcagcccgtaacgtctcaagtatccagatgctgagtgtgcaaccagacacgaagcccaagggctgtgccggatgtaaccggaagatcaaggataggtacctattgaaagcgctcgacaagtactggcacgaagactgtctgaagtgcgcctgttgcgattgccgtctgggcgaagtgggctcaaccctctacaccaaagccaatctgatcctgtgtagacgcgattatctgcggctgttcggggtgaccgggaactgcgctgcctgctccaagcttatcccggctttcgagatggtgatgagggcaaaagataacgtgtatcacctcgattgcttcgcttgccaattatgtaatcagcgcttctgcgtgggcgacaagttcttcctcaaaaacaacatgatcctctgccagaccgactatgaagaggggcttatgaaagaaggctatgctccccaggtccgatag

SEQ ID NO: 86364 - DNA, 492 bp, Artificial Sequence
  derived and/or modified sequence
atgctgatggagggcggcagagccgccgccgccagaaacgtgagcagcatccagatgctgagcgtgcagcccgacaccaagcccaagggctgcgccggctgcaacagaaagatcaaggacagatacctgctgaaggccctggacaagtactggcacgaggactgcctgaagtgcgcctgctgcgactgcagactgggcgaggtgggcagcaccctgtacaccaaggccaacctgatcctgtgcagaagagactacctgagactgttcggcgtgaccggcaactgcgccgcctgcagcaagctgatccccgccttcgagatggtgatgagagccaaggacaacgtgtaccacctggactgcttcgcctgccagctgtgcaaccagagattctgcgtgggcgacaagttcttcctgaagaacaacatgatcctgtgccagaccgactacgaggagggcctgatgaaggagggctacgccccccaggtgagatag

SEQ ID NO: 86365 - protein, 170 aa, Artificial Sequence
  derived and/or modified sequence
MSRLGLPEEPVRNSLLDDAKARLRKYDIGGKYSHLPYNKYSVLLPLVAKEGKLHLLFTVRSEKLRRAPGEVCFPGGKRDPTDMDDAATALREAQEEVGLRPHQVEVVCCLVPCLIDRWGSRYVDEAGLELLASSDPPTSASQSAGITDRYIDNSICGFNRPQLPGPAESC

SEQ ID NO: 86366 - DNA, 513 bp, Artificial Sequence
  derived and/or modified sequence
atgagcagactgggcctgcccgaggagcccgtgagaaacagcctgctggacgacgccaaggccagactgagaaagtacgacatcggcggcaagtacagccacctgccctacaacaagtacagcgtgctgctgcccctggtggccaaggagggcaagctgcacctgctgttcaccgtgagaagcgagaagctgagaagagcccccggcgaggtgtgcttccccggcggcaagagagaccccaccgacatggacgacgccgccaccgccctgagagaggcccaggaggaggtgggcctgagaccccaccaggtggaggtggtgtgctgcctggtgccctgcctgatcgacagatggggcagcagatacgtggacgaggccggcctggagctgctggccagcagcgacccccccaccagcgccagccagagcgccggcatcaccgacagatacatcgacaacagcatctgcggcttcaacagaccccagctgcccggccccgccgagagctgctag

SEQ ID NO: 86367 - DNA, 513 bp, Artificial Sequence
  derived and/or modified sequence
atgagcaggctcggcctgccagaggagcctgtccggaatagcctgttagacgatgcaaaggcccgcctgcggaaatacgacattggtgggaagtatagccatttgccttataataagtacagtgtacttttgcctctggtggcaaaggagggcaaactgcacttgctttttacagtgcggtccgaaaaattgcgacgcgcgcccggagaagtgtgcttccccggaggcaagagggatcctacagacatggacgacgctgcgactgcactccgcgaagcacaggaagaggtggggctgcgcccccatcaggttgaggtagtgtgctgtctcgtcccctgcctgattgaccgatggggctcccgctacgtagacgaagcgggcctggaacttctcgcgtccagcgacccgcctacgtccgcgagccagagcgccggcattacagatcgttacattgataatagcatttgcggcttcaaccgcccacagctgccggggcctgccgaatcctgctag

SEQ ID NO: 86368 - DNA, 513 bp, Artificial Sequence
  derived and/or modified sequence
atgagccggctgggcctgcctgaggagcctgtgaggaacagcctgctggatgatgccaaggcccggctgaggaaatatgacatcggcggcaagtacagccacctgccctacaacaagtacagcgtgctgctgcccctggtggccaaggagggcaagctgcacctgctcttcaccgtgcgctctgagaagctgcggcgggcccctggagaggtgtgcttccctgggggcaagagggaccccacagacatggatgatgctgccacagccctgcgggaggcccaggaggaggtgggcctgcggccccaccaggtggaggtggtgtgctgcctggtgccctgcctgattgaccgctggggcagccgctacgtggatgaggccggcctggagctgctggccagcagtgacccccccaccagcgccagccagagcgctggcatcacagaccgctacatcgacaacagcatctgtggcttcaaccggccccagctgcccggccctgctgagagctgctag

SEQ ID NO: 86369 - DNA, 513 bp, Artificial Sequence
  derived and/or modified sequence
atgagccggctgggcctgcccgaggagcccgtgcggaacagcctgttggacgatgcgaaggctcgactcaggaaatatgacattggcgggaagtattcccaccttccctacaataaatactccgtcttgctcccactggtagcgaaggaagggaagttgcatttactgttcacggttcggagcgaaaagctaaggcgcgccccaggagaagtgtgctttcctggaggaaaaagagacccaaccgatatggatgacgctgccaccgcactccgggaggcccaggaagaagtgggcttgagacctcatcaggtcgaggtggtgtgctgtctggtgccatgcctgatcgaccggtggggctcccggtacgtggacgaggcaggcttagaactccttgcttctagcgatccccctacctcagcctcccagtcagctgggatcaccgacagatacatagataactctatctgcggatttaatcggcctcagctccccggcccagccgagagttgttag

SEQ ID NO: 86370 - DNA, 513 bp, Artificial Sequence
  derived and/or modified sequence
atgtcccggctgggcttgcctgaagaaccagtcagaaactcattactagatgatgcaaaggctcgcctacgcaaatacgatatcgggggtaagtattcacaccttccgtataacaaatatagtgtcctgttgccacttgttgcgaaggagggcaagctccatctgctgttcaccgttcgctccgaaaaactgagacgcgctccaggagaggtatgcttccccggtggcaaacgggacccaacagatatggatgatgctgcaaccgccctgcgcgaagcgcaggaggaggttggcttacgacctcatcaagttgaggtggtatgttgtttggtcccctgcctgatcgaccggtggggttcaaggtatgtggacgaagcaggattggagttgttggctagctccgaccctcctacctcagctagtcagtctgccggaatcactgataggtatattgacaactcaatatgtggtttcaaccggcctcagctacccggacccgctgagtcgtgctag

SEQ ID NO: 86371 - protein, 106 aa, Artificial Sequence
  derived and/or modified sequence
MAQEFVNCKIQPGKVVVFIKPTCPYCRRAQEILSQLPIKQGLLEFVDITATNHTNEIQDYLQQLTGARTVPRVFIGKDCIGGCSDLVSLQQSGELLTRLKQIGALQ

SEQ ID NO: 86372 - DNA, 321 bp, Artificial Sequence
  derived and/or modified sequence
atggctcaggagtttgtcaattgcaagatccaacccggaaaggtcgtcgtgttcatcaagcctacctgcccatattgcaggcgagctcaggagattctgagtcagttacctatcaaacaaggactgctggaattcgtggatattaccgccactaatcataccaacgagatccaagattatctgcaacaactgacgggggctcgcactgtacccagggttttcatcgggaaagattgtattggggggtgcagtgacttggtgtccctgcagcagagcggtgagctgctgacccgcctgaagcagatcggtgccctgcagtag

SEQ ID NO: 86373 - DNA, 321 bp, Artificial Sequence
  derived and/or modified sequence
atggcccaagaatttgtcaattgcaaaatacagccaggtaaggtggtggttttcatcaaacccacttgcccatactgtagaagggcacaggaaatcctgtcccagctacccattaagcagggcctgctggaatttgtggatattacagctaccaaccacaccaatgagattcaggactatctgcagcagctgacaggggcccgtacagtacctagagtttttattggtaaggattgtatcggcggctgctccgacctggtctctttacagcaaagcggtgaattactgactcgcctaaagcaaatcggagccctgcagtag

SEQ ID NO: 86374 - DNA, 321 bp, Artificial Sequence
  derived and/or modified sequence
atggcacaagagtttgtgaactgcaagatccagcctggtaaggtggtagtgtttatcaagccgacttgcccctattgcagaagagcacaggaaatcctaagtcagcttcccatcaagcaaggcctgctcgaatttgtggacatcaccgctaccaatcacacaaatgagatacaggactatctgcagcagctgaccggggctcgcactgtcccacgcgtgtttatagggaaggattgtatcggtggctgctctgacctagttagcttgcaacagtccggtgaactcctcacaaggctgaagcaaataggtgccctccaatag

SEQ ID NO: 86375 - DNA, 321 bp, Artificial Sequence
  derived and/or modified sequence
atggcgcaggaatttgttaattgcaaaatccagccaggtaaggtcgtggtgttcataaagccaacctgtccatactgtaggcgcgctcaagaaatcctatcccagctcccaatcaaacagggtctcctggagttcgtggatatcacagccacaaaccacaccaatgagattcaggactacctgcagcaattgaccggagcccgcaccgtgccaagggtctttattggtaaggactgcattggaggatgttcggatctggtctccctgcagcagagcggagaactactgacccgcctgaagcagataggtgccctccagtag

SEQ ID NO: 86376 - DNA, 321 bp, Artificial Sequence
  derived and/or modified sequence
atggctcaagagtttgtcaattgtaaaatccagccaggcaaagtggtggttttcataaaaccaacctgtccttattgtagacgggcgcaagaaatacttagccagctgccaatcaagcagggactgctggagttcgtcgatatcactgccaccaatcatactaatgagatacaggactacttacagcaactgacaggggcaaggaccgtaccccgtgtcttcattgggaaggattgcatcggcggctgtagcgacttggtatcgctgcagcagtccggggaactcctcacacgccttaagcagatcggcgctttgcagtag

SEQ ID NO: 86377 - DNA, 1211 bp, Artificial Sequence
  derived and/or modified sequence
gtaagcactttatgcttccccagaggtgactaaactctgatcattgccaatgggcaggcactccccaaatgtccaaggacaacaaagatacccagagtgtctttcatagctaccaatgattaaatagcaagtattgcattcctgggcattgctaactagtgaagtataccagatggaaatgtcttcgaagctgtccctttaaaactcgagcaagctaccaggcaaactccgcctccagggaggttccttattaaataggagccaactggctgggtcggggctcaataccccaagcaatacctgcaactgaggattcttcccggggagaccgcagcccatcggcatggctcaagagtttgtgaactgcaaaatccagcctgggaaggtggttgtgttcatcaagcccacctgcccgtactgcaggagggcccaagagatcctcagtcaattgcccatcaaacaagggcttctggaatttgtcgatatcacagccaccaaccacactaacgagattcaagattatttgcaacagctcacgggagcaagaacggtgcctcgagtctttattggtaaagattgtataggcggatgcagtgatctagtctctttgcaacagagtggggaactgctgacgcggctaaagcagattggagctctgcagtaaccacagatctcataggaaatgttcaacaattctgtgaaaggtcacaggacccaattggagaaatcatatgaaaagcatagttggtcttggtgtcatatggatcagaggcacaagtgcagaggctgtggtcatgcggaacactctgttatttaagatggctatccagataatcctgaacactgtgtatttattttatttagactaccagcaaagattaaagcatgaaatgtaaaacatctgataaaacttacagccccctacaccaagagtgtatctgtgaaagagctcctacactttgaaaacttaagaatcccttatcatgaagtttgcctgttctagaattgtaagattgttaatttccttcaatctctagtgacaacacttaatttcttttctaataaaaaaaacctatagatgattcagtgatttttgtccaattcatttgcatgttctcaagacattaaggaatgttatgcgaaatacactaacttaaaactgtgtttatatttggccctgccattataaataaagacacgtgctgctgtca

SEQ ID NO: 86378 - DNA, 1366 bp, Artificial Sequence
  derived and/or modified sequence
aagcaatacctgcaactgaggattcttcccggggagaccgcagcccatcggcatggctcaagagtttgtgaactgcaaaatccagcctgggaaggtggttgtgttcatcaagcccacctgcccgtactgcaggagggcccaagagatcctcagtcaattgcccatcaaacaagggcttctggaatttgtcgatatcacagccaccaaccacactaacgagattcaagattatttgcaacagctcacgggagcaagaacggtgcctcgagtctttattggtaaagattgtataggcggatgcagtgatctagtctctttgcaacagagtggggaactgctgacgcggctaaagcagattggagctctgcagtaaccacagaacaggccccatgctgacgtccctcctcaagagctggatggcattgcaaatgatgacagcacttctggtggatgaatttgggggcacaaacagcttttttcctcttttggctcagtatttaaaagtggaccaacttgctcttaatcacagggccaagaaggttgacgggccatcttggttttcttctggatgtgctctttggttttcagaagactgtgacaagttctggcccaggattcgctcactgaccctcaattgtcctctttggcatgcgtttcttactgttctccatgtgtcggcatgtctctacctctaagccagtgtttttcaactatgtttatccagactccttctccacaatgatgaatccacagttggttatctgctactgcccattagctaaaatcattttgctgcttgactttatggagtttgtattatgaaatcagtgggtattttgaatgtgttctttctaactacatgcatctctccactcaactccaccccatcccatcccaccttgaaaatcactgctctgaaccagtgttctccaccttgtcctccacagatctcataggaaatgttcaacaattctgtgaaaggtcacaggacccaattggagaaatcatatgaaaagcatagttggtcttggtgtcatatggatcagaggcacaagtgcagaggctgtggtcatgcggaacactctgttatttaagatggctatccagataatcctgaacactgtgtatttattttatttagactaccagcaaagattaaagcatgaaatgtaaaacatctgataaaacttacagccccctacaccaagagtgtatctgtgaaagagctcctacactttgaaaacttaagaatcccttatcatgaagtttgcctgttctagaattgtaagattgttaatttccttcaatctctagtgacaacacttaatttcttttctaataaaaaaaacctatagatgattcagtg

SEQ ID NO: 86379 - DNA, 632 bp, Artificial Sequence
  derived and/or modified sequence
aataccccaagcaatacctgcaactgaggattcttcccggggagaccgcagcccatcggcatggctcaagagtttgtgaactgcaaaatccagcctgggaaggtggttgtgttcatcaagcccacctgcccgtactgcaggagggcccaagagatcctcagtcaattgcccatcaaacaagggcttctggaatttgtcgatatcacagccaccaaccacactaacgagattcaagattatttgcaacagctcacgggagcaagaacggtgcctcgagtctttattggtaaagattgtataggcggatgcagtgatctagtctctttgcaacagagtggggaactgctgacgcggctaaagcagattggagctctgcagtaaccacagggccaagaaggttgacgggccatcttggttttcttctggatgtgctctttggttttcagaagactgtgacaagttctggcccaggattcgctcactgaccctcaattgtcctctttggcatgcgtttcttactgttctccatgtgtcggcatgtctctacctctaagccagtgtttttcaactatgtttatccagactccttctccacaatgatgaatccacagttggttatctgctactgccca

SEQ ID NO: 86380 - DNA, 533 bp, Artificial Sequence
  derived and/or modified sequence
gctcaataccccaagcaatacctgcaactgaggattcttcccggggagaccgcagcccatcggcatggctcaagagtttgtgaactgcaaaatccagcctgggaaggtggttgtgttcatcaagcccacctgcccgtactgcaggagggcccaagagatcctcagtcaattgcccatcaaacaagggcttctggaatttgtcgatatcacagccaccaaccacactaacgagattcaagattatttgcaacagctcacgggagcaagaacggtgcctcgagtctttattggtaaagattgtataggcggatgcagtgatctagtctctttgcaacagagtggggaactgctgacgcggctaaagcagattggagctctgcagtaaccacagaaatggagtatcactatgttgctcaagctagactcaaactcctggactcaagggatcctcccgcctcagccttccaagtcactgggattataagtgcatgccatcccacgcagctactctcttgaatactcgagaaagccaa

SEQ ID NO: 86381 - DNA, 473 bp, Artificial Sequence
  derived and/or modified sequence
caatacctgcaactgaggattcttcccggggagaccgcagcccatcggcatggctcaagagtttgtgaactgcaaaatccagcctgggaaggtggttgtgttcatcaagcccacctgcccgtactgcaggagggcccaagagatcctcagtcaattgcccatcaaacaagggcttctggaatttgtcgatatcacagccaccaaccacactaacgagattcaagattatttgcaacagctcacgggagcaagaacggtgcctcgagtctttattggtaaagattgtataggcggatgcagtgatctagtctctttgcaacagagtggggaactgctgacgcggctaaagcagattggagctctgcagtaaccacaggtgagtggcaggtgaggtgctgggccaggaacatgggagaccgtggaattcttctgtcgtggtttgttatactgtatgacagcattctggttggggg

SEQ ID NO: 86382 - DNA, 321 bp, Artificial Sequence
  derived and/or modified sequence
atggcccaggagtttgtgaactgcaagatccagcccgggaaggtggtggtgttcatcaagcccacctgcccctactgcagaagagcccaggagatcctgagccagctgcccatcaagcagggcctgctggagtttgtggacatcacagccaccaaccacaccaatgagatccaggactacctgcagcagctgactggagccaggacagtgcccagggtcttcatcggcaaggactgcatcggcggctgcagcgacctggtgtccctgcagcagagcggggagctgctgacccggctgaagcagatcggggccctgcagtag

SEQ ID NO: 86383 - DNA, 321 bp, Artificial Sequence
  derived and/or modified sequence
atggcccaggagttcgtgaactgcaagatccagcccggcaaggtggtggtattcatcaaaccaacttgcccatactgtagacgagcacaggaaatcttaagccagctgccaatcaagcagggtctgcttgagtttgtagacatcacagccactaatcataccaatgagatccaagactatttgcagcagctcaccggagcaaggactgtgcccagggtgtttattgggaaggactgtatcggaggctgtagcgacctcgtgagtttgcagcagtctggcgagctgcttactaggctgaaacagatcggggctctccagtag

SEQ ID NO: 86384 - DNA, 321 bp, Artificial Sequence
  derived and/or modified sequence
atggcccaggagttcgtgaactgcaagatccagcccggcaaggtggtcgtgtttatcaagccaacttgtccctactgccggcgggcacaagagatcctatcccagctcccaattaaacaggggttactagagtttgtagacattactgctacaaatcataccaacgaaatccaagattaccttcagcagctgaccggcgctcggacggtgcctagagtgttcatagggaaggactgcatcggcggctgttcagacttagtaagcctgcagcagtccggagagctgctcaccagattgaaacaaattggtgcactgcaatag

SEQ ID NO: 86385 - DNA, 321 bp, Artificial Sequence
  derived and/or modified sequence
atggcccaggagttcgtgaactgcaagatccagcccggcaaggtggtagtctttatcaagccaacttgcccctactgccgaagggctcaggagattctgagtcagctgccaatcaagcagggcttactggaatttgttgacattacagccacgaaccatacaaacgagattcaggactatctccagcaattaaccggagcaagaacagtaccccgggtattcattggcaaagactgtattggtggttgttcagacctcgtctccctccagcagagcggagagctgctgactcgcttgaaacagatcggcgccctacagtag

SEQ ID NO: 86386 - DNA, 321 bp, Artificial Sequence
  derived and/or modified sequence
atggcccaggagttcgtgaactgcaagatccagcccggcaaggtggtggttttcatcaaacctacctgtccttactgtaggcgggcacaagaaattctgtcgcagctacccatcaagcagggactgctcgaattcgttgacatcaccgcaactaaccacactaatgaaatccaggactaccttcaacaattgacgggagcccgcaccgtgcctcgagtgtttatcggcaaagattgtattgggggctgctccgacctcgtgtcactacagcagagcggggaactgctcactcgccttaagcagattggcgccctgcagtag

SEQ ID NO: 86387 - DNA, 321 bp, Artificial Sequence
  derived and/or modified sequence
atggcccaggagttcgtgaactgcaagatccagcccggcaaggtggtggtctttattaagcccacttgcccatattgccggcgcgctcaagagattttgtcccagctccccatcaaacagggactgctcgagtttgtggatatcaccgccactaaccacaccaacgaaattcaggactacctacaacaacttaccggcgctcggacagtgcccagggtgttcattgggaaggattgcattggcggatgctcggatctcgtgtctctgcagcagtccggagaattgttgacacggctgaagcagattggcgccctccaatag

SEQ ID NO: 86388 - DNA, 321 bp, Artificial Sequence
  derived and/or modified sequence
atggctcaggaattcgtgaactgtaaaatacagcctggcaaagtggtggtgttcatcaagcctacgtgtccgtattgccgccgtgcccaagaaatactgtctcaactgcctatcaaacaggggttgctcgagtttgtcgacatcaccgccacaaatcacacaaacgaaatccaggactaccttcagcagctgacaggtgctcggactgtaccacgggttttcattggaaaggattgtattggcggatgctcagaccttgtcagtctccagcagagcggcgaattgcttaccaggttgaaacagatcggggcacttcaatag

SEQ ID NO: 86389 - DNA, 321 bp, Artificial Sequence
  derived and/or modified sequence
atggcccaggagtttgttaattgtaagatacagccaggaaaagtggtggtcttcatcaagccaacgtgtccgtattgtcggagggcccaggaaatcctgtcacagctgcccatcaagcagggcctgctggagttcgtggatatcaccgcaaccaatcatactaacgagatccaggattacctacagcagctgaccggcgctcgtacagtgcccagggtgtttattggaaaagactgtatcggcggatgctctgacctagtctctctgcagcaaagcggggagctgttgactcgcctcaagcaaattggcgcactgcaatag

SEQ ID NO: 86390 - DNA, 321 bp, Artificial Sequence
  derived and/or modified sequence
atggcccaggagttcgtcaactgtaagatccaaccagggaaggtggtggttttcattaagccaacttgcccttattgtcgcagggcccaggagattctgagccagttaccaattaagcaggggctgttggagtttgtggacatcactgcaactaaccataccaatgagattcaggactacctgcagcagctgactggagcacgcaccgtccctcgcgtgttcataggaaaagattgtattggcggttgtagcgatttggtgtcactgcaacaatccggggaactgctgactaggttaaagcagattggcgcactgcaatag

SEQ ID NO: 86391 - DNA, 321 bp, Artificial Sequence
  derived and/or modified sequence
atggctcaggagtttgttaactgtaagatccagcccggaaaggtcgtcgtgtttattaagcctacctgcccctactgtagaagagcccaggagatattgtcccagctaccaatcaagcagggactgcttgaattcgtggatattacagccactaaccatactaacgaaatacaagattatctgcagcaactgaccggagcgagaactgtacccagggtgtttattggcaaagattgtatcggcggatgtagcgacttggtgtccctgcaacagagtggagagctgttaacccgcttgaagcaaatcggcgctttgcaatag

SEQ ID NO: 86392 - DNA, 321 bp, Artificial Sequence
  derived and/or modified sequence
atggcccaggagttcgtgaattgcaaaattcagccgggtaaggtggtggtgttcatcaaacccacatgcccttactgtcgcagggctcaagagatccttagccagctccctataaaacagggattgctggagttcgtagatattactgctaccaatcacactaacgaaattcaggattacctgcagcaacttaccggggcaagaactgtcccacgagtgtttattgggaaggactgcattggtggttgctcagacttagtgtcccttcagcaaagcggcgagctgttgaccaggctgaagcagatcggggctttgcagtag

SEQ ID NO: 86393 - DNA, 321 bp, Artificial Sequence
  derived and/or modified sequence
atggcccaggagttcgtgaactgcaagatccagcccggcaaggtggtggtgttcatcaagcccacctgcccctactgcagaagagcccaggagatcctgagccagctgcccatcaagcagggcctgctggagttcgtggacatcaccgccaccaaccacaccaacgagatccaggactacctgcagcagctgaccggcgccagaaccgtgcccagagtgttcatcggcaaggactgcatcggcggctgcagcgacctggtgagcctgcagcagagcggcgagctgctgaccagactgaagcagatcggcgccctgcagtag

SEQ ID NO: 86394 - protein, 185 aa, Artificial Sequence
  derived and/or modified sequence
MSRLGLPEEPVRNSLLDDAKARLRKYDIGGKYSHLPYNKYSVLLPLVAKEGKLHLLFTVRSEKTDTLITPFVGLIDHNFQAQPNPAEVKDVFLVPLAYFLHPQVHDQHYVTRLGHRFINHIFEYTNPEDGVTYQIKGMTANLAVLVAFIILEKKPTFEVQFNLNDVLASSEELFLKVHKKATSRL

SEQ ID NO: 86395 - DNA, 558 bp, Artificial Sequence
  derived and/or modified sequence
atgagcagactgggcctgcccgaggagcccgtgagaaacagcctgctggacgacgccaaggccagactgagaaagtacgacatcggcggcaagtacagccacctgccctacaacaagtacagcgtgctgctgcccctggtggccaaggagggcaagctgcacctgctgttcaccgtgagaagcgagaagaccgacaccctgatcacccccttcgtgggcctgatcgaccacaacttccaggcccagcccaaccccgccgaggtgaaggacgtgttcctggtgcccctggcctacttcctgcacccccaggtgcacgaccagcactacgtgaccagactgggccacagattcatcaaccacatcttcgagtacaccaaccccgaggacggcgtgacctaccagatcaagggcatgaccgccaacctggccgtgctggtggccttcatcatcctggagaagaagcccaccttcgaggtgcagttcaacctgaacgacgtgctggccagcagcgaggagctgttcctgaaggtgcacaagaaggccaccagcagactgtag

SEQ ID NO: 86396 - DNA, 558 bp, Artificial Sequence
  derived and/or modified sequence
atgtccagactgggattacctgaagagcctgttcgaaattcccttttagacgatgcaaaagccagattacggaagtacgatattggcggaaagtattcccatctgccctacaataagtatagcgtgctccttccgctggtggcaaaagagggtaagctgcatcttctgtttaccgttcgatctgaaaaaacggacaccctgataactccattcgtgggcctgatcgaccataacttccaggcccagccaaatcccgccgaagttaaagatgttttcctggtccccctggcctattttctgcatccacaggtgcatgatcagcactacgtcacccggctgggccatagattcatcaaccatatcttcgagtacacgaacccagaggacggcgtgacttaccaaataaaaggcatgaccgccaatctagccgtcctggtggcattcatcatcctggaaaagaaacccacgtttgaggtgcagtttaatctcaacgacgtcttagcatcaagcgaagagttgttcctcaaggtgcacaagaaggccacaagccggctctag

SEQ ID NO: 86397 - DNA, 558 bp, Artificial Sequence
  derived and/or modified sequence
atgagccggctgggcctgcctgaggagcctgtgaggaacagcctgctggatgatgccaaggcccggctgaggaaatatgacatcggcggcaagtacagccacctgccctacaacaagtacagcgtgctgctgcccctggtggccaaggagggcaagctgcacctgctcttcaccgtgcgctctgagaagacagacaccctcatcaccccatttgtgggcctgattgaccacaacttccaggcccagcccaacccagctgaggtgaaggatgtgttcctggtgcccctggcctacttcctgcacccccaggtgcatgaccagcactacgtgacccggctgggccaccgcttcatcaaccacatctttgagtacaccaacccagaagatggagtgacctaccagatcaagggcatgacagccaacctggccgtgctggtggccttcatcatcctggagaagaagcccacctttgaggtgcagttcaacctgaatgatgtgctggccagcagcgaggagctgttcctgaaggtgcacaagaaggccaccagccggctgtag

SEQ ID NO: 86398 - DNA, 558 bp, Artificial Sequence
  derived and/or modified sequence
atgagccggctgggcctgcccgaggagcccgtgcggaacagcctgctggacgatgccaaggccaggttgagaaagtatgacatcggcgggaaatactcccacttaccttataataaatatagcgtgttgctccccctggtcgccaaggagggcaagcttcacctgctgtttacggttcgtagcgaaaaaacagatactcttatcacgccattcgttggactgattgaccacaatttccaggcacagccaaatccggcagaagtcaaggacgtgttcctggtacctctcgcctactttctgcacccacaggttcacgatcagcattacgtcacccgcctgggccatcggtttatcaaccacatctttgagtacacgaacccagaggacggagtgacctaccagatcaaaggaatgacagcaaaccttgcagtgttagtggctttcataatcttggaaaagaaaccaacatttgaagtgcaattcaatctcaacgacgtcctagcctccagcgaagagctcttcctgaaggtacataagaaagccaccagcaggttgtag

SEQ ID NO: 86399 - DNA, 558 bp, Artificial Sequence
  derived and/or modified sequence
atgtcacgacttggtcttcccgaggagccagtcagaaacagtttgctagatgatgctaaggcccgcttaagaaagtatgatattggaggcaaatattctcacttgccatataacaaatactccgtccttttgccattggtggctaaagaaggaaaactccatttgttgttcaccgtccggtcagagaagacagatacattgataactccatttgtgggtttaatagaccacaacttccaggcccagccgaatcctgctgaagttaaggatgtattcctggtgcctctggcctatttcctgcatccacaggtccatgaccagcattacgtcacacgtcttggtcaccgttttattaatcatatctttgagtacacaaaccctgaagacggtgtcacttaccagatcaagggaatgacggcaaaccttgcagtgttggtggcctttatcattttggaaaaaaaacccacctttgaggttcaatttaatcttaatgatgtattagcatcctctgaagagttattcctgaaggttcataaaaaagctacaagcaggttatga

SEQ ID NO: 86400 - DNA, 558 bp, Artificial Sequence
  derived and/or modified sequence
atgtcaaggctaggattaccagaggagccggttcgaaactcccttctggacgacgcgaaggcgaggctgcgcaaatacgacattggtggtaaatacagccatcttccttacaataaatatagcgtgctcctgccgttggtagcaaaggaggggaaactgcatctccttttcacagtgaggagcgagaagacggacactctgattactcccttcgtgggactgatagatcacaatttccaggcccagccaaatcccgcagaagtcaaggatgttttcctcgtgcccctggcctatttcctgcaccctcaggtacacgaccagcactatgtgactaggctcggacacagatttatcaaccacatttttgagtacacaaaccccgaggacggagtcacttaccagataaagggcatgaccgctaacctggccgtgctggtggccttcattatactggaaaaaaaacctacattcgaagtgcagtttaatctgaatgacgttctagctagcagcgaagaactgttcctcaaagtccacaagaaagcgacatcccggctgtag

SEQ ID NO: 86401 - protein, 373 aa, Artificial Sequence
  derived and/or modified sequence
MALSRVCWARSAVWGSAVTPGHFVTRRLQLGRSGLAWGAPRSSKLHLSPKADVKNLMSYVVTKTKAINGKYHRFLGRHFPRFYVLYTIFMKGLQMLWADAKKARRIKTNMWKHNIKFHQLPYREMEHLRQVWARGRYPEVHGEFRQDVTKCLFLGIISIPPFANYLVFLLMYLFPRQLLIRHFWTPKQQTDFLDIYHAFRKQSHPEIISYLEKVIPLISDAGLRWRLTDLCTKIQRGTHPAIHDILALRECFSNHPLGMNQLQALHVKALSRAMLLTSYLPPPLLRHRLKTHTTVIHQLDKALAKLGIGQLTAQEVKSACYLRGLNSTHIGEDRCRTWLGEWLQISCSLKEAELSLLLHNVVLLSTNYLGTRR

SEQ ID NO: 86402 - DNA, 1122 bp, Artificial Sequence
  derived and/or modified sequence
atggccctgagcagagtgtgctgggccagaagcgccgtgtggggcagcgccgtgacccccggccacttcgtgaccagaagactgcagctgggcagaagcggcctggcctggggcgcccccagaagcagcaagctgcacctgagccccaaggccgacgtgaagaacctgatgagctacgtggtgaccaagaccaaggccatcaacggcaagtaccacagattcctgggcagacacttccccagattctacgtgctgtacaccatcttcatgaagggcctgcagatgctgtgggccgacgccaagaaggccagaagaatcaagaccaacatgtggaagcacaacatcaagttccaccagctgccctacagagagatggagcacctgagacaggtgtgggccagaggcagataccccgaggtgcacggcgagttcagacaggacgtgaccaagtgcctgttcctgggcatcatcagcatcccccccttcgccaactacctggtgttcctgctgatgtacctgttccccagacagctgctgatcagacacttctggacccccaagcagcagaccgacttcctggacatctaccacgccttcagaaagcagagccaccccgagatcatcagctacctggagaaggtgatccccctgatcagcgacgccggcctgagatggagactgaccgacctgtgcaccaagatccagagaggcacccaccccgccatccacgacatcctggccctgagagagtgcttcagcaaccaccccctgggcatgaaccagctgcaggccctgcacgtgaaggccctgagcagagccatgctgctgaccagctacctgcccccccccctgctgagacacagactgaagacccacaccaccgtgatccaccagctggacaaggccctggccaagctgggcatcggccagctgaccgcccaggaggtgaagagcgcctgctacctgagaggcctgaacagcacccacatcggcgaggacagatgcagaacctggctgggcgagtggctgcagatcagctgcagcctgaaggaggccgagctgagcctgctgctgcacaacgtggtgctgctgagcaccaactacctgggcaccagaagatag

SEQ ID NO: 86403 - DNA, 1122 bp, Artificial Sequence
  derived and/or modified sequence
atggctttgagcagagtgtgctgggcaaggtcggcagtatggggatccgctgtaacgccaggacacttcgtcaccagaaggcttcagctgggacggtctggtctcgcctggggtgctcccagatcttccaagctgcacctgtctcctaaggccgacgtgaaaaatcttatgtcttatgtggtcacaaaaaccaaagccattaatggcaaatatcatcgattcctgggaaggcacttcccccgtttttatgtgctgtatacaatcttcatgaagggcttgcagatgctgtgggctgacgcaaaaaaggcccgccggatcaagactaacatgtggaaacacaatatcaagttccaccagctgccctaccgtgagatggagcacctaagacaagtgtgggccagaggtcgatatcccgaggtgcacggggaatttaggcaggatgtgactaaatgtctctttttggggatcatttccatccccccctttgccaattatcttgtctttttattgatgtatttgtttcccaggcaactgctgatccgtcatttctggacgcccaaacagcagaccgactttttagacatataccatgcattcaggaaacagtcacatccagagataatctcatatctggagaaagtgatccctctgatatcggacgcggggctgaggtggcggctgacggatctgtgtactaaaatacaacgagggacgcatcctgctattcacgacatccttgccctgcgcgaatgcttttcaaaccatcccttaggaatgaaccagctgcaagccctgcatgtcaaagctctttccagagcaatgcttctcacctcttacttgccaccacctctgctaaggcataggctgaagactcataccacagttatccatcagctggataaagcactggccaagttggggatcggccaactgactgctcaagaagtcaaatctgcctgttaccttcgcggactgaattccacccatatcggagaggacaggtgccggacttggttaggagaatggctgcagatttcttgcagcctcaaagaagcggagctaagcctgctcctccacaacgttgtgttactgtctactaattacctgggtacccgtagatag

SEQ ID NO: 86404 - DNA, 2123 bp, Artificial Sequence
  derived and/or modified sequence
cgcttctctcgctgtgaagatggcgctctccagggtgtgctgggctcggtcggctgtgtggggctcggcagtcacccctggacattttgtcacccggaggctgcaacttggtcgctctggcctggcttggggggcccctcggtcttcaaagcttcacctttctccaaaggcagatgtgaagaacttgatgtcttatgtggtaaccaagacaaaagcgattaatgggaaataccatcgtttcttgggtcgtcatttcccccgcttctatgtcctgtacacaatcttcatgaaaggattgcagatgttatgggctgatgccaaaaaggctagaagaataaagacaaatatgtggaagcacaatataaagtttcatcaacttccataccgggagatggagcatttgagacaggtatgggccaggggcagatatccagaagttcatggtgagttccgccaagacgtcaccaagtgtcttttcctaggtattatttccattccaccttttgccaactacctggtcttcttgctaatgtacctgtttcccaggcaactactgatcaggcatttctggaccccaaaacaacaaactgatttcttagatatctatcatgctttccggaagcagtcccacccagaaattattagttatttagaaaaggtcatccctctcatttctgatgcaggactccggtggcgtctgacagatctgtgcaccaagatacagcgtggtacccacccagcaatacatgatatcttggctctgagagagtgtttctctaaccatcctctgggcatgaaccaactccaggctttgcacgtgaaagccttgagccgggccatgcttctcacatcttacctgcctcctcccttgttgagacatcgtttgaagactcatacaactgtgattcaccaactggacaaggctttggcaaagctggggattggccagctgactgctcaggaagtaaaatcggcttgttatctccgtggcctgaattctacgcatattggtgaagataggtgtcgaacttggctgggagaatggctgcagatttcctgcagcctgaaagaagctgagctgtctctcttgctgcacaacgtggtcctgctctccaccaactaccttgggacaaggcgctgaatgaaccatggagcggatggcattgtcctgcagtcgtatagtatagcagtgcaggaacaaacagcacttgccagcaaagtctgtgtgtactgttaagtgtgtgggaggcagagagaggagcaggggccatgggcttcacagcatggcacacatgtgggaactgcagacattcctctcacagctagaactgaaacaaaccctcttgctaggggtggtccgtgtgaggtgtcatcctgtccccctcataattactaatagctggaactggcagcagcctctactgggcttttactgtgatgtgttcagttcatgtcctaggaagtcagcttttgccccaggtgggaatccttatttggcttaggactgatccacttccatgttacttacatctgtgggtttttgttgttgctgttagaaaatttgtggctggtgaaaacagcactcctttggctggagcacatgtgtccgtgcatgtacttgggtgtttccctccatcctttctgatatgaccaaaaatcaagttgttttgttttttgtcaccttcactggcatgggctaaccacttctttttcaaaccctctgaacacctttttctgatgggtaacttgcaggaatattctattggaaaagataacaggaagtacaagtgcttcttgaccccttcctcaatgtttctagccttcactctccattgtcttttctgggctgtattacagccctctgtggatcttcaactctgctgcctccactgtgatgcagcagtccaactgtaactgacagtggctgccttctctgggccatggatcacacctgtaaggtactaattactgcccagcctggggagatcaggagaggtctgcatagttagtaagttgggtttagcttttgtgtgtgcatcagtgacttagagttctgtaataacttattgtaaatgcatgaagcactgtttttaaacccaagtaaagactgcttgaaacctgtt

SEQ ID NO: 86405 - DNA, 1122 bp, Artificial Sequence
  derived and/or modified sequence
atggccctgagccgggtgtgctgggcccggtctgctgtgtggggcagcgctgtgaccccaggccactttgtgacccggcggctgcagctgggccgcagcggcctggcctggggcgcccccaggagcagcaagctgcacctgagccccaaggcagatgtgaagaacctgatgtcctatgtggtgaccaagaccaaggccatcaacgggaagtaccaccgcttcctgggccgccacttcccccgcttctacgtgctgtacaccatcttcatgaagggcctgcagatgctgtgggcagatgccaagaaggcccggcgcatcaagaccaacatgtggaagcacaacatcaagttccaccagctgccctaccgggagatggagcacctgcggcaggtgtgggcccggggccgctacccagaggtgcatggagagttccggcaggatgtgaccaagtgcctcttcctgggcatcatcagcatccccccatttgccaactacctggtgttcctgctgatgtacctgttcccccggcagctgctgatccgccacttctggacccccaagcagcagacagacttcctggacatctaccacgccttcaggaagcagagccaccctgagatcatctcctacctggagaaggtgatccccctcatcagtgatgctggcctgcgctggaggctgacagacctgtgcaccaagatccagaggggcacccacccagccatccatgacatcctggccctgcgggagtgcttcagcaaccaccccctgggcatgaaccagctgcaggccctgcacgtgaaggccctgagccgggccatgctgctgaccagctacctgcccccacccctgctgcggcaccggctgaagacccacaccaccgtcatccaccagctggacaaggccctggccaagctgggcatcggccagctgacagcccaggaggtgaagagcgcctgctacctgcggggcctgaacagcacccacatcggggaggaccgctgcaggacctggctgggggagtggctgcagatcagctgcagcctgaaggaggccgagctgagcctgctgctgcacaacgtggtgctgctgagcaccaactacctgggcaccaggaggtag

SEQ ID NO: 86406 - DNA, 1122 bp, Artificial Sequence
  derived and/or modified sequence
atggccctgagccgggtgtgctgggcccggagcgccgtgtggggctccgctgtgaccccaggacatttcgtgaccaggagactgcagctcgggcgctccggactagcttggggcgcaccaaggtccagcaaacttcacctgtctcctaaggccgacgttaaaaatctgatgagctatgtcgtgacaaagacgaaagcgataaacgggaagtatcatcgattcttagggaggcattttcccaggttttacgttttgtacactatctttatgaaaggtcttcaaatgctttgggccgacgccaaaaaggcacggagaataaagactaatatgtggaagcacaatattaaatttcatcagcttccttatagggaaatggagcacttgcgccaggtctgggctcgaggaagataccccgaggttcacggcgaattccggcaggacgtgaccaaatgtttatttctggggataatttccatccccccatttgcaaattatttggtgtttctcctgatgtatcttttcccccgtcaactgcttattaggcatttttggactcccaagcagcagacggatttcttagatatctaccacgcctttcggaagcagtcacacccggaaatcatctcatacttagaaaaggtcatcccactcatttcagatgctggattacggtggagactgacagacctctgcacgaagatccagcgtggcacccatccagccatccacgatatcctggccctgcgggaatgtttttcaaaccatccattaggcatgaatcagctgcaagcacttcacgtaaaagcgctctccagagccatgctccttacttcatacttgccccctcctctgctgcgacacaggctaaagacccatacaaccgtaatccaccagctggacaaagccctggccaagctcggtattggacaactcaccgctcaagaggttaagtccgcctgctatctcagggggctcaattctactcatattggcgaggacagatgccggacatggcttggcgagtggctccagattagttgttccttgaaggaagccgagctcagtctcctcctgcataatgtggtactgttgtccaccaactatctcggcacacgacgctag

SEQ ID NO: 86407 - DNA, 1122 bp, Artificial Sequence
  derived and/or modified sequence
atggccctgtcccgggtctgctgggccagatctgctgtgtggggcagcgctgtgacacccggacactttgtcacacgtagactgcagttagggcgaagcggtctggcttggggtgcccctaggtctagcaagcttcacctgagtcctaaggcagacgtgaagaatctgatgtcatatgtggtgacaaaaacaaaagcaataaacggaaagtaccatcgctttttaggccgacattttccacggttctacgtactctatacaatatttatgaaaggtctgcaaatgctttgggcagacgcaaagaaggcgagacggatcaagactaatatgtggaaacacaacattaagttccaccaactgccttatagagagatggaacatttgcgccaagtctgggctagagggaggtatcccgaggtccatggtgagtttcgccaggatgtgactaagtgcctttttcttggtataatcagcattcctcccttcgcaaactatcttgttttcctgctcatgtatctgttcccaagacagttgctcatacgccacttctggacccctaaacaacagaccgactttctcgacatctatcatgctttcagaaagcaatcacaccctgaaatcatttcttatctcgaaaaggtgatccctctaatatcagacgccggtctgcgatggagacttaccgacttatgtaccaagatccagagagggacccatcctgcaattcacgacatcctggctctgcgcgagtgcttctcaaatcatcccctgggcatgaatcagttacaggctttgcacgtcaaagcactttccagggcaatgctgctcacctcttacctccctccccctctcctgcgtcacaggctgaaaacacacaccacggttatacatcagctcgacaaggctctagctaagttagggatcggccagttgaccgctcaggaagttaagagtgcatgctacctgcgcggtctgaactccacacatattggggaggatcggtgtaggacatggctgggggagtggctgcagatttcctgttctcttaaggaggccgagctatccctgttgttgcataacgtcgtattgttgagcactaattacctgggcactcgcaggtag

SEQ ID NO: 86408 - protein, 104 aa, Artificial Sequence
  derived and/or modified sequence
MSTGGDFGNPLRKFKLVFLGEQSVGKTSLITRFMYDSFDNTYQATIGIDFLSKTMYLEDRTLFRRVAAALPGMESTQDRSREDMIDIKLEKPQEQPVSEGGCSC

SEQ ID NO: 86409 - DNA, 315 bp, Artificial Sequence
  derived and/or modified sequence
atgagcacggggggagacttcggcaacccactgcggaaatttaaactcgtgttcctcggagaacagtctgtcggtaagacaagcctcattacacgctttatgtacgacagttttgacaacacatatcaggccaccattgggattgatttcctgtcaaagacaatgtatctcgaggatcgcaccctgtttcggagagtagccgcagccttgccaggcatggagtctactcaggatcgttccagggaagacatgattgacatcaagctcgagaaaccccaggaacaaccagtctccgagggggggtgctcctgttag

SEQ ID NO: 86410 - DNA, 144 bp, Artificial Sequence
  derived and/or modified sequence
atgagtactggtggggatttcggcaaccccctccgtaaattcaaacttgtattccttggagaacagagtgtggggaagacatcgttgatcacaagatttatgtacgattcgtttgacaacacataccaggcgacaattggatag

SEQ ID NO: 86411 - DNA, 315 bp, Artificial Sequence
  derived and/or modified sequence
atgagcactggaggagactttggaaaccccctgaggaagttcaagctggtgttcctgggggagcagagcgtgggcaagaccagcctcatcacccgcttcatgtatgacagctttgacaacacctaccaggccaccatcggcatcgacttcctgagcaagaccatgtacctggaggacaggaccctcttccggcgggtggccgccgccctgcccggcatggagagcacccaggacaggagccgggaggacatgattgacatcaagctggagaagccccaggagcagcctgtgtctgagggcggctgcagctgctag

SEQ ID NO: 86412 - DNA, 144 bp, Artificial Sequence
  derived and/or modified sequence
atgagcactggaggagactttggaaaccccctgaggaagttcaagctggtgttcctgggggagcagagcgtgggcaagaccagcctcatcacccgcttcatgtatgacagctttgacaacacctaccaggccaccatcggctag

SEQ ID NO: 86413 - DNA, 315 bp, Artificial Sequence
  derived and/or modified sequence
atgagcaccggcggcgacttcggcaaccccctgcggaagttcaagctggtttttcttggtgagcagagcgttgggaaaacttctttaatcactagattcatgtatgacagcttcgacaacacgtaccaggccaccatagggatagactttttgagcaaaaccatgtacctggaggatagaactctgtttcggagggtggccgctgccctccccggcatggaaagcacacaggatcgctctcgcgaggatatgattgacatcaagttggagaagccccaggagcagccggtgtccgagggaggttgcagctgttag

SEQ ID NO: 86414 - DNA, 144 bp, Artificial Sequence
  derived and/or modified sequence
atgagcaccggcggcgacttcggcaaccccctgcggaagttcaagctagtgttccttggagagcagagtgtcgggaaaacaagccttatcacaagatttatgtatgactccttcgataacacctaccaggcaacaattggctag

SEQ ID NO: 86415 - DNA, 315 bp, Artificial Sequence
  derived and/or modified sequence
atgtccactggaggcgactttggcaatcctctacgtaagttcaaactcgtcttcctcggtgaacagtcagtcggaaagactagcctgatcacccgatttatgtacgactctttcgacaacacataccaagccacaattggcatagactttctctccaagacaatgtacctggaggatcgcactctattccgtcgcgtcgcagccgctctgcctgggatggagagtacgcaggaccgctctcgcgaggatatgatcgacattaaactcgaaaagccccaagaacagcccgttagtgaggggggttgcagctgctag

SEQ ID NO: 86416 - DNA, 144 bp, Artificial Sequence
  derived and/or modified sequence
atgtccaccggtggggatttcggaaatccactcaggaagtttaagctagtctttctaggcgagcagtccgtagggaagacaagcctgattactagatttatgtacgatagctttgataacacctatcaggccaccattggctag

SEQ ID NO: 86417 - DNA, 758 bp, Artificial Sequence
  derived and/or modified sequence
actcagcaggttgggctgcggcggcggcggcagctgtggaagctcaggcgctgcgcgtgagaggtcccagatacgtctgcggttccggctccgccaccctcagcttctcttccccaggtctgggagccgagtgcggaaggagggaacggccctagctttgggaagccagaggacacccctggctcctgccgacaccgccctccttcccttcccagccgcgggcctcgctcggtgctaggctactctgccgggaggcggcggcggctgccagtctgtggagagtcctgctgccctccagccgggctcctccaccgggccttgcaggggccgagagagctcggtgcccgcccttccgctcgcctttttcgtcagctggctggagcagcatcggtccgggaggtctctaggctgaggcggcggccgctcctctagttccacaatgtccacgggcggagacttcgggaatccgctgaggaaattcaagctggtgttcctgggggagcaaagcgttggaaagacatctttgatcaccagattcatgtatgacagttttgacaacacctatcaggcaacaattggcattgactttttatcaaaaactatgtacttggaggatcgaacactctttcgacgtgtagcagcagctttgccgggaatggaaagcacacaggacagaagcagagaagatatgattgacataaaactggaaaagcctcaggagcaaccagtcagtgaaggaggctgttcctgctaatctc

SEQ ID NO: 86418 - DNA, 569 bp, Artificial Sequence
  derived and/or modified sequence
gcgccgctccagaggctcgcgcactcagcaggttgggctgcggcggcggcggcagctgtggaagctcaggcgctgcgcgtgagaggtcccagatacgtctgcggttccggctccgccaccctcagcttctcttccccaggtctgggagccgagtgcggaaggagggaacggccctagctttgggaagccagaggacacccctggctcctgccgacaccgccctccttcccttcccagccgcgggcctcgctcggtgctaggctactctgccgggaggcggcggcggctgccagtctgtggagagtcctgctgccctccagccgggctcctccaccgggccttgcaggggccgagagagctcggtgcccgcccttccgctcgcctttttcgtcagctggctgaggcggcggccgctcctctagttccacaatgtccacgggcggagacttcgggaatccgctgaggaaattcaagctggtgttcctgggggagcaaagcgttggaaagacatctttgatcaccagattcatgtatgacagttttgacaacacctatcaggcaacaattgg

SEQ ID NO: 86419 - DNA, 315 bp, Artificial Sequence
  derived and/or modified sequence
atgagcaccggcggcgacttcggcaaccccctgagaaagttcaagctggtgttcctgggcgagcagagcgtgggcaagaccagcctgatcaccagattcatgtacgacagcttcgacaacacctaccaggccaccatcggcatcgacttcctgagcaagaccatgtacctggaggacagaaccctgttcagaagagtggccgccgccctgcccggcatggagagcacccaggacagaagcagagaggacatgatcgacatcaagctggagaagccccaggagcagcccgtgagcgagggcggctgcagctgctag

SEQ ID NO: 86420 - DNA, 144 bp, Artificial Sequence
  derived and/or modified sequence
atgagcaccggcggcgacttcggcaaccccctgagaaagttcaagctggtgttcctgggcgagcagagcgtgggcaagaccagcctgatcaccagattcatgtacgacagcttcgacaacacctaccaggccaccatcggctag

SEQ ID NO: 86421 - DNA, 528 bp, Artificial Sequence
  derived and/or modified sequence
atgtacgattcctttgacaatacctatcaggccactattgggattgacttccttagcaagactatgtacctggaggatagaaccattaggttgcagctgtgggacaccgctggtcaggagcgcttccggagcctgatccccagctatatacgggacagtgccgctgcagtggtggtctatgacattaccaacgtcaactccttccagcagaccacaaagtggatagatgatgttcggactgagagaggctcagacgtcattatcatgttggtggggaataagacagatttggccgataagcggcaggtgagcattgaggaaggggagagaaaagctaaggaattgaatgtgatgttcattgaaacaagcgccaaggcaggttataatgttaagcagctgtttaggcgggttgccgcggccttgcccgggatggagagcacccaagataggtctcgggaggatatgatcgatatcaagcttgaaaagccgcaggagcaaccagtgagcgaaggaggctgctcatgttag

SEQ ID NO: 86422 - DNA, 528 bp, Artificial Sequence
  derived and/or modified sequence
atgtatgacagctttgacaacacctaccaggccaccatcggcatcgacttcctgagcaagaccatgtacctggaggacaggaccatccggctgcagctgtgggacacagctggccaggagcgcttccgcagcctcatccccagctacatccgggacagcgctgctgctgtggtggtgtatgacatcaccaacgtgaacagcttccagcagaccaccaagtggattgatgatgtgaggacagagcggggcagtgatgtgatcatcatgctggtgggcaacaagacagacctggccgacaagaggcaggtgtccattgaggagggggagaggaaggccaaggagctgaatgtgatgttcatcgagaccagcgccaaggccggctacaacgtgaagcagctgttcagaagagtggccgccgccctgcccggcatggagagcacccaggacaggagccgggaggacatgattgacatcaagctggagaagccccaggagcagcctgtgtctgagggcggctgcagctgctag

SEQ ID NO: 86423 - DNA, 528 bp, Artificial Sequence
  derived and/or modified sequence
atgtacgacagcttcgacaacacctaccaggccaccatcggcatcgacttcttgagcaaaaccatgtatttggaagaccgcacgattcgcctgcagctttgggacacagctggtcaggaacggtttcgctcactcatcccatcctatatccgagattcagccgcggccgtcgtcgtgtacgatatcaccaacgttaattctttccagcagactaccaagtggatagacgacgttcgtaccgagagaggctctgacgtcatcatcatgctcgttgggaataagaccgatttagcagataagcgacaggtgtctattgaagaaggcgagcgcaaggcaaaggaactcaacgtgatgttcatcgaaacttccgctaaagcaggctacaatgtgaaacagttatttcgtagggtggctgccgctctgccaggtatggagagcacacaggacaggtcccgcgaagatatgattgacattaagctggaaaagccccaggaacaacccgtgtccgagggtggctgctcgtgctag

SEQ ID NO: 86424 - DNA, 528 bp, Artificial Sequence
  derived and/or modified sequence
atgtatgacagcttcgataatacctatcaggcaactataggaattgattttctatctaagaccatgtacttggaggaccgcacaataagactgcaactatgggacaccgcaggccaggaaagattccgctctctcattccatcctatatacgcgacagcgccgcagctgtggtggtctacgatattactaacgtgaacagttttcagcaaacaaccaaatggatcgacgatgttaggacagagcgaggatctgacgtgataataatgctagtcggcaacaagacagatctcgcggacaaaagacaggtgagcatcgaagagggcgaacgcaaagctaaagagcttaatgtgatgttcattgagacatcagcaaaggctgggtataacgtgaagcaactgtttcggagggtcgctgccgctctgcccggaatggagagtactcaggaccgctcgagagaagatatgatcgatatcaaactggagaaaccacaggagcagccagtgagcgagggagggtgcagctgctag

SEQ ID NO: 86425 - DNA, 528 bp, Artificial Sequence
  derived and/or modified sequence
atgtacgacagcttcgacaacacctaccaggccaccatcggcatcgacttcctgagcaagaccatgtacctggaggacagaaccatcagactgcagctgtgggacaccgccggccaggagagattcagaagcctgatccccagctacatcagagacagcgccgccgccgtggtggtgtacgacatcaccaacgtgaacagcttccagcagaccaccaagtggatcgacgacgtgagaaccgagagaggcagcgacgtgatcatcatgctggtgggcaacaagaccgacctggccgacaagagacaggtgagcatcgaggagggcgagagaaaggccaaggagctgaacgtgatgttcatcgagaccagcgccaaggccggctacaacgtgaagcagctgttcagaagagtggccgccgccctgcccggcatggagagcacccaggacagaagcagagaggacatgatcgacatcaagctggagaagccccaggagcagcccgtgagcgagggcggctgcagctgctag

SEQ ID NO: 86426 - protein, 313 aa, Artificial Sequence
  derived and/or modified sequence
MSDLLLLGLIGGLTLLLLLTLLAFAGYSGLLAGVEVSAGSPPIRNVTVAYKFHMGLYGETGRLFTESCSISPKLRSIAVYYDNPHMVPPDKCRCAVGSILSEGEESPSPELIDLYQKFGFKVFSFPAPSHVVTATFPYTTILSIWLATRRVHPALDTYIKERKLCAYPRLEIYQEDQIHFMCPLARQGDFYVPEMKETEWKWRGLVEAIDTQVDGTGADTMSDTSSVSLEVSPGSRETSAATLSPGASSRGWDDGDTRSEHSYSESGASGSSFEELDLEGEGPLGESRLDPGTEPLGTTKWLWEPTAPEKGKE

SEQ ID NO: 86427 - protein, 104 aa, Artificial Sequence
  derived and/or modified sequence
MSDLLLLGLIGGLTLLLLLTLLAFAGYSGLLAGVEVSAGSPPIRNVTVAYKFHMGLYGETGRLFTESCSISPKLRSIAVYYDNPHMVPPDKCRCAVGSILSEGE

SEQ ID NO: 86428 - protein, 151 aa, Artificial Sequence
  derived and/or modified sequence
MSDLLLLGLIGGLTLLLLLTLLAFAGYSGLLAGVEVSAGSPPIRNVTVAYKFHMGLYGETGRLFTESCSISPKLRSIAVYYDNPHMVPPDKCRCAVGSILSEGEESPSPELIDLYQKFGFKVFSFPAPSHVVTATFPYTTILSIWLATRRV

SEQ ID NO: 86429 - protein, 217 aa, Artificial Sequence
  derived and/or modified sequence
MSDLLLLGLIGGLTLLLLLTLLAFAGYSGLLAGVEVSAGSPPIRNVTVAYKFHMGLYGETGRLFTESCSISPKLRSIAVYYDNPHMVPPDKCRCAVGSILSEGEESPSPELIDLYQKFGFKVFSFPAPSHVVTATFPYTTILSIWLATRRVHPALDTYIKERKLCAYPRLEIYQEDQIHFMCPLARQGDFYVPEMKETEWKWRGLVEAIDTQVDGTG

SEQ ID NO: 86430 - protein, 216 aa, Artificial Sequence
  derived and/or modified sequence
MSDLLLLGLIGGLTLLLLLTLLAFAGYSGLLAGVEVSAGSPPIRNVTVAYKFHMGLYGETGRLFTESCSISPKLRSIAVYYDNPHMVPPDKCRCAVGSILSEGEESPSPELIDLYQKFGFKVFSFPAPSHVVTATFPYTTILSIWLATRRVHPALDTYIKERKLCAYPRLEIYQEDQIHFMCPLARQGDFYVPEMKETEWKWRGLVEAIDTQVDGT

SEQ ID NO: 86431 - DNA, 942 bp, Artificial Sequence
  derived and/or modified sequence
atgtctgacctcctcctcctcggacttatcgggggtttaactttgctattgctccttacactgctcgcctttgcaggctactcgggcctgcttgccggagtcgaagtgagcgctggatcaccaccgatccggaacgttacagttgcatataaatttcatatgggcctctatggggagacaggccgtctgttcactgagagctgttctataagccccaaactgcgctcaattgccgtctattacgataatccgcatatggttcctcctgataagtgccgatgtgctgtagggtcgatcctatccgaaggagaagaaagcccctcccccgaactaatcgacctttaccagaagttcggcttcaaggttttttcttttcctgcaccatcgcatgttgtcactgccacattcccatacacaaccatcctgtctatatggctggccacgcgccgagtccacccagctctcgacacatatatcaaagaacgcaagttgtgcgcctacccgaggctggagatataccaagaggatcagatacattttatgtgccctctggccagacagggcgacttctatgtgcccgaaatgaaagagacagaatggaagtggcgaggtctcgttgaagcgatcgatacccaggtggatggcacaggtgcggacacaatgagcgataccagctcagttagtctggaagtgagccctggctctcgcgagacgtccgccgctactctgtcgcctggcgctagctcaagaggctgggatgacggcgatacaagaagcgagcattcgtactcggaatccggcgcaagcggaagttccttcgaggagctggacttagaaggcgaaggcccactcggggaatctcgcctggatcccggtactgaaccactcggcaccaccaaatggctgtgggaaccgactgcccctgaaaaaggaaaagaatag

SEQ ID NO: 86432 - DNA, 942 bp, Artificial Sequence
  derived and/or modified sequence
atgagcgatttactgctgctgggcttgataggcggtttgacactgcttctcttgttgaccctgttagctttcgcaggatattccggtttgctcgccggagtagaggtgagtgcaggtagcccccctattaggaacgtaacagtggcgtataaattccacatgggactgtatggagagacagggagactgtttaccgagagctgctctatctcccctaaacttcgcagcattgccgtttattacgataatccgcacatggtgccgcctgacaagtgcagatgtgcagtgggatccattctgagcgagggcgaagagagccccagcccggagttaattgacctgtaccagaagttcggatttaaagtgttctcatttcccgcaccctcacatgttgtcactgcaaccttcccatatacgacaatcctgagcatctggctggcaacccgccgtgtgcatcccgcactggatacatacattaaggaaaggaaattatgtgcctatcccagactggagatttatcaggaggaccaaatccactttatgtgtcccttggcccgacaaggagacttttacgtgccagagatgaaggagacggagtggaaatggagggggctggtggaggccattgacacacaggtcgatggcactggagcggatacaatgtccgatacctcatccgtttcactcgaagtgtcccccggtagtcgcgagacgtccgccgctacattaagccctggtgccagcagccgcggttgggacgacggagatactcggagcgagcatagctattcggagtctggcgctagcggttcctccttcgaggaactcgacctggaaggagaggggccactgggcgagtcccggcttgaccccggaactgagcccctcggaactactaagtggctgtgggagccgacagctcctgagaaagggaaggagtag

SEQ ID NO: 86433 - DNA, 423 bp, Artificial Sequence
  derived and/or modified sequence
atgtcagacttgctccttctgggactgatcggcggactcactcttctgctgctcctgacattactggcattcgctggatactcgggcctccttgcaggcgtggaagtcagcgccggatcacctcccattcgcaatgtcactgtggcttataagtttcacatgggcctgtacggtgaaactgggcgtttattcacagagtcatgcagtattagtccaaaactgcggtcaatcgccgtgtactacgacaacccgcacatggttccacctgacaaatgtcgctgcgccgtaggctcaatcctcagtgaaggggaggaaagcccatccccagagcttatcgatctgtaccaaaagtttgggttcaaagtcttcagctttcccgcaccaagccacgtggtcaccgcaacttttccatatactacatag

SEQ ID NO: 86434 - DNA, 942 bp, Artificial Sequence
  derived and/or modified sequence
atgtccgatctgctccttttgggtcttatcggtggcctaactctgttgttgcttctgactctgctcgccttcgctggatacagcggtttactggccggagtggaggtgagcgccggtagccctcccatccggaatgtcacagtggcttataagtttcatatgggtttgtacggagagactggtcgattgtttaccgaaagctgttcaatcagcccaaagctgcggtctatcgcagtgtactatgacaatccgcacatggtgccaccagacaagtgtaggtgcgccgtgggatctatcttgagcgaaggggaggagagtccctcacccgagctgatcgacctttatcagaagttcggttttaaggtgttctcattcccagcaccctcgcatgtcgttactgccacttttccttacacgactattctgtcgatctggctggcaacccggagagtacaccccgctctggatacatacatcaaagagcgaaaactgtgtgcttacccacgcttagagatttaccaagaggaccaaatccatttcatgtgtccattggctcgtcagggtgatttctacgtgccagagatgaaggaaaccgaatggaaatggcgcggtcttgtggaggctatcgatacacaggtagacggcaccggagcagacacaatgtctgatacctcatcagtgtctctagaagtcagtcccggttctcgagaaaccagcgccgctacactctcccccggtgctagctctcgcggttgggatgacggggatacccgcagcgagcactcttactccgagagcggagcgagcgggtcctccttcgaagagttggatctcgagggcgagggtcctctgggggagagccggttagatcctggcactgagccacttgggaccaccaaatggctgtgggaacctaccgcccctgaaaagggaaaggagtag

SEQ ID NO: 86435 - DNA, 942 bp, Artificial Sequence
  derived and/or modified sequence
atgagtgacctgctgcttctggggctgatcggcggtcttaccttgctgctcctactcacattgctcgccttcgccggatattctggattacttgccggtgtggaggtgtcagccggatctcctcctattcggaacgtgacggtggcatataaatttcatatggggctttatggtgagacgggcagactcttcacagaatcttgcagtatctctccaaaactgagatctattgccgtgtactatgataatccacatatggttcccccagataagtgtcgctgcgccgtgggctctatcctgtccgagggcgaagaatcccccagccccgaactcattgatttatatcagaaattcggcttcaaggtcttctcctttcctgctccgagccacgtggtgactgctacgtttccatacactactattctgagtatttggctggctactagaagggtacatcccgctctcgatacgtacatcaaagagaggaaattatgtgcctatcctaggctggagatctaccaggaggatcaaattcattttatgtgccccctggcacgtcaaggcgacttttacgttcctgaaatgaaggagactgagtggaagtggcggggacttgtagaagctatcgacacccaggtggacggaacgggggcagacactatgtctgatacctcctctgtgagtctagaggtgtctccagggtcacgcgaaacgagtgccgcaactctgagccccggagctagctcaaggggctgggatgacggcgatacccggagcgagcattcctacagcgaatctggggcaagtgggagcagtttcgaagagttggatctggaaggggaggggccactgggggaatcccgcttggatccgggtactgagcccctgggtaccaccaagtggctttgggagcccaccgcccctgagaagggcaaggaatag

SEQ ID NO: 86436 - DNA, 315 bp, Artificial Sequence
  derived and/or modified sequence
atgtccgacctgcttttgctaggactcattggcggactcactcttctcttgcttcttacactgttggcgttcgccggatattccgggcttctggctggtgtagaagtatctgctggttcaccacctatcagaaatgtgaccgtcgcttacaaattccatatgggactgtacggagagacgggacggctgttcaccgagtcatgttctatctctccgaaactacggtccatcgcggtgtactacgacaatccccacatggtgccccctgacaagtgccgatgcgccgtgggatccatcctgtctgaaggtgagtag

SEQ ID NO: 86437 - DNA, 456 bp, Artificial Sequence
  derived and/or modified sequence
atgtctgacctgttactgctgggtctgataggcggacttacactactgctgctgttgacattgttagcctttgctgggtacagtggactgctcgctggcgttgaagtgtcagccggatcccctcccatccggaatgtcacagtggcatataaattccacatggggctttacggggaaacaggacggctgtttaccgagtcatgttcaattagcccaaagctgcgtagcatcgcagtgtactatgacaatccgcacatggtcccaccagacaagtgtaggtgcgctgtggggagcatactaagcgagggggaagagtcaccttctcccgagctcatagacctatatcaaaaattcgggttcaaagtttttagtttccccgcaccatcccacgtcgtgaccgcgaccttcccttacactacgatcttgtccatctggctggctacacgaagggtatag

SEQ ID NO: 86438 - DNA, 654 bp, Artificial Sequence
  derived and/or modified sequence
atgagcgacctgctgctgctgggcttgattgggggactgactcttctcctgcttctcacacttctcgctttcgcaggatatagcgggctgctggctggggtggaggtcagcgccggttcccctcctatccgcaacgttactgtggcctacaaattccacatggggttatatggcgagactggcaggctcttcaccgaaagctgtagcatttctcccaaattacgatccatcgccgtatattacgacaacccacacatggtaccgccagacaaatgcaggtgtgctgtcggcagcatactttctgagggggaggaatctccatcccctgaattgattgacttatatcaaaaattcggttttaaggtgttttccttccccgcaccttcacacgttgtaactgccacattcccttacaccaccattttaagtatttggctagcgaccagacgagtgcaccctgccctcgatacctacatcaaagaaagaaagctgtgtgcctatcccagactcgagatctaccaggaagaccagatccacttcatgtgccctctggcgaggcagggcgacttttacgtgcctgaaatgaaggagacagaatggaaatggagagggctggtagaggctatagacactcaggtagatggcacagggtag

SEQ ID NO: 86439 - DNA, 942 bp, Artificial Sequence
  derived and/or modified sequence
atgtcggacctacttctcctgggcctgatcgggggactgactctcctccttcttctgaccttgttggcttttgctggctactctggtctcctggctggcgttgaagtctcagcgggttccccccctattcgtaacgtaaccgtcgcttataagttccatatgggcttgtacggtgagaccggacgtctgtttaccgagagctgtagcataagtcctaaactgaggagtatcgctgtttactatgataacccacacatggtgccaccggataaatgtagatgtgctgtggggtccatcctcagcgagggggaggagtccccttccccggagctcattgatctttatcaaaaattcggtttcaaggttttctccttccctgctccttcccacgtggtgaccgctacgttcccctacacaaccatcctgtcaatctggcttgcaacccggagggtgcatcccgcactcgacacatatatcaaggaacgaaaattatgtgcgtatccccgactcgagatctaccaggaggaccaaattcatttcatgtgtcctctcgcacggcagggcgatttctacgtccctgagatgaaggagactgagtggaagtggcggggtttggtggaggcaatcgacactcaagtggatgggaccggagctgacacaatgtccgatacatcatccgtctcgctggaagtaagccctgggtccagagagaccagcgctgcaaccctgagtccaggggcttccagtagaggctgggacgacggggacaccaggtccgagcatagctactctgagtctggagcatcagggtctagctttgaagaactggaccttgagggagagggccctctgggcgagtctaggcttgaccctggaacagagcctttgggaaccaccaaatggttgtgggagcccacagccccagagaaagggaaagaatag

SEQ ID NO: 86440 - DNA, 651 bp, Artificial Sequence
  derived and/or modified sequence
atgagcgatctacttctgctcggtcttatcggtggactgaccttgctgttgctattaactctgcttgcctttgcaggatacagcggcttacttgccggagttgaagtctcggccggttcgcctcccataaggaacgtaaccgtcgcctacaaatttcatatgggactctacggggaaaccggccgactgttcactgaatcttgtagcatctcacctaaattaaggtccatcgccgtgtactatgacaatccccatatggtgccccctgataagtgtcgatgtgccgttggttcaattcttagcgagggagaggagagtcccagtccagaactgattgatttatatcaaaagttcggatttaaggtgttctctttcccggcaccgagccatgtggtgactgcaactttcccttataccacaatactgagcatctggctggccaccaggagagttcaccccgcacttgatacatacattaaggagagaaaactatgtgcctatcccaggttggaaatctaccaggaagaccagattcatttcatgtgtccacttgctcgccagggggacttttatgttccagagatgaaggaaaccgaatggaagtggcgaggcctagtggaggccattgatacccaggtggacggaacctag

SEQ ID NO: 86441 - DNA, 942 bp, Artificial Sequence
  derived and/or modified sequence
atgagcgatctcctgctgttagggctcattggcggtctgactcttctactattattgaccctcttggcctttgctgggtactcaggtttactcgctggagtggaggtctctgccggtagcccgccaattaggaacgtgacggtagcttacaaatttcacatgggcctgtatggagaaaccgggagattattcacagagtcatgttctatatcgccaaaattaagatcaatcgccgtctactacgacaatccacacatggtccccccggataaatgcagatgtgcagtgggatccatcctgtctgagggtgaggagtcccctagccccgagctgatcgacctttatcagaagttcggttttaaagtcttttcctttcctgctccctcacacgtagtgactgcaacatttccttacacgactatcttgagcatttggcttgccaccaggcgcgtccatcctgcattagatacatacataaaggagcggaaactttgcgcctatccccggttggagatatatcaggaggatcagattcactttatgtgtcctctggccagacagggagatttctacgtccctgagatgaaggaaaccgaatggaaatggagaggcttagtggaagccattgacacgcaggtggatggaaccggagcagacactatgtcagacacgtcttctgtttctctggaggttagccctggctcacgcgagacatcagccgccaccctgagccccggagctagctcacgcggatgggatgacggcgatacgaggagcgagcactcgtattcagaatccggagcgtctggatcctcattcgaagaactcgacctagagggcgaggggcctcttggagaatctaggcttgatccgggcacggagccccttggtaccacgaagtggttatgggagcccacagctccagagaaaggcaaagaatag

SEQ ID NO: 86442 - DNA, 942 bp, Artificial Sequence
  derived and/or modified sequence
atgagtgacctgttgctgctcgggctgatagggggtctcaccctattgctgctcctgacccttctcgcttttgcaggctactctggactcctggccggtgttgaagtgtctgccggcagcccccccatccgcaatgttaccgtggcttataagttccacatgggcctttatggcgagaccgggcggttgttcactgaatcatgcagcatttcacccaagctccgttctatcgccgtgtactacgacaatcctcacatggtgcctcctgacaaatgcaggtgtgcagtgggctccatcctgtcagagggagaggagagtccctctcctgagttaatcgacctgtatcaaaagttcggttttaaagtgttttcgttcccggccccctctcacgtcgtgaccgccacctttccatacacaactatcctgtccatctggttagcaacgaggagagttcaccccgctctagatacttatattaaagaaagaaagctttgcgcctatccgcgcctagagatctatcaggaagaccagattcacttcatgtgtcctctagctagacaaggagacttttacgtccccgagatgaaagagactgaatggaagtggagagggctggttgaggcaatagatacccaggtagatgggaccggggcagacaccatgtcagatacaagtagcgtgagtcttgaggtgagcccaggatctcgcgagacctccgccgccactctctcaccaggagcttcgtctagaggctgggatgacggcgacacccgaagtgagcacagctatagcgaatccggagctagtggttctagctttgaggagcttgatcttgaaggagaagggccccttggcgaatcaagattagatccaggcacggaaccactgggcacaactaagtggctatgggaacccactgctcctgagaaaggaaaagagtag

SEQ ID NO: 86443 - DNA, 423 bp, Artificial Sequence
  derived and/or modified sequence
atgtccgacctgctcctgcttggattaatcggcggactgacattgctgctgctgctgaccttgctggcattcgctgggtattccgggttgctcgctggggtggaagtttcagccggctcgccccccataagaaatgtgaccgtcgcctacaagtttcacatgggcctttatggagagacaggccgactttttacagagtcttgcagcatctccccaaagctcaggtctattgcggtctactatgacaatccccatatggttcccccagacaagtgtagatgcgccgtgggaagtatcctctccgagggcgaggaaagtccatctccagagctgatcgatctgtatcaaaagtttgggttcaaagtgtttagttttccggctccatcacatgtggtgaccgccacttttccatatacaacctag

SEQ ID NO: 86444 - DNA, 942 bp, Artificial Sequence
  derived and/or modified sequence
atgtccgacctactccttctgggacttataggcgggctgactctattgctactcctgaccctcctggcctttgccgggtattcagggttgcttgcaggcgttgaggtctcagcaggatcaccaccaatccgtaacgtgaccgttgcctacaaatttcatatgggcttgtatggtgaaacgggtaggttgttcactgaaagctgttctataagtcccaagttgaggtctatcgctgtgtattatgacaatccgcacatggtgccacccgataagtgtcgatgcgctgtgggctctatcctgagtgaaggcgaggagagtccctcaccagaactgatcgatctctatcagaagtttggttttaaggtgttttcgtttcctgctccaagtcacgtggtcacagccacttttccctataccaccattttgagcatctggctggccacacgtcgcgttcacccagcactagatacctatattaaagagagaaaactgtgcgcctatccacgtctggaaatctaccaagaggaccaaatccattttatgtgtcctctagcccgccaaggcgatttttatgtgcccgaaatgaaagaaaccgaatggaaatggcgagggctagtcgaggcaattgacacgcaggtggacggcactggcgccgataccatgagcgacacgtcttctgttagcttggaagtttcacctgggtcacgcgaaacatccgcagcaacactgtcccccggggcatcatcacggggctgggacgatggggacaccaggagtgaacactcgtattccgaaagcggagctagtggttcttccttcgaggagctggatcttgagggtgaaggtccgctgggtgagagcagacttgatcctggaactgagcctctggggacaaccaaatggctctgggagcctaccgctcctgaaaaggggaaagaatag

SEQ ID NO: 86445 - DNA, 942 bp, Artificial Sequence
  derived and/or modified sequence
atgtccgatctgctgctcttgggcttaatcggcggcttaacgttgctgctgctgctgactttgctcgcattcgctggttacagtggacttttggcaggtgttgaggtgtcagccggatctcccccaattagaaatgtgacggtcgcctataagtttcacatgggtctatacggcgaaaccggacgactgttcaccgaaagttgtagtatcagcccaaagcttaggtccatcgccgtctattacgacaatccccacatggttcctcctgataagtgtcgatgtgccgttggatcaatcctttctgagggtgaggaaagtccctccccagaactaatagacctctatcagaaattcggttttaaagtgttctctttccccgcgccatcacacgtcgttacggccacttttccctacaccaccattttgtcaatatggttggcaacccgccgcgtgcacccggctcttgatacctacattaaagaaaggaagttgtgtgcctatccaagactcgaaatttaccaggaggaccagatccatttcatgtgtcctctcgccaggcagggggatttttatgtgcccgagatgaaggagaccgaatggaagtggagagggcttgtggaagctatcgatacgcaagtggacggaaccggcgccgataccatgtctgacacaagcagcgtgtctctggaggtgtcaccaggcagtcgcgaaacatccgcagccaccctcagtccaggggccagcagcagggggtgggacgacggtgacacacgctctgaacacagctacagcgaaagcggggcatcaggatcatcgtttgaagaattagatctagagggggagggaccattgggagagagcagactagacccgggcactgaacctttaggtaccaccaaatggctctgggagccaaccgccccagagaaagggaaagaatag

SEQ ID NO: 86446 - DNA, 315 bp, Artificial Sequence
  derived and/or modified sequence
atgagcgatcttttgctgctcggcttaatcggtgggcttactctcttgctcctacttacacttctcgcctttgccggatactcgggtctcttagctggggtggaagtgtctgcaggaagtcctccaattcgtaatgtcactgttgcttataaatttcacatgggtctgtacggtgagacagggaggctttttaccgaatcttgctccattagccccaaattgaggtcaatcgccgtgtattacgacaacccccatatggtccctcctgataaatgtaggtgcgctgtgggcagcattctcagtgaaggtgagtag

SEQ ID NO: 86447 - DNA, 456 bp, Artificial Sequence
  derived and/or modified sequence
atgtctgacctcctgttgctcggtctgataggaggactcaccttactccttctgctgactctacttgccttcgccgggtacagtggccttctggctggggtcgaggtgtccgctggctcaccccccatcaggaatgttacagtggcttacaagtttcacatgggcttatacggagaaacaggtaggctctttactgaaagctgctcaatcagcccaaagcttcgatccattgctgtatactacgacaatccacatatggttccaccggacaagtgtcggtgcgctgtcggctctattttgtccgagggtgaagaatcccccagccccgaactcatcgacctgtaccaaaagtttggatttaaagtgttctccttccctgccccttcacatgttgtaaccgccacattcccctacaccactatactgagtatttggctcgcaaccagaagggtatag

SEQ ID NO: 86448 - DNA, 654 bp, Artificial Sequence
  derived and/or modified sequence
atgagcgacctccttctgctcggcctcattggcggactgacactgctgctgctcctgacactgctcgcttttgctggatactccggcttgctggcgggtgtcgaggtgtccgctggaagcccacccataagaaacgtaactgtggcctacaaattccacatggggctatatggtgagacaggccggctgtttaccgaatcttgctcaattagtccaaaactgcggagtatcgccgtctactatgataacccacatatggtcccccccgacaaatgtcgctgtgctgtgggttcaattctttctgaaggagaagaaagtccaagtcccgagctcatcgatctttaccagaaattcggctttaaggtattctccttccccgctccaagccacgtggtgaccgccaccttcccatatactacaatcttaagtatctggcttgcgacccggagagtccaccctgctcttgacacttacatcaaagaacggaaattatgtgcctatccccgactagaaatctaccaagaggatcagatccatttcatgtgtccactggcccgccagggagacttctacgtgcctgaaatgaaagaaacagaatggaagtggcgcgggctggttgaggccattgacacccaagtggacggcaccggctag

SEQ ID NO: 86449 - DNA, 942 bp, Artificial Sequence
  derived and/or modified sequence
atgtctgatctgttactgctgggacttattgggggcctgactctcctgctgctgctgacattattggcatttgcaggctattctgggcttctcgctggggtagaagtgtctgctggtagcccgccgattaggaacgtgaccgttgcatacaaatttcacatgggtctttatggtgagacaggacggctctttacggaatcttgcagtattagtccaaaactccgctctatcgctgtctattatgataatccccacatggttccccccgataaatgcaggtgcgccgtgggaagtatcctgagtgaaggtgaagaatccccgtccccagagctgatcgacttatatcaaaagttcggcttcaaggtgttttcttttcctgctccgagccacgtggttaccgccaccttcccttacacaacaattctctcaatctggttggcaactcgccgagtccacccggcgctcgacacgtatataaaggaacgcaagctttgtgcctacccgaggttggaaatctaccaggaggaccagattcactttatgtgtcctttggctagacaaggagacttttacgtgcccgagatgaaggagacggagtggaagtggcggggattggtagaggcaatagatacacaggttgacgggaccggagccgacactatgtccgacaccagcagcgtcagtctagaggtcagcccaggcagcagggagacgtcagcagcaactttgagccccggggcatcatcaagagggtgggacgatggagacacacgaagtgaacatagctacagcgagtccggcgccagtggtagttccttcgaggagctggacttagaaggtgaggggcccctgggggaaagccggctcgacccaggcacagagcctctcggcacaactaagtggctttgggagcctactgccccagagaagggtaaggaatag

SEQ ID NO: 86450 - DNA, 651 bp, Artificial Sequence
  derived and/or modified sequence
atgtccgatctgctccttttgggtctcatcgggggtctgacccttttattgctcctgaccttgctggccttcgcaggatattcaggcctgctcgctggagtagaagtatctgccggctctccaccaatccgcaatgttactgtcgcgtacaagttccacatgggcctgtatggggaaactgggagactgttcactgagtcatgctctataagcccaaaactgagatcaatagctgtatactatgataacccccacatggtgcctccagataaatgtaggtgtgccgtaggttcaattctgtctgaaggcgaagaatccccatctcctgaacttatcgatctgtaccagaagttcggctttaaagtcttctccttccctgcacccagtcatgtagttaccgcaaccttcccctatacaacaatcctgtcgatatggcttgccacacgccgcgttcacccggccctcgacacatatattaaagagaggaagctctgtgcgtatccacggttagagatttaccaggaggaccagatccattttatgtgtcccttagcccgacaaggggacttctatgttccagagatgaaagaaactgaatggaaatggcgcggcctagtggaagctatcgatacacaggtggatggtacatag

SEQ ID NO: 86451 - DNA, 942 bp, Artificial Sequence
  derived and/or modified sequence
atgagcgatctcctgctgttagggctcattggcggtctgactcttctactattattgaccctcttggcctttgctgggtactcaggtttactcgctggagtggaggtctctgccggtagcccgccaattaggaacgtgacggtagcttacaaatttcacatgggcctgtatggagaaaccgggagattattcacagagtcatgttctatatcgccaaaattaagatcaatcgccgtctactacgacaatccacacatggtccccccggataaatgcagatgtgcagtgggatccatcctgtctgaaggcgaagagtccccctcacctgaactgatcgacttatatcaaaaatttggctttaaggtttttagcttccccgcccctagccatgtcgttactgctacttttccgtacaccactatcctcagcatttggttagcaaccaggagggtacatcctgcactcgacacttatattaaagaacgcaagctttgcgcctatcctaggctggaaatctatcaagaggaccagattcacttcatgtgtccccttgcaagacaaggggatttctacgtgcctgaaatgaaggaaactgaatggaaatggagaggccttgtggaggcgatagatacacaggtagacgggacaggcgcagacaccatgagcgataccagcagcgtttccctcgaggtaagtcctggatcacgcgaaacatccgccgctaccttatccccaggtgctagtagccgcggctgggatgacggggatacacggtctgaacattcttattcagagtccggtgcatctgggtcctccttcgaagagcttgacctggagggagaagggccgctgggggaatcaagattagatcctggcaccgaacctctcgggaccacaaaatggctatgggaaccgacagcacccgagaaaggcaaggaatag

SEQ ID NO: 86452 - DNA, 942 bp, Artificial Sequence
  derived and/or modified sequence
atgtccgacttactgctcttaggattaattggaggcttgactctattgttgctgctgacactgcttgccttcgctggatacagcggcctgcttgccggggtagaggtttctgctggttctccccccatccggaacgtcaccgtagcttacaaattccacatggggctatatggggagacaggccgcctgtttaccgaatcttgttcaatttcacccaaactcaggtctattgctgtgtactacgacaacccacacatggtcccaccagataaatgccgctgcgccgttggatccattctgtcagagggagaggagagtccctctcctgagttaatcgacctgtatcaaaagttcggttttaaagtgttttcgttcccggccccctctcacgtcgtgaccgccacctttccatacacaactatcctgtccatctggttagcaacgaggagagttcaccccgctctagatacttatattaaagaaagaaagctttgcgcctatccgcgcctagagatctatcaggaagaccagattcacttcatgtgtcctctagctagacaaggagacttttacgtccccgagatgaaagagactgaatggaagtggagggggctcgtcgaggctatagacactcaagtggacggaaccggagcagacactatgtccgacactagcagcgtttcactggaagtatcacctggatcacgggagactagcgccgccaccctatcacctggtgcatcttccaggggctgggacgacggagatacacggagtgaacactcttattcagaatcaggtgcctctggctcgtctttcgaggaattagatctggagggtgagggacccctgggtgaaagtcgtctggatcctggtactgaaccattgggcactactaagtggctgtgggaaccaactgcaccagagaaaggaaaggagtag

SEQ ID NO: 86453 - DNA, 423 bp, Artificial Sequence
  derived and/or modified sequence
atgtccgatctcttgctgctcggtctcatcggcggcctgacacttctgttattactcacactgttggccttcgctggctatagtggcctcctcgccggcgtggaagttagcgccggttccccccctatccggaatgttaccgtggcatataaatttcacatgggcttatacggcgaaacagggagactctttaccgaatcctgcagcatttctcccaagctgagaagtattgccgtttattacgacaacccacacatggtgccacctgataagtgtagatgcgctgtgggatcgatcctctctgaaggtgaagagtccccatctcccgaattaatcgatctgtaccagaaatttggtttcaaagttttctcgtttccagcaccgtcacacgtagtgacagcaactttcccttatactacctag

SEQ ID NO: 86454 - DNA, 942 bp, Artificial Sequence
  derived and/or modified sequence
atgtccgacctgctattattgggcctcattggcggcctgacccttcttctcttgctgaccttgctcgcctttgccggctactccggactgctcgctggagttgaagtatcagcaggtagtcctccaattcggaatgtcacagttgcctacaaatttcacatgggcttgtacggcgagaccggccggctattcactgaatcttgttcaataagtcccaaactcagatcgatagctgtctactacgacaatcctcatatggtgccccccgacaagtgtcgctgcgcagtgggcagtatcctctcagagggagaggagtcacccagtcccgagttgatcgacctgtatcaaaaattcggatttaaggtcttttcttttccggcaccatcccatgtcgtgactgcaacattcccatacacaactatcctgagcatttggttggccactagaagagttcatccagcactggacacttatatcaaggaaagaaagctgtgcgcatacccccgcctagagatttatcaggaggaccagattcattttatgtgccctctggcgaggcaaggcgatttttacgttccagagatgaaagagacagagtggaaatggagaggcctggttgaagcgatcgacacccaggtagatggcactggcgctgatacaatgagtgatacaagctctgtatctctggaagtgagccccggcagtcgtgaaacaagtgcagcaacactttctcctggtgcgagtagtcgcggctgggatgatggcgacacacggagcgaacattcttactctgaatcgggggcaagcgggtcaagtttcgaagaactggaccttgaaggcgaggggccccttggcgaatctaggctcgatccaggcacggaaccgctgggtaccacaaagtggttatgggaaccgacagctccggagaagggaaaagagtag

SEQ ID NO: 86455 - DNA, 942 bp, Artificial Sequence
  derived and/or modified sequence
atgagcgacctactgcttctggggttgatcggcggccttaccctcctcttgttgcttacactcctggcctttgctgggtattccggattgttagcaggcgttgaggtatctgcagggtcccctccaatcagaaacgtaacagtggcttataaattccacatgggtctatatggcgaaaccggcaggctgtttaccgaatcctgctcaataagcccaaaactgcgttccattgccgtttattacgacaacccacacatggtcccgcccgacaaatgccgatgtgctgtaggatccatcttgagtgaaggtgaggagtctcccagcccagaactcatcgacctgtaccagaaattcggattcaaagtctttagcttcccagccccctctcatgtggtgacagccacctttccctatactactatcctttccatctggctcgccacgcgacgcgtacacccagccctagacacgtacataaaggaacggaagctctgtgcttaccctcgactggagatctatcaagaagatcagatacacttcatgtgtccactagccaggcaaggagatttctacgtccccgaaatgaaagagaccgaatggaagtggagagggcttgtggaagctatcgatacgcaagtggacggaaccggcgccgataccatgtctgacacaagcagcgtgtctctggaggtgtcaccaggcagtcgcgaaacatccgcagccaccctcagtccaggggccagcagcagggggtgggacgacggtgacacacgctctgaacacagctacagcgaaagcggggcatcaggatcatcgtttgaagaattagatctagagggggagggaccattgggagagagcagactagacccgggcactgaacctttaggtaccaccaaatggttatgggagccaacagcaccagaaaaagggaaggagtag

SEQ ID NO: 86456 - DNA, 315 bp, Artificial Sequence
  derived and/or modified sequence
atgtctgatctactcttgctgggactgattggaggtctcacacttttgctgcttcttacactcctggccttcgccggctactcaggtctcctggctggagttgaggtgtccgcaggttcccctcccatccgcaatgtgacagtggcttacaaatttcacatgggcctatatggcgaaaccggccggctcttcacggaaagttgttcaatctcacccaaactccgcagtattgccgtatactatgataacccgcacatggtgcctccggataagtgtcggtgcgccgtcgggtcaatcctcagcgaaggagagtag

SEQ ID NO: 86457 - DNA, 456 bp, Artificial Sequence
  derived and/or modified sequence
atgtccgacctgttacttctcggtttgataggaggccttacactgctcctgctactaacacttctcgcatttgcaggatactccgggctattggcgggcgtggaggtgtctgcagggtccccacctattcggaatgtgacggtcgcctataaattccatatggggctgtacggtgagactggtaggttgttcacagagtcatgctcaatttcccctaagctgagatctattgccgtgtactatgacaacccacacatggtcccccctgacaaatgccgctgtgcagttggaagtattctgtctgaaggtgaagaatctccctcacctgaacttatcgatctgtatcaaaaattcggattcaaagtttttagttttccagctccctcacatgtggtgacagctacgtttccctatacaactattctctcgatctggttggcaacccggcgggtttag

SEQ ID NO: 86458 - DNA, 654 bp, Artificial Sequence
  derived and/or modified sequence
atgagcgacctgctgctgctagggctgattggcggtctcactctgctgctcctgttgaccctcctcgctttcgctggttactcaggtctactggcgggggtcgaggttagcgcgggttccccccctatacgtaacgtgaccgtcgcctacaagtttcacatgggcctctacggagagaccggccggctgtttactgagtcctgctctatttcaccaaagttaagatccatcgccgtttattacgataatccacacatggtcccccctgacaaatgcagatgtgccgtaggatccattctctctgaaggagaagaaagtccaagtcccgagctcatcgatctttaccagaaattcggctttaaggtattctccttccccgctccaagccacgtggtgaccgccaccttcccatatactacaatcttaagtatctggcttgcgacccggagagtccaccctgctcttgacacttacatcaaagaacggaaattatgtgcctatccccgactagaaatctaccaagaggatcagatccatttcatgtgtccactggcccgccagggagacttctacgtgcctgaaatgaaagaaacagaatggaagtggcgcggactggtggaggcaatcgatactcaggtggatgggacagggtag

SEQ ID NO: 86459 - DNA, 942 bp, Artificial Sequence
  derived and/or modified sequence
atgtctgatctgttactgctgggacttattgggggcctgactctcctgctgctgctgacattattggcatttgcaggctattctgggcttctcgctggggtagaagtgtctgctggtagcccgccgattaggaacgtgaccgttgcatacaaatttcacatgggtctttatggtgagacaggacggctctttacggaatcttgcagtattagtccaaaactccgctctatcgctgtctattatgataatccccacatggttccccccgataaatgcaggtgcgccgtgggaagtatcctgtctgaaggcgaagaatccccctctcctgagcttattgacttgtatcaaaaattcggctttaaagtcttctccttcccagctcctagccatgttgttaccgctacctttccgtataccaccatcctcagcatctggttggccactaggcgtgtgcatcctgcattggatacatatattaaggaacgaaaattgtgtgcctacccacggctggagatctatcaagaagaccagattcattttatgtgcccgctagctagacagggcgacttctacgtccctgaaatgaaggagacagagtggaagtggcggggattggtagaggcaatagatacacaggttgacgggaccggagccgacactatgtccgacaccagcagcgtcagtctagaggtcagcccaggcagcagggagacgtcagcagcaactttgagccccggggcatcatcaagagggtgggacgatggagacacacgaagtgaacatagctacagcgagtccggcgccagtggtagttccttcgaggagctggacttagaaggtgaggggcccctgggggaaagccggctcgacccaggcacagagcctctcggcacaactaagtggttatgggaaccaaccgctccagagaaagggaaagagtag

SEQ ID NO: 86460 - DNA, 651 bp, Artificial Sequence
  derived and/or modified sequence
atgtccgatctgctccttttgggtctcatcgggggtctgacccttttattgctcctgaccttgctggccttcgcaggatattcaggcctgctcgctggagtagaagtatctgccggctctccaccaatccgcaatgttactgtcgcgtacaagttccacatgggcctgtatggggaaactgggagactgttcactgagtcatgctctataagcccaaaactgagatcaatagctgtatactatgataacccccacatggtgcctccagataaatgtaggtgtgccgtaggttcaattctgtccgaaggtgaggaatccccttccccggaattgattgatctttaccagaagttcggctttaaggtgttctcatttccagctcccagccacgtcgtgactgccacctttccttataccaccatcctgagtatttggctcgctacccgccgcgttcaccccgctcttgacacctatatcaaagaacgaaagctttgcgcctaccctcgcctggaaatctatcaggaggaccagatccacttcatgtgtccattagcgcgccagggtgacttttacgttcctgagatgaaagagacagaatggaagtggagagggctagttgaagcgatagatactcaggtagatggcacatag

SEQ ID NO: 86461 - DNA, 942 bp, Artificial Sequence
  derived and/or modified sequence
atgagcgacctgctgctgctgggcctgatcggcggcctgaccctgctgctgctgctgaccctgctggccttcgccggctacagcggcctgctggccggcgtggaggtgagcgccggcagcccccccatcagaaacgtgaccgtggcctacaagttccacatgggcctgtacggcgagaccggcagactgttcaccgagagctgcagcatcagccccaagctgagaagcatcgccgtgtactacgacaacccccacatggtgccccccgacaagtgcagatgcgccgtgggcagcatcctgagcgagggcgaggagagccccagccccgagctgatcgacctgtaccagaagttcggcttcaaggtgttcagcttccccgcccccagccacgtggtgaccgccaccttcccctacaccaccatcctgagcatctggctggccaccagaagagtgcaccccgccctggacacctacatcaaggagagaaagctgtgcgcctaccccagactggagatctaccaggaggaccagatccacttcatgtgccccctggccagacagggcgacttctacgtgcccgagatgaaggagaccgagtggaagtggagaggcctggtggaggccatcgacacccaggtggacggcaccggcgccgacaccatgagcgacaccagcagcgtgagcctggaggtgagccccggcagcagagagaccagcgccgccaccctgagccccggcgccagcagcagaggctgggacgacggcgacaccagaagcgagcacagctacagcgagagcggcgccagcggcagcagcttcgaggagctggacctggagggcgagggccccctgggcgagagcagactggaccccggcaccgagcccctgggcaccaccaagtggctgtgggagcccaccgcccccgagaagggcaaggagtag

SEQ ID NO: 86462 - DNA, 423 bp, Artificial Sequence
  derived and/or modified sequence
atgagcgacctgctgctgctgggcctgatcggcggcctgaccctgctgctgctgctgaccctgctggccttcgccggctacagcggcctgctggccggcgtggaggtgagcgccggcagcccccccatcagaaacgtgaccgtggcctacaagttccacatgggcctgtacggcgagaccggcagactgttcaccgagagctgcagcatcagccccaagctgagaagcatcgccgtgtactacgacaacccccacatggtgccccccgacaagtgcagatgcgccgtgggcagcatcctgagcgagggcgaggagagccccagccccgagctgatcgacctgtaccagaagttcggcttcaaggtgttcagcttccccgcccccagccacgtggtgaccgccaccttcccctacaccacctag

SEQ ID NO: 86463 - DNA, 315 bp, Artificial Sequence
  derived and/or modified sequence
atgagcgacctgctgctgctgggcctgatcggcggcctgaccctgctgctgctgctgaccctgctggccttcgccggctacagcggcctgctggccggcgtggaggtgagcgccggcagcccccccatcagaaacgtgaccgtggcctacaagttccacatgggcctgtacggcgagaccggcagactgttcaccgagagctgcagcatcagccccaagctgagaagcatcgccgtgtactacgacaacccccacatggtgccccccgacaagtgcagatgcgccgtgggcagcatcctgagcgagggcgagtag

SEQ ID NO: 86464 - DNA, 456 bp, Artificial Sequence
  derived and/or modified sequence
atgagcgacctgctgctgctgggcctgatcggcggcctgaccctgctgctgctgctgaccctgctggccttcgccggctacagcggcctgctggccggcgtggaggtgagcgccggcagcccccccatcagaaacgtgaccgtggcctacaagttccacatgggcctgtacggcgagaccggcagactgttcaccgagagctgcagcatcagccccaagctgagaagcatcgccgtgtactacgacaacccccacatggtgccccccgacaagtgcagatgcgccgtgggcagcatcctgagcgagggcgaggagagccccagccccgagctgatcgacctgtaccagaagttcggcttcaaggtgttcagcttccccgcccccagccacgtggtgaccgccaccttcccctacaccaccatcctgagcatctggctggccaccagaagagtgtag

SEQ ID NO: 86465 - DNA, 654 bp, Artificial Sequence
  derived and/or modified sequence
atgagcgacctgctgctgctgggcctgatcggcggcctgaccctgctgctgctgctgaccctgctggccttcgccggctacagcggcctgctggccggcgtggaggtgagcgccggcagcccccccatcagaaacgtgaccgtggcctacaagttccacatgggcctgtacggcgagaccggcagactgttcaccgagagctgcagcatcagccccaagctgagaagcatcgccgtgtactacgacaacccccacatggtgccccccgacaagtgcagatgcgccgtgggcagcatcctgagcgagggcgaggagagccccagccccgagctgatcgacctgtaccagaagttcggcttcaaggtgttcagcttccccgcccccagccacgtggtgaccgccaccttcccctacaccaccatcctgagcatctggctggccaccagaagagtgcaccccgccctggacacctacatcaaggagagaaagctgtgcgcctaccccagactggagatctaccaggaggaccagatccacttcatgtgccccctggccagacagggcgacttctacgtgcccgagatgaaggagaccgagtggaagtggagaggcctggtggaggccatcgacacccaggtggacggcaccggctag

SEQ ID NO: 86466 - DNA, 651 bp, Artificial Sequence
  derived and/or modified sequence
atgagcgacctgctgctgctgggcctgatcggcggcctgaccctgctgctgctgctgaccctgctggccttcgccggctacagcggcctgctggccggcgtggaggtgagcgccggcagcccccccatcagaaacgtgaccgtggcctacaagttccacatgggcctgtacggcgagaccggcagactgttcaccgagagctgcagcatcagccccaagctgagaagcatcgccgtgtactacgacaacccccacatggtgccccccgacaagtgcagatgcgccgtgggcagcatcctgagcgagggcgaggagagccccagccccgagctgatcgacctgtaccagaagttcggcttcaaggtgttcagcttccccgcccccagccacgtggtgaccgccaccttcccctacaccaccatcctgagcatctggctggccaccagaagagtgcaccccgccctggacacctacatcaaggagagaaagctgtgcgcctaccccagactggagatctaccaggaggaccagatccacttcatgtgccccctggccagacagggcgacttctacgtgcccgagatgaaggagaccgagtggaagtggagaggcctggtggaggccatcgacacccaggtggacggcacctag

SEQ ID NO: 86467 - DNA, 942 bp, Artificial Sequence
  derived and/or modified sequence
atgagcgacttactcctgctgggtcttattgggggcctcactcttctactgctgctgactttattggctttcgccggttactcgggtttactcgccggagtcgaggtttcagccggatcccccccaatcagaaatgtgaccgtggcctacaagttccacatgggcctgtatggcgagaccggacggctattcaccgaaagttgctcaataagccctaagctgcgtagcatcgcagtgtactacgacaatcctcacatggtccctcctgacaaatgtcgctgtgctgtcggtagtatcctgagcgagggggaggagagtccctcccccgaactcattgatctttatcagaagtttggcttcaaggtctttagcttccctgccccaagccacgtggttacagctacatttccttacacgacgattctgagcatctggctggctacgagaagagtccatccggccctcgatacctacattaaggagcgcaaactgtgcgcctacccgcgcctcgaaatttaccaagaggatcagatccatttcatgtgccctctcgccaggcagggcgatttttacgttcccgagatgaaggagactgagtggaaatggcgggggctcgtggaggctatagacacacaggtagatggcactggggcagacacaatgagcgatacttccagcgtctcccttgaagtgagccctgggagtcgcgagacgtcagcagcaacactttctcctggagcctcttctagaggatgggacgatggggacactagaagcgagcattcctacagcgagtctggcgcaagcggtagctctttcgaggagctggatctagagggggaggggcccttaggagaatctcgccttgaccctggcacggaacctctcggaacgacgaaatggctgtgggaacccactgccccagaaaaagggaaggaatag

SEQ ID NO: 86468 - DNA, 942 bp, Artificial Sequence
  derived and/or modified sequence
atgtccgatttactcctcttaggattgatcgggggcttgaccctgttgctgctgctgacactcctggcgtttgctggctactctggattgcttgccggtgtggaagtctctgcgggaagcccgcctattcggaacgtcactgttgcttataagtttcatatgggactgtacggggagactggtcgcctgtttacagagtcttgttccatcagtcccaaactcaggtcaatcgctgtctactacgataaccctcacatggtgcctccagacaagtgtagatgtgctgtaggcagcatcttatccgaaggggaagaaagtccctcaccggaactcattgatttgtaccagaagtttggattcaaggtattcagcttccccgcaccttctcacgtggtgactgcaactttcccctatacgacaatcctgtccatatggctggcaactcggcgggtgcacccggctctcgacacatacattaaagaacggaagctttgtgcataccctaggctcgaaatctatcaggaggatcaaatacacttcatgtgcccactggcgagacagggggatttttacgtccctgaaatgaaagagacagagtggaaatggcgggggctggttgaggctattgacacacaggtcgatggaactggcgcagacaccatgagtgatacctcaagcgtgagcctggaggtgtctccggggagtcgagagacctccgccgcaacactctcacccggagcatcctctagaggctgggacgatggggacaccagatctgaacattcttattctgagagcggcgcctctgggtcctcttttgaagagctggacttggaaggtgagggaccgctgggggagtctcgtcttgatccggggaccgagcccctcggaaccactaagtggttgtgggagccaaccgctcctgagaagggaaaggagtag

SEQ ID NO: 86469 - DNA, 423 bp, Artificial Sequence
  derived and/or modified sequence
atgagtgatcttctcttgctgggtctgatcggaggcctgactttgctcctgctactgaccctgctggccttcgcaggatactccggactgctggcaggagtcgaggtaagtgcagggtcgcctccaataaggaatgtgacagtggcctacaaattccatatggggctttacggcgagacgggcaggctgttcacagaatcctgtagtatatctcctaaattaaggagcattgccgtttactacgacaacccccatatggtacctccagacaagtgcagatgcgcagtcggttctatcctcagtgaaggcgaggagtcaccttcgcccgaactgattgatctctatcagaaatttggcttcaaagtgttctcattcccagccccatcacacgtggtaacagcaacattcccctacactacatag

SEQ ID NO: 86470 - DNA, 942 bp, Artificial Sequence
  derived and/or modified sequence
atgagcgatttacttctcctggggctaataggtggcctcactttgttgcttctgctgactcttctggcatttgccggctatagcgggctcctcgcaggtgtagaggtatccgcagggtcccctcccattagaaatgtgactgtcgcgtacaagtttcacatgggtctatacggggagaccggtaggctcttcactgagagttgttccatctctcctaagctgaggagtattgccgtgtactatgacaacccacacatggtgcctcctgataaatgccgttgcgccgttggctctatcctgtcagaaggagaggagtccccctctccagaactaattgacttatatcagaaattcggtttcaaggtcttcagctttccagcccccagccacgtggtcaccgcaacttttccctacactactatcctttccatctggctggccacccgccgagtacatccagccctggacacgtatataaaagagcgtaagctctgtgcctaccccaggctggaaatatatcaggaggaccaaatccactttatgtgtcccctagcgaggcagggagatttctacgtgccagagatgaaggagaccgaatggaaatggagaggacttgtcgaagccatagatacccaggtggacggaacaggggccgacaccatgtctgatacttcctcggtgtcactcgaggtatcccccggtagccgagagacatccgccgccactctgagcccgggcgcaagctcacgggggtgggatgacggagacactcggtccgagcattcctattccgaatcaggggcctccgggtcatctttcgaggagctggacctggagggcgagggacctttaggagaatcccggctcgatcccggtaccgaacccctagggacaacaaaatggctttgggaaccaacggcccccgaaaagggcaaagaatag

SEQ ID NO: 86471 - DNA, 942 bp, Artificial Sequence
  derived and/or modified sequence
atgagtgatcttctgcttctcgggctgatcggcggccttactctcctgctgttattgacactgcttgcctttgccggttatagtggtcttctggctggtgttgaggtgagcgcagggagtccacccatcagaaatgtgactgtggcctataaatttcacatgggcctgtatggagaaacaggtcgcctgttcacagagtcatgctcgatttcgcccaaactccgatctatcgcagtatactacgacaatccgcacatggtccccccagacaagtgcaggtgcgccgtcggcagcattttgagtgagggcgaggagtcaccatcccccgaactaatcgacctgtatcaaaaatttggcttcaaagtgttctccttccccgccccctcacacgtcgtcacagctacctttccatatactacgatcctgagtatatggctcgccacaaggcgcgtgcatcccgctctcgacacatatataaaggaacggaaattatgtgcctatccgaggttggaaatctatcaggaagaccaaatccattttatgtgcccactggctcgccaaggagacttttacgtccccgagatgaaggagacagaatggaaatggcgcggcttagtcgaggccattgacacgcaagttgatggcactggggcagacaccatgtctgacacgtcatcagtgtccctggaagtatctccagggtctcgcgagacctccgccgccaccctctcccccggcgcttcctcaaggggatgggacgacggcgacactcggagtgagcactcttactcagagagtggggccagcgggtcctcattcgaagaactagaccttgaaggtgaagggccgctgggcgagtctaggctggaccctggaaccgagccactgggaaccactaagtggctgtgggaacctaccgctccggagaagggcaaggagtag

SEQ ID NO: 86472 - DNA, 315 bp, Artificial Sequence
  derived and/or modified sequence
atgagcgatctcttactgctcggccttatcggaggcttgacgttattactgttgttaactcttctcgcatttgcaggatactccggcctcttggcgggcgtggaagtgagtgcaggaagtccaccaatcagaaatgttaccgtggcctacaagttccacatgggactgtacggggagactggcagacttttcacagagagctgttccattagccccaagctgcggtctatcgcagtgtactacgacaacccgcacatggtccctccagataaatgtcgctgtgcagtgggctctatcctgtccgagggggaatag

SEQ ID NO: 86473 - DNA, 456 bp, Artificial Sequence
  derived and/or modified sequence
atgtcggatttactcctcctcggactgatcggtggcctgacccttctgctgctcctgaccctcctggctttcgctgggtattccggtcttctcgccggcgtggaagtgtctgctggatcaccccctattcggaatgtcaccgtggcatacaaatttcatatgggcctgtacggggagacagggaggctcttcacagaaagttgttccatctcccctaagctccgctccatagctgtctactacgacaacccacacatggtaccccccgacaaatgccggtgtgctgtcggttcaatcctgagtgagggggaggagtctccttcaccagagcttatcgatctgtatcagaaattcggttttaaggttttctccttccccgctccatcccatgtcgttaccgcgacctttccgtataccaccattctcagtatctggctcgcaacgagaagggtgtag

SEQ ID NO: 86474 - DNA, 654 bp, Artificial Sequence
  derived and/or modified sequence
atgtcagatctactcctgctgggacttatcggcggacttacattgcttcttcttcttacgctgctcgcatttgccgggtatagcggtctcctagccggtgtagaggtctctgctggatccccacccattcgcaatgtgacagtggcttacaaattccacatgggactctatggagagaccggaagattattcacggagagttgctctatctcccccaagcttcgctctatcgccgtgtactatgacaatccacatatggtgccgcctgataagtgccgttgtgccgtcggaagcattttgtcggaaggggaggagtcacctagtcctgaactgattgacctctaccagaagtttggattcaaggtattttcctttcctgcgccgtcccacgttgtgacggctaccttcccgtacacaaccatcctgtccatttggctcgccaccagacgcgtgcaccccgcactggatacctatattaaagaaagaaagctgtgcgcctaccccaggcttgagatctaccaggaggaccagattcacttcatgtgccccctcgccaggcagggcgatttttatgtgcccgaaatgaaagagaccgaatggaagtggcggggccttgtggaggcaatcgacacccaggttgatgggactggttag

SEQ ID NO: 86475 - DNA, 942 bp, Artificial Sequence
  derived and/or modified sequence
atgtctgatctgttgctgctgggactgatcggtgggctgacactgctcctgctcctgaccctccttgccttcgctggttattctggtctcctagcgggtgtcgaagtgagcgccggctcccccccaatcagaaacgttaccgtcgcctataagttccacatggggttatacggcgagacaggcaggctgtttacagaatcgtgtagtatctcccccaaactgaggtcaatcgccgtctactatgacaatccgcacatggttccgcccgataagtgtagatgcgctgtggggagcattcttagcgaaggcgaggaatccccgtccccagagctcatcgacctctaccaaaaattcggatttaaggtgttctccttcccagcaccaagccacgtggtgacagcgacgtttccctataccaccatcctgagtatctggctggctaccaggcgcgtccatcctgccttagatacttacatcaaggaacggaagctgtgtgcctaccctcggctggagatttaccaggaagatcagatccattttatgtgccctctggcaaggcagggtgacttctacgtgcccgagatgaaggaaacagagtggaagtggcggggtctggtggaggctatagacacacaagtggacgggacaggagcggataccatgtccgacaccagcagcgtgtcccttgaggtctcaccaggtagtcgggaaacgtctgccgcgacactctccccaggcgcttcaagcagaggatgggacgatggggatactcggtccgaacacagctactccgaaagcggggcttccgggtcttctttcgaagagctggacctcgaaggcgagggccctctcggtgagagcaggcttgaccccgggaccgaaccattagggaccacgaagtggctctgggagcctacggctcccgaaaagggtaaggagtag

SEQ ID NO: 86476 - DNA, 651 bp, Artificial Sequence
  derived and/or modified sequence
atgtctgatttgctgttattgggcttaataggaggccttacactgctgctgctcctgaccctcctcgcgttcgctggatatagcggactacttgccggagtggaagtgagtgcgggcagtcccccaattcggaatgtcacagttgcttacaaatttcacatgggactgtatggcgaaaccggacggctgttcaccgagtcctgctccattagtcccaagctgagatctattgctgtgtactacgacaacccacacatggtgccaccagacaagtgtcgttgtgcagtgggaagtattctgtcagagggcgaagagtctccttcaccagagttaatagatttataccagaagtttggattcaaagtcttctcatttcccgctccatctcacgtagtgaccgcaaccttcccctatacaactatcttatcaatatggctcgccactcgcagagtgcaccccgcccttgacacgtacataaaagagaggaagctgtgtgcctaccccaggctcgaaatataccaagaggatcagatccactttatgtgtccgctggcaaggcagggcgacttttatgtgcccgagatgaaggaaacagagtggaaatggcggggcctcgtcgaagccattgatacccaggtcgatgggacttag

SEQ ID NO: 86477 - DNA, 942 bp, Artificial Sequence
  derived and/or modified sequence
atgtctgacctgctgctgctgggcctcatcggcggcctgaccctgctgctgctgctgaccctgctggcctttgctggctacagcggcctgctggccggcgtggaggtgtctgctggcagcccccccatcagaaatgtgacagtggcctacaagttccacatgggcctgtatggagagaccggccgcctcttcacagagagctgcagcatcagccccaagctgcggagcattgctgtgtactatgacaacccccacatggtgcccccagacaagtgccgctgtgctgtgggcagcatcctgtctgagggggaggagagccccagccctgagctgattgacctgtaccagaagtttggcttcaaggtgttctccttccctgcccccagccacgtggtgacagccaccttcccctacaccaccatcctgagcatctggctggccaccaggagagtgcacccagccctggacacctacatcaaggagaggaagctgtgtgcctacccccggctggagatctaccaggaggaccagatccacttcatgtgccccctggcccggcagggcgacttctacgtgcctgagatgaaggagacagagtggaagtggaggggcctggtggaggccatcgacacccaggtggatggcaccggggctgacaccatgtctgacaccagctctgtgtccctggaggtgtccccaggcagccgggagaccagcgctgccaccctgagccctggggccagcagccggggctgggatgatggagacaccaggtctgagcacagctacagcgagagcggggccagcggcagcagctttgaggagctggacctggagggggagggccccctgggggagagccggctggaccctggaacagagcccctgggcaccaccaagtggctgtgggagcccacagcccctgagaagggcaaggagtag

SEQ ID NO: 86478 - DNA, 423 bp, Artificial Sequence
  derived and/or modified sequence
atgtctgacctgctgctgctgggcctcatcggcggcctgaccctgctgctgctgctgaccctgctggcctttgctggctacagcggcctgctggccggcgtggaggtgtctgctggcagcccccccatcagaaatgtgacagtggcctacaagttccacatgggcctgtatggagagaccggccgcctcttcacagagagctgcagcatcagccccaagctgcggagcattgctgtgtactatgacaacccccacatggtgcccccagacaagtgccgctgtgctgtgggcagcatcctgtctgagggggaggagagccccagccctgagctgattgacctgtaccagaagtttggcttcaaggtgttctccttccctgcccccagccacgtggtgacagccaccttcccctacaccacctag

SEQ ID NO: 86479 - DNA, 315 bp, Artificial Sequence
  derived and/or modified sequence
atgtctgacctgctgctgctgggcctcatcggcggcctgaccctgctgctgctgctgaccctgctggcctttgctggctacagcggcctgctggccggcgtggaggtgtctgctggcagcccccccatcagaaatgtgacagtggcctacaagttccacatgggcctgtatggagagaccggccgcctcttcacagagagctgcagcatcagccccaagctgcggagcattgctgtgtactatgacaacccccacatggtgcccccagacaagtgccgctgtgctgtgggcagcatcctgtctgagggggagtag

SEQ ID NO: 86480 - DNA, 456 bp, Artificial Sequence
  derived and/or modified sequence
atgtctgacctgctgctgctgggcctcatcggcggcctgaccctgctgctgctgctgaccctgctggcctttgctggctacagcggcctgctggccggcgtggaggtgtctgctggcagcccccccatcagaaatgtgacagtggcctacaagttccacatgggcctgtatggagagaccggccgcctcttcacagagagctgcagcatcagccccaagctgcggagcattgctgtgtactatgacaacccccacatggtgcccccagacaagtgccgctgtgctgtgggcagcatcctgtctgagggggaggagagccccagccctgagctgattgacctgtaccagaagtttggcttcaaggtgttctccttccctgcccccagccacgtggtgacagccaccttcccctacaccaccatcctgagcatctggctggccaccaggagagtgtag

SEQ ID NO: 86481 - DNA, 654 bp, Artificial Sequence
  derived and/or modified sequence
atgtctgacctgctgctgctgggcctcatcggcggcctgaccctgctgctgctgctgaccctgctggcctttgctggctacagcggcctgctggccggcgtggaggtgtctgctggcagcccccccatcagaaatgtgacagtggcctacaagttccacatgggcctgtatggagagaccggccgcctcttcacagagagctgcagcatcagccccaagctgcggagcattgctgtgtactatgacaacccccacatggtgcccccagacaagtgccgctgtgctgtgggcagcatcctgtctgagggggaggagagccccagccctgagctgattgacctgtaccagaagtttggcttcaaggtgttctccttccctgcccccagccacgtggtgacagccaccttcccctacaccaccatcctgagcatctggctggccaccaggagagtgcacccagccctggacacctacatcaaggagaggaagctgtgtgcctacccccggctggagatctaccaggaggaccagatccacttcatgtgccccctggcccggcagggcgacttctacgtgcctgagatgaaggagacagagtggaagtggaggggcctggtggaggccatcgacacccaggtggatggcaccggctag

SEQ ID NO: 86482 - DNA, 651 bp, Artificial Sequence
  derived and/or modified sequence
atgtctgacctgctgctgctgggcctcatcggcggcctgaccctgctgctgctgctgaccctgctggcctttgctggctacagcggcctgctggccggcgtggaggtgtctgctggcagcccccccatcagaaatgtgacagtggcctacaagttccacatgggcctgtatggagagaccggccgcctcttcacagagagctgcagcatcagccccaagctgcggagcattgctgtgtactatgacaacccccacatggtgcccccagacaagtgccgctgtgctgtgggcagcatcctgtctgagggggaggagagccccagccctgagctgattgacctgtaccagaagtttggcttcaaggtgttctccttccctgcccccagccacgtggtgacagccaccttcccctacaccaccatcctgagcatctggctggccaccaggagagtgcacccagccctggacacctacatcaaggagaggaagctgtgtgcctacccccggctggagatctaccaggaggaccagatccacttcatgtgccccctggcccggcagggcgacttctacgtgcctgagatgaaggagacagagtggaagtggaggggcctggtggaggccatcgacacccaggtggatggcacctag

SEQ ID NO: 86483 - DNA, 942 bp, Artificial Sequence
  derived and/or modified sequence
atgagcgacctgctgctgctgggcctgatcggcggcctgaccctgctgctgcttttgacccttctggcttttgctgggtactctggtctgcttgccggggtggaagtaagcgcgggcagccctcccattcgtaatgtgacagttgcttacaagttccatatgggcttgtatggagaaaccggacggttgtttacagaatcctgtagtatcagcccaaaactccgctctattgcagtgtactatgataacccacatatggttccacctgacaagtgccgttgtgcggtcggaagcatattatctgaaggagaagaatcgccatctccagagcttatcgatctctatcagaaattcggtttcaaggtgttctcctttcccgcaccttcacacgttgtgacagccacatttccatacaccacaatcctcagcatctggctggccacccgcagggtgcatcctgctctggacacatacatcaaggagcggaagctgtgtgcctacccgcgcctggagatctatcaagaggaccaaattcacttcatgtgcccgctggctaggcagggcgatttctatgttccggaaatgaaagagacagaatggaaatggcgtggtcttgtggaggcaatagacacccaagttgatggtaccggagcagacactatgagcgacacatccagcgtatccctcgaggtttcacctggttcccgggagacgtcagccgcaactttgagtccaggagcctcgtctcggggttgggatgatggagacacacggtctgagcacagctattccgagagtggggcatcaggcagtagcttcgaagagctcgacctagagggtgagggtccattaggggagtccaggctggacccaggaaccgagccactgggcactacaaaatggctgtgggaaccaaccgcccctgagaaaggcaaggagtag

SEQ ID NO: 86484 - DNA, 942 bp, Artificial Sequence
  derived and/or modified sequence
atgagcgacctgctgctgctgggcctgatcggcggcctgaccctgctgttgcttttgactcttctggcgtttgccggatactcagggctgttagcaggtgtggaggtctctgcaggctcacccccgatcaggaacgtaaccgtggcctacaaattccacatgggtctttacggcgagacgggaaggctattcaccgagagctgttcaatcagtccaaagctcagatccatagctgtgtattacgataacccccacatggtaccaccagataaatgtaggtgcgcggtcggatctatcctcagcgagggtgaggaaagtcccagccctgagctgatcgatttgtaccaaaaattcgggtttaaggtgttcagttttcctgcccctagccacgtcgttactgccacttttccctacaccacaattttatccatctggctcgcaacacgtcgagtacatccggcgcttgacacatacattaaggagaggaaactatgcgcctatccacgactggaaatttaccaggaggatcagattcattttatgtgtcccctcgctcgccagggcgacttttacgtcccggaaatgaaggagaccgagtggaaatggcgtgggcttgtggaagcaattgatactcaggtagatgggaccggcgccgacactatgtccgatacaagctcggtgagcctggaagtgtcacccggcagccgtgagacctccgccgccactttgagcccgggcgccagttctagaggctgggacgatggcgacaccaggtccgaacattcgtatagtgaaagcggagccagtggaagctccttcgaggaactggatttagagggcgagggccctctaggcgagtctaggctggacccaggcaccgagcccctgggtactaccaagtggctctgggagcccacggccccagagaaaggaaaagagtag

SEQ ID NO: 86485 - DNA, 423 bp, Artificial Sequence
  derived and/or modified sequence
atgagcgacctgctgctgctgggcctgatcggcggcctgaccctgctgttgctccttaccctgctggcttttgcaggctattctgggctgctggccggggtggaagtgtccgctggctccccacctattcgcaatgtgactgtcgcatataaattccatatgggtttgtacggagaaaccggccgcctctttactgagtcctgctccataagtcccaaactgaggtcaatagcggtctattatgataatccacatatggtgccacccgataaatgccgttgcgctgtgggaagtatcttgtcagaaggagaggaaagtccatcccccgaattgatagatctctatcagaaatttggctttaaggtgttctccttcccggccccttcccatgtcgtgacagccacctttccctacaccacctag

SEQ ID NO: 86486 - DNA, 942 bp, Artificial Sequence
  derived and/or modified sequence
atgagcgacctgctgctgctgggcctgatcggcggcctgaccctgttactgctgttgacactcttagccttcgccggatattctgggttgctagcaggagtggaggtgtccgcaggcagcccgcctattaggaatgtgacagtggcttataaatttcacatgggactttacggagagacaggccggctgttcactgagtcgtgtagtatcagccccaaactgcgatcaatcgccgtctactacgacaacccgcacatggtccccccggacaagtgccggtgcgctgtgggtagcatcctgtctgaaggcgaggagtcgccttcccctgagttaattgacctgtaccaaaagttcggctttaaggtattttccttcccggcaccctctcatgtggttactgccacattcccgtataccaccatactttccatctggctcgcaacccgaagggtccacccggccctcgatacgtacattaaggaacggaaactctgtgcttatccccggctggaaatctatcaggaggaccagatccacttcatgtgtcccctggctaggcagggggacttctacgttccagagatgaaggaaactgaatggaagtggcgagggttggtggaggcgatagatacccaagtggatggcaccggggccgatacaatgtccgacacctcctctgtgtcattggaagtgtcgccaggatcccgcgaaacgtccgctgccactctctcgcctggagcaagttcaaggggatgggacgacggggacacccggtctgagcactcctactccgagtcaggggccagtggcagctctttcgaggagctcgatctggagggggagggccctctgggcgaatcaaggctcgaccctggtacagagccccttgggaccaccaagtggctgtgggagcccactgctccagagaagggaaaagagtag

SEQ ID NO: 86487 - DNA, 942 bp, Artificial Sequence
  derived and/or modified sequence
atgagcgacctgctgctgctgggcctgatcggcggcctgaccctgctgctcttactgactcttcttgcctttgccggttactcaggcctcttggctggagtggaagtgagcgccggaagtcctcctattcgcaacgtgacagtggcatataaattccatatgggcctgtatggagaaacaggaagactttttacggagtcttgtagcataagtccaaagctgcgtagcattgcggtctactatgataacccccacatggtgccccctgataagtgcaggtgcgccgtgggcagtatcctgagtgaaggagaagagtcaccctctccggagctcattgatctttatcagaaattcggttttaaggtgttttccttcccagcacctagccatgttgtgactgcgacctttccttacaccacaattctgtcaatctggctggcgaccagacgcgtacatcccgctctcgacacttacattaaagagaggaaactgtgtgcataccctcggctcgaaatataccaggaagatcagatccactttatgtgtcctctcgcacgccaaggcgacttttacgtgccagaaatgaaggagacggaatggaagtggagaggcctggtggaggccatcgacactcaggtcgatggcacaggcgctgacaccatgtctgatacttcctctgtgtcactggaagtcagcccgggatcacgagagacatcagcagctacactctctccaggagcctctagcaggggctgggacgacggggacacaaggtctgaacactcttattctgaaagcggcgctagcggctcttcctttgaagaactagatctggaaggagagggccctctgggagagtccagactagacccgggcaccgaaccgcttggcactaccaagtggctgtgggagcctaccgcacctgaaaagggaaaggaatag

SEQ ID NO: 86488 - DNA, 315 bp, Artificial Sequence
  derived and/or modified sequence
atgagcgacctgctgctgctgggcctgatcggcggcctgaccctgctgctgctgctgacacttctggccttcgctggatactccggactgctggctggggttgaagtcagtgcagggtctccccccatcagaaatgtgaccgtcgcttataagtttcacatgggtctgtatggcgagaccgggcgacttttcactgaatcatgcagcatcagccccaaattgcgctctatcgccgtatattatgataacccccacatggtgcctcccgacaagtgtcggtgcgctgtgggctcaatcttgtcggagggcgaatag

SEQ ID NO: 86489 - DNA, 456 bp, Artificial Sequence
  derived and/or modified sequence
atgagcgacctgctgctgctgggcctgatcggcggcctgaccctgctgctgcttctcacgctcctcgcattcgccgggtattccgggctcctcgccggcgtcgaagtgtctgctggtagcccacctatccgcaatgttacagtcgcatacaaattccatatgggtctctatggagagaccggcagattattcacggaatcatgctccatttcacctaagctccggtctatcgctgtgtactatgataacccgcatatggtgccccccgacaaatgccgctgtgccgttggcagtattctgagtgaaggcgaagagtcgccgtcccctgagctgatcgacctgtaccagaagtttggtttcaaggtattttcgtttcctgccccatctcatgttgtgacagccaccttcccctacactaccattctcagcatttggttggccactagacgtgtgtag

SEQ ID NO: 86490 - DNA, 654 bp, Artificial Sequence
  derived and/or modified sequence
atgagcgacctgctgctgctgggcctgatcggcggcctgaccctgcttctgctactgacactcttagctttcgccggttattcaggcctgttggctggggtggaggtctctgctggctccccccctattcgtaatgtgaccgtcgcctataaatttcacatgggattatatggcgagaccgggcgcctgttcaccgagagttgctcgatctctccaaagcttaggtctattgcggtttactatgacaatcctcacatggtacctccagataaatgccggtgcgctgtgggatcgattctgagcgagggggaagagagccccagtcccgagttaatcgacttgtatcaaaagtttggatttaaagtgttcagctttcccgccccctcccacgtggtgacagcgacattcccctatacaacgattctttcgatttggctggctacaagacgggtccaccccgccctggatacatacataaaagagagaaagctctgtgcttatccaagactggagatttaccaggaagaccaaatacatttcatgtgtccattagctaggcagggggacttctacgttccagaaatgaaggaaactgagtggaagtggagaggtctggttgaggcaattgatacccaggtagacggtactgggtag

SEQ ID NO: 86491 - DNA, 942 bp, Artificial Sequence
  derived and/or modified sequence
atgagcgacctgctgctgctgggcctgatcggcggcctgaccctgctgttgctgctcaccctcctcgcttttgcaggctacagcggcctgttggccggagttgaagtatcggcaggatcacctccgataaggaatgttacggtggcttataagtttcacatgggtttgtacggcgagaccgggcggctctttactgagagctgctcgattagcccaaaactgaggtccatagcggtgtattacgacaatccccacatggtccctccagacaaatgtcgttgtgccgtcgggtctattctaagtgagggagaagaatcccccagtcccgaactcatagacttgtatcagaaattcgggtttaaagtgttctccttccccgcccccagccacgtcgtcaccgcgacatttccttacaccaccatcctgtccatctggctcgctactaggagggtgcatccagcacttgatacctatattaaggagcggaaattatgcgcttatccccggctagaaatctaccaagaagatcagattcatttcatgtgtcctttagctagacagggggatttctacgtgccagagatgaaggaaaccgaatggaaatggcgcgggttagtcgaggccatagatacccaagtcgatggaaccggagccgataccatgagcgatacctcatctgtctcacttgaagttagcccaggtagccgggagactagcgcagcaacattatcaccgggggccagttcccgtggctgggacgatggagatacccgaagcgaacactcatattctgagagcggggcttctggtagcagcttcgaggaactcgatctggagggagaaggaccattgggtgagtcacgtttagaccctgggaccgaacctttgggaaccacgaagtggctgtgggaacccacagctccggagaaggggaaagaatag

SEQ ID NO: 86492 - DNA, 651 bp, Artificial Sequence
  derived and/or modified sequence
atgagcgacctgctgctgctgggcctgatcggcggcctgaccctgctattgttgctcaccctcctggcgtttgcaggctatagtggactcctagcaggtgtagaggtctctgctgggagtcccccaataagaaatgtcaccgttgcatacaagtttcacatgggtctctatggggagaccggccggctgtttacagagagctgcagcatcagccctaagctacggagtatcgcagtctattatgacaacccccacatggtcccaccggacaagtgtcggtgcgcagtgggtagcatactctcagagggcgaggaatcacctagccctgagcttatcgacctgtaccagaagttcggattcaaagtattttcattccccgctccttctcacgttgtgaccgctacgtttccatatactactattttgagtatttggcttgctacccgccgagtccatccagctctggatacttacattaaggaaaggaagctgtgcgcctacccacggctggaaatttaccaggaagaccagatacattttatgtgtcccctggctaggcaaggagatttctatgtgcctgagatgaaagaaaccgagtggaaatggaggggactggtcgaagctattgatacgcaggtcgatggtacctag

SEQ ID NO: 86493 - RNA, 942 nt, Artificial Sequence
  derived and/or modified sequence
augagcgaucuccugcuguuagggcucauuggcggucugacucuucuacuauuauugacccucuuggccuuugcuggguacucagguuuacucgcuggaguggaggucucugccgguagcccgccaauuaggaacgugacgguagcuuacaaauuucacaugggccuguauggagaaaccgggagauuauucacagagucauguucuauaucgccaaaauuaagaucaaucgccgucuacuacgacaauccacacaugguccccccggauaaaugcagaugugcagugggauccauccugucugagggugaggaguccccuagccccgagcugaucgaccuuuaucagaaguucgguuuuaaagucuuuuccuuuccugcucccucacacguagugacugcaacauuuccuuacacgacuaucuugagcauuuggcuugccaccaggcgcguccauccugcauuagauacauacauaaaggagcggaaacuuugcgccuauccccgguuggagauauaucaggaggaucagauucacuuuauguguccucuggccagacagggagauuucuacgucccugagaugaaggaaaccgaauggaaauggagaggcuuaguggaagccauugacacgcagguggauggaaccggagcagacacuaugucagacacgucuucuguuucucuggagguuagcccuggcucacgcgagacaucagccgccacccugagccccggagcuagcucacgcggaugggaugacggcgauacgaggagcgagcacucguauucagaauccggagcgucuggauccucauucgaagaacucgaccuagagggcgaggggccucuuggagaaucuaggcuugauccgggcacggagccccuugguaccacgaagugguuaugggagcccacagcuccagagaaaggcaaagaauag

SEQ ID NO: 86494 - RNA, 942 nt, Artificial Sequence
  derived and/or modified sequence
augagugaccuguugcugcucgggcugauagggggucucacccuauugcugcuccugacccuucucgcuuuugcaggcuacucuggacuccuggccgguguugaagugucugccggcagcccccccauccgcaauguuaccguggcuuauaaguuccacaugggccuuuauggcgagaccgggcgguuguucacugaaucaugcagcauuucacccaagcuccguucuaucgccguguacuacgacaauccucacauggugccuccugacaaaugcaggugugcagugggcuccauccugucagagggagaggagagucccucuccugaguuaaucgaccuguaucaaaaguucgguuuuaaaguguuuucguucccggcccccucucacgucgugaccgccaccuuuccauacacaacuauccuguccaucugguuagcaacgaggagaguucaccccgcucuagauacuuauauuaaagaaagaaagcuuugcgccuauccgcgccuagagaucuaucaggaagaccagauucacuucauguguccucuagcuagacaaggagacuuuuacguccccgagaugaaagagacugaauggaaguggagagggcugguugaggcaauagauacccagguagaugggaccggggcagacaccaugucagauacaaguagcgugagucuugaggugagcccaggaucucgcgagaccuccgccgccacucucucaccaggagcuucgucuagaggcugggaugacggcgacacccgaagugagcacagcuauagcgaauccggagcuagugguucuagcuuugaggagcuugaucuugaaggagaagggccccuuggcgaaucaagauuagauccaggcacggaaccacugggcacaacuaaguggcuaugggaacccacugcuccugagaaaggaaaagaguag

SEQ ID NO: 86495 - RNA, 423 nt, Artificial Sequence
  derived and/or modified sequence
auguccgaccugcuccugcuuggauuaaucggcggacugacauugcugcugcugcugaccuugcuggcauucgcuggguauuccggguugcucgcugggguggaaguuucagccggcucgccccccauaagaaaugugaccgucgccuacaaguuucacaugggccuuuauggagagacaggccgacuuuuuacagagucuugcagcaucuccccaaagcucaggucuauugcggucuacuaugacaauccccauaugguucccccagacaaguguagaugcgccgugggaaguauccucuccgagggcgaggaaaguccaucuccagagcugaucgaucuguaucaaaaguuuggguucaaaguguuuaguuuuccggcuccaucacauguggugaccgccacuuuuccauauacaaccuag

SEQ ID NO: 86496 - RNA, 942 nt, Artificial Sequence
  derived and/or modified sequence
auguccgaccuacuccuucugggacuuauaggcgggcugacucuauugcuacuccugacccuccuggccuuugccggguauucaggguugcuugcaggcguugaggucucagcaggaucaccaccaauccguaacgugaccguugccuacaaauuucauaugggcuuguauggugaaacggguagguuguucacugaaagcuguucuauaagucccaaguugaggucuaucgcuguguauuaugacaauccgcacauggugccacccgauaagugucgaugcgcugugggcucuauccugagugaaggcgaggagagucccucaccagaacugaucgaucucuaucagaaguuugguuuuaagguguuuucguuuccugcuccaagucacguggucacagccacuuuucccuauaccaccauuuugagcaucuggcuggccacacgucgcguucacccagcacuagauaccuauauuaaagagagaaaacugugcgccuauccacgucuggaaaucuaccaagaggaccaaauccauuuuauguguccucuagcccgccaaggcgauuuuuaugugcccgaaaugaaagaaaccgaauggaaauggcgagggcuagucgaggcaauugacacgcagguggacggcacuggcgccgauaccaugagcgacacgucuucuguuagcuuggaaguuucaccugggucacgcgaaacauccgcagcaacacugucccccggggcaucaucacggggcugggacgauggggacaccaggagugaacacucguauuccgaaagcggagcuagugguucuuccuucgaggagcuggaucuugagggugaagguccgcugggugagagcagacuugauccuggaacugagccucuggggacaaccaaauggcucugggagccuaccgcuccugaaaaggggaaagaauag

SEQ ID NO: 86497 - RNA, 942 nt, Artificial Sequence
  derived and/or modified sequence
auguccgaucugcugcucuugggcuuaaucggcggcuuaacguugcugcugcugcugacuuugcucgcauucgcugguuacaguggacuuuuggcagguguugaggugucagccggaucucccccaauuagaaaugugacggucgccuauaaguuucacaugggucuauacggcgaaaccggacgacuguucaccgaaaguuguaguaucagcccaaagcuuagguccaucgccgucuauuacgacaauccccacaugguuccuccugauaagugucgaugugccguuggaucaauccuuucugagggugaggaaagucccuccccagaacuaauagaccucuaucagaaauucgguuuuaaaguguucucuuuccccgcgccaucacacgucguuacggccacuuuucccuacaccaccauuuugucaauaugguuggcaacccgccgcgugcacccggcucuugauaccuacauuaaagaaaggaaguugugugccuauccaagacucgaaauuuaccaggaggaccagauccauuucauguguccucucgccaggcagggggauuuuuaugugcccgagaugaaggagaccgaauggaaguggagagggcuuguggaagcuaucgauacgcaaguggacggaaccggcgccgauaccaugucugacacaagcagcgugucucuggaggugucaccaggcagucgcgaaacauccgcagccacccucaguccaggggccagcagcagggggugggacgacggugacacacgcucugaacacagcuacagcgaaagcggggcaucaggaucaucguuugaagaauuagaucuagagggggagggaccauugggagagagcagacuagacccgggcacugaaccuuuagguaccaccaaauggcucugggagccaaccgccccagagaaagggaaagaauag

SEQ ID NO: 86498 - RNA, 315 nt, Artificial Sequence
  derived and/or modified sequence
augagcgaucuuuugcugcucggcuuaaucggugggcuuacucucuugcuccuacuuacacuucucgccuuugccggauacucgggucucuuagcugggguggaagugucugcaggaaguccuccaauucguaaugucacuguugcuuauaaauuucacaugggucuguacggugagacagggaggcuuuuuaccgaaucuugcuccauuagccccaaauugaggucaaucgccguguauuacgacaacccccauauggucccuccugauaaauguaggugcgcugugggcagcauucucagugaaggugaguag

SEQ ID NO: 86499 - RNA, 456 nt, Artificial Sequence
  derived and/or modified sequence
augucugaccuccuguugcucggucugauaggaggacucaccuuacuccuucugcugacucuacuugccuucgccggguacaguggccuucuggcuggggucgagguguccgcuggcucaccccccaucaggaauguuacaguggcuuacaaguuucacaugggcuuauacggagaaacagguaggcucuuuacugaaagcugcucaaucagcccaaagcuucgauccauugcuguauacuacgacaauccacauaugguuccaccggacaagugucggugcgcugucggcucuauuuuguccgagggugaagaaucccccagccccgaacucaucgaccuguaccaaaaguuuggauuuaaaguguucuccuucccugccccuucacauguuguaaccgccacauuccccuacaccacuauacugaguauuuggcucgcaaccagaaggguauag

SEQ ID NO: 86500 - RNA, 654 nt, Artificial Sequence
  derived and/or modified sequence
augagcgaccuccuucugcucggccucauuggcggacugacacugcugcugcuccugacacugcucgcuuuugcuggauacuccggcuugcuggcgggugucgagguguccgcuggaagcccacccauaagaaacguaacuguggccuacaaauuccacauggggcuauauggugagacaggccggcuguuuaccgaaucuugcucaauuaguccaaaacugcggaguaucgccgucuacuaugauaacccacauauggucccccccgacaaaugucgcugugcuguggguucaauucuuucugaaggagaagaaaguccaagucccgagcucaucgaucuuuaccagaaauucggcuuuaagguauucuccuuccccgcuccaagccacguggugaccgccaccuucccauauacuacaaucuuaaguaucuggcuugcgacccggagaguccacccugcucuugacacuuacaucaaagaacggaaauuaugugccuauccccgacuagaaaucuaccaagaggaucagauccauuucauguguccacuggcccgccagggagacuucuacgugccugaaaugaaagaaacagaauggaaguggcgcgggcugguugaggccauugacacccaaguggacggcaccggcuag

SEQ ID NO: 86501 - RNA, 942 nt, Artificial Sequence
  derived and/or modified sequence
augucugaucuguuacugcugggacuuauugggggccugacucuccugcugcugcugacauuauuggcauuugcaggcuauucugggcuucucgcugggguagaagugucugcugguagcccgccgauuaggaacgugaccguugcauacaaauuucacaugggucuuuauggugagacaggacggcucuuuacggaaucuugcaguauuaguccaaaacuccgcucuaucgcugucuauuaugauaauccccacaugguuccccccgauaaaugcaggugcgccgugggaaguauccugagugaaggugaagaauccccguccccagagcugaucgacuuauaucaaaaguucggcuucaagguguuuucuuuuccugcuccgagccacgugguuaccgccaccuucccuuacacaacaauucucucaaucugguuggcaacucgccgaguccacccggcgcucgacacguauauaaaggaacgcaagcuuugugccuacccgagguuggaaaucuaccaggaggaccagauucacuuuauguguccuuuggcuagacaaggagacuuuuacgugcccgagaugaaggagacggaguggaaguggcggggauugguagaggcaauagauacacagguugacgggaccggagccgacacuauguccgacaccagcagcgucagucuagaggucagcccaggcagcagggagacgucagcagcaacuuugagccccggggcaucaucaagagggugggacgauggagacacacgaagugaacauagcuacagcgaguccggcgccagugguaguuccuucgaggagcuggacuuagaaggugaggggccccugggggaaagccggcucgacccaggcacagagccucucggcacaacuaaguggcuuugggagccuacugccccagagaaggguaaggaauag

SEQ ID NO: 86502 - RNA, 651 nt, Artificial Sequence
  derived and/or modified sequence
auguccgaucugcuccuuuugggucucaucgggggucugacccuuuuauugcuccugaccuugcuggccuucgcaggauauucaggccugcucgcuggaguagaaguaucugccggcucuccaccaauccgcaauguuacugucgcguacaaguuccacaugggccuguauggggaaacugggagacuguucacugagucaugcucuauaagcccaaaacugagaucaauagcuguauacuaugauaacccccacauggugccuccagauaaauguaggugugccguagguucaauucugucugaaggcgaagaauccccaucuccugaacuuaucgaucuguaccagaaguucggcuuuaaagucuucuccuucccugcacccagucauguaguuaccgcaaccuuccccuauacaacaauccugucgauauggcuugccacacgccgcguucacccggcccucgacacauauauuaaagagaggaagcucugugcguauccacgguuagagauuuaccaggaggaccagauccauuuuaugugucccuuagcccgacaaggggacuucuauguuccagagaugaaagaaacugaauggaaauggcgcggccuaguggaagcuaucgauacacagguggaugguacauag

SEQ ID NO: 86503 - RNA, 942 nt, Artificial Sequence
  derived and/or modified sequence
augagcgaucuccugcuguuagggcucauuggcggucugacucuucuacuauuauugacccucuuggccuuugcuggguacucagguuuacucgcuggaguggaggucucugccgguagcccgccaauuaggaacgugacgguagcuuacaaauuucacaugggccuguauggagaaaccgggagauuauucacagagucauguucuauaucgccaaaauuaagaucaaucgccgucuacuacgacaauccacacaugguccccccggauaaaugcagaugugcagugggauccauccugucugaaggcgaagagucccccucaccugaacugaucgacuuauaucaaaaauuuggcuuuaagguuuuuagcuuccccgccccuagccaugucguuacugcuacuuuuccguacaccacuauccucagcauuugguuagcaaccaggaggguacauccugcacucgacacuuauauuaaagaacgcaagcuuugcgccuauccuaggcuggaaaucuaucaagaggaccagauucacuucauguguccccuugcaagacaaggggauuucuacgugccugaaaugaaggaaacugaauggaaauggagaggccuuguggaggcgauagauacacagguagacgggacaggcgcagacaccaugagcgauaccagcagcguuucccucgagguaaguccuggaucacgcgaaacauccgccgcuaccuuauccccaggugcuaguagccgcggcugggaugacggggauacacggucugaacauucuuauucagaguccggugcaucuggguccuccuucgaagagcuugaccuggagggagaagggccgcugggggaaucaagauuagauccuggcaccgaaccucucgggaccacaaaauggcuaugggaaccgacagcacccgagaaaggcaaggaauag

SEQ ID NO: 86504 - RNA, 942 nt, Artificial Sequence
  derived and/or modified sequence
auguccgacuuacugcucuuaggauuaauuggaggcuugacucuauuguugcugcugacacugcuugccuucgcuggauacagcggccugcuugccgggguagagguuucugcugguucuccccccauccggaacgucaccguagcuuacaaauuccacauggggcuauauggggagacaggccgccuguuuaccgaaucuuguucaauuucacccaaacucaggucuauugcuguguacuacgacaacccacacauggucccaccagauaaaugccgcugcgccguuggauccauucugucagagggagaggagagucccucuccugaguuaaucgaccuguaucaaaaguucgguuuuaaaguguuuucguucccggcccccucucacgucgugaccgccaccuuuccauacacaacuauccuguccaucugguuagcaacgaggagaguucaccccgcucuagauacuuauauuaaagaaagaaagcuuugcgccuauccgcgccuagagaucuaucaggaagaccagauucacuucauguguccucuagcuagacaaggagacuuuuacguccccgagaugaaagagacugaauggaaguggagggggcucgucgaggcuauagacacucaaguggacggaaccggagcagacacuauguccgacacuagcagcguuucacuggaaguaucaccuggaucacgggagacuagcgccgccacccuaucaccuggugcaucuuccaggggcugggacgacggagauacacggagugaacacucuuauucagaaucaggugccucuggcucgucuuucgaggaauuagaucuggagggugagggaccccugggugaaagucgucuggauccugguacugaaccauugggcacuacuaaguggcugugggaaccaacugcaccagagaaaggaaaggaguag

SEQ ID NO: 86505 - RNA, 423 nt, Artificial Sequence
  derived and/or modified sequence
auguccgaucucuugcugcucggucucaucggcggccugacacuucuguuauuacucacacuguuggccuucgcuggcuauaguggccuccucgccggcguggaaguuagcgccgguucccccccuauccggaauguuaccguggcauauaaauuucacaugggcuuauacggcgaaacagggagacucuuuaccgaauccugcagcauuucucccaagcugagaaguauugccguuuauuacgacaacccacacauggugccaccugauaaguguagaugcgcugugggaucgauccucucugaaggugaagaguccccaucucccgaauuaaucgaucuguaccagaaauuugguuucaaaguuuucucguuuccagcaccgucacacguagugacagcaacuuucccuuauacuaccuag

SEQ ID NO: 86506 - RNA, 942 nt, Artificial Sequence
  derived and/or modified sequence
auguccgaccugcuauuauugggccucauuggcggccugacccuucuucucuugcugaccuugcucgccuuugccggcuacuccggacugcucgcuggaguugaaguaucagcagguaguccuccaauucggaaugucacaguugccuacaaauuucacaugggcuuguacggcgagaccggccggcuauucacugaaucuuguucaauaagucccaaacucagaucgauagcugucuacuacgacaauccucauauggugccccccgacaagugucgcugcgcagugggcaguauccucucagagggagaggagucacccagucccgaguugaucgaccuguaucaaaaauucggauuuaaggucuuuucuuuuccggcaccaucccaugucgugacugcaacauucccauacacaacuauccugagcauuugguuggccacuagaagaguucauccagcacuggacacuuauaucaaggaaagaaagcugugcgcauacccccgccuagagauuuaucaggaggaccagauucauuuuaugugcccucuggcgaggcaaggcgauuuuuacguuccagagaugaaagagacagaguggaaauggagaggccugguugaagcgaucgacacccagguagauggcacuggcgcugauacaaugagugauacaagcucuguaucucuggaagugagccccggcagucgugaaacaagugcagcaacacuuucuccuggugcgaguagucgcggcugggaugauggcgacacacggagcgaacauucuuacucugaaucgggggcaagcgggucaaguuucgaagaacuggaccuugaaggcgaggggccccuuggcgaaucuaggcucgauccaggcacggaaccgcuggguaccacaaagugguuaugggaaccgacagcuccggagaagggaaaagaguag

SEQ ID NO: 86507 - RNA, 942 nt, Artificial Sequence
  derived and/or modified sequence
augagcgaccuacugcuucugggguugaucggcggccuuacccuccucuuguugcuuacacuccuggccuuugcuggguauuccggauuguuagcaggcguugagguaucugcaggguccccuccaaucagaaacguaacaguggcuuauaaauuccacaugggucuauauggcgaaaccggcaggcuguuuaccgaauccugcucaauaagcccaaaacugcguuccauugccguuuauuacgacaacccacacauggucccgcccgacaaaugccgaugugcuguaggauccaucuugagugaaggugaggagucucccagcccagaacucaucgaccuguaccagaaauucggauucaaagucuuuagcuucccagcccccucucauguggugacagccaccuuucccuauacuacuauccuuuccaucuggcucgccacgcgacgcguacacccagcccuagacacguacauaaaggaacggaagcucugugcuuacccucgacuggagaucuaucaagaagaucagauacacuucauguguccacuagccaggcaaggagauuucuacguccccgaaaugaaagagaccgaauggaaguggagagggcuuguggaagcuaucgauacgcaaguggacggaaccggcgccgauaccaugucugacacaagcagcgugucucuggaggugucaccaggcagucgcgaaacauccgcagccacccucaguccaggggccagcagcagggggugggacgacggugacacacgcucugaacacagcuacagcgaaagcggggcaucaggaucaucguuugaagaauuagaucuagagggggagggaccauugggagagagcagacuagacccgggcacugaaccuuuagguaccaccaaaugguuaugggagccaacagcaccagaaaaagggaaggaguag

SEQ ID NO: 86508 - RNA, 315 nt, Artificial Sequence
  derived and/or modified sequence
augucugaucuacucuugcugggacugauuggaggucucacacuuuugcugcuucuuacacuccuggccuucgccggcuacucaggucuccuggcuggaguugagguguccgcagguuccccucccauccgcaaugugacaguggcuuacaaauuucacaugggccuauauggcgaaaccggccggcucuucacggaaaguuguucaaucucacccaaacuccgcaguauugccguauacuaugauaacccgcacauggugccuccggauaagugucggugcgccgucgggucaauccucagcgaaggagaguag

SEQ ID NO: 86509 - RNA, 456 nt, Artificial Sequence
  derived and/or modified sequence
auguccgaccuguuacuucucgguuugauaggaggccuuacacugcuccugcuacuaacacuucucgcauuugcaggauacuccgggcuauuggcgggcguggaggugucugcaggguccccaccuauucggaaugugacggucgccuauaaauuccauauggggcuguacggugagacugguagguuguucacagagucaugcucaauuuccccuaagcugagaucuauugccguguacuaugacaacccacacaugguccccccugacaaaugccgcugugcaguuggaaguauucugucugaaggugaagaaucucccucaccugaacuuaucgaucuguaucaaaaauucggauucaaaguuuuuaguuuuccagcucccucacauguggugacagcuacguuucccuauacaacuauucucucgaucugguuggcaacccggcggguuuag

SEQ ID NO: 86510 - RNA, 654 nt, Artificial Sequence
  derived and/or modified sequence
augagcgaccugcugcugcuagggcugauuggcggucucacucugcugcuccuguugacccuccucgcuuucgcugguuacucaggucuacuggcgggggucgagguuagcgcggguucccccccuauacguaacgugaccgucgccuacaaguuucacaugggccucuacggagagaccggccggcuguuuacugaguccugcucuauuucaccaaaguuaagauccaucgccguuuauuacgauaauccacacaugguccccccugacaaaugcagaugugccguaggauccauucucucugaaggagaagaaaguccaagucccgagcucaucgaucuuuaccagaaauucggcuuuaagguauucuccuuccccgcuccaagccacguggugaccgccaccuucccauauacuacaaucuuaaguaucuggcuugcgacccggagaguccacccugcucuugacacuuacaucaaagaacggaaauuaugugccuauccccgacuagaaaucuaccaagaggaucagauccauuucauguguccacuggcccgccagggagacuucuacgugccugaaaugaaagaaacagaauggaaguggcgcggacugguggaggcaaucgauacucagguggaugggacaggguag

SEQ ID NO: 86511 - RNA, 942 nt, Artificial Sequence
  derived and/or modified sequence
augucugaucuguuacugcugggacuuauugggggccugacucuccugcugcugcugacauuauuggcauuugcaggcuauucugggcuucucgcugggguagaagugucugcugguagcccgccgauuaggaacgugaccguugcauacaaauuucacaugggucuuuauggugagacaggacggcucuuuacggaaucuugcaguauuaguccaaaacuccgcucuaucgcugucuauuaugauaauccccacaugguuccccccgauaaaugcaggugcgccgugggaaguauccugucugaaggcgaagaaucccccucuccugagcuuauugacuuguaucaaaaauucggcuuuaaagucuucuccuucccagcuccuagccauguuguuaccgcuaccuuuccguauaccaccauccucagcaucugguuggccacuaggcgugugcauccugcauuggauacauauauuaaggaacgaaaauugugugccuacccacggcuggagaucuaucaagaagaccagauucauuuuaugugcccgcuagcuagacagggcgacuucuacgucccugaaaugaaggagacagaguggaaguggcggggauugguagaggcaauagauacacagguugacgggaccggagccgacacuauguccgacaccagcagcgucagucuagaggucagcccaggcagcagggagacgucagcagcaacuuugagccccggggcaucaucaagagggugggacgauggagacacacgaagugaacauagcuacagcgaguccggcgccagugguaguuccuucgaggagcuggacuuagaaggugaggggccccugggggaaagccggcucgacccaggcacagagccucucggcacaacuaagugguuaugggaaccaaccgcuccagagaaagggaaagaguag

SEQ ID NO: 86512 - RNA, 651 nt, Artificial Sequence
  derived and/or modified sequence
auguccgaucugcuccuuuugggucucaucgggggucugacccuuuuauugcuccugaccuugcuggccuucgcaggauauucaggccugcucgcuggaguagaaguaucugccggcucuccaccaauccgcaauguuacugucgcguacaaguuccacaugggccuguauggggaaacugggagacuguucacugagucaugcucuauaagcccaaaacugagaucaauagcuguauacuaugauaacccccacauggugccuccagauaaauguaggugugccguagguucaauucuguccgaaggugaggaauccccuuccccggaauugauugaucuuuaccagaaguucggcuuuaagguguucucauuuccagcucccagccacgucgugacugccaccuuuccuuauaccaccauccugaguauuuggcucgcuacccgccgcguucaccccgcucuugacaccuauaucaaagaacgaaagcuuugcgccuacccucgccuggaaaucuaucaggaggaccagauccacuucauguguccauuagcgcgccagggugacuuuuacguuccugagaugaaagagacagaauggaaguggagagggcuaguugaagcgauagauacucagguagauggcacauag

SEQ ID NO: 86513 - DNA, 306 bp, Artificial Sequence
  derived and/or modified sequence
caccaccaggatgaatttgcaaagcgcctgcccggttttaccgggctttcaatcgccgatcaaatcacgcttctgaaagccgcttgcctagatattctcatgttacgcatatgtacaaggtatacccccgagcaggacactatgacattctcagacggactgacgctcaacaggactcagatgcataatgcgggttttggcccactgactgacctggtgtttgcgttcgctggtcagcttttgccgcttgagatggatgatacagagacgggcctgttatctgctatatgcctgatctgcggttag

SEQ ID NO: 86514 - DNA, 306 bp, Artificial Sequence
  derived and/or modified sequence
caccaccaggatgaatttgccaagaggctgcccggcttcaccggcctgagcattgctgaccagatcaccctgctgaaggccgcctgcctggacatcctgatgctgcgcatctgcacccgctacaccccagagcaggacaccatgaccttcagtgatggcctgaccctgaacagaacccagatgcacaatgccggcttcggccccctgacagacctggtgtttgcctttgctggccagctgctgcccctggagatggatgacacagagaccggcctgctgagcgccatctgcctgatctgtggctag

SEQ ID NO: 86515 - DNA, 306 bp, Artificial Sequence
  derived and/or modified sequence
caccaccaggacgagttcgccaagcggctgcccggcttcaccggcttatccatcgccgaccagatcactctgctaaaggcggcgtgcctggacattctgatgttgcgtatctgtactcggtacacccccgaacaggatacaatgaccttctcagatggactgaccctgaatcggactcagatgcataatgccggctttggtccactcaccgacctggtgttcgccttcgcaggacagttgcttcctcttgaaatggacgacacagaaaccggtctgctatcagccatctgcctgatctgcgggtag

SEQ ID NO: 86516 - DNA, 306 bp, Artificial Sequence
  derived and/or modified sequence
caccaccaggacgagtttgccaagcggctgccgggattcacaggcctctcaatagccgaccagatcaccctgctaaaggcagcttgcctggatatcctgatgttacgaatctgtacccggtatacgccagaacaggataccatgacgttctctgatggactgacactgaaccgcacccaaatgcataacgccggtttcggcccactcaccgacctcgtgtttgcctttgctggccaacttctgccactggaaatggacgacacagaaactggactgctgagtgctatttgtctgatttgtggctag

SEQ ID NO: 86517 - DNA, 1757 bp, Artificial Sequence
  derived and/or modified sequence
catcatcaagatgagtttgccaagcggttgcctggctttacagggctcagcattgctgaccagatcactctgctcaaagctgcctgcctagatatcctgatgctgcgtatctgcacaaggtacaccccagagcaggacaccatgaccttctccgacgggctgaccctgaaccggacccagatgcacaatgccggcttcgggcccctcacagaccttgtctttgcctttgctgggcagctcctgcccctggagatggatgacaccgagacagggctgctcagcgccatctgcctcatctgcggagaccgcatggacctggaggagcccgaaaaagtggacaagctgcaggagccactgctggaagccctgaggctgtacgcccggcgccggcggcccagccagccctacatgttcccaaggatgctaatgaaaatcaccgacctccggggcatcagcactaagggagctgaaagggccattactctgaagatggagattccaggcccgatgcctcccttaatccgagagatgctggagaaccctgaaatgtttgaggatgactcctcgcagcctggtccccaccccaatgcctctagcgaggatgaggttcctgggggccagggcaaagggggcctgaagtccccagcctgaccagggcccctgacctccccgctgtgggggttggggcttcaggcagcagactgaccatctcccagaccgccagtgactgggggaggacctgctctgccctctccccaccccttccaatgagctccttgtttttgccaaagtttctaggggtgcctctgtgttcatccccttcctgatctaaccggctccctcgccagtcccgggggcctgccctgctcccaccaggagagagggcaaagggatgagcctgggtttggactctaaaatctcagcactgccccatgggtcctagacttcccagggcaagaggaagaccctgccattccacagccccttcctctgccaggtgcttggctctctgagagcaaacaggaacactagagaccaaaaaggggacaaaggagaagggctgagcccaccttcttgctcctacccttggtgcctaatgctgtgtgatgcacctgcagggtgtgtgctagcctctgtgccccgtccttgtgccaggtcaaggtgggggcaggctgggccctgcatttctggggcaggaacagagggtgaaagggacagatagatgcaggtccattctgcacctcttggctcgggtgcagagttcaccctgtgccctccgttataagtccctcccccagccctgtcatgtgccttgggctcctcctgccctccatctcagccattggggcagggaccctcctacactacagaggggccaggggatccctctctccctagtgccttccaccctttactccccagagcagcttggcccagggaggggggatgctgcttagctgatcccgccctgacccagaggaagcctctatttatttattagcttttgtttacaccgtggaattgaccccttcctccaggggtcttgggtgggggagcccagggcccctgtgacccctcctttcttcctccaatccccagtttgtatttagctgccaaataagattcccattggctccctgtgttctcttggggggtcagggtgctgtcccctcccctctgtttacatctcccctctaccccgctgtatcgcatattgctgagttttctatttttgcaaaataaagtgatggaaactc

SEQ ID NO: 86518 - DNA, 306 bp, Artificial Sequence
  derived and/or modified sequence
caccaccaggacgagttcgccaagagactgcccggcttcaccggcctgagcatcgccgaccagatcaccctgctgaaggccgcctgcctggacatcctgatgctgagaatctgcaccagatacacccccgagcaggacaccatgaccttcagcgacggcctgaccctgaacagaacccagatgcacaacgccggcttcggccccctgaccgacctggtgttcgccttcgccggccagctgctgcccctggagatggacgacaccgagaccggcctgctgagcgccatctgcctgatctgcggctag

SEQ ID NO: 86519 - protein, 432 aa, Artificial Sequence
  derived and/or modified sequence
MLALPLPPCWSGAPPGEEGESAAGPWCFQHPVSLQAGSRCTTVWKRLPRVRDGCTGRPGPGPACCAEPPAAPVSPDLNLLPGRNPPACNGFFRRSIQKNMVYTCHRDKNCIINKVTRNRCQYCRLQKCFEVGMSKEAVRNDRNKKKKEVKEEGSPDSYELSPQLEELITKVSKAHQETFPSLCQLGKYTTNSSADHRVQLDLGLWDKFSELATKCIIKIVEFAKRLPGFTGLSIADQITLLKAACLDILMLRICTRYTPEQDTMTFSDGLTLNRTQMHNAGFGPLTDLVFAFAGQLLPLEMDDTETGLLSAICLICGDRMDLEEPEKVDKLQEPLLEALRLYARRRRPSQPYMFPRMLMKITDLRGISTKGAERAITLKMEIPGPMPPLIREMLENPEMFEDDSSQPGPHPNASSEDEVPGGQGKGGLKSPA

SEQ ID NO: 86520 - DNA, 1299 bp, Artificial Sequence
  derived and/or modified sequence
atgctggccttgccattacctccatgctggagtggcgcccctcccggggaggagggcgaaagcgcagcaggaccttggtgcttccagcatcccgtgtcccttcaagccggcagcaggtgcaccaccgtgtggaaacgactgcctcgcgtgagagatggctgtacaggccggccgggacccggccccgcttgttgcgcggaaccgcctgcagcccccgtctccccagatctaaacttgttaccaggccgcaatcctcccgcttgtaacgggttcttcaggagaagtatacagaaaaacatggtttacacctgtcaccgggataagaactgcatcatcaacaaagtcacccggaatcgatgccaatattgtagactgcagaaatgcttcgaggtggggatgtctaaggaggcagtgaggaatgatagaaataaaaaaaagaaggaggtcaaggaagagggttcccccgactcctatgagctctcaccccagctggaggaactgatcacaaaagtatccaaggcccaccaggaaacctttccaagcctgtgccagcttggaaaatataccacaaattcttctgcagatcatagggtgcagctcgacctcggcctctgggataagttctcagaattggcaactaaatgcattattaagatagtagagttcgcaaagaggctgccgggtttcactgggctcagcattgccgatcagataactctactgaaggccgcctgtctcgacattctgatgctgcggatttgtacccggtataccccagagcaggatacgatgactttctcggatggcctgactctaaatcgaacacaaatgcacaatgccggctttggtccactgactgatttggttttcgcttttgccggccaactgctcccacttgaaatggatgacaccgaaaccggtctgttgtcagccatctgcctaatctgtggtgataggatggacctggaagaaccggaaaaggtggataagctccaagaacccctgctagaggccctcagattgtacgcaaggaggagacggcctagccagccatacatgtttcctagaatgttgatgaaaataaccgacctccgcggcatttccaccaaaggtgccgaaagagccatcacactgaagatggaaatccctggacccatgccgccactgatccgggagatgctggaaaatccagaaatgttcgaagatgactccagccaacctgggccacaccccaatgccagttccgaagatgaggtacctgggggccaggggaaaggtggcctgaagtcacctgcctag

SEQ ID NO: 86521 - DNA, 1299 bp, Artificial Sequence
  derived and/or modified sequence
atgctggccctgcccctgcccccctgctggagcggggcccctcctggagaggagggggagagcgctgctggcccctggtgcttccagcaccctgtgtccctgcaggccggcagccgctgcaccaccgtgtggaagaggctgccccgggtgagagatggctgcaccggccggcccggccctggccctgcctgctgtgccgagcccccagctgcccctgtgtccccagacctgaacctgctgcctggaagaaatcctccagcctgcaatggcttcttcagaagaagcatccagaagaacatggtgtacacctgccaccgggacaagaactgcatcatcaacaaggtgaccaggaaccgctgccagtactgccgcctgcagaagtgctttgaggtgggcatgagcaaggaggccgtgagaaatgacaggaacaagaagaagaaggaggtgaaggaggagggcagcccagacagctatgagctgagcccccagctggaggagctgatcaccaaggtgtccaaggcccaccaggagaccttccccagcctgtgccagctgggcaagtacaccaccaacagcagcgctgaccaccgggtgcagctggacctgggcctgtgggacaagttcagcgagctggccaccaagtgcatcatcaagatcgtggagtttgccaagaggctgcccggcttcaccggcctgagcattgctgaccagatcaccctgctgaaggccgcctgcctggacatcctgatgctgcgcatctgcacccgctacaccccagagcaggacaccatgaccttcagtgatggcctgaccctgaacagaacccagatgcacaatgccggcttcggccccctgacagacctggtgtttgcctttgctggccagctgctgcccctggagatggatgacacagagaccggcctgctgagcgccatctgcctgatctgtggggacaggatggacctggaggagcctgagaaggtggacaagctgcaggagcccctgctggaggccctgcggctgtatgccaggagaagaagacccagccagccctacatgttccccaggatgctgatgaagatcacagacctgcggggcatcagcaccaagggagctgagcgggccatcaccctgaagatggagatccctggccccatgcctcctctcatccgggagatgctggagaaccctgagatgtttgaagatgacagcagccagcccggcccccaccccaatgccagcagtgaagatgaggtgcctgggggccagggcaaaggaggcctgaagagccctgcctag

SEQ ID NO: 86522 - DNA, 1299 bp, Artificial Sequence
  derived and/or modified sequence
atgctggccctgcccctgcccccctgctggagcggcgccccccccggcgaagagggcgagtccgcagctggaccatggtgttttcagcaccctgtaagtctccaagccggttcacggtgcacaaccgtgtggaaacggctgccaagagtgcgcgatgggtgtaccggtaggcctggtcccggacccgcctgttgtgctgaacctccagctgccccagtgtcccctgacctgaatttgttgccaggccgcaacccacccgcatgtaatggtttctttaggaggtctatccaaaaaaatatggtgtatacctgtcaccgggataagaactgtatcattaacaaggttaccaggaacaggtgtcagtactgtaggctccagaagtgttttgaggtcgggatgtccaaggaagccgtgcgaaatgacagaaataagaagaagaaagaagtgaaagaggagggtagtcccgacagctacgagctaagcccacagttagaagaactaattacaaaggtgagtaaggcacaccaggagacgttcccttcactttgccaactcggaaaatatactaccaacagcagcgccgatcatcgtgtgcaattagatctggggttgtgggataagtttagtgaactggccaccaaatgcatcattaagatcgtggaattcgcaaaaagacttccaggtttcaccggattgtccatagccgaccagatcaccctcttaaaagctgcctgcctcgatattttgatgctacgtatctgtacacggtatacacctgaacaggatactatgacattttcagatggcctgacgttgaatcgcacccagatgcataacgcagggttcggacctctgaccgacctggtgtttgcctttgccgggcaactgctgccgctggagatggatgacactgaaaccggcctcctgagtgctatttgcttgatctgtggggatcgaatggacctggaagaaccagaaaaggttgataaacttcaggagccgttgctagaagcacttcgactgtatgccagaaggcggagaccgtcgcagccttatatgttcccccggatgctcatgaaaattactgatctgcgagggatctcaactaagggcgccgagagagccatcactctgaaaatggaaatacctggaccaatgcctccactcattcgagaaatgttggaaaaccctgagatgttcgaggacgactctagccaacctggccctcacccaaatgcatcttccgaggatgaggttcccggtggacagggtaaggggggactcaaaagcccagcctag

SEQ ID NO: 86523 - DNA, 1299 bp, Artificial Sequence
  derived and/or modified sequence
atgctggcattgcctctgcctccctgctggtccggtgcccctccaggcgaggagggtgaaagcgccgctgggccatggtgcttccagcaccccgtgagccttcaagcgggtagtaggtgtaccacagtgtggaagcgcttgcccagggtgcgcgacggctgtaccggtaggccaggcccaggcccagcttgttgcgccgaaccacccgctgctccggtgtcgccggatctgaacctgttacccggacggaaccccccagcctgcaacggattcttcaggcgatccatacaaaagaatatggtgtacacatgtcacagggacaagaattgcatcattaataaggtgacccggaacagatgtcagtattgccggctgcagaagtgctttgaggtcgggatgagtaaggaagctgtcagaaatgatcgaaacaagaaaaaaaaggaggttaaggaggaaggtagtccggactcctacgagctgtccccccagctcgaagaacttatcactaaagtaagcaaggcccaccaggagaccttccctagcttatgccagctgggaaagtataccacaaattcatctgctgaccacagggtgcagcttgatctcggattgtgggataagtttagtgagttggctactaagtgtattatcaaaattgtggaatttgcaaagagactccccggattcacgggactgtctatcgccgatcagatcacactcctgaaggctgcctgtttggatatcttaatgctgcgaatttgcacacgctacacacccgagcaggacaccatgacattcagcgacggacttactttgaacagaacccagatgcacaatgcaggctttggcccactgacggatctcgttttcgccttcgcgggacaactactccccttggaaatggacgataccgaaacagggctgctttctgcaatttgcttgatatgcggcgatagaatggacctcgaggagccggagaaggtggacaaattacaggagccactcttggaggccctccgactgtacgctagacgcaggagaccatcccagccctatatgttccctagaatgctcatgaagattaccgacctgcgtggcatctctaccaagggagccgaacgggcaataacccttaaaatggaaatccccggtccaatgcctcctttgattagggagatgctggaaaacccagagatgttcgaagatgactcttcccagcctggtccacaccccaacgcctccagtgaggatgaggttcccggtggtcaaggaaagggcggactgaagtcacccgcatag

SEQ ID NO: 86524 - DNA, 1779 bp, Artificial Sequence
  derived and/or modified sequence
caagccccaccccccacccctccaggcttcgcttttaaaaaaggtctccccagtgctagctgccgaagcacccagataagagctggacggaggctaaagcggcagccccagcttcgcgccccgcccagtccctttcccctgctggggatcccccctcttccccgcccaccccttacccgcatgcagcccagcgccctatgctagccctccccctccccccctgctggagcggggcgccgccgggggaggagggggaatcggctgcgggtccttggtgtttccagcacccagtttcccttcaagccgggtcgcgatgtacgactgtatggaaacgtttgccccgggtccgcgacggctgtacggggcggccgggcccggggccggcttgctgcgcagagccaccggcggctcctgtttcgccggacttgaatcttttgcctggccgcaacccgccagcctgcaatggcttctttcgccgaagcatccagaagaacatggtgtacacgtgtcaccgcgacaaaaactgtatcatcaacaaggtgaccaggaatcgctgccagtactgccggctacagaagtgcttcgaagtgggcatgtccaaggaagctgtgcgaaatgaccggaacaagaagaagaaagaggtgaaggaagaagggtcacctgacagctatgagctgagccctcagttagaagagctcatcaccaaggtcagcaaagcccatcaggagactttcccctcgctctgccagctgggcaagtataccacgaactccagtgcagaccaccgcgtgcagctggatctggggctgtgggacaagttcagtgagctggctaccaagtgcatcatcaagatcgtggagtttgccaagcggttgcctggctttacagggctcagcattgctgaccagatcactctgctcaaagctgcctgcctagatatcctgatgctgcgtatctgcacaaggtacaccccagagcaggacaccatgaccttctccgacgggctgaccctgaaccggacccagatgcacaatgccggcttcgggcccctcacagaccttgtctttgcctttgctgggcagctcctgcccctggagatggatgacaccgagacagggctgctcagcgccatctgcctcatctgcggagaccgcatggacctggaggagcccgaaaaagtggacaagctgcaggagccactgctggaagccctgaggctgtacgcccggcgccggcggcccagccagccctacatgttcccaaggatgctaatgaaaatcaccgacctccggggcatcagcactaagggagctgaaagggccattactctgaagatggagattccaggcccgatgcctcccttaatccgagagatgctggagaaccctgaaatgtttgaggatgactcctcgcagcctggtccccaccccaatgcctctagcgaggatgaggttcctgggggccagggcaaagggggcctgaagtccccagcctgaccagggcccctgacctccccgctgtgggggttggggcttcaggcagcagactgaccatctcccagaccgccagtgactgggggaggacctgctctgccctctccccaccccttccaatgagctccttgtttttgccaaagtttctaggggtgcctctgtgttcatccccttcctgatctaaccggctccctcgccagtcccgggggcctgccctgctcccaccaggagagagggcaaagggatgagcctgggtttggactctaaaatctcagcactgccccat

SEQ ID NO: 86525 - DNA, 1299 bp, Artificial Sequence
  derived and/or modified sequence
atgctggccctgcccctgcccccctgctggagcggcgccccccccggcgaggagggcgagagcgccgccggcccctggtgcttccagcaccccgtgagcctgcaggccggcagcagatgcaccaccgtgtggaagagactgcccagagtgagagacggctgcaccggcagacccggccccggccccgcctgctgcgccgagccccccgccgcccccgtgagccccgacctgaacctgctgcccggcagaaacccccccgcctgcaacggcttcttcagaagaagcatccagaagaacatggtgtacacctgccacagagacaagaactgcatcatcaacaaggtgaccagaaacagatgccagtactgcagactgcagaagtgcttcgaggtgggcatgagcaaggaggccgtgagaaacgacagaaacaagaagaagaaggaggtgaaggaggagggcagccccgacagctacgagctgagcccccagctggaggagctgatcaccaaggtgagcaaggcccaccaggagaccttccccagcctgtgccagctgggcaagtacaccaccaacagcagcgccgaccacagagtgcagctggacctgggcctgtgggacaagttcagcgagctggccaccaagtgcatcatcaagatcgtggagttcgccaagagactgcccggcttcaccggcctgagcatcgccgaccagatcaccctgctgaaggccgcctgcctggacatcctgatgctgagaatctgcaccagatacacccccgagcaggacaccatgaccttcagcgacggcctgaccctgaacagaacccagatgcacaacgccggcttcggccccctgaccgacctggtgttcgccttcgccggccagctgctgcccctggagatggacgacaccgagaccggcctgctgagcgccatctgcctgatctgcggcgacagaatggacctggaggagcccgagaaggtggacaagctgcaggagcccctgctggaggccctgagactgtacgccagaagaagaagacccagccagccctacatgttccccagaatgctgatgaagatcaccgacctgagaggcatcagcaccaagggcgccgagagagccatcaccctgaagatggagatccccggccccatgccccccctgatcagagagatgctggagaaccccgagatgttcgaggacgacagcagccagcccggcccccaccccaacgccagcagcgaggacgaggtgcccggcggccagggcaagggcggcctgaagagccccgcctag

SEQ ID NO: 86526 - protein, 188 aa, Artificial Sequence
  derived and/or modified sequence
MSPLLRRLLLAALLQLAPAQAPVSQPDAPGHQRKVVSWIDVYTRATCQPREVVVPLTVELMGTVAKQLVPSCVTVQRCGGCCPDDGLECVPTGQHQVRMQILMIRYPSSQLGEMSLEEHSQCECRPKKKDSAVKPDSPRPLCPRCTQHHQRPDPRTCRCRCRRRSFLRCQGRGLELNPDTCRCRKLRR

SEQ ID NO: 86527 - DNA, 399 bp, Artificial Sequence
  derived and/or modified sequence
atgaccgagcaggagaccctggccctgctggaggtgaagcgggacccaggggtccgagcagagcccgtgatgcttttctgcccgtccgccttatggggcgccactgccggaggcggagacccaccagccatttgtggtccagtgggtccggccttgtactcgcttcttctgcaacccggcagagcctttcacttacccgcccctgggtacccccagacagcacctagtgcccactggagcctctgtaggttgccggctgacttgcttgccgatctgtgtaggggtccccttctgccgagactgcggcttcgacccgatgtgtctgctacagcagtagacgcggacgtggagccattacttcacgtccgggggggcgcaggcgctcacgcacactgttag

SEQ ID NO: 86528 - DNA, 567 bp, Artificial Sequence
  derived and/or modified sequence
atgagccccctgctgagaagactgctgctggccgccctgctgcagctggcccccgcccaggcccccgtgagccagcccgacgcccccggccaccagagaaaggtggtgagctggatcgacgtgtacaccagagccacctgccagcccagagaggtggtggtgcccctgaccgtggagctgatgggcaccgtggccaagcagctggtgcccagctgcgtgaccgtgcagagatgcggcggctgctgccccgacgacggcctggagtgcgtgcccaccggccagcaccaggtgagaatgcagatcctgatgatcagataccccagcagccagctgggcgagatgagcctggaggagcacagccagtgcgagtgcagacccaagaagaaggacagcgccgtgaagcccgacagccccagacccctgtgccccagatgcacccagcaccaccagagacccgaccccagaacctgcagatgcagatgcagaagaagaagcttcctgagatgccagggcagaggcctggagctgaaccccgacacctgcagatgcagaaagctgagaagatag

SEQ ID NO: 86529 - DNA, 567 bp, Artificial Sequence
  derived and/or modified sequence
atgagcccattgttacgccggttactccttgcggcccttcttcagctggctccggcccaggctccggtatcacagcctgacgccccaggccaccaaaggaaggtagtctcgtggattgacgtttacactcgcgccacttgccagcctcgcgaagtggttgtccctctgacagtcgagcttatgggaacagtcgccaaacagctggtcccttcctgcgtgactgtacagagatgcggtggctgctgtcctgacgacggacttgaatgtgtccctacagggcaacatcaggttagaatgcagattctcatgattagatatccctcttctcaattgggcgagatgagcctggaggagcactcacagtgtgagtgtaggccaaaaaagaaggattctgcggtgaagcctgatagccccaggccgctgtgtccccgctgcacacagcaccaccagcgccccgatcccaggacctgtagatgccgatgtcgacggcgcagcttcctgagatgccaaggtagggggctggaactgaatccggacacttgcagatgccggaaactgcgcagatag

SEQ ID NO: 86530 - DNA, 567 bp, Artificial Sequence
  derived and/or modified sequence
atgagccccctgctgcggcggctgctgctggccgccctgctgcagctggccccagcccaggcccctgtgtcccagccagatgcccctggccaccagaggaaggtggtgtcctggattgatgtgtacacccgggccacctgccagccccgggaggtggtggtgcccctgactgtggagctgatgggcaccgtggccaagcagctggtgcccagctgtgtgacagtgcagagatgtggcggctgctgcccagatgatggcctggagtgtgtgcccaccggccagcaccaggtgaggatgcagatcctgatgatccgctaccccagcagccagctgggggagatgagcctggaggagcacagccagtgtgaatgtcggcccaagaagaaggacagcgctgtgaagccagacagcccccggcccctgtgcccccgctgcacccagcaccaccagaggccagaccccaggacctgccgctgccgctgcagaagaagaagcttcctgcgctgccagggccggggcctggagctgaacccagacacctgccgctgcaggaagctgcggaggtag

SEQ ID NO: 86531 - DNA, 567 bp, Artificial Sequence
  derived and/or modified sequence
atgagccccctgctgcggcggctgctgctggccgccctgctgcagctggcgccagctcaggcccccgtgtcacaacccgatgctcctgggcatcagcgaaaagtcgtaagctggattgatgtctacacacgtgctacatgtcagcctcgcgaggtggtggtgcctcttacagtagagctgatgggtacagtcgcaaagcagctcgtaccctcctgtgtgacagtccagcgatgcgggggttgttgccctgacgacggtttggaatgcgtgcctacaggacagcatcaggtgcgaatgcaaatcctgatgatcagatacccctcctcacagcttggtgaaatgtctcttgaagaacatagccaatgtgagtgccggccaaagaaaaaagattccgcagtgaagccggatagcccaaggccactatgcccccgctgcacgcaacaccaccaaagacccgaccccagaacttgtaggtgtaggtgtcgcagacgcagtttcctccgatgccagggccgggggctggaactcaacccagatacttgccggtgtaggaagttaagacggtag

SEQ ID NO: 86532 - DNA, 567 bp, Artificial Sequence
  derived and/or modified sequence
atgtcacctctgcttcgcagattgctgctggctgctctgctgcaactggccccagcacaagcccctgtctcccagcccgacgcgccagggcatcaaagaaaggtggtgagctggattgacgtgtataccagggccacttgtcagcccagggaagtggtggttcccctgacagtcgagctcatgggaaccgttgcaaagcagctcgtgccttcttgtgtgacagttcagcgatgcggtggatgctgtcctgacgatggactagagtgcgtccccacaggacaacatcaggtgaggatgcagatcctgatgatccgttatccttcatcccagctcggcgagatgagcctggaagaacactcccaatgcgaatgtcggcctaagaagaaagattcagctgtaaagcctgatagcccaagacctctgtgtcccaggtgtacacagcaccaccagaggcccgatccccgtacctgtcgttgccggtgtagaaggcggtcatttctgaggtgtcaggggagagggctcgaactcaaccccgatacctgcagatgcaggaagcttcggaggtag

SEQ ID NO: 86533 - DNA, 979 bp, Artificial Sequence
  derived and/or modified sequence
ccccggcgggcaccatgagccctctgctccgccgcctgctgctcgccgcactcctgcagctggcccccgcccaggcccctgtctcccagcctgatgcccctggccaccagaggaaagtggtgtcatggatagatgtgtatactcgcgctacctgccagccccgggaggtggtggtgcccttgactgtggagctcatgggcaccgtggccaaacagctggtgcccagctgcgtgactgtgcagcgctgtggtggctgctgccctgacgatggcctggagtgtgtgcccactgggcagcaccaagtccggatgcagatcctcatgatccggtacccgagcagtcagctgggggagatgtccctggaagaacacagccagtgtgaatgcagacctaaaaaaaaggacagtgctgtgaagccagacagccccaggcccctctgcccacgctgcacccagcaccaccagcgccctgacccccggacctgccgctgccgctgccgacgccgcagcttcctccgttgccaagggcggggcttagagctcaacccagacacctgcaggtgccggaagctgcgaaggtgacacatggcttttcagactcagcagggtgacttgcctcagaggctatatcccagtgggggaacaaagaggagcctggtaaaaaacagccaagcccccaagacctcagcccaggcagaagctgctctaggacctgggcctctcagagggctcttctgccatcccttgtctccctgaggccatcatcaaacaggacagagttggaagaggagactgggaggcagcaagaggggtcacataccagctcaggggagaatggagtactgtctcagtttctaaccactctgtgcaagtaagcatcttacaactggctcttcctcccctcactaagaagacccaaacctctgcataatgggatttgggctttggtacaagaactgtgacccccaaccctgataaaa

SEQ ID NO: 86534 - DNA, 1721 bp, Artificial Sequence
  derived and/or modified sequence
gccgtccccgccgccgctgcccgccgccaccggccgcccgcccgcccggctcctccggccgcctccgctgcgctgcgctgcgctgcctgcacccagggctcgggagggggccgcggaggagtcgccccccgcgcccggcccccgcccgccgcgcccgggcccgcgccatggggctctggctgtcgccgccccccgcgccgccgggctagggcgatgcgggcgcccccggcgggcggccccggcgggcaccatgagccctctgctccgccgcctgctgctcgccgcactcctgcagctggcccccgcccaggcccctgtctcccagcctgatgcccctggccaccagaggaaagtggtgtcatggatagatgtgtatactcgcgctacctgccagccccgggaggtggtggtgcccttgactgtggagctcatgggcaccgtggccaaacagctggtgcccagctgcgtgactgtgcagcgctgtggtggctgctgccctgacgatggcctggagtgtgtgcccactgggcagcaccaagtccggatgcagatcctcatgatccggtacccgagcagtcagctgggggagatgtccctggaagaacacagccagtgtgaatgcagacctaaaaaaaaggacagtgctgtgaagccagacagccccaggcccctctgcccacgctgcacccagcaccaccagcgccctgacccccggacctgccgctgccgctgccgacgccgcagcttcctccgttgccaagggcggggcttagagctcaacccagacacctgcaggtgccggaagctgcgaaggtgacacatggcttttcagactcagcagggtgacttgcctcagaggctatatcccagtgggggaacaaagaggagcctggtaaaaaacagccaagcccccaagacctcagcccaggcagaagctgctctaggacctgggcctctcagagggctcttctgccatcccttgtctccctgaggccatcatcaaacaggacagagttggaagaggagactgggaggcagcaagaggggtcacataccagctcaggggagaatggagtactgtctcagtttctaaccactctgtgcaagtaagcatcttacaactggctcttcctcccctcactaagaagacccaaacctctgcataatgggatttgggctttggtacaagaactgtgacccccaaccctgataaaagagatggaaggagctgtccctgcctgtgtcactgtttgtcactgtccaggctggctggtttgggcatgaatgtctgcatcactaaatccagagcttgtcttgctccctcattgtgcagatggaggaaatgaggactaaggccccacagcagatcccaggcagggccagaattatgtattcatcactttcaagttattgccacgcatgggagtcagggatagcccagtcaatacagactgcctgccctcctgctcttcaccagggttcttttctagaaggagacagccttctgtggccagagagcttggggtaggacccagatctactgagtgaccttgcttgtcactacccctgcctctctgagcagcagtttccacatgtgcacatagagggaacagaagattgctgtggttggcgtcctcgggccccagagaagtttgagactatctttacgtaatagaaaagaacacttgttcttcctgccaggcaaaaaaaaaaaaaaaaaa

SEQ ID NO: 86535 - protein, 558 aa, Artificial Sequence
  derived and/or modified sequence
MAQDSVDLSCDYQFWMQKLSVWDQASTLETQQDTCLHVAQFQEFLRKMYEALKEMDSNTVIERFPTIGQLLAKACWNPFILAYDESQKILIWCLCCLINKEPQNSGQSKLNSWIQGVLSHILSALRFDKEVALFTQGLGYAPIDYYPGLLKNMVLSLASELRENHLNGFNTQRRMAPERVASLSRVCVPLITLTDVDPLVEALLICHGREPQEILQPEFFEAVNEAILLKKISLPMSAVVCLWLRHLPSLEKAMLHLFEKLISSERNCLRRIECFIKDSSLPQAACHPAIFRVVDEMFRCALLETDGALEIIATIQVFTQCFVEALEKASKQLRFALKTYFPYTSPSLAMVLLQDPQDIPRGHWLQTLKHISELLREAVEDQTHGSCGGPFESWFLFIHFGGWAEMVAEQLLMSAAEPPTALLWLLAFYYGPRDGRQQRAQTMVQVKAVLGHLLAMSRSSSLSAQDLQTVAGQGTDTDLRAPAQQLIRHLLLNFLLWAPGGHTIAWDVITLMAHTAEITHEIIGFLDQTLYRWNRLGIESPRSEKLARELLKELRTQV

SEQ ID NO: 86536 - DNA, 4585 bp, Artificial Sequence
  derived and/or modified sequence
actgctgacacgtgtgcgcgcgcgcggctccactgccgggcgaccgcgggaaaattccaaaaaaactcaaaaagccaatacgaggcaaagccaaattttcaagccacagatcccgggcggtggcttcctttccgccactgcccaaactgctgaagcagctcccgcgaggaccacccgatttaatgtgtgccgaccatttccttcagtgctggacaggctgctgtgaagggacatcaccttttcgctttttccaagatggctcaagattcagtagatctttcttgtgattatcagttttggatgcagaagctttctgtatgggatcaggcttccactttggaaacccagcaagacacctgtcttcacgtggctcagttccaggagttcctaaggaagatgtatgaagccttgaaagagatggattctaatacagtcattgaaagattccccacaattggtcaactgttggcaaaagcttgttggaatccttttattttagcatatgatgaaagccaaaaaattctaatatggtgcttatgttgtctaattaacaaagaaccacagaattctggacaatcaaaacttaactcctggatacagggtgtattatctcatatactttcagcactcagatttgataaagaagttgctcttttcactcaaggtcttgggtatgcacctatagattactatcctggtttgcttaaaaatatggttttatcattagcgtctgaactcagagagaatcatcttaatggatttaacactcaaaggcgaatggctcccgagcgagtggcgtccctgtcacgagtttgtgtcccacttattaccctgacagatgttgaccccctggtggaggctctcctcatctgtcatggacgtgaacctcaggaaatcctccagccagagttctttgaggctgtaaacgaggccattttgctgaagaagatttctctccccatgtcagctgtagtctgcctctggcttcggcaccttcccagccttgaaaaagcaatgctgcatctttttgaaaagctaatctccagtgagagaaattgtctgagaaggatcgaatgctttataaaagattcatcgctgcctcaagcagcctgccaccctgccatattccgggttgttgatgagatgttcaggtgtgcactcctggaaaccgatggggccctggaaatcatagccactattcaggtgtttacgcagtgctttgtagaagctctggagaaagcaagcaagcagctgcggtttgcactcaagacctactttccttacacttctccatctcttgccatggtgctgctgcaagaccctcaagatatccctcggggacactggctccagacactgaagcatatttctgaactgctcagagaagcagttgaagaccagactcatgggtcctgcggaggtccctttgagagctggttcctgttcattcacttcggaggatgggctgagatggtggcagagcaattactgatgtcggcagccgaaccccccacggccctgctgtggctcttggccttctactacggcccccgtgatgggaggcagcagagagcacagactatggtccaggtgaaggccgtgctgggccacctcctggcaatgtccagaagcagcagcctctcagcccaggacctgcagacggtagcaggacagggcacagacacagacctcagagctcctgcacaacagctgatcaggcaccttctcctcaacttcctgctctgggctcctggaggccacacgatcgcctgggatgtcatcaccctgatggctcacactgctgagataactcacgagatcattggctttcttgaccagaccttgtacagatggaatcgtcttggcattgaaagccctagatcagaaaaactggcccgagagctccttaaagagctgcgaactcaagtctagaaggcacgcaggccgtgtgggtgcccggcgtgagggatcaggctcgccagggccacaggacaggtgatgacctgtggccacgcatttgtggagtaagtgccctcgctgggctgtgagaatgagctgtacacatcttgggacaatctgctagtatctattttacaaaatgcagagccaggtccctcagcccagactcagtcagacatgttcactaatgactcaagtgagccttcggtactcctggtgcccgcccggccagaccgtcagcttgataattactaaagcaaaggcctgggtgggagaacaggtttctagtttttacccaagtcaagctgcacatctattatttaaaaattcaaagtcttagaaccaagaatttggtcatgaaccattaaagaatttagagagaacttagctctttttagactctttttaggagtcagggatctgggataaagccacactgtcttgctgtatggagaaattcttcaaggggagtcagggtccctcaggcttcccttgtgtctccctggacctgcctgacaggccacaggagcagacagcacacccaagcccgggcctccggcacactctttccactctgtatttgctaaatgatgctaactgctaccaaaaggcccttgggacatcagaggagccggcaggcgaaggtagaggatgtgttccagaaacattagaaggcaggattaattcagttagttagttctcttgttaaatggaaatgggaattggaaattcctgataaagaattggcctggctgggtgcagtggctcacacctgtgatcccagcactttgggaggccaaggcagggggattacttcagcccaggagttccagactgcctggctaacatggcaataccctatctctactaaaaatacaaaaattatcggggtgcaatggcatgcatctgtaatcccagctattcaagaggctgaggcatgaggatctcttgaacccgggaggtgggagttgtagtgagccgagatcatgacactgcactccagcctgggcaacagagcgagaccatctcttaaaaaaaggcattgttagtgtaatctcaaggttaacatttatttcatgtcagtacagggtgctttttcctttcagggacattctggaattgtattggttgtacattcttttgtgtctattctgtttgtcaagtgagtcaagacttgcttttgtccattttgatttgtgtgtattagtctgagtcttggctccgttttgaggtatgagcaaagttttgctggattagaagttaacctttagggaaattccttattttggtatgtggcaatgctaatagatccactgaagatctggaaaattccaggaacttttcacctgagcctttcttctgagaaatgctgcagtcagaagggtgtgctggtaaagtattttggtggcagctgccatcatggtcattgccttcatataacatgcttcgtgctcatggtcattgccttcatataacatgcttcgtgccatcatgatccttgccttcatataacaaacatgcttcgtcagaggtgttggggttgaaaaaggagctgcatgcttcactggagttgagggcctctctcctgttctgactttaagccagaacttgtggctgggccatggaagctgtgactcctctgtggacatggtggcagcagggaacccctagagagaggggccactgggaccaggcctcctgttgtggagggactcctgggacagtcctccaccctgtcctgtggtcctgtgtacagggttggcctcttcctcctcccctgccaggcctctgcccatgccccttccttccttctcctgggactggtgaagctaggcatctggaagacttcttcctagcctggaagccctgacctcggcccatctgcagaatctcccagttccttcacagctgccgagtcctctcacgggtgcggtggaggcggccttgccggtggtgctttctgggcagccaggggttcctgggtgggaggactgtccctctggggacgtggcactgaagtgcctgctggcttcatgtggccctttgccctttcccagcctgagagatgctcaaaggtggggagctgggggagccacccctcggccattccctccacctccaagacaggtggcggccgggcaggcactcttaagcccacctccccctcttgttgccttcgatttcggcaaagcctgggcaggtgccaccgggaaggaatggcatccgagatgctgggcggggacgcggcgtggccgagggggccttgacggcgttggcggggcctgggcacaggggcagccgcagggaggcagggatggcaaggcgtgaagccaccctggaaggaactggaccaaggtcttcagaggtgcgacagggtctggaatctgaccttactctagcaggagtttttgtagactctccctgatagtttagtttttgataaagcatgctggtaaaaccactaccctcagagagagccaaaaatacagaagaggcggagagcgcccctccaaccaggctgttattcccctggactccgtgacatctgtggaattttttagctctttaaaatctgtaatttgttgtctattttttcattctaaataaaacttcagtttgcacctaa

SEQ ID NO: 86537 - DNA, 4504 bp, Artificial Sequence
  derived and/or modified sequence
gagcccccggagaggcgggagccgggtgttggcgttttggttctttttgttcattgagcgcaggcagctatgtcttcttcaaaggagaggagcaaagatttaatgtgtgccgaccatttccttcagtgctggacaggctgctgtgaagggacatcaccttttcgctttttccaagatggctcaagattcagtagatctttcttgtgattatcagttttggatgcagaagctttctgtatgggatcaggcttccactttggaaacccagcaagacacctgtcttcacgtggctcagttccaggagttcctaaggaagatgtatgaagccttgaaagagatggattctaatacagtcattgaaagattccccacaattggtcaactgttggcaaaagcttgttggaatccttttattttagcatatgatgaaagccaaaaaattctaatatggtgcttatgttgtctaattaacaaagaaccacagaattctggacaatcaaaacttaactcctggatacagggtgtattatctcatatactttcagcactcagatttgataaagaagttgctcttttcactcaaggtcttgggtatgcacctatagattactatcctggtttgcttaaaaatatggttttatcattagcgtctgaactcagagagaatcatcttaatggatttaacactcaaaggcgaatggctcccgagcgagtggcgtccctgtcacgagtttgtgtcccacttattaccctgacagatgttgaccccctggtggaggctctcctcatctgtcatggacgtgaacctcaggaaatcctccagccagagttctttgaggctgtaaacgaggccattttgctgaagaagatttctctccccatgtcagctgtagtctgcctctggcttcggcaccttcccagccttgaaaaagcaatgctgcatctttttgaaaagctaatctccagtgagagaaattgtctgagaaggatcgaatgctttataaaagattcatcgctgcctcaagcagcctgccaccctgccatattccgggttgttgatgagatgttcaggtgtgcactcctggaaaccgatggggccctggaaatcatagccactattcaggtgtttacgcagtgctttgtagaagctctggagaaagcaagcaagcagctgcggtttgcactcaagacctactttccttacacttctccatctcttgccatggtgctgctgcaagaccctcaagatatccctcggggacactggctccagacactgaagcatatttctgaactgctcagagaagcagttgaagaccagactcatgggtcctgcggaggtccctttgagagctggttcctgttcattcacttcggaggatgggctgagatggtggcagagcaattactgatgtcggcagccgaaccccccacggccctgctgtggctcttggccttctactacggcccccgtgatgggaggcagcagagagcacagactatggtccaggtgaaggccgtgctgggccacctcctggcaatgtccagaagcagcagcctctcagcccaggacctgcagacggtagcaggacagggcacagacacagacctcagagctcctgcacaacagctgatcaggcaccttctcctcaacttcctgctctgggctcctggaggccacacgatcgcctgggatgtcatcaccctgatggctcacactgctgagataactcacgagatcattggctttcttgaccagaccttgtacagatggaatcgtcttggcattgaaagccctagatcagaaaaactggcccgagagctccttaaagagctgcgaactcaagtctagaaggcacgcaggccgtgtgggtgcccggcgtgagggatcaggctcgccagggccacaggacaggtgatgacctgtggccacgcatttgtggagtaagtgccctcgctgggctgtgagaatgagctgtacacatcttgggacaatctgctagtatctattttacaaaatgcagagccaggtccctcagcccagactcagtcagacatgttcactaatgactcaagtgagccttcggtactcctggtgcccgcccggccagaccgtcagcttgataattactaaagcaaaggcctgggtgggagaacaggtttctagtttttacccaagtcaagctgcacatctattatttaaaaattcaaagtcttagaaccaagaatttggtcatgaaccattaaagaatttagagagaacttagctctttttagactctttttaggagtcagggatctgggataaagccacactgtcttgctgtatggagaaattcttcaaggggagtcagggtccctcaggcttcccttgtgtctccctggacctgcctgacaggccacaggagcagacagcacacccaagcccgggcctccggcacactctttccactctgtatttgctaaatgatgctaactgctaccaaaaggcccttgggacatcagaggagccggcaggcgaaggtagaggatgtgttccagaaacattagaaggcaggattaattcagttagttagttctcttgttaaatggaaatgggaattggaaattcctgataaagaattggcctggctgggtgcagtggctcacacctgtgatcccagcactttgggaggccaaggcagggggattacttcagcccaggagttccagactgcctggctaacatggcaataccctatctctactaaaaatacaaaaattatcggggtgcaatggcatgcatctgtaatcccagctattcaagaggctgaggcatgaggatctcttgaacccgggaggtgggagttgtagtgagccgagatcatgacactgcactccagcctgggcaacagagcgagaccatctcttaaaaaaaggcattgttagtgtaatctcaaggttaacatttatttcatgtcagtacagggtgctttttcctttcagggacattctggaattgtattggttgtacattcttttgtgtctattctgtttgtcaagtgagtcaagacttgcttttgtccattttgatttgtgtgtattagtctgagtcttggctccgttttgaggtatgagcaaagttttgctggattagaagttaacctttagggaaattccttattttggtatgtggcaatgctaatagatccactgaagatctggaaaattccaggaacttttcacctgagcctttcttctgagaaatgctgcagtcagaagggtgtgctggtaaagtattttggtggcagctgccatcatggtcattgccttcatataacatgcttcgtgctcatggtcattgccttcatataacatgcttcgtgccatcatgatccttgccttcatataacaaacatgcttcgtcagaggtgttggggttgaaaaaggagctgcatgcttcactggagttgagggcctctctcctgttctgactttaagccagaacttgtggctgggccatggaagctgtgactcctctgtggacatggtggcagcagggaacccctagagagaggggccactgggaccaggcctcctgttgtggagggactcctgggacagtcctccaccctgtcctgtggtcctgtgtacagggttggcctcttcctcctcccctgccaggcctctgcccatgccccttccttccttctcctgggactggtgaagctaggcatctggaagacttcttcctagcctggaagccctgacctcggcccatctgcagaatctcccagttccttcacagctgccgagtcctctcacgggtgcggtggaggcggccttgccggtggtgctttctgggcagccaggggttcctgggtgggaggactgtccctctggggacgtggcactgaagtgcctgctggcttcatgtggccctttgccctttcccagcctgagagatgctcaaaggtggggagctgggggagccacccctcggccattccctccacctccaagacaggtggcggccgggcaggcactcttaagcccacctccccctcttgttgccttcgatttcggcaaagcctgggcaggtgccaccgggaaggaatggcatccgagatgctgggcggggacgcggcgtggccgagggggccttgacggcgttggcggggcctgggcacaggggcagccgcagggaggcagggatggcaaggcgtgaagccaccctggaaggaactggaccaaggtcttcagaggtgcgacagggtctggaatctgaccttactctagcaggagtttttgtagactctccctgatagtttagtttttgataaagcatgctggtaaaaccactaccctcagagagagccaaaaatacagaagaggcggagagcgcccctccaaccaggctgttattcccctggactccgtgacatctgtggaattttttagctctttaaaatctgtaatttgttgtctattttttcattctaaataaaacttcagtttgcaccta

SEQ ID NO: 86538 - DNA, 1677 bp, Artificial Sequence
  derived and/or modified sequence
atggctcaggacagcgtggatttaagctgtgactatcagttttggatgcaaaagctgagtgtctgggatcaggcgagcacgctagaaacacaacaagacacgtgcctgcacgtggctcaatttcaggagtttttacgcaagatgtatgaggcactgaaagaaatggattcaaacactgtgattgaacggttccctacaatcgggcagttactggctaaggcctgctggaatccgtttatccttgcatacgatgagtcacaaaagattctgatctggtgcctgtgttgcctcattaataaagagccccagaactccggtcagtcaaagctgaacagctggatccaaggggtcctctcacatattctgtcagcgctccgcttcgataaagaggttgccctgtttacccaggggctgggctatgcacctatcgattattatccaggactgctgaagaacatggtgctgagtctcgcttcagagcttagggagaaccatttgaatggctttaacactcaacgtaggatggcacctgaacgagtggcatctctctcgagggtgtgtgttccgctcatcaccttaaccgatgtcgaccccctggtcgaggccctactgatttgtcacgggcgggagccccaggaaattctacagcccgaattcttcgaggccgttaacgaggccattctgctaaaaaaaattagcctgcccatgtccgccgtggtttgcttgtggttgcggcacctaccaagtctggagaaggccatgctgcatctcttcgaaaagctcatttcctcggagcggaactgtctgcggcgtatagagtgtttcatcaaggattccagcctgccccaggccgcttgccatcccgccatctttcgcgtcgtcgatgagatgttcaggtgtgcattacttgaaaccgacggcgcacttgaaatcattgctaccattcaggtgttcactcagtgctttgtcgaggccctggaaaaggctagtaaacagcttaggttcgcattaaagacctactttccctacacaagcccgtccctggctatggtgctcctgcaggaccctcaagacatcccccgggggcactggttacagacccttaagcacatctccgagctcctgagggaagccgtcgaggatcaaacacacggatcttgcggaggacctttcgaatcatggttcttgtttatccactttgggggctgggccgaaatggtggcggaacagctgctcatgagcgccgccgagccacccactgcgctgctctggttgttagcattttattatgggccaagagatggacggcagcagagagcccagaccatggttcaggttaaagcggtcttaggccacttactggccatgtctagaagtagttccttatctgctcaggatctgcagacagtggcaggacagggtacggacacagacttgcgcgctccggcccagcaactcattcgtcatctgcttctgaacttcctgctgtgggctccaggcggtcacacaattgcctgggatgttattaccctgatggcccacacggctgaaattacccacgagatcatcgggtttctggaccagactttatatcgatggaatcggctgggtatagagtctccccgctccgaaaagctcgcaagagagctcctgaaagagttgcgaacacaggtgtag

SEQ ID NO: 86539 - DNA, 1677 bp, Artificial Sequence
  derived and/or modified sequence
atggctcaggactccgtggatctttcctgcgattaccagttctggatgcagaagctcagcgtatgggatcaggcctctaccctggaaacgcagcaagacacctgcttgcatgtcgcccagttccaggagtttctgagaaagatgtacgaggccttaaaggagatggatagcaataccgttattgagcgctttcctactattggccagctacttgcaaaggcttgttggaacccctttatcctcgcttatgacgaatctcagaaaattttgatctggtgcttatgttgtcttattaataaagaaccccaaaactccggccagagcaagctcaactcctggatacagggggtcctgtcccatattctcagtgccctgagattcgacaaagaagtggccctgtttactcaggggctcgggtacgctccaattgactactatcccgggcttcttaaaaatatggttctctcattagccagtgagttgcgggagaatcatctcaacggatttaatacccaacgtcggatggccccagagagggttgccagcttgagtagggtgtgcgtgcctctaatcacactgactgatgtcgaccccctggttgaggctcttctcatatgccacggcagagagccacaggaaattctccagcccgagtttttcgaggccgtgaatgaagctattttgcttaagaaaatctccctgcctatgagtgcggtggtctgtctgtggttacggcacttgccctctctcgaaaaggcaatgctgcacctattcgaaaagctgatttctagtgaaaggaactgcctgcgccgcattgaatgcttcattaaagactccagtctccctcaggccgcttgtcatccggcaattttccgagtggtcgacgagatgtttagatgcgccctgctagaaaccgacggggccctggaaataattgcgacaatccaggtcttcacacaatgtttcgtggaagcacttgaaaaggcgtccaagcagctgcgttttgcactcaagacatatttcccatatacttctcctagcctggcgatggttttgctgcaggatccccaagatataccaagagggcattggctacagactttgaaacatatttctgaactcttgcgagaagctgtggaagaccagacccatgggagttgcgggggacccttcgagtcatggttcctattcatccatttcggcggctgggccgagatggtggctgaacagctactcatgagtgctgctgaacctcctaccgcgcttctctggttactggccttttattatggtccgcgggacggaaggcagcagagggcgcaaaccatggtgcaggtcaaggcagtgctgggtcacctgctggctatgagccgaagtagcagtctcagcgcgcaagatttgcagacagttgccggtcagggaactgacacggatctgagggcccccgcccagcagttgataaggcatttgctccttaattttctgctttgggctcctggtgggcacactatagcctgggatgtcatcactctaatggctcacaccgccgagataacacatgagatcatcggcttcctggaccagacactctaccgctggaacagactaggcattgagtctccgagatctgagaaactcgcaagagagctacttaaggagctccgaactcaggtctag

SEQ ID NO: 86540 - DNA, 1677 bp, Artificial Sequence
  derived and/or modified sequence
atggcccaggacagcgtggacctgagctgtgactaccagttctggatgcagaagctgtctgtgtgggaccaggccagcaccctggagacccagcaggacacctgcctgcacgtggcccagttccaggagttcctgaggaagatgtatgaggccctgaaggagatggacagcaacacagtgattgagcgcttccccaccatcggccagctgctggccaaggcctgctggaaccccttcatcctggcctatgatgagagccagaagatcctgatctggtgcctgtgctgcctgatcaacaaggagccccagaacagcggccagagcaagctgaacagctggatccagggcgtgctgagccacatcctgagcgccctgcgctttgacaaggaggtggccctcttcacccagggcctgggctacgcccccatcgactactacccaggcctgctgaagaacatggtgctgagcctggccagcgagctgcgggagaaccacctgaatggcttcaacacccagaggaggatggcccctgagcgggtggccagcctgagccgggtgtgtgtgcccctcatcaccctgacagatgtggaccccctggtggaggccctgctgatctgccacggccgggagccccaggagatcctgcagcctgagttctttgaggccgtgaatgaggccatcctgctgaagaagatcagcctgcccatgtctgctgtggtgtgcctgtggctgcggcacctgcccagcctggagaaggccatgctgcacctgtttgagaagctgatcagcagcgagaggaactgcctgcggagaattgagtgcttcatcaaggacagcagcctgccccaggccgcctgccacccagccatcttccgggtggtggatgagatgttccgctgtgccctgctggagacagatggagccctggagatcatcgccaccatccaggtgttcacccagtgctttgtggaggccctggagaaggccagcaagcagctgcgctttgccctgaagacctacttcccctacaccagccccagcctggccatggtgctgctgcaggacccccaggacatcccccggggccactggctgcagaccctgaagcacatcagcgagctgctgcgggaggccgtggaggaccagacccacggcagctgtggcggcccctttgagagctggttcctgttcatccactttggaggctgggccgagatggtggccgagcagctgctgatgtctgctgctgagcccccaacagccctgctgtggctgctggccttctactacggccccagagatggccggcagcagagggcccagaccatggtgcaggtgaaggctgtgctgggccacctgctggccatgagccgcagcagcagcctgagcgcccaggacctgcagacagtggccggccagggcacagacacagacctgcgggccccagcccagcagctgatccgccacctgctgctgaacttcctgctgtgggcccctgggggccacaccatcgcctgggatgtgatcaccctgatggcccacacagctgagatcacccatgagatcatcggcttcctggaccagaccctgtaccgctggaaccggctgggcatcgagagccccaggtctgagaagctggcccgggagctgctgaaggagctgcggacccaggtgtag

SEQ ID NO: 86541 - DNA, 1677 bp, Artificial Sequence
  derived and/or modified sequence
atggcccaggacagcgtggacctgagctgcgactaccagttctggatgcagaagttaagcgtgtgggaccaggcttcaaccctggaaacgcagcaagatacgtgtcttcacgtcgctcaattccaggagtttcttcgaaagatgtacgaggctctgaaagagatggatagcaacaccgtgattgaaagatttcccacaatcggtcagttactcgctaaggcctgctggaacccatttattttggcctacgacgaaagccaaaagattttgatttggtgcctgtgctgcctcatcaacaaagagcctcagaacagtggccagagcaagcttaattcatggatccagggggtgctgtctcacattctgtcagcacttcgtttcgataaggaagtggcgctgttcacccaggggctggggtatgcccccatcgactactatcccggtcttctgaaaaatatggtgctttcactcgcctccgagcttagggagaatcatttgaacgggttcaacacacagaggaggatggcccctgagagagtggcctccctgagccgtgtgtgtgtgcccttaatcactctgacagatgtagatcctttggtcgaagcgcttctcatctgccatggccgcgaaccgcaggagatcttgcaacctgagttctttgaggctgttaacgaggctattctacttaaaaagattagcctgccaatgtcagccgtcgtatgtctgtggctgcggcatctgccatctctggaaaaggccatgctccacctcttcgagaagcttatctcttcggagcggaactgtcttcggcggatcgaatgctttatcaaagacagcagcctccctcaagctgcctgccacccggctatcttccgagtggtggacgaaatgttccggtgcgctttgctggagacggatggagctcttgaaataatagcaactatccaggtgtttactcagtgcttcgtcgaggctttggagaaagccagcaagcaactgcgctttgccctgaaaacttactttccctatacttctcccagcttagccatggttttgcttcaagacccccaggacataccacggggacattggttacagaccctcaagcatatatccgagctgctgcgtgaggccgtggaagatcagacacatggcagctgcggcggccctttcgagtcttggttcttattcatccattttggcgggtgggccgaaatggtggctgaacaattactgatgagtgccgctgagcctccaacggccctactttggctcttggcattctactacggcccgagagatggtcgtcagcaaagggcacaaacaatggtccaggtgaaggcagttttggggcacctgttggccatgagcagaagtagcagtctctccgcccaagacttgcagacagttgccgggcagggtacagatactgatcttcgggctcccgcccagcagctcatccgccacctgctgctcaatttcctcctttgggcccctggggggcacacaattgcttgggatgttataacgctgatggctcacacagccgagattacccatgaaattattggcttccttgaccagacactgtataggtggaatcggctcggtattgagtcccccagatccgagaaactggcacgggaattgctgaaagagctgcggacccaggtgtag

SEQ ID NO: 86542 - DNA, 1677 bp, Artificial Sequence
  derived and/or modified sequence
atggcccaggacagcgtggacctgagctgcgactaccagttctggatgcagaagctctcagtgtgggaccaggcttctacactcgagacacaacaggacacatgtctgcatgtcgcccagttccaagagtttctgcggaagatgtatgaagccctgaaagaaatggacagtaacactgtgattgaaaggtttccgaccattggccagctccttgctaaggcgtgctggaatccttttatcctcgcctatgacgagtctcagaaaatactgatctggtgcctgtgctgtctaatcaataaggagcctcagaactctggacaaagcaagcttaatagctggattcagggcgtgctctcccacatcctttccgccctgcgatttgataaggaagtagccttgttcacccagggactgggctatgcccccatcgattattatcccggtttgctgaaaaatatggtgctctcattagcgagcgagctccgggaaaaccacctgaacgggttcaatacccagcgcagaatggcgcctgagcgagtagcctctctcagtagagtctgcgtccccctcatcacattaaccgatgtcgatccattggtcgaggcacttctgatctgccatgggcgggagccacaggaaattctgcagcctgagttttttgaggcggtgaacgaagctattctcctcaagaaaataagcctaccgatgtccgctgtcgtgtgcctgtggctgagacacctaccgtctctggagaaagctatgttacatctgttcgaaaaattgatcagcagtgagcgcaattgtcttcgacggatcgagtgtttcatcaaagattcgtctctgccccaagccgcctgtcaccccgccatcttccgggtggtggatgaaatgttccgatgtgccctcctcgaaactgacggcgctctggagataattgctactatccaggttttcacccagtgtttcgtggaggcccttgagaaggcttctaaacagctgcggttcgccctgaaaacctacttcccctatacttccccctcgctggccatggttctcctccaggatccccaggacatccctcgcggccactggcttcagaccctcaaacacattagcgaacttctcagagaggcagttgaagaccagacacacggcagctgtggtggaccatttgagtcttggttcctgttcattcatttcggaggctgggctgagatggtggctgagcagctcctaatgtccgctgcagagcctcccaccgcccttttatggctgctggcattttattatggcccccgggatggaagacagcagagagcccagactatggtgcaggtgaaggcggtgctggggcacctgctggcgatgtcccggagttcaagcctctctgctcaggacctgcagactgttgcgggccagggcaccgacaccgatcttcgcgcacctgctcagcagctgattaggcacctgctcttaaactttttgctgtgggcacctggcggccacacgatcgcttgggatgtcattacgctgatggctcatacagctgaaatcacacacgagattatcggctttttagaccagacactgtaccggtggaatcggctagggattgagagcccgagaagcgagaaactggctagagagcttttgaaagaattacgcactcaggtgtag

SEQ ID NO: 86543 - DNA, 1677 bp, Artificial Sequence
  derived and/or modified sequence
atggcccaagattccgtggatctgtcctgcgactaccagttctggatgcagaagctgagcgtgtgggatcaggcgagcaccctggaaactcagcaggacacctgcctgcatgttgcgcaattccaggagttcttgcgaaaaatgtatgaggccttaaaagaaatggattcgaacaccgtgatcgagcggttcccgactataggccagctcctggcaaaggcttgttggaaccctttcattctggcctatgatgaaagccagaagattctgatctggtgcctctgctgtctgatcaacaaggaaccccagaattcaggccagtccaaactaaacagctggatccaaggcgttcttagtcacatcttgagcgcattaagatttgacaaagaagtagcattatttacacaagggttaggatacgcacctattgactattatccaggccttcttaagaacatggttctctctctggcatccgagttgagagagaaccacctaaacgggtttaatacccaaaggcgtatggcgcctgagcgagtggcctccttgagtcgcgtttgcgtgcccttaataacccttacagatgtcgacccactagtagaagccttgctcatctgccacggacgcgaaccgcaagagatcctacagcccgaattcttcgaagccgtcaacgaagccatcctgctgaagaaaatcagcctccctatgtctgctgtcgtgtgtctctggcttcgccatctgccctcactggagaaggcaatgttgcacctgtttgagaagctcatatcatctgagcgcaattgtctgcgcaggatcgagtgtttcattaaggatagctcccttccccaggcagcatgccatcctgcaatttttagagtggttgatgagatgttccgatgcgcgctcctggagaccgacggagccttggaaattattgctaccatccaggtgtttacacagtgttttgtagaagctctggagaaagcttccaagcagctgagatttgccctgaagacttactttccctatacatctccttccctcgctatggtactcctgcaggacccgcaggacatcccacgagggcactggctccagaccctgaagcacatcagtgaactccttcgcgaagctgttgaggatcagacacatggctcttgcggtggacccttcgagagttggttcctctttatccactttggcggatgggccgagatggttgcagaacagctcctgatgtcagctgccgaacctcctacagccttgctttggctccttgctttttactacgggcctagagacggcaggcagcaacgggctcaaactatggtgcaggttaaagccgttctgggacacttgctagccatgagcaggagttcatcactatccgcccaggatctgcagacagtcgctgggcagggcaccgacacagatctcagggctccagctcagcaacttatacggcacctcctcctcaacttcctactctgggccccaggagggcataccattgcctgggatgtcattacacttatggcccatactgcagagatcacgcacgagatcatcgggttcctcgaccaaacactgtatcggtggaataggttaggcatcgagagtcccaggagcgaaaaactggcacgagagctgttgaaggaactgcgtacccaggtgtag

SEQ ID NO: 86544 - DNA, 1677 bp, Artificial Sequence
  derived and/or modified sequence
atggctcaggacagcgtcgatctttcctgcgactaccagttttggatgcagaagctgtctgtatgggatcaagcctcaaccctggaaacacagcaagatacatgtctccatgtggcccagttccaggagttcctgcgcaagatgtatgaagcgctaaaggaaatggactccaacacagttatagagagattccccaccattggacagttgttagcgaaagcttgttggaaccctttcatattggcttacgatgagtcccagaaaatcttaatttggtgcctctgttgtctcatcaataaagaacctcagaatagcggccagagcaagctgaattcctggatccagggagtgctgagccatatcctatccgccctgcgcttcgataaggaggtggccctgttcacccagggtttgggttacgctccaattgattactaccccggtctattgaagaatatggtgctatctctcgcttctgaactcagagagaaccaccttaacggattcaacactcagcgcagaatggccccagagcgagttgcatccctttccagggtgtgcgtacctttgatcactctcaccgacgtagatccactggtggaggctttgctgatttgccatggacgagagcctcaagagattctgcagcccgagttcttcgaggccgtcaacgaggccatcctgctgaagaaaatcagcttacccatgtctgccgttgtctgtctctggctcaggcatttaccaagtctggagaaagccatgctacatctatttgagaagctgatctcctctgaaaggaattgccttagacgcatcgagtgcttcattaaagattcaagtcttccgcaggctgcctgtcatcccgcaatattccgggtggtggatgagatgttcaggtgtgctctactcgagacagacggcgcactggaaattatagcaacaatccaggtgttcacccagtgtttcgtggaggccttggaaaaggcaagcaagcaactaagattcgctttaaaaacttactttccctacacttccccttcacttgcaatggttctgttacaagacccccaagatatccctcgcggacactggctacagaccctgaaacatatctctgagctgttacgggaggccgttgaggaccagacccacggtagctgtggcggaccctttgaaagttggttcctgttcattcattttggaggctgggcagaaatggtagccgaacagctcctgatgagtgcagcagagcctcccaccgcactgctttggcttttggcattttactacggccctcgagacggaagacagcaaagggcccaaacaatggtgcaagtgaaggcggtcctggggcacctgcttgcgatgagtagatcctctagcttatccgcacaggatttgcagactgtggcgggacaggggactgacaccgatctgcgggcacccgctcagcagcttatccgtcacctgttgttgaactttcttctctgggcgccagggggtcatacaattgcctgggacgtgatcacactgatggctcataccgccgagatcacgcacgaaataattggattccttgaccagacattgtataggtggaaccggctcggtatcgagtctccaaggtcggaaaagttggcccgagagctgctcaaagaactacggacccaggtgtag

SEQ ID NO: 86545 - DNA, 1677 bp, Artificial Sequence
  derived and/or modified sequence
atggcccaggacagcgtggacctgagctgcgactaccagttctggatgcagaagctgagcgtgtgggaccaggccagcaccctggagacccagcaggacacctgcctgcacgtggcccagttccaggagttcctgagaaagatgtacgaggccctgaaggagatggacagcaacaccgtgatcgagagattccccaccatcggccagctgctggccaaggcctgctggaaccccttcatcctggcctacgacgagagccagaagatcctgatctggtgcctgtgctgcctgatcaacaaggagccccagaacagcggccagagcaagctgaacagctggatccagggcgtgctgagccacatcctgagcgccctgagattcgacaaggaggtggccctgttcacccagggcctgggctacgcccccatcgactactaccccggcctgctgaagaacatggtgctgagcctggccagcgagctgagagagaaccacctgaacggcttcaacacccagagaagaatggcccccgagagagtggccagcctgagcagagtgtgcgtgcccctgatcaccctgaccgacgtggaccccctggtggaggccctgctgatctgccacggcagagagccccaggagatcctgcagcccgagttcttcgaggccgtgaacgaggccatcctgctgaagaagatcagcctgcccatgagcgccgtggtgtgcctgtggctgagacacctgcccagcctggagaaggccatgctgcacctgttcgagaagctgatcagcagcgagagaaactgcctgagaagaatcgagtgcttcatcaaggacagcagcctgccccaggccgcctgccaccccgccatcttcagagtggtggacgagatgttcagatgcgccctgctggagaccgacggcgccctggagatcatcgccaccatccaggtgttcacccagtgcttcgtggaggccctggagaaggccagcaagcagctgagattcgccctgaagacctacttcccctacaccagccccagcctggccatggtgctgctgcaggacccccaggacatccccagaggccactggctgcagaccctgaagcacatcagcgagctgctgagagaggccgtggaggaccagacccacggcagctgcggcggccccttcgagagctggttcctgttcatccacttcggcggctgggccgagatggtggccgagcagctgctgatgagcgccgccgagccccccaccgccctgctgtggctgctggccttctactacggccccagagacggcagacagcagagagcccagaccatggtgcaggtgaaggccgtgctgggccacctgctggccatgagcagaagcagcagcctgagcgcccaggacctgcagaccgtggccggccagggcaccgacaccgacctgagagcccccgcccagcagctgatcagacacctgctgctgaacttcctgctgtgggcccccggcggccacaccatcgcctgggacgtgatcaccctgatggcccacaccgccgagatcacccacgagatcatcggcttcctggaccagaccctgtacagatggaacagactgggcatcgagagccccagaagcgagaagctggccagagagctgctgaaggagctgagaacccaggtgtag

SEQ ID NO: 86546 - protein, 87 aa, Artificial Sequence
  derived and/or modified sequence
MENQLAKSTEERTFQYQDSLPSLPVPSLEESLKKYLESVKPFANQEEYKKTEEIVQKFQSGIGEKLHQKLLERAKGKRNWVFVVIIE

SEQ ID NO: 86547 - DNA, 264 bp, Artificial Sequence
  derived and/or modified sequence
atggagaaccagctggccaagagcaccgaggagagaaccttccagtaccaggacagcctgcccagcctgcccgtgcccagcctggaggagagcctgaagaagtacctggagagcgtgaagcccttcgccaaccaggaggagtacaagaagaccgaggagatcgtgcagaagttccagagcggcatcggcgagaagctgcaccagaagctgctggagagagccaagggcaagagaaactgggtgttcgtggtgatcatcgagtag

SEQ ID NO: 86548 - DNA, 264 bp, Artificial Sequence
  derived and/or modified sequence
atggaaaatcaacttgcaaagtccacagaggagcgtaccttccaatatcaggattcactgccaagtctccccgttccttccctggaagaaagcctgaagaaatatcttgagtccgttaaacccttcgctaatcaagaggagtacaagaaaaccgaggagatagttcagaagtttcagagtgggattggtgaaaaattgcaccagaagctgttggagcgagctaagggcaagaggaactgggttttcgtggttatcattgaatag

SEQ ID NO: 86549 - DNA, 264 bp, Artificial Sequence
  derived and/or modified sequence
atggagaaccagctggccaagagcacagaggagaggaccttccagtaccaggacagcctgcccagcctgcctgtgcccagcctggaggagagcctgaagaagtacctggagagcgtgaagccctttgccaaccaggaggagtacaagaagacagaggagatcgtgcagaagttccagagcggcatcggggagaagctgcaccagaagctgctggagcgggccaagggcaagaggaactgggtgtttgtggtgatcatcgagtag

SEQ ID NO: 86550 - DNA, 264 bp, Artificial Sequence
  derived and/or modified sequence
atggagaaccagctggccaagagcaccgaggagcggaccttccagtaccaggactccctgccatcgcttccagtgccgtcattggaagagagccttaagaagtatcttgagagcgtaaagccattcgccaaccaagaggaatataagaagactgaggaaattgtgcagaaatttcaatccggcattggtgagaagctgcaccagaagctgctggaaagggccaaaggcaagcgcaattgggtgtttgttgtcatcattgaatag

SEQ ID NO: 86551 - DNA, 1213 bp, Artificial Sequence
  derived and/or modified sequence
gggggagcgagccggtgctgctgcaggctgaggctgcggcagaggcggcgaggcgcgggcggtgaggacggacagtcaccgacttagtccagttccctgtgatctcaaaacaattgttgcagcaggctcctggcagtctcaagcagttcatcttcttggtgtactggtttcctattgtgattttatcatggaaaatcaattggctaaatcaactgaagaacgaacatttcagtaccaggattctcttccatcactgcctgttccttcacttgaagaatcattaaaaaaataccttgaatcagtgaaaccatttgcaaatcaagaagaatataagaaaactgaagaaatagttcaaaaatttcaaagtgggattggagaaaaattgcaccagaaattgcttgaaagagcaaaaggaaaaagaaattgggtatttgttgttataattgaataatgatgatgtttaaagaatgataaataaaaagtgcatagtttttatttttaaattattgctgtaaaaatttttacagttattattgttattttcataatccaaaagaaggaatgaatcacttaactttgggagttttcagtgggtggattcgggaacttgttaaaatgcagatttgctgggataagtgattctgattcacatggctggaatgaggcccagagattcttattttaacaatcacttcatgtggtttggctgcaggtaatctgtagaccatgctgaaggaaaacattttgtccaggtgactagcttgaaaaatcagaaacactaaaatagacatgtcacataggtggcatagaaatattttcgtagtacaatggagaaagggaatcattaaaaatcagagtggagaatggttatgtatattgtatatttcagttagataaattgaggaagctagtataataattattgaaggtctcaataattttccacaaaattctttaacttcttcagctcaaccatttctgtacttctctactatgaatcagaggatgaggttgtataattcaaaagcattgccttagtctagaaataattattgtacctatcatttagttttagaaataaaaagcaagctgattttttttgatgaaccatttatatctgtgatggaataataaaatttcacacttccggattcctttgttctcaattttgagccttgagttgttttaattaaagaggggtaaaggtaaagaa

SEQ ID NO: 86552 - DNA, 264 bp, Artificial Sequence
  derived and/or modified sequence
atggagaaccagctggccaagtccacggaagagaggactttccagtatcaggactccttgccaagcttgccagtgccatcactggaggaatccttgaaaaagtatttagagagcgtgaagcctttcgctaatcaggaggagtacaagaagaccgaagagatcgttcaaaaatttcagtctgggatcggcgaaaagttgcaccaaaagctactggagcgcgctaaaggtaaacgcaattgggtctttgttgtgatcatcgaatag

SEQ ID NO: 86553 - DNA, 2080 bp, Artificial Sequence
  derived and/or modified sequence
aagaggagtgagttggtccccaggccacacagcccagtccttgacagtagccacagaccctgtaccagggacttgttgctagcttggcttttgaatctgaaaagctgcctcaatactcctttgccccatttcatattgatcctgggatcagcaggcctgggtctgttctcccctttagttcatttattcagttctaaagaaccttccatatacccaacactaggtgttatgggatacagaaatggaagactcagactctctccttgagaagctccttggtctagtggggagaacagacatgtagccagatcacgaaaacacagcacagcacttgctataaccagggagcacacgagaatcccatgggagggacacctggttcccgagcaagccctgggagaccaaggacctcactgctgtatccccaggacctagcaccctccctggcacatagcaggtactccacactagctgactgagtgaatcgatccatcagtcaagccgtcatgatcatcgtgggaaaagaagtaaccaggcagaatttctggaggacatgacagatcctaagggactctgtgaaggctgagaagagccctcggatgaaaatgggcatcggagcattgtaggcagaaaaccatgtgtgagagagaaagggcaggaacagcccatggaggtgctatgagtggcgcagggtccaagaggcttggtgagagggactgtggagggacgaggaagcaggtgagggtcactacctcctcctttcctgcctgccccggcctctcccctctggcacacagtatcccaaccatgggtttagtgtccaccagacttaaaggacccaggaccttctcaccacacggaatatgcagccttacgcgtccttgcccagggcctttctgaattttagaagctgccaccagcccagggcaggatcagggaggcagggattgggggggcagggggaggtgtggggagacccccgacaccctgccatcttggcttttccagccccaggacttcttctccccctcaggtgggaggtcaatcccctttactgtgacacagtgaaacagatctacccgtacaacaacagccagcggctcctcaatgtcatcgacatggccatcttcgacttcttgatagcctcagaagtggcggaggtcccagaggacagaaggtaacaggctcccctctcttcaaagaactggaagaagctcaaggggtcgtcactcataaggcaggcatctcaccctgccacgggcctgagtgggcgtcagattggaagctgtatgttcacttcaccaagtgaggggaaaccagggaatatggaccggcaccattatgagatgttcaccaagttcggggatgatgggttccttattcaccttgacaacgccagagggttcggacgacactcccatgatgaaatctccatcctctcgcctctctcccagtgctgcatgataaaaaagaaaacacttttgcacctgcagctgctggcccaagctgactacagactcagcgatgtgatgcgagaatcactgctggaagaccagctcagccctgtcctcactgaaccccacctccttgccctggatcgaaggctccaaaccatcctaaggacagtggaggggtgcatagtggcccatggacagcagagtgtcatagtcgacggcccagtggaacagttggccccagactctggccaggctaacttgacaagctaagggctggcagagtccagtttcagaaaatacgcctggagccagagcagtcgactcgagtgccgaccctgcgtcctcactcccacctgttactgctgggagtcaagtcagctaggaaggaagcaggacattttctcaaacagcaagtggggcccatggaactgaatctttactccttggtgcaccgcttctgtcgtgcgttgccttgctccgtttttcccaaaaagcactggcttcatcaaggccaccgacgatctcctgagtgcactgggaaatctgggtataggtcaggcttggcagccttgatcccaggagagtactaatggtaacaagtcaaataaaaggacatcaagtgg

SEQ ID NO: 86554 - DNA, 438 bp, Artificial Sequence
  derived and/or modified sequence
atgtttacctcccccagcgagggcaagcccggcaatatggatcggcaccattatgagatgtttaccaaattcggggacgacgggttcctcattcacctggacaacgcccgaggattcggacgtcactcacatgacgagattagcatactgtcgcccttgtcacaatgctgcatgataaagaagaagaccttgctgcacttacagctcctcgcccaggccgattatcggttgagcgacgtgatgcgcgagtccctgcttgaggaccagctctctcctgttctcacagagccccacctcctggctctggatagaagattgcagactattctacgtaccgtcgaaggatgcatcgtagcccatggacagcagtccgtaattgtggatgggcctgtggaacagttggcccccgattccgggcaggctaatctcacctcctag

SEQ ID NO: 86555 - DNA, 438 bp, Artificial Sequence
  derived and/or modified sequence
atgttcaccagccccagcgagggcaagccaggcaacatggacagacaccactatgagatgttcaccaagtttggagatgatggcttcctgatccacctggacaatgcccggggcttcggccgccacagccatgatgagatcagcatcctgagccccctgagccagtgctgcatgatcaagaagaagaccctgctgcacctgcagctgctggcccaggccgactaccgcctgagtgatgtgatgagggagagcctgctggaggaccagctgagccctgtgctgacagagccccacctgctggccctggaccggcggctgcagaccatcctgaggacagtggagggctgcatcgtggcccacggccagcagagcgtcatcgtggatggccctgtggagcagctggccccagacagcggccaggccaacctgaccagctag

SEQ ID NO: 86556 - DNA, 438 bp, Artificial Sequence
  derived and/or modified sequence
atgttcaccagccccagcgagggcaagcccggcaacatggaccggcaccattacgagatgttcaccaagttcggtgatgatgggtttctgatccatcttgacaacgcacggggcttcggccgacatagccatgacgagatctctatcctgtcccctctttcgcagtgctgtatgatcaaaaaaaagaccctcctgcacttgcaactcctcgctcaagccgactacagactctctgacgtaatgcgggagagtctgctagaggaccagctcagcccagtccttaccgaaccacacttactagcactggatcgtcggttacagaccattctgcggaccgtggagggttgcattgtcgcccacgggcaacagtcggtgatcgtagatggaccagtggaacaactcgcccccgactccggccaagctaaccttacaagctag

SEQ ID NO: 86557 - DNA, 438 bp, Artificial Sequence
  derived and/or modified sequence
atgttcacctcccccagtgagggtaaaccagggaatatggataggcatcactacgagatgttcacaaagttcggtgatgatggctttttgatacacctcgataatgcacgcggttttgggcgtcattcccacgacgagatctccatcctgtcgcccttgagccaatgttgtatgatcaaaaagaagactctgctgcatctgcaactgcttgctcaagctgattacaggttgtccgacgtcatgcgggaatccctgctcgaagatcagctatcccccgtgctgacagagccccatttgctagccctggaccggagattgcagacaatcctccggacagtcgaagggtgcatcgtcgcccacggccaacagtctgtgatcgtcgacggccctgttgagcagttagctcctgattctggccaagccaatctgactagttag

SEQ ID NO: 86558 - DNA, 438 bp, Artificial Sequence
  derived and/or modified sequence
atgttcaccagccccagcgagggcaagcccggcaacatggacagacaccactacgagatgttcaccaagttcggcgacgacggcttcctgatccacctggacaacgccagaggcttcggcagacacagccacgacgagatcagcatcctgagccccctgagccagtgctgcatgatcaagaagaagaccctgctgcacctgcagctgctggcccaggccgactacagactgagcgacgtgatgagagagagcctgctggaggaccagctgagccccgtgctgaccgagccccacctgctggccctggacagaagactgcagaccatcctgagaaccgtggagggctgcatcgtggcccacggccagcagagcgtgatcgtggacggccccgtggagcagctggcccccgacagcggccaggccaacctgaccagctag

SEQ ID NO: 86559 - protein, 156 aa, Artificial Sequence
  derived and/or modified sequence
MADSPGGYKECGTNEGPQEDENGSSASGSSKVRQLWSEDSCESGKLPATRTVYCMNEAEIVDVALGILIESRKQEKACEQPALAGADNPEHSPPCSVSPHTSSGSSSEEEDSGKQALAPGLSPSQRPGGSSSACSRSPEEEEEEDVLKYVREIFFS

SEQ ID NO: 86560 - DNA, 309 bp, Artificial Sequence
  derived and/or modified sequence
atgaacgaggccgagatcgtggacgtggccctgggcatcctgatcgagagcagaaagcaggagaaggcctgcgagcagcccgccctggccggcgccgacaaccccgagcacagccccccctgcagcgtgagcccccacaccagcagcggcagcagcagcgaggaggaggacagcggcaagcaggccctggcccccggcctgagccccagccagagacccggcggcagcagcagcgcctgcagcagaagccccgaggaggaggaggaggaggacgtgctgaagtacgtgagagagatcttcttcagctag

SEQ ID NO: 86561 - DNA, 309 bp, Artificial Sequence
  derived and/or modified sequence
atgaacgaggcagagattgtagatgttgcactagggattctgatagaatccagaaaacaggaaaaggcttgcgaacagcccgccctggcaggagccgacaaccctgagcacagtccaccctgcagcgtctcaccacacactagcagtggctcatcatctgaggaggaagactctggcaagcaagcccttgccccaggactgtcgcccagccaacggccgggggggtctagtagcgcgtgctctagatcccctgaagaggaggaagaggaagatgtgttgaaatatgtgagagagattttcttttcgtag

SEQ ID NO: 86562 - DNA, 309 bp, Artificial Sequence
  derived and/or modified sequence
atgaacgaggcggaaatcgtagatgtggctctgggaatcctgatcgagtccagaaaacaagagaaggcatgtgagcagccagctcttgctggcgctgacaaccccgagcatagccccccctgctcagtgagtcctcacacaagctcgggctctagtagtgaggaagaagatagcgggaagcaggcccttgcccctgggcttagtccttcccagagaccaggtggtagttcatctgcgtgtagtagaagtccagaggaagaggaggaagaagatgtgctaaagtatgtgagggagattttcttttcatag

SEQ ID NO: 86563 - DNA, 309 bp, Artificial Sequence
  derived and/or modified sequence
atgaatgaggccgagatcgtggatgtggccctgggcatcctgattgagagcaggaagcaggagaaggcctgtgagcagcctgccctggccggggctgacaaccctgagcacagccccccctgcagcgtgagcccccacaccagcagcggcagcagcagcgaggaggaggacagcggcaagcaggccctggcccctggcctgagccccagccagaggcctgggggcagcagcagcgcctgcagccgcagccctgaggaggaggaggaggaggatgtgctgaagtatgtgcgggagatcttcttctcctag

SEQ ID NO: 86564 - DNA, 309 bp, Artificial Sequence
  derived and/or modified sequence
atgaacgaggccgagatcgtggacgtggccctgggcatcctgatcgagtcacggaaacaagagaaggcatgtgaacagccagcactcgcaggagccgacaatcccgaacacagcccaccttgtagcgtatcaccacacacatctagcgggagttcctctgaagaagaagattcgggaaaacaggcactggccccggggctgtccccctctcagcgcccaggtggatcttccagtgcatgtagccggtctccagaagaggaggaggaggaggatgtgctgaagtacgtgagagagatcttcttttcatag

SEQ ID NO: 86565 - DNA, 309 bp, Artificial Sequence
  derived and/or modified sequence
atgaacgaggccgagatcgtggacgtggccctgggcatcctgatcgaaagcaggaagcaggaaaaagcttgcgagcagcccgccctggccggggcggacaaccctgagcatagtcccccctgttccgtaagcccacacactagcagtgggagcagcagcgaggaagaggacagcggcaaacaggctctcgctcctgggttaagcccttctcagcgaccaggggggtcgagtagcgcctgcagtcgctctccggaggaagaagaagaggaagacgttctaaagtatgttcgtgagattttcttctcgtag

SEQ ID NO: 86566 - DNA, 309 bp, Artificial Sequence
  derived and/or modified sequence
atgaatgaggctgagatcgttgacgttgcccttgggattctgattgagtcaagaaaacaggagaaggcatgcgagcagcctgcattggctggggcagataatccagaacacagccctccctgtagtgtgtcaccacatacctcatcaggcagctctagtgaggaggaggattcaggcaaacaggccctggctcctggcctatccccttcccagaggcccggtggttcctcttccgcatgttccaggtctccggaagaggaagaggaagaggatgtgctgaaatacgttagggaaatcttttttagttag

SEQ ID NO: 86567 - DNA, 309 bp, Artificial Sequence
  derived and/or modified sequence
atgaacgaggctgagatcgtggatgtagccctagggattctcatcgaaagtaggaaacaagagaaggcttgtgaacagcctgccctggctggcgctgacaaccctgaacacagtcccccatgctcggtatcccctcatacctcatcaggttcaagctctgaagaggaagattccggcaagcaggctcttgctccgggtctgtcaccttctcaacggcctgggggatcaagtagcgcctgttccagatccccagaagaggaggaggaggaagatgtacttaagtatgttcgagagatcttcttctcctag

SEQ ID NO: 86568 - protein, 605 aa, Artificial Sequence
  derived and/or modified sequence
MDDLDALLADLESTTSHISKRPVFLSEETPYSYPTGNHTYQEIAVPPPVPPPPSSEALNGTILDPLDQWQPSSSRFIHQQPQSSSPVYGSSAKTSSVSNPQDSVGSPCSRVGEEEHVYSFPNKQKSAEPSPTVMSTSLGSNLSELDRLLLELNAVQHNPPGFPADEANSSPPLPGALSPLYGVPETNSPLGGKAGPLTKEKPKRNGGRGLEDVRPSVESLLDELESSVPSPVPAITVNQGEMSSPQRVTSTQQQTRISASSATRELDELMASLSDFKGSWPLEEVVLLVSISSSVQEGEKYPHPCAARHRTPSLRSPDQPPPCPQFMAQGKTGSSSPPGGPPKPGSQLDSMLGSLQSDLNKLGVATVAKGVCGACKKPIAGQVVTAMGKTWHPEHFVCTHCQEEIGSRNFFERDGQPYCEKDYHNLFSPRCYYCNGPILDKVVTALDRTWHPEHFFCAQCGAFFGPEGFHEKDGKAYCRKDYFDMFAPKCGGCARAILENYISALNTLWHPECFVCRECFTPFVNGSFFEHDGQPYCEVHYHERRGSLCSGCQKPITGRCITAMAKKFHPEHFVCAFCLKQLNKGTFKEQNDKPYCQNCFLKLFC

SEQ ID NO: 86569 - protein, 362 aa, Artificial Sequence
  derived and/or modified sequence
MLVPGSTRPYSKKRQNSKSAQGLAGLRNLGNTCFMNSILQCLSNTRELRDYCLQRLYMRDLHHGSNAHTALVEEFAKLIQTIWTSSPNDVVSPSEFKTQIQRYAPRFVGYNQQDAQEFLRFLLDGLHNEVNRVTLRPKSNPENLDHLPDDEKGRQMWRKYLEREDSRIGDLFVGQLKSSLTCTDCGYCSTVFDPFWDLSLPIAKRGYPEVTLMDCMRLFTKEDVLDGDEKPTCCRCRGRKRCIKKFSIQRFPKILVLHLKRFSESRIRTSKLTTFVNFPLRDLDLREFASENTNHAVYNLYAVSNHSGTTMGGHYTAYCRSPGTGEWHTFNDSSVTPMSSSQVRTSDAYLLFYELASPPSRM

SEQ ID NO: 86570 - DNA, 1089 bp, Artificial Sequence
  derived and/or modified sequence
atgctggtgcccggcagcaccagaccctacagcaagaagagacagaacagcaagagcgcccagggcctggccggcctgagaaacctgggcaacacctgcttcatgaacagcatcctgcagtgcctgagcaacaccagagagctgagagactactgcctgcagagactgtacatgagagacctgcaccacggcagcaacgcccacaccgccctggtggaggagttcgccaagctgatccagaccatctggaccagcagccccaacgacgtggtgagccccagcgagttcaagacccagatccagagatacgcccccagattcgtgggctacaaccagcaggacgcccaggagttcctgagattcctgctggacggcctgcacaacgaggtgaacagagtgaccctgagacccaagagcaaccccgagaacctggaccacctgcccgacgacgagaagggcagacagatgtggagaaagtacctggagagagaggacagcagaatcggcgacctgttcgtgggccagctgaagagcagcctgacctgcaccgactgcggctactgcagcaccgtgttcgaccccttctgggacctgagcctgcccatcgccaagagaggctaccccgaggtgaccctgatggactgcatgagactgttcaccaaggaggacgtgctggacggcgacgagaagcccacctgctgcagatgcagaggcagaaagagatgcatcaagaagttcagcatccagagattccccaagatcctggtgctgcacctgaagagattcagcgagagcagaatcagaaccagcaagctgaccaccttcgtgaacttccccctgagagacctggacctgagagagttcgccagcgagaacaccaaccacgccgtgtacaacctgtacgccgtgagcaaccacagcggcaccaccatgggcggccactacaccgcctactgcagaagccccggcaccggcgagtggcacaccttcaacgacagcagcgtgacccccatgagcagcagccaggtgagaaccagcgacgcctacctgctgttctacgagctggccagcccccccagcagaatgtag

SEQ ID NO: 86571 - DNA, 1089 bp, Artificial Sequence
  derived and/or modified sequence
atgctggtgcctggatccacgcgaccctatagcaagaaacgccagaacagtaaatccgcgcagggcctggccggactacggaacctgggcaatacttgttttatgaatagcattctccaatgcctctccaatacaagagaactgcgagattattgcctccagcggctctatatgagggacctgcaccatggttcaaacgctcatacagccttggtcgaggaatttgccaagttaatccagactatctggacctctagcccaaatgatgtggtcagcccctccgagtttaaaacacagattcagagatacgcaccacgcttcgtaggttataaccaacaagacgcacaagaattcctgaggtttctcctcgacggcctccacaatgaagtgaaccgggtgaccctgagaccaaaatcaaacccggagaatttagaccaccttcccgatgatgaaaaaggtcgacagatgtggcgtaaatatcttgaacgcgaggactcccggatcggcgacctgtttgtcggacagctgaaatctagcctgacttgcacagattgtgggtactgcagtacagtgttcgatccattttgggacctatccctgccaatcgctaagcgtgggtatccggaggtgaccttgatggattgcatgaggctcttcactaaggaggacgtactggatggcgacgaaaagcccacatgttgtcggtgcagaggacgaaaaagatgtatcaaaaaattttccatccaacgctttccaaagattctggttttgcatctgaaacgattttccgaaagccgaataagaacctcaaagctaaccactttcgtgaatttcccactgcgggatctcgatctccgggagtttgccagtgagaatactaatcatgctgtatacaatctctatgccgtttccaatcacagcggcaccactatggggggccactatacggcctactgtcgcagtccagggacaggcgagtggcatacctttaacgacagctccgtgacaccaatgtcctcttcccaagtgcggacttcggacgcctacttactgttttatgaattggcctctcctcctagcaggatgtag

SEQ ID NO: 86572 - DNA, 1089 bp, Artificial Sequence
  derived and/or modified sequence
atgctggtgcccggcagcacccggccctacagcaagaagaggcagaacagcaagagcgcccagggcctggccggcctgaggaacctgggcaacacctgcttcatgaacagcatcctgcagtgcctgagcaacacccgggagctgcgggactactgcctgcagaggctgtacatgagggacctgcaccacggcagcaatgcccacacagccctggtggaggagtttgccaagctgatccagaccatctggaccagcagccccaatgatgtggtgagccccagcgagttcaagacccagatccagagatatgcccccaggtttgtgggctacaaccagcaggatgcccaggagttcctgcgcttcctgctggatggcctgcacaatgaggtgaacagagtgaccctgcggcccaagagcaaccctgagaacctggaccacctgcctgatgatgagaagggccggcagatgtggaggaagtacctggagcgggaggacagccgcatcggggacctgtttgtgggccagctgaagagcagcctgacctgcacagactgtggctactgcagcacagtgtttgaccccttctgggacctgagcctgcccatcgccaagaggggctacccagaggtgaccctgatggactgcatgaggctcttcaccaaggaggatgtgctggatggagatgagaagcccacctgctgccgctgccggggcaggaagcgctgcatcaagaagttcagcatccagcgcttccccaagatcctggtgctgcacctgaagcgcttcagcgagagccgcatccgcaccagcaagctgaccacctttgtgaacttccccctgcgggacctggacctgcgggagtttgccagcgagaacaccaaccacgctgtgtacaacctgtatgctgtgagcaaccacagcggcaccaccatgggcggccactacacagcctactgccgcagccctggcaccggggagtggcacaccttcaatgacagctctgtgacccccatgagcagcagccaggtgaggaccagtgatgcctacctgctcttctatgagctggccagcccccccagcaggatgtag

SEQ ID NO: 86573 - DNA, 1089 bp, Artificial Sequence
  derived and/or modified sequence
atgctggtgcccggcagcacccggccctacagcaagaagcggcagaactcaaaatccgcccagggtctagctggactccgtaatttgggaaatacatgtttcatgaactccatactgcaatgcttgtctaacacacgcgagctgagagactactgccttcagcgattgtatatgagggacctccaccacgggtcgaatgcgcatacagcattagttgaagagtttgcaaaacttatccagactatctggacaagctctcccaacgatgttgtgtctccaagcgaattcaagacccagatccaaaggtacgcaccacggttcgtgggttataatcaacaagacgcgcaggaattcctccgtttccttttggatgggctccacaacgaagtgaatcgagtgactctgcggcccaaatccaacccagagaacctcgatcacttacctgatgatgagaagggccggcagatgtggcgcaaatacctggagagagaggattcccgcattggggatctattcgtggggcagttgaaaagctcgttgacttgcaccgattgtggatattgctccacagtatttgacccattctgggatctgtccctgcccatcgcaaagaggggctaccccgaggtgacgctgatggattgcatgcgcctgtttaccaaagaagacgtgctggacggagacgaaaagccaacttgttgtcgatgtcggggccgtaagcgctgtatcaagaaattttccatacaacgcttcccaaagattctcgtgctgcacctgaagagattcagcgagagccgtatccgtacaagcaagttaacaaccttcgtcaacttcccgctccgagacttagacttgagagagttcgcctcagaaaatactaaccatgctgtctacaacctctacgctgtctcaaaccactccggaaccaccatgggaggtcattataccgcctactgcaggtcccccggtaccggagaatggcacacgtttaacgacagcagcgtgactcctatgagtagtagccaggtccgcacctcagatgcataccttttgttttacgaactggcttccccaccttctaggatgtag

SEQ ID NO: 86574 - DNA, 1089 bp, Artificial Sequence
  derived and/or modified sequence
atgttggtccctggatctacgaggccctatagcaaaaaaagacaaaactcaaagagtgcccaaggattggcgggactgcgtaatcttggaaacacatgctttatgaactcaatcctccagtgcctaagtaataccagagaactcagagactactgcctgcagcgcctttacatgagagatttacaccacggatccaatgcacataccgctctggtagaagagtttgcaaaattgattcagactatatggacaagtagccccaacgatgtcgtttctccttcggagtttaagacgcagatccagcgctacgccccacgattcgtgggctacaatcaacaagacgcccaggaattcctgagattcctattagatgggttgcataacgaagtgaatcgcgtgactctcagacccaaatcaaaccctgaaaaccttgaccatctaccagatgatgaaaaggggaggcagatgtggaggaagtatctggagagagaggattccaggattggagacctgttcgtgggtcagttaaaatcatccctgacttgcacagactgtgggtactgcagcacggtgttcgatccattctgggacctgtctctgcctattgctaagaggggttatccagaagtgacgttaatggactgtatgaggttatttactaaagaagacgtgctcgatggggatgagaagcctacttgctgccggtgtagggggagaaagcgctgcattaagaaatttagtatacagagattccctaaaatcctcgtacttcacctgaaaagattttctgaatctcgtattcggacttcaaagctcacaacttttgtaaactttccattaagggatttagacttgagggaattcgccagcgaaaacaccaaccacgcagtgtataatttatacgccgtgagcaatcactccggcactacgatgggaggccattatacagcatattgccgaagtccaggtaccggtgaatggcataccttcaacgactctagcgtcaccccaatgtcttcctcacaggtgcgtacctctgatgcctatctcctgttttacgagctggcctcacccccttctaggatgtag

SEQ ID NO: 86575 - DNA, 2903 bp, Artificial Sequence
  derived and/or modified sequence
ggggtgtggctctgccggcccaggcgcgatgaggcggctgcccgctgggtggcgccgatttcccggggaggtcccttctgggcccccggcggaggtgggagagagtcaggcaggagccgaggccggggagccctcttcgtcagctggtgctcactgcgccgcgccagcgccagccgggactcacccgcagctccatgcttgtgcccggttcgactcgtccatactccaagaagaggcagaattctaagagtgcccagggtctggctggtcttcgaaaccttgggaacacgtgcttcatgaactcaattctgcagtgcctgagcaacactcgggagttgagagattactgcctccagaggctctacatgcgggacctgcaccacggcagcaatgcacacacagccctcgtggaagagtttgcaaaactaattcagaccatatggacttcatcccccaatgatgtggtgagcccatctgagttcaagacccagatccagagatacgcaccgcgctttgttggctataatcagcaggatgctcaggagttccttcgctttcttctggatgggctccataacgaggtgaaccgagtgacactgagacctaagtccaaccctgagaacctcgatcatcttcctgatgacgagaaaggccgacagatgtggagaaaatatctagaacgggaagacagtaggatcggggatctctttgttgggcagctaaagagctcgctgacgtgtacagattgtggttactgttctacggtcttcgaccccttctgggacctctcactgcccattgctaagcgaggttatcctgaggtgacattaatggactgcatgaggctcttcaccaaagaggatgtgcttgatggagatgaaaagccaacatgctgtcgctgccgaggcagaaaacggtgtataaagaagttctccatccagaggttcccaaagatcttggtgctccatctgaagcggttctcagaatccaggatccgaaccagcaagctcacaacatttgtgaacttccccctaagagacctggacttaagagaatttgcctcagaaaacaccaaccatgctgtttacaacctgtacgctgtgtccaatcactccggaaccaccatgggtggccactatacagcctactgtcgcagtccagggacaggagaatggcacactttcaacgactccagcgtcactcccatgtcctccagccaagtgcgcaccagcgacgcctacctgctcttctacgaactggccagcccgccctcccgaatgtagcgccaggagccacgtcccttctcccttccccgtggtggccccgctccctaaattttttaaaaagacaaaaacaaaacaacaacaacaacacacaaacctgacaagagaaaaacaaacctgaagctgccgagcaggagtggatgcagcctgatcagggtctggagcaaggagccgggctttcctgagctgtggcccggcagggaagatcgcctggacgtggagccagcatcgccccgtgccctcggcgtttgcatttgtaaacttgtggtcttcctatgtgtcagaaacaactgtgtcttgggggggaagaccctcgctgcgccgcttcccgccgcagcgcccgcgcctccgaggggacagcgccctctggagctcgctgggagcatcaccgcctggacgcccgcgccgcggaggagccggcgcccatctccacccgcacggctcgccggtccagagccatgagccaagagccctcttcacgctgctaactccaggggacagacgaagggacatctttggaaaacgctggttttggtttttaaaaagcccaactttttttttttaatttccataactaaagtgttcagactggagtgctctccttcaggcctcttcatagctgggacgttgcactggtccttttattgcttttccaagtacaactttctaatgctagccctccgtggtgctaggtgggcgttggccaggccccaagcacagccacagtagacctgggatctaaaacaagtttctgttttgggggtttgggttttttttttttttttttaatgttttgaatggaatttagttgcctccaagaattgtgccttatagcatttggggaccagggggtaactgcccctcctgaaatatccctcagcctcttcccttttccccagtgctctgttcaaacccgcctgggaaagggatcctgcccttagccctggctcgttgtgcattgcagtgaggcaaagaagaaagcaggtagattccttccgacagggcatcaagttcttcccgcccacgtcctctagcccacccctggtctgctccccagctgtttgaaggatagcacaagcccctcgtccctagagcttctctcccttttatttattctcttaacatccctttccccctggccttcctgcccccgcccccttctcagagcctcctagacaataggccctttggaccgagtttctcagggatgcccaggccacccctcagctcttcttagcgctggtctccagtcctgccctgggagctggagcctgggtatttggggacatcttgcctcagttgtatggttctttcctgtgggctcaattttgccctacatagttggataaaactctgtgctgtcctggagagtaaagctgttcacccacacagctgggcccggcttgtgccccgtggagcctggcacattccaggctcctaggaggaggcatcagagaaagacaccctgagttttactggcctgacacccttctccagagaagacctgtgaacctgagcccaagggcaagtgtacacttgtttactgtgtaagcaagagtagaagaatgtctaatgtacagtggaaccttgtacagaataaataatagctttgagaaatca

SEQ ID NO: 86576 - protein, 72 aa, Artificial Sequence
  derived and/or modified sequence
MMEEISIMVAYDAHVFSQLHDEDFLTSLVAISKPRSMVPTKKLKKYEKEYQTMRESQLQQEDPMDRYKFVYL

SEQ ID NO: 86577 - DNA, 219 bp, Artificial Sequence
  derived and/or modified sequence
atgatggaggagatcagcatcatggtggcctacgacgcccacgtgttcagccagctgcacgacgaggacttcctgaccagcctggtggccatcagcaagcccagaagcatggtgcccaccaagaagctgaagaagtacgagaaggagtaccagaccatgagagagagccagctgcagcaggaggaccccatggacagatacaagttcgtgtacctgtag

SEQ ID NO: 86578 - DNA, 219 bp, Artificial Sequence
  derived and/or modified sequence
atgatggaggaaatctctattatggtggcatacgatgcacacgtcttttcccagctgcacgatgaagatttcctgacaagtctggttgcaattagcaagcccaggagcatggtgcctacaaagaagcttaagaaatacgagaaggagtaccagactatgcgagaatctcaactgcagcaagaggatccaatggaccggtacaaattcgtatacctatag

SEQ ID NO: 86579 - DNA, 219 bp, Artificial Sequence
  derived and/or modified sequence
atgatggaagaaatctccataatggtggcatatgatgcccacgttttctctcagctccatgacgaggactttctgacaagtctcgtggcaatttccaaacccaggtcaatggtcccaacaaaaaagcttaaaaagtacgagaaggagtatcagaccatgagagaatcccaactacagcaagaagacccaatggaccgatataaatttgtttatttgtag

SEQ ID NO: 86580 - DNA, 219 bp, Artificial Sequence
  derived and/or modified sequence
atgatggaggagatcagcatcatggtggcctatgatgcccacgtgttcagccagctgcatgatgaggacttcctgaccagcctggtggccatcagcaagcccaggtccatggtgcccaccaagaagctgaagaagtatgagaaggagtaccagaccatgagggagagccagctgcagcaggaggaccccatggaccgctacaagtttgtgtacctgtag

SEQ ID NO: 86581 - DNA, 219 bp, Artificial Sequence
  derived and/or modified sequence
atgatggaggagatcagcatcatggtggcctacgacgcccacgtgttctcccagttgcacgacgaggacttcctgaccagcctggtggccattagcaagcctaggtcaatggtgccaacaaagaagctcaagaagtatgagaaagagtaccagaccatgcgggaatcccagttgcaacaagaggaccccatggatcgctacaaattcgtttatctttag

SEQ ID NO: 86582 - DNA, 219 bp, Artificial Sequence
  derived and/or modified sequence
atgatggaggagatcagcatcatggtggcctacgacgcccacgtgttttctcagctgcacgacgaggatttcctcacctcactcgtggcgattagcaaacccaggtcgatggtacccacaaagaagctcaaaaaatatgagaaggaatatcagacaatgcgtgaaagtcagctgcagcaggaggatccaatggacaggtacaaattcgtttacctgtag

SEQ ID NO: 86583 - DNA, 219 bp, Artificial Sequence
  derived and/or modified sequence
atgatggaggagatttctattatggttgcctacgacgcgcacgtcttctcacagctgcatgacgaggacttcctgacatcattggtagctattagcaaacccagatccatggtaccgaccaagaagcttaaaaagtatgagaaggagtaccagacaatgagagaatctcaactgcagcaggaagaccccatggataggtacaaatttgtctacctttag

SEQ ID NO: 86584 - DNA, 219 bp, Artificial Sequence
  derived and/or modified sequence
atgatggaggaaatttccataatggtagcttacgatgcgcatgtgttctcgcagctgcacgatgaggatttcctgacctcactggtagcaatctcaaagcctcggtcaatggtccctactaagaaactgaagaaatacgaaaaagagtatcagacgatgcgagaatcacagttgcagcaggaggaccctatggataggtacaaattcgtgtatttgtag

SEQ ID NO: 86585 - DNA, 648 bp, Artificial Sequence
  derived and/or modified sequence
accgggagtgtggctggtttctgttgcctgttttgatactcttctcctggtgggtgtgtacactggcactgagctgcagtaggatttttccttggatagtctggtctggagctgggacagcagctgctgctgtggaaaggccagctggcaagatgatggaagaaatctccattatggtagcctatgacgcccatgttttcagccagctgcacgatgaagacttcctcactagtctggtggccatcagcaagcccaggtctatggtaccaaccaagaagctgaagaaatatgagaaagaatatcagacaatgcgagagagtcagctgcaacaggaagacccaatggatagatacaagtttgtatatttgtaggtaactccagctgttgcatttatactgggaatcttcataagaagctgagagaaagagaggggaaaaagaaagtggctttctactttcaaaaatgaaacaaaaaggaaaaatggcaaagtactgttttagctgtgcatgtcatatccacaaagacttttagcaggtgaactgttccaagactgacacaaggatgtttcaaacttgcctctgtctgtagaaaatgttaaaaataccaactcacttggaaggaaaaataaaaatcacaaaggtatattga

SEQ ID NO: 86586 - DNA, 772 bp, Artificial Sequence
  derived and/or modified sequence
ggaagctctgagtcactgaatagcaaagaaaaatatgaaagcaagaggaattgctttcacatctagaaaatgttgcaagataatctgaaatcttctggtgctggtgaatgcatgaagaggttcacagtatcttttaaagtacttctgaaaagataaggagtttaaaaggtgggtgtgtacactggcactgagctgcagtaggatttttccttggatagtctggtctggagctgggacagcagctgctgctgtggaaaggccagctggcaagatgatggaagaaatctccattatggtagcctatgacgcccatgttttcagccagctgcacgatgaagacttcctcactagtctggtggccatcagcaagcccaggtctatggtaccaaccaagaagctgaagaaatatgagaaagaatatcagacaatgcgagagagtcagctgcaacaggaagacccaatggatagatacaagtttgtatatttgtaggtaactccagctgttgcatttatactgggaatcttcataagaagctgagagaaagagaggggaaaaagaaagtggctttctactttcaaaaatgaaacaaaaaggaaaaatggcaaagtactgttttagctgtgcatgtcatatccacaaagacttttagcaggtgaactgttccaagactgacacaaggatgtttcaaacttgcctctgtctgtagaaaatgttaaaaataccaactcacttggaaggaaaaataaaaatcacaaaggtatattgagcaca

SEQ ID NO: 86587 - protein, 253 aa, Artificial Sequence
  derived and/or modified sequence
MIENSSWSMTFEERENRRLQEASMRLEQENDDLAHELVTSKIALRNDLDQAEDKADVLNKELLLTKQRLVETEEEKRKQEEETAQLKEVFRKQLEKAEYEIKKTTAIIAEYKQICSQLSTRLEKQQAASKEELEVVKGKMMACKHCSDIFSKEGALKLAATGREDQGIETDDEKDSLKKQLREMELELAQTKLQLVEAKCKIQELEHQRGALMNEIQAAKNSWFSKTLNSIKTATGTQPLQPAPVTQPPKEST

SEQ ID NO: 86588 - DNA, 762 bp, Artificial Sequence
  derived and/or modified sequence
atgatcgagaacagcagctggagcatgaccttcgaggagagagagaacagaagactgcaggaggccagcatgagactggagcaggagaacgacgacctggcccacgagctggtgaccagcaagatcgccctgagaaacgacctggaccaggccgaggacaaggccgacgtgctgaacaaggagctgctgctgaccaagcagagactggtggagaccgaggaggagaagagaaagcaggaggaggagaccgcccagctgaaggaggtgttcagaaagcagctggagaaggccgagtacgagatcaagaagaccaccgccatcatcgccgagtacaagcagatctgcagccagctgagcaccagactggagaagcagcaggccgccagcaaggaggagctggaggtggtgaagggcaagatgatggcctgcaagcactgcagcgacatcttcagcaaggagggcgccctgaagctggccgccaccggcagagaggaccagggcatcgagaccgacgacgagaaggacagcctgaagaagcagctgagagagatggagctggagctggcccagaccaagctgcagctggtggaggccaagtgcaagatccaggagctggagcaccagagaggcgccctgatgaacgagatccaggccgccaagaacagctggttcagcaagaccctgaacagcatcaagaccgccaccggcacccagcccctgcagcccgcccccgtgacccagccccccaaggagagcacctag

SEQ ID NO: 86589 - DNA, 762 bp, Artificial Sequence
  derived and/or modified sequence
atgattgaaaacagcagttggtccatgacttttgaagaaagggaaaacaggcgtctgcaggaggcctcaatgcggttggagcaagagaatgacgatctggcgcacgagttagtgacctctaaaatagccctgcgaaacgacctagaccaggctgaagacaaagccgacgtactcaataaagagctcctcctgaccaagcaacggctcgtggaaacagaggaagagaaaaggaaacaggaagaagaaactgcgcagctgaaggaggtcttcaggaaacagctggaaaaagcagagtacgagataaaaaaaactaccgcaattatcgctgaatataagcagatctgttctcaattgagtacaaggctggagaagcagcaggctgcttctaaggaagaacttgaggtggtcaaaggcaaaatgatggcctgtaaacactgctccgatatttttagcaaggagggcgcgctgaagctcgccgccaccggcagagaggatcaaggcattgagacagatgacgagaaggactctctgaagaagcagctacgcgaaatggagctcgagctcgcgcagacaaagctgcagctagtagaagcgaagtgcaagatacaggagctggagcaccaacggggcgctttaatgaacgagatacaggccgcaaaaaatagctggttcagtaagacgctgaattctatcaagacggctactgggacgcagcctttacagcctgctcccgtgactcagccacctaaggagtcaacctag

SEQ ID NO: 86590 - DNA, 1425 bp, Artificial Sequence
  derived and/or modified sequence
aagtatctttgttccattgaatgtttgcggtcacagagagaacttagagttatatgacactcaaaggaaaagcaaaagagcattaagaagtgtctgtttttgttattgccatttcataaatattttagtaggtgttcaatttcattggatattctttttttttaattgtctttgtacctatgattgaaaacagtagttggtctatgacttttgaggagagggagaaccgaagattacaggaggccagcatgaggttggaacaagagaatgatgaccttgcccatgaactagtaacaagcaaaattgctctacggaatgacttggatcaggcagaagacaaggcagatgtgttgaataaagagctccttttgaccaaacagaggctggtggagactgaagaggagaagaggaagcaagaggaagagactgcccagctaaaagaagtcttcaggaaacagctagagaaggcagaatatgaaataaagaagactacagctatcattgctgagtataaacagatctgttcgcagttgagtaccaggctggagaaacagcaagcagccagcaaggaggagctggaagtggtaaagggtaagatgatggcatgcaaacactgcagtgacattttcagcaaggagggtgctttgaaactagcagccacaggcagagaggaccagggaattgaaacagatgatgagaaggactcacttaagaagcagctgagagagatggaactggaactggcacaaaccaaactgcagttggtggaggccaagtgtaaaattcaggaacttgaacatcagagaggagcccttatgaatgaaatccaagctgcgaaaaactcttggtttagcaaaaccctgaactctatcaaaacggccacgggcacccagccattgcagccagcaccggtcacccagccacccaaggagagcacatagttccagccttacccaagcacaagagcacaatgttcaaaccaatggaaatctgggaggattcttcctggtgtccctttgaaggaaagtcaaggaggccagaaaacaagccagaatttttcagtagctctcactctttcttgtatgacacttttcaaagggatgctatttaaactgacctgttctatgttgaatacctattttccagcttctggaaggccatgttcagatccatcatagtattacacattattttgtttgcctgatgtttagttggaaataagtaattcagaactaaatgcttttttatttagaattattcataattatttttatcttacataaaaatggagacatctgttattccaaggttgaagtgataagaagatctttgtcacaggaaaaaaaaaattgaaacctaaacatcttaagttttcaggatttattcagataaagcacactgtggggccaggcatgaccactctca

SEQ ID NO: 86591 - DNA, 762 bp, Artificial Sequence
  derived and/or modified sequence
atgattgagaacagctcctggagcatgacctttgaggagagagaaaatagaaggctgcaggaggcctccatgaggctggagcaggagaatgatgacctggcccacgagctggtgaccagcaagatcgccctgagaaatgacctggaccaggccgaggacaaggcagatgtgctgaacaaggagctgctgctgaccaagcagaggctggtggagacagaggaggagaagaggaagcaggaggaggagacagcccagctgaaggaggtgttcaggaagcagctggagaaggccgagtatgagatcaagaagaccacagccatcatcgccgagtacaagcagatctgcagccagctgagcacccggctggagaagcagcaggccgccagcaaggaggagctggaggtggtgaagggcaagatgatggcctgcaagcactgcagcgacatcttcagcaaggagggcgccctgaagctggccgccaccggccgggaggaccagggcatcgagacagatgatgagaaggacagcctgaagaagcagctgcgggagatggagctggagctggcccagaccaagctgcagctggtggaggccaagtgcaagatccaggagctggagcaccagagaggagccctgatgaatgagatccaggccgccaagaacagctggttcagcaagaccctgaacagcatcaagacagccaccggcacccagcccctgcagcctgcccctgtgacccagccccccaaggagagcacctag

SEQ ID NO: 86592 - DNA, 762 bp, Artificial Sequence
  derived and/or modified sequence
atgatcgagaacagcagctggagcatgaccttcgaggagcgggagaaccggcggctgcaggaggcaagtatgaggctggagcaagaaaatgacgatctggcccacgaactggtcaccagcaagatcgccttgcggaacgacttagaccaggctgaggacaaagccgacgtgctgaacaaggaactgctgcttacaaaacaacgactggtggagaccgaagaagagaaacgtaagcaagaggaggaaacagcccagctcaaggaagtctttagaaagcagctggagaaggccgaatacgaaattaagaagacaacggctatcattgcagagtataagcaaatttgtagccagttgagcaccaggctggaaaaacaacaggctgcctctaaagaagagctggaagtagtgaaaggaaagatgatggcatgcaaacactgctctgatatcttttctaaggagggagccctaaaactggccgccaccggccgcgaggaccagggcattgaaactgatgatgaaaaggactccctgaagaaacaattaagggagatggagctcgagctcgctcagactaagctccagttggtggaggcaaagtgtaaaatccaggaactggaacatcagaggggcgccttgatgaatgagatccaggccgccaagaatagttggttttctaagactctgaactccattaaaaccgcaacgggaacacagccactgcagcctgcaccagtgactcagccccccaaggaatccacatag

SEQ ID NO: 86593 - DNA, 762 bp, Artificial Sequence
  derived and/or modified sequence
atgatcgagaactcttcgtggagtatgacctttgaagagcgtgagaaccgccgtctccaagaagccagcatgcggctggagcaggagaacgatgatctggcacacgagctggtgacatctaagatcgcactgagaaatgatctggatcaggcagaagataaagcagatgttttaaacaaagagctccttctcactaagcagagactggttgagaccgaggaggaaaagagaaagcaagaggaagagacggcacaactcaaggaggtcttccggaaacagctggaaaaggcagagtacgaaattaaaaaaactactgcaatcatagctgagtacaagcagatctgttcacagctttcaacccggttggagaaacagcaggcggcttccaaagaggaactggaggttgtgaagggaaagatgatggcatgtaagcactgcagcgacatcttctccaaggagggagcccttaagcttgccgcaaccgggagggaggatcagggcatcgagaccgatgacgagaaggactctctgaagaagcagctccgggagatggaactggagctggctcaaacgaagctccaactcgtggaggcgaagtgcaagattcaggagctggagcatcagaggggcgctctaatgaatgaaatccaagccgcaaagaatagctggttctccaaaaccttgaatagtatcaaaacagctaccggcacccagcctctacagccggctcctgtaacccagccacccaaggaaagcacctag

SEQ ID NO: 86594 - protein, 370 aa, Artificial Sequence
  derived and/or modified sequence
MEEGVPCPAPAAKLTPPVKKSQDMHDERSKLVNEYACRVLELLGMGHRLFVPRLLATSKEDLLQADFEGALKFFRVQLPKRYRAEENARRLMEQACNIKVPTKKLKKYEKEYQTMRESQLQQEDPMDRYKRENRRLQEASMRLEQENDDLAHELVTSKIALRNDLDQAEDKADVLNKELLLTKQRLVETEEEKRKQEEETAQLKEVFRKQLEKAEYEIKKTTAIIAEYKQICSQLSTRLEKQQAASKEELEVVKGKMMACKHCSDIFSKEGALKLAATGREDQGIETDDEKDSLKKQLREMELELAQTKLQLVEAKCKIQELEHQRGALMNEIQAAKNSWFSKTLNSIKTATGTQPLQPAPVTQPPKEST

SEQ ID NO: 86595 - DNA, 927 bp, Artificial Sequence
  derived and/or modified sequence
atgatggaggagatcagcatcatggtggcctacgacgcccacgtgttcagccagctgcacgacgaggacttcctgaccagcctggtggccatcagcaagcccagaagcatggtgcccaccaagaagctgaagaagtacgagaaggagtaccagaccatgagagagagccagctgcagcaggaggaccccatggacagatacaagagagagaacagaagactgcaggaggccagcatgagactggagcaggagaacgacgacctggcccacgagctggtgaccagcaagatcgccctgagaaacgacctggaccaggccgaggacaaggccgacgtgctgaacaaggagctgctgctgaccaagcagagactggtggagaccgaggaggagaagagaaagcaggaggaggagaccgcccagctgaaggaggtgttcagaaagcagctggagaaggccgagtacgagatcaagaagaccaccgccatcatcgccgagtacaagcagatctgcagccagctgagcaccagactggagaagcagcaggccgccagcaaggaggagctggaggtggtgaagggcaagatgatggcctgcaagcactgcagcgacatcttcagcaaggagggcgccctgaagctggccgccaccggcagagaggaccagggcatcgagaccgacgacgagaaggacagcctgaagaagcagctgagagagatggagctggagctggcccagaccaagctgcagctggtggaggccaagtgcaagatccaggagctggagcaccagagaggcgccctgatgaacgagatccaggccgccaagaacagctggttcagcaagaccctgaacagcatcaagaccgccaccggcacccagcccctgcagcccgcccccgtgacccagccccccaaggagagcacctag

SEQ ID NO: 86596 - DNA, 1113 bp, Artificial Sequence
  derived and/or modified sequence
atggaggagggcgtgccctgccccgcccccgccgccaagctgaccccccccgtgaagaagagccaggacatgcacgacgagagaagcaagctggtgaacgagtacgcctgcagagtgctggagctgctgggcatgggccacagactgttcgtgcccagactgctggccaccagcaaggaggacctgctgcaggccgacttcgagggcgccctgaagttcttcagagtgcagctgcccaagagatacagagccgaggagaacgccagaagactgatggagcaggcctgcaacatcaaggtgcccaccaagaagctgaagaagtacgagaaggagtaccagaccatgagagagagccagctgcagcaggaggaccccatggacagatacaagagagagaacagaagactgcaggaggccagcatgagactggagcaggagaacgacgacctggcccacgagctggtgaccagcaagatcgccctgagaaacgacctggaccaggccgaggacaaggccgacgtgctgaacaaggagctgctgctgaccaagcagagactggtggagaccgaggaggagaagagaaagcaggaggaggagaccgcccagctgaaggaggtgttcagaaagcagctggagaaggccgagtacgagatcaagaagaccaccgccatcatcgccgagtacaagcagatctgcagccagctgagcaccagactggagaagcagcaggccgccagcaaggaggagctggaggtggtgaagggcaagatgatggcctgcaagcactgcagcgacatcttcagcaaggagggcgccctgaagctggccgccaccggcagagaggaccagggcatcgagaccgacgacgagaaggacagcctgaagaagcagctgagagagatggagctggagctggcccagaccaagctgcagctggtggaggccaagtgcaagatccaggagctggagcaccagagaggcgccctgatgaacgagatccaggccgccaagaacagctggttcagcaagaccctgaacagcatcaagaccgccaccggcacccagcccctgcagcccgcccccgtgacccagccccccaaggagagcacctag

SEQ ID NO: 86597 - DNA, 927 bp, Artificial Sequence
  derived and/or modified sequence
atgatggaagagatctccataatggtggcttacgacgcgcacgtattctctcaacttcacgacgaagacttcctgaccagcctagtggctatctccaaaccgcgctcaatggttcctacgaaaaagttgaagaagtacgaaaaggagtatcagactatgcgtgagtctcagcttcaacaagaagatcctatggatcggtataaaagggaaaaccgccggctccaggaagctagtatgagattagagcaggaaaacgacgatctggctcacgagctggtaacaagcaagatagccttacggaacgatcttgatcaagccgaggacaaagctgatgtgttaaacaaggagcttctgttgaccaagcagcgtcttgtggagaccgaggaggagaaaaggaagcaggaagaggagaccgcccaattaaaagaagtgttcagaaagcagctcgaaaaagctgagtacgagatcaagaagacaactgcgatcattgccgaatataaacaaatctgttcccagctgtctacccgcctagagaaacagcaagctgccagtaaagaggaattggaggtcgttaaggggaagatgatggcttgtaaacactgctctgatatttttagtaaggagggtgctctcaagctcgccgctacaggcagagaagatcaagggatagagacggatgatgaaaaagatagtttgaaaaaacagttgcgagaaatggaattagagttggcacagactaagcttcagttggtagaagccaagtgcaagatccaggagttggagcatcagcgcggcgcactcatgaatgaaatccaggcagcgaagaatagctggttttctaagactttgaatagcataaagaccgcaactggcacgcagcccttgcagcctgcccccgtaactcagccaccaaaagaaagtacctag

SEQ ID NO: 86598 - DNA, 1113 bp, Artificial Sequence
  derived and/or modified sequence
atggaagagggagtgccatgtcctgccccagctgcaaagctcactcccccagtgaagaagtcacaggatatgcacgatgagagatctaagctggtgaatgaatacgcatgccgagttctcgagctgctcggtatgggtcatagattgtttgtaccacgcctgctggccactagtaaggaggatcttctccaggccgattttgagggagccctgaagtttttccgcgtccagttgccaaagcggtaccgcgccgaagagaacgcacggcgccttatggagcaagcatgcaacattaaggtgccaactaagaagcttaaaaaatatgagaaggaataccaaaccatgagggaatcacagctgcagcaggaggatcctatggatcggtataagagggagaatcgcaggctccaagaagcttccatgagactggaacaggaaaacgatgacttggcacatgagctagtgaccagcaagatcgccctgcgcaatgatttggatcaggccgaggacaaggccgacgtgctgaataaggaacttttgctgacaaagcagagactggtggaaactgaagaggagaaacgaaagcaggaggaggagacagctcagttaaaggaggtgttcaggaaacaactcgagaaagcagagtacgagataaaaaaaactacagctattattgcggagtacaagcagatttgcagccaactttcaacacggctcgaaaaacagcaggcagcttcaaaggaggaactggaagtggtgaagggcaaaatgatggcgtgcaaacactgttccgatatcttcagcaaagaaggagcactaaaattggcagccaccggcagagaggaccagggcattgagacggacgacgagaaggatagcctgaagaagcagcttagagaaatggaactggagttggctcagactaaattgcagctggttgaggcaaaatgcaagatccaggagctcgagcatcagagaggtgctctgatgaacgaaatccaggctgccaaaaattcttggttctcaaaaaccctgaacagtattaagaccgctacaggcactcaacccctccagccagcgcccgttacacagccgcccaaggaatctacctag

SEQ ID NO: 86599 - DNA, 927 bp, Artificial Sequence
  derived and/or modified sequence
atgatggaggagatcagcatcatggtggcctatgatgcccacgtgttcagccagctgcatgatgaggacttcctgaccagcctggtggccatcagcaagcccaggtccatggtgcccaccaagaagctgaagaagtatgagaaggagtaccagaccatgagggagagccagctgcagcaggaggaccccatggaccgctacaagcgggagaacagaaggctgcaggaggcctccatgaggctggagcaggagaatgatgacctggcccacgagctggtgaccagcaagatcgccctgagaaatgacctggaccaggccgaggacaaggcagatgtgctgaacaaggagctgctgctgaccaagcagaggctggtggagacagaggaggagaagaggaagcaggaggaggagacagcccagctgaaggaggtgttcaggaagcagctggagaaggccgagtatgagatcaagaagaccacagccatcatcgccgagtacaagcagatctgcagccagctgagcacccggctggagaagcagcaggccgccagcaaggaggagctggaggtggtgaagggcaagatgatggcctgcaagcactgcagcgacatcttcagcaaggagggcgccctgaagctggccgccaccggccgggaggaccagggcattgaaacagatgatgagaaggacagcctgaagaagcagctgcgggagatggagctggagctggcccagaccaagctgcagctggtggaggccaagtgcaagatccaggagctggagcaccagagaggagccctgatgaatgagatccaggccgccaagaacagctggttcagcaagaccctgaacagcatcaagacagccaccggcacccagcccctgcagcctgcccctgtgacccagccccccaaggagagcacctag

SEQ ID NO: 86600 - DNA, 1113 bp, Artificial Sequence
  derived and/or modified sequence
atggaggagggcgtgccctgcccagccccagctgccaagctgaccccacctgtgaagaagagccaggacatgcatgatgagaggagcaagctggtgaatgaatatgcctgccgggtgctggagctgctgggcatgggccaccggctgtttgtgccccggctgctggccaccagcaaggaggacctgctgcaggccgactttgaaggagccctgaagttcttccgggtgcagctgcccaagcgctacagagctgaggagaatgcccggcggctgatggagcaggcctgcaacatcaaggtgcccaccaagaagctgaagaagtatgagaaggagtaccagaccatgagggagagccagctgcagcaggaggaccccatggaccgctacaagcgggagaacagaaggctgcaggaggcctccatgaggctggagcaggagaatgatgacctggcccacgagctggtgaccagcaagatcgccctgagaaatgacctggaccaggccgaggacaaggcagatgtgctgaacaaggagctgctgctgaccaagcagaggctggtggagacagaggaggagaagaggaagcaggaggaggagacagcccagctgaaggaggtgttcaggaagcagctggagaaggccgagtatgagatcaagaagaccacagccatcatcgccgagtacaagcagatctgcagccagctgagcacccggctggagaagcagcaggccgccagcaaggaggagctggaggtggtgaagggcaagatgatggcctgcaagcactgcagcgacatcttcagcaaggagggcgccctgaagctggccgccaccggccgggaggaccagggcattgaaacagatgatgagaaggacagcctgaagaagcagctgcgggagatggagctggagctggcccagaccaagctgcagctggtggaggccaagtgcaagatccaggagctggagcaccagagaggagccctgatgaatgagatccaggccgccaagaacagctggttcagcaagaccctgaacagcatcaagacagccaccggcacccagcccctgcagcctgcccctgtgacccagccccccaaggagagcacctag

SEQ ID NO: 86601 - DNA, 6282 bp, Artificial Sequence
  derived and/or modified sequence
agtctggtctggagctgggacagcagctgctgctgtggaaaggccagctggcaagatgatggaagaaatctccattatggtagcctatgacgcccatgttttcagccagctgcacgatgaagacttcctcactagtctggtggccatcagcaagcccaggtctatggtaccaaccaagaagctgaagaaatatgagaaagaatatcagacaatgcgagagagtcagctgcaacaggaagacccaatggatagatacaagagggagaaccgaagattacaggaggccagcatgaggttggaacaagagaatgatgaccttgcccatgaactagtaacaagcaaaattgctctacggaatgacttggatcaggcagaagacaaggcagatgtgttgaataaagagctccttttgaccaaacagaggctggtggagactgaagaggagaagaggaagcaagaggaagagactgcccagctaaaagaagtcttcaggaaacagctagagaaggcagaatatgaaataaagaagactacagctatcattgctgagtataaacagatctgttcgcagttgagtaccaggctggagaaacagcaagcagccagcaaggaggagctggaagtggtaaagggtaagatgatggcatgcaaacactgcagtgacattttcagcaaggagggtgctttgaaactagcagccacaggcagagaggaccagggaattgaaacagatgatgagaaggactcacttaagaagcagctgagagagatggaactggaactggcacaaaccaaactgcagttggtggaggccaagtgtaaaattcaggaacttgaacatcagagaggagcccttatgaatgaaatccaagctgcgaaaaactcttggtttagcaaaaccctgaactctatcaaaacggccacgggcacccagccattgcagccagcaccggtcacccagccacccaaggagagcacatagttccagccttacccaagcacaagagcacaatgttcaaaccaatggaaatctgggaggattcttcctggtgtccctttgaaggaaagtcaaggaggccagaaaacaagccagaatttttcagtagctctcactctttcttgtatgacacttttcaaagggatgctatttaaactgacctgttctatgttgaatacctattttccagcttctggaaggccatgttcagatccatcatagtattacacattattttgtttgcctgatgtttagttggaaataagtaattcagaactaaatgcttttttatttagaattattcataattatttttatcttacataaaaatggagacatctgttattccaaggttgaagtgataagaagatctttgtcacaggaaaaaaaaaattgaaacctaaacatcttaagttttcaggatttattcagataaagcacactgtggggccaggcatgaccactctcaggtttcctcctgagcctgattcccagggaagtgttaatcctgtccaaaggaaagaaccaatcagcgatcattggtttactttcattttctgttcggtacatctggaaatgaagtgccaggaatagacgggctgttcagattatacgctaggtaaaaggaactgaaattttaataagtgtaggtcaggatcatttgggctgtggtattctaacagatccttttaagaatgccacataggacttgtgagttcctaagtacaccaaagtatggacacagatgtgacttctggcaattataaagttaaaggtggatattgcaccttacagacttagggagcctttaccagagacgcctaaaaagccccaggttcagccattgtgctgaatagagtggaatatagaaccagggacagagtatttcatttaacgttgatatatacttgctaaggaaacactaacaatactgtaactttgttaaaggacatagtattgaaatgggaaatagaggtcaggctcacatcatcttagtttaatgctgggcaactttttctgatttctgtagttccctgaaaatgtgtccttcgtacccataaagagatacaaatgcatttgtaacatttttgattgaatataaaacctttacagaaatacttatctcatggaaaggtaaagctattgtttaaaaattagtggaaatattttttcaattatatttaacatgcctataaaaatagtccttgcaggaaattatttgataagagcaaaactatttttattttataaactattttggaggcctctgatcctttcaaaccaaccaaactactattagatatgtacaataacatttgttgatattaatcattggcctcattgttgaacatattatttgcaaagaatcttaaactctgtagtgccagaatgattctcatctgtgccatattttgcaattaaaagtaacacacccttagaagaatcaaataagagccatctacatcccaggaggatgcaccaagttgctcacagtggatcttttcctctaaaatgatcttttatgttctaaaaagtgaaatcccctttatctgtgtttatattctctacagcccataaaactgatgtgattgttatgttatactcatcagataatacttttcttacataaatctttcattgttgttctgacatctttcattacaaaatttattttcttaacaaaaaggaacataacccagcattccaagtgtctgtgttggctttaacattctctacatggtggtctagataagctaatttttttttttttttttttgtaaaatgtaatagctagaaaatgttatcttggcgcttgtttttgtaaatcatttagtataggctgttagctttactggtactttacgctttgattccaagaagccttgtgcagttgccttatcaaatggccagctaaattaaagatgctcttttgtgttgtgaatttcatagttctgtacagagcttgtttcaatttacaaaaataagtacattccacagaatgcctaaagtgtgtaattttctttaaataatagtaggtgagggagaaacataatggctctaggtcaatcccttatctaaagaccttgttcaacttcatagtccctttccttttaaagaggagaagagaaaaatcccccctggccaggcatggtggctcacatctgtaatcccagcactttgggaggctgaggtgggtggatcacctaaggtcaggagtttgagaccagcctggccaacatggtgaaaccctatctctactgcaaaatacaaaaattagccgggcttggtggcgggtgcctgtaatcccagctactcgggaggttgaggcaggagaatcacttgaacccaggaggcagaggttgcagtgggccaagattacggcattacattccatccagcctgggcgacaagagcaaaattccgtctcgaaaaatcaccaggtacatacctctcaagtttgataagtccatcttttgagttttcttttagctctttcaaaagattacgagggcaatacatattttttttttttttattctccagccccatatcatacttgggtatgcctgttggtaccataagcctaaactctccttcactgcaatgcctttgagtcagtagcaatagtaaagactagaaacaaagaaaattcagaatttggtatgtgatatgattgttcatacaatatgttataatagcaatattccaaacaatatgtccttcactgtctattgttggaaaactcatgcatcccagcatgaagtaactcctagttttaattttagttattttgagatatatttgagaattgcatctcttctcttgaatttcacttagaagagattaaccagccaaatatccaggaaagtttcaaaacattctagtgtttttcatcctttgctaggatgcactctgtacaaaacattcctctgaaaatctaatatttgcagtatctaagaattgatcatttctattttcattaaattctgtggaaaaaattaaatgaatgaaattcaacttcataattcagttcatcagcttttgtatcttgagaatctaaacacgtctttaaatctgaaagaaaccaagctggattttgcagtgcatatgtttgctagcttcccacatcctgaaccatgtcaaaatttggttttatttagttacatataatttaatgcaaagaaattctgttacttaatgttctgtttatttatgagtgcctatcaggaacactaataggaatgccattcaaccagtgtcttctgcccctctcccagctgttaaattagtacttcttcattggctttctgaaatgtcctgagtaaagtagaaaagcaacctttgtatggatgtggggatatttaatagtatgtatcttgtttcatttttttcctatgatgtattaatatttatttttctccaacccctgctccattttcttaaaatattttccagttaataactagttgctttatttcctagctgaagtgagaaaaccaacggaaaacaatacagatttgggcagaggagatagagttacatctttaaaggagtgagccagtcacccaggagaatcacatgtgtaactgatgtaggggtttaagtcttcatactttcactaaaatctgtctactaactctcccaccaacctttgcatcaaacacttaggtacctgcctgattaggggggcccctttaagggaaaaaacttttaaaaaattaaatgccttggttttgttttatcttctgggaaagaacacttttacttgattagcaagatgattatattatataacttgcccttaaaaacactccaaaatactgactccttttctccaattacaaatgagtgtgaagaaattctgttgtatgatttgaacactattaggtttgtatgtgtgtttaattggaagaattttatatagagtatctctgctgcttttgtttacctgggtaccacacaaccaaatacacattgagatttcaagaaatgatgatgaaagccagaaggccagaccacagctctgcagcctgtttcctacaaccagatataaaactctttctcgtcgccatgctgatagtcacactgaactagaactgtcccaacacattcttcctctctcataatggcttccatttaatacaggcaaagccctttaccttagcaaattctttatctttcaaaagtgaccaaaatgaggacttcaaccttggctgcacctcaataggagatgctgatcttgagttgtaatgagaaaagtgggcatataggagattttagtgactgcagtcagctgtctggcattcctttctcagtttgcatctaaaagactacatatgtcaagcttatctccacctgaatttgctgcctgctataaaaacatttcattaatatatcccattcttcctacctccatctctggtttgtcattagtggtattctgaaaagcttaagaaaaaagaatcattgagtagaaagtgaacattttaagttattttcctttttcattggcaattagttaacatgtaaaatcttttccattaaactgtataacttttaataactatatattatatatgggataaaatatatggactgaattgtgagaatataaatgcatcgaaagactctggtgtcatgaaagcacaagaataaggctggagatggtcccagatccaagatgtcccaaaagccttttgtatcagtttctctatttttggtattttgcataatgcatggatccttagttcaaatgagggacaaagtttctcagtcagccccacttcctttctttctaactcctacctttcccttgcagaggaggtagtagagattctggaattgtctatttttatgaattccattattttgtccatggcatctctaatgaaaacaggttctagaataaaggagttgattagtctgaacagtactaattaactacaaaataaacgttagtgatcagcctcttcctctataaacaatgaccaattagacgtttccgtaattccatgtattatgtatagtacactctataaatgtaaatgtaatgcttgtctaaaaagtgcaatttattgtacattgtcccaacaaatgtttacttttataatcgttatgaacttgaattggattagtatcttgtttttatgtgtgaatgaagccttgtgaaataaacaaatgcaactgagaaggtaacaaggtgactgtttttgtgagccagtgatgttttcaatgctttgtgttgcccctttggccccattaagcagtaataaacatttgttctg

SEQ ID NO: 86602 - DNA, 927 bp, Artificial Sequence
  derived and/or modified sequence
atgatggaggagatcagcatcatggtggcctacgacgcccacgtgttctcccaattgcacgacgaagatttcttgacctcactggtggcgatctccaagccgcgcagcatggtccctacgaagaaacttaagaaatatgaaaaggagtatcagacaatgcgagaatctcagttgcaacaggaggatcccatggatagatataagagagagaacagacgcctgcaagaagctagcatgcgcctggaacaggagaacgacgacttagcccacgaacttgtgacttctaaaatagctctaagaaatgaccttgaccaggcagaggacaaagctgatgttctgaacaaagagctgctcctcaccaagcagcgcctagtggagaccgaggaggagaagaggaagcaggaagaagagaccgcccaactcaaagaggtgtttcgcaaacaattggagaaagctgagtatgagattaagaaaactactgccataatcgcagagtataaacaaatatgttcacagctgtccacgcgtttggaaaaacagcaagcagcctctaaagaggagctcgaggtggtgaaaggcaagatgatggcctgcaagcactgcagcgatatcttctcgaaagaaggcgcactcaagcttgcagcgactggtcgggaggaccagggaatcgagacagatgacgagaaagacagcctcaaaaagcagctgcgcgagatggagctggagctggctcagacaaagttgcagttggtggaagcgaagtgcaagatccaggaactggagcatcaaaggggcgccctgatgaatgaaatacaggccgccaagaattcctggttctccaaaacactgaatagcatcaagacggctacgggtacccaacccctgcagccagctcccgtgactcagccaccaaaggagtctacgtag

SEQ ID NO: 86603 - DNA, 1113 bp, Artificial Sequence
  derived and/or modified sequence
atggaggagggcgtgccctgccccgcccccgccgccaagctgacccctcccgttaagaagtcacaggatatgcatgacgaacgaagcaagctggtaaatgagtatgcttgccgagtgctggagctgctgggaatgggccaccgcctcttcgttccccgcctcctggccacttccaaggaggatctgctccaggcagactttgaaggagccctcaagttttttagggtacagctgccgaagagataccgggcggaagagaacgctcgcagactaatggagcaagcctgcaatatcaaggtacccactaagaaattaaagaagtacgagaaagagtatcagactatgcgggaaagccagttacagcaggaggaccccatggataggtataagagggagaacagaaggttgcaggaggccagtatgaggctggaacaggagaacgacgacttggcccatgagctggtgacatccaaaatcgcactgagaaacgacttagatcaggctgaagacaaagcggacgtcctgaataaagagctgcttctgactaaacagcgacttgtcgagacagaggaggaaaaacgcaagcaggaagaggagaccgcacaactcaaggaagtttttaggaaacaactggagaaggctgagtatgagattaaaaagaccactgcaattatcgcggagtataagcagatctgcagccaactgtctacgcgcctcgaaaagcagcaggctgcttctaaggaagagctggaagtggttaaaggtaagatgatggcctgtaagcactgctccgacatcttttctaaagaaggagccttgaaactcgccgcgacagggagagaggaccaggggatagaaacagatgacgagaaggattccctgaaaaagcagctgagagaaatggagctggagctggcccaaaccaaattgcagctggtggaggctaagtgtaaaatacaggagctggagcaccagcggggagccctgatgaatgaaatccaggccgctaagaactcctggttcagcaaaacactgaattctatcaagactgcaacgggaacacagccactacaacctgcccctgtgacgcaaccacctaaggagagtacatag

SEQ ID NO: 86604 - DNA, 927 bp, Artificial Sequence
  derived and/or modified sequence
atgatggaagagataagtataatggtagcttacgacgctcacgtgttctcacagcttcatgatgaagactttcttaccagcctggtcgctatttctaagccccgatcgatggtgccaacaaagaagcttaaaaagtacgagaaggagtaccagacaatgagagaatcccagctacaacaggaggaccccatggatcgttacaagcgggagaacagaaggcttcaggaggctagtatgcggctggagcaggaaaacgacgatctggcccacgagcttgtcacctcgaagatcgctctccgcaacgatctggatcaggccgaagataaggccgatgtcctgaacaaagagctgcttctgaccaaacagaggctggtggaaacggaagaggaaaagcgcaagcaagaggaagaaactgctcagctcaaggaggtctttcgcaagcagcttgaaaaggccgaatacgaaattaaaaagaccacggctatcatcgccgaatacaaacagatttgttctcagttgagtacccgcttggagaaacaacaggctgcctccaaggaggaactcgaagtggtgaaaggtaagatgatggcctgtaagcattgctctgatatcttctccaaagaaggtgccttgaagctcgccgctaccggtagggaagatcagggcatcgagaccgacgacgagaaggacagcctcaaaaaacaacttagggaaatggagctagagttggcgcagacgaaactacagctggttgaggcaaagtgcaagatacaggaattggagcatcagagaggcgctttgatgaacgaaattcaagccgcaaagaattcatggttttctaaaaccctcaactccattaagactgcgacgggcacccagccccttcaaccggcaccagtgactcagccacctaaggaatctacatag

SEQ ID NO: 86605 - DNA, 1113 bp, Artificial Sequence
  derived and/or modified sequence
atggaagagggagtcccttgtcccgcacccgcagcaaagctaacacctcctgtaaaaaaatctcaagatatgcatgacgaacgatctaagctcgtgaacgaatacgcttgtagggtgttggagctgctgggcatggggcacagactcttcgtgcccaggcttctggccacatcgaaagaggatctgctgcaggccgacttcgagggagccctgaaatttttccgcgtgcaactcccaaagcggtaccgcgcagaagagaatgccaggcggcttatggagcaggcatgcaacattaaagtgcccactaaaaaactaaaaaaatatgagaaagaataccagacaatgcgggaatcacagctccagcaagaggaccccatggaccgctataaaagagaaaaccgccgactgcaagaggcctccatgagactggagcaggagaatgacgaccttgcccatgagcttgtgaccagcaagattgcgctccgtaatgacctggaccaggccgaggacaaggccgatgtgttaaacaaggagctgctgctgactaaacaacgcctggttgagaccgaagaagagaaaaggaagcaggaggaggagacggctcagctgaaggaggtgttcaggaagcagctcgagaaagccgagtacgaaattaaaaagacaaccgccataatcgccgagtataaacagatttgtagccaactaagtacccggctcgagaagcagcaggctgcgtccaaagaggagctcgaggtggtgaaagggaagatgatggcctgcaaacactgttcggacatttttagtaaggagggagccctgaaactcgcagctaccgggagagaagaccagggtatagagaccgacgacgagaaggactccctgaaaaagcagctaagagaaatggaactggagctcgcacagaccaagctgcaacttgtggaggccaaatgtaagatccaggagctcgaacatcagagaggtgccctgatgaatgaaatccaggccgctaagaacagctggttctccaagaccctgaacagcatcaagaccgcaactgggacacagccgctccaacccgcacctgtcacccagccacccaaggagtccacatag

SEQ ID NO: 86606 - DNA, 6821 bp, Artificial Sequence
  derived and/or modified sequence
acacacacacacacacacacacacacacacacacacacacacacacactctcacacattctcacatgctagacccttctaagcagcttgtccgtttttacacatgtatctgaactctcctgcatcactcttggccattttctcgcattcgattgcttttgccgttttttatttagatcagtacttgatttcattttcattttccagtctactttggggttctcgcagtggataatttagccaaaatgtttttcttgtggagacattagctgacaattcccaccacagactggcttgtacgtcctcccagggagacctaaacctggctcccctcccaccgcagttcttaatattgtggataagagatccatctttctcattctggatacctacttagtgctcatggaagaaggggtgccctgcccagccccagctgctaagctcacacctcctgtcaaaaagtcccaggacatgcacgacgagaggagcaagctggtgaatgagtatgcgtgtcgagtgctggaacttctggggatggggcatcgtctgtttgtgcctcggcttctggcgacctcaaaggaagaccttctgcaggctgattttgaaggtgctttaaagttctttagagttcagcttccaaagagatacagggcagaggaaaatgcaagaagactgatggagcaggcttgcaatattaaagtaccaaccaagaagctgaagaaatatgagaaagaatatcagacaatgcgagagagtcagctgcaacaggaagacccaatggatagatacaagagggagaaccgaagattacaggaggccagcatgaggttggaacaagagaatgatgaccttgcccatgaactagtaacaagcaaaattgctctacggaatgacttggatcaggcagaagacaaggcagatgtgttgaataaagagctccttttgaccaaacagaggctggtggagactgaagaggagaagaggaagcaagaggaagagactgcccagctaaaagaagtcttcaggaaacagctagagaaggcagaatatgaaataaagaagactacagctatcattgctgagtataaacagatctgttcgcagttgagtaccaggctggagaaacagcaagcagccagcaaggaggagctggaagtggtaaagggtaagatgatggcatgcaaacactgcagtgacattttcagcaaggagggtgctttgaaactagcagccacaggcagagaggaccagggaattgaaacagatgatgagaaggactcacttaagaagcagctgagagagatggaactggaactggcacaaaccaaactgcagttggtggaggccaagtgtaaaattcaggaacttgaacatcagagaggagcccttatgaatgaaatccaagctgcgaaaaactcttggtttagcaaaaccctgaactctatcaaaacggccacgggcacccagccattgcagccagcaccggtcacccagccacccaaggagagcacatagttccagccttacccaagcacaagagcacaatgttcaaaccaatggaaatctgggaggattcttcctggtgtccctttgaaggaaagtcaaggaggccagaaaacaagccagaatttttcagtagctctcactctttcttgtatgacacttttcaaagggatgctatttaaactgacctgttctatgttgaatacctattttccagcttctggaaggccatgttcagatccatcatagtattacacattattttgtttgcctgatgtttagttggaaataagtaattcagaactaaatgcttttttatttagaattattcataattatttttatcttacataaaaatggagacatctgttattccaaggttgaagtgataagaagatctttgtcacaggaaaaaaaaaattgaaacctaaacatcttaagttttcaggatttattcagataaagcacactgtggggccaggcatgaccactctcaggtttcctcctgagcctgattcccagggaagtgttaatcctgtccaaaggaaagaaccaatcagcgatcattggtttactttcattttctgttcggtacatctggaaatgaagtgccaggaatagacgggctgttcagattatacgctaggtaaaaggaactgaaattttaataagtgtaggtcaggatcatttgggctgtggtattctaacagatccttttaagaatgccacataggacttgtgagttcctaagtacaccaaagtatggacacagatgtgacttctggcaattataaagttaaaggtggatattgcaccttacagacttagggagcctttaccagagacgcctaaaaagccccaggttcagccattgtgctgaatagagtggaatatagaaccagggacagagtatttcatttaacgttgatatatacttgctaaggaaacactaacaatactgtaactttgttaaaggacatagtattgaaatgggaaatagaggtcaggctcacatcatcttagtttaatgctgggcaactttttctgatttctgtagttccctgaaaatgtgtccttcgtacccataaagagatacaaatgcatttgtaacatttttgattgaatataaaacctttacagaaatacttatctcatggaaaggtaaagctattgtttaaaaattagtggaaatattttttcaattatatttaacatgcctataaaaatagtccttgcaggaaattatttgataagagcaaaactatttttattttataaactattttggaggcctctgatcctttcaaaccaaccaaactactattagatatgtacaataacatttgttgatattaatcattggcctcattgttgaacatattatttgcaaagaatcttaaactctgtagtgccagaatgattctcatctgtgccatattttgcaattaaaagtaacacacccttagaagaatcaaataagagccatctacatcccaggaggatgcaccaagttgctcacagtggatcttttcctctaaaatgatcttttatgttctaaaaagtgaaatcccctttatctgtgtttatattctctacagcccataaaactgatgtgattgttatgttatactcatcagataatacttttcttacataaatctttcattgttgttctgacatctttcattacaaaatttattttcttaacaaaaaggaacataacccagcattccaagtgtctgtgttggctttaacattctctacatggtggtctagataagctaatttttttttttttttttttgtaaaatgtaatagctagaaaatgttatcttggcgcttgtttttgtaaatcatttagtataggctgttagctttactggtactttacgctttgattccaagaagccttgtgcagttgccttatcaaatggccagctaaattaaagatgctcttttgtgttgtgaatttcatagttctgtacagagcttgtttcaatttacaaaaataagtacattccacagaatgcctaaagtgtgtaattttctttaaataatagtaggtgagggagaaacataatggctctaggtcaatcccttatctaaagaccttgttcaacttcatagtccctttccttttaaagaggagaagagaaaaatcccccctggccaggcatggtggctcacatctgtaatcccagcactttgggaggctgaggtgggtggatcacctaaggtcaggagtttgagaccagcctggccaacatggtgaaaccctatctctactgcaaaatacaaaaattagccgggcttggtggcgggtgcctgtaatcccagctactcgggaggttgaggcaggagaatcacttgaacccaggaggcagaggttgcagtgggccaagattacggcattacattccatccagcctgggcgacaagagcaaaattccgtctcgaaaaatcaccaggtacatacctctcaagtttgataagtccatcttttgagttttcttttagctctttcaaaagattacgagggcaatacatattttttttttttttattctccagccccatatcatacttgggtatgcctgttggtaccataagcctaaactctccttcactgcaatgcctttgagtcagtagcaatagtaaagactagaaacaaagaaaattcagaatttggtatgtgatatgattgttcatacaatatgttataatagcaatattccaaacaatatgtccttcactgtctattgttggaaaactcatgcatcccagcatgaagtaactcctagttttaattttagttattttgagatatatttgagaattgcatctcttctcttgaatttcacttagaagagattaaccagccaaatatccaggaaagtttcaaaacattctagtgtttttcatcctttgctaggatgcactctgtacaaaacattcctctgaaaatctaatatttgcagtatctaagaattgatcatttctattttcattaaattctgtggaaaaaattaaatgaatgaaattcaacttcataattcagttcatcagcttttgtatcttgagaatctaaacacgtctttaaatctgaaagaaaccaagctggattttgcagtgcatatgtttgctagcttcccacatcctgaaccatgtcaaaatttggttttatttagttacatataatttaatgcaaagaaattctgttacttaatgttctgtttatttatgagtgcctatcaggaacactaataggaatgccattcaaccagtgtcttctgcccctctcccagctgttaaattagtacttcttcattggctttctgaaatgtcctgagtaaagtagaaaagcaacctttgtatggatgtggggatatttaatagtatgtatcttgtttcatttttttcctatgatgtattaatatttatttttctccaacccctgctccattttcttaaaatattttccagttaataactagttgctttatttcctagctgaagtgagaaaaccaacggaaaacaatacagatttgggcagaggagatagagttacatctttaaaggagtgagccagtcacccaggagaatcacatgtgtaactgatgtaggggtttaagtcttcatactttcactaaaatctgtctactaactctcccaccaacctttgcatcaaacacttaggtacctgcctgattaggggggcccctttaagggaaaaaacttttaaaaaattaaatgccttggttttgttttatcttctgggaaagaacacttttacttgattagcaagatgattatattatataacttgcccttaaaaacactccaaaatactgactccttttctccaattacaaatgagtgtgaagaaattctgttgtatgatttgaacactattaggtttgtatgtgtgtttaattggaagaattttatatagagtatctctgctgcttttgtttacctgggtaccacacaaccaaatacacattgagatttcaagaaatgatgatgaaagccagaaggccagaccacagctctgcagcctgtttcctacaaccagatataaaactctttctcgtcgccatgctgatagtcacactgaactagaactgtcccaacacattcttcctctctcataatggcttccatttaatacaggcaaagccctttaccttagcaaattctttatctttcaaaagtgaccaaaatgaggacttcaaccttggctgcacctcaataggagatgctgatcttgagttgtaatgagaaaagtgggcatataggagattttagtgactgcagtcagctgtctggcattcctttctcagtttgcatctaaaagactacatatgtcaagcttatctccacctgaatttgctgcctgctataaaaacatttcattaatatatcccattcttcctacctccatctctggtttgtcattagtggtattctgaaaagcttaagaaaaaagaatcattgagtagaaagtgaacattttaagttattttcctttttcattggcaattagttaacatgtaaaatcttttccattaaactgtataacttttaataactatatattatatatgggataaaatatatggactgaattgtgagaatataaatgcatcgaaagactctggtgtcatgaaagcacaagaataaggctggagatggtcccagatccaagatgtcccaaaagccttttgtatcagtttctctatttttggtattttgcataatgcatggatccttagttcaaatgagggacaaagtttctcagtcagccccacttcctttctttctaactcctacctttcccttgcagaggaggtagtagagattctggaattgtctatttttatgaattccattattttgtccatggcatctctaatgaaaacaggttctagaataaaggagttgattagtctgaacagtactaattaactacaaaataaacgttagtgatcagcctcttcctctataaacaatgaccaattagacgtttccgtaattccatgtattatgtatagtacactctataaatgtaaatgtaatgcttgtctaaaaagtgcaatttattgtacattgtcccaacaaatgtttacttttataatcgttatgaacttgaattggattagtatcttgtttttatgtgtgaatgaagccttgtgaaataaacaaatgcaactgagaaggtaacaaggtgactgtttttgtgagccagtgatgttttcaatgctttgtgttgcccctttggccccattaagcagtaataaacatttgttctgaagtcca

SEQ ID NO: 86607 - DNA, 1374 bp, Artificial Sequence
  derived and/or modified sequence
atggagcagaaagaaaatgtgccaccagggcctgaagtgtgcatcacccaccaggagggggaaaagatcagcgcaaatgaaaactcattggcggtgagaagcactcccgccgaagatgactctcgcgactctcaagtcaagtctgaggtccagcaacctgtgcaccctaaacctctcagcccagacagtcgggccagcagtttgtctgagtctagcccccccaaagccatgaagaaattccaggcccccgcccgcgaaacttgtgtcgagtgtcagaagactgtatatccgatggagcgcctgctcgctaatcagcaggtctttcacatctcttgttttcgttgcagctactgcaataacaaactgagtttgggcacttacgcatcactgcacggccggatctattgcaaaccacacttcaaccagctgtttaaatccaaaggtaactacgacgaggggttcgggcatagaccccataaggatctctgggctagcaaaaatgaaaatgaggaaattctggagcggccagcccaattagccaacgctcgagaaacaccccattccccaggcgtagaagacgctccaattgccaaggtgggggtgctggccgcctcaatggaggctaaggctagtagccaacaagaaaaagaggataagcccgcagagaccaagaaactgcgtatcgcatggcccccccctacagaattaggatcctcgggctcagccctagaggaggggattaaaatgtccaaacctaagtggcccccagaagacgagattagtaaacctgaagtaccagaggacgtagatttggatcttaagaaattacgaagatctagttccttgaaggagaggagccgtccattcaccgtagctgcgtcattccaatccacctctgtgaagtctcccaaaacagtgtccccacccattcgcaagggttggtctatgtcagaacaaagcgaggagtccgtcggggggagagttgctgagcgtaaacaagtggagaacgcaaaggccagtaagaagaatggcaatgtggggaagaccacttggcaaaacaaggaatctaaaggcgaaacgggcaagcgttccaaggaaggacactctctggagatggaaaacgagaatctggttgagaatggtgcagactccgatgaagatgacaattctttcctaaaacaacagtccccacaggagccaaaatccctgaactggtcatctttcgtcgacaatacattcgctgaagagttcactacacagaaccagaagagtcaggacgtggaactgtgggagggcgaggttgttaaggagctcagtgtagaggagcagattaagaggaatcgatactatgatgaggacgaggacgaggagtag

SEQ ID NO: 86608 - DNA, 1371 bp, Artificial Sequence
  derived and/or modified sequence
atggaacaaaaggagaacgtgcctcccggacctgaggtgtgcatcacgcaccaggaaggtgagaagatttccgctaacgaaaatagtcttgccgtgaggtctacacctgccgaggatgactcgagggacagccaggttaaaagtgaggttcaacagccagtccatcctaagcctctcagccccgacagtcgggcttcatccttgagcgaatcatcccctcctaaagcaatgaaattccaggccccagcgcgagagacttgtgtggaatgtcaaaagaccgtgtaccccatggagaggctgctagcgaatcagcaggtgttccatatatcttgttttcgttgtagttactgtaataacaaactgtccctggggacatacgctagcttacacgggcgcatatactgtaaaccacatttcaaccagctgttcaagagcaaagggaactatgatgagggatttggtcacaggccgcataaggacctgtgggcaagcaagaacgagaatgaagagattcttgaacgtcctgcacagctggccaacgcacgcgagaccccgcattctccgggagtagaggacgcacctatagccaaggttggggttttggctgcctccatggaagcgaaggcatcctctcagcaggagaaagaagataagcctgccgaaactaaaaagttgcgcatcgcctggccccctccaactgagctggggtccagtggcagcgctctggaggaaggaataaaaatgagcaaacccaaatggccacctgaggacgagatttcaaaacccgaggtacccgaggatgtggacctggatttgaaaaagcttcgacggagcagtagcttaaaagaaagaagccgtccattcaccgtcgctgccagctttcagtctacaagcgtgaagagccccaagaccgtcagccccccaattaggaagggatggagtatgagcgagcagtctgaagaatccgtgggagggagagtggccgagagaaagcaggtggagaatgctaaagcatccaagaagaatgggaacgtcggaaagaccacttggcagaacaaggagtccaagggtgagacaggtaaacggtccaaggagggacacagcctcgagatggagaacgaaaatctggtcgagaacggagctgactcggatgaagatgataacagtttccttaagcagcagtcacctcaggaaccaaagagcctgaactggagttctttcgtagacaacactttcgcggaggaatttacgactcaaaatcaaaaatctcaggacgtcgagctgtgggagggcgaggtcgtcaaggagttaagcgtggaggagcagatcaaacggaatcggtactacgatgaggacgaagacgaggagtag

SEQ ID NO: 86609 - DNA, 1374 bp, Artificial Sequence
  derived and/or modified sequence
atggagcagaaggaaaatgtgcccccaggccctgaggtgtgcatcacccaccaggagggggagaagatcagcgccaatgaaaacagcctggccgtgcgcagcaccccagcagaagatgacagccgggacagccaggtgaagtctgaggtgcagcagcctgtgcaccccaagcccctgagcccagacagccgggccagcagcctgtctgagagcagcccccccaaggccatgaagaagttccaggccccagcccgggagacctgtgtggagtgccagaagacagtgtaccccatggagcggctgctggccaaccagcaggtgttccacatcagctgcttccgctgcagctactgcaacaacaagctgagcctgggcacctacgccagcctgcacggccgcatctactgcaagccccacttcaaccagctgttcaagagcaaaggaaattatgatgagggcttcggccaccggccccacaaggacctgtgggccagcaagaatgaaaatgaggagatcctggagaggcctgcccagctggccaatgcccgggagaccccccacagccctggggtggaggatgcccccatcgccaaggtgggcgtgctggccgcctccatggaggccaaggccagcagccagcaggagaaggaggacaagccagctgagaccaagaagctgcgcatcgcctggcccccacccacagagctgggcagcagcggcagcgccctggaggagggcatcaagatgagcaagcccaagtggcccccagaagatgagatcagcaagccagaggtgcctgaagatgtggacctggacctgaagaagctgcggcgcagcagcagcctgaaggagaggagccggcccttcaccgtggccgccagcttccagagcacctctgtgaagagccccaagacagtgagcccccccatcaggaagggctggagcatgtctgagcagagcgaggagagcgtgggcggccgggtggccgagaggaagcaggtggagaatgccaaggccagcaagaagaatggaaatgtgggcaagaccacctggcagaacaaggagagcaaaggagagaccgggaagaggagcaaggagggccacagcctggagatggagaatgaaaacctggtggagaatggagctgacagtgatgaagatgacaacagcttcctgaagcagcagagcccccaggagcccaagagcctgaactggagcagctttgtggacaacacctttgctgaggagttcaccacccagaaccagaagagccaggatgtggagctgtgggagggggaggtggtgaaggagctgtctgtggaggagcagatcaagaggaaccgctactatgatgaagatgaagatgaggagtag

SEQ ID NO: 86610 - DNA, 1371 bp, Artificial Sequence
  derived and/or modified sequence
atggagcagaaggaaaatgtgcccccaggccctgaggtgtgcatcacccaccaggagggggagaagatcagcgccaatgaaaacagcctggccgtgcgcagcaccccagcagaagatgacagccgggacagccaggtgaagtctgaggtgcagcagcctgtgcaccccaagcccctgagcccagacagccgggccagcagcctgtctgagagcagcccccccaaggccatgaagttccaggccccagcccgggagacctgtgtggagtgccagaagacagtgtaccccatggagcggctgctggccaaccagcaggtgttccacatcagctgcttccgctgcagctactgcaacaacaagctgagcctgggcacctacgccagcctgcacggccgcatctactgcaagccccacttcaaccagctgttcaagagcaagggcaactatgatgagggcttcggccaccggccccacaaggacctgtgggccagcaagaatgaaaatgaggagatcctggagaggcctgcccagctggccaatgcccgggagaccccccacagccctggggtggaggatgcccccatcgccaaggtgggcgtgctggccgcctccatggaggccaaggccagcagccagcaggagaaggaggacaagccagctgagaccaagaagctgagaattgcctggcccccacccacagagctgggcagcagcggcagcgccctggaggagggcatcaagatgagcaagcccaagtggcccccagaagatgagatcagcaagccagaggtgcctgaagatgtggacctggacctgaagaagctgcggcgcagcagcagcctgaaggagaggagccggcccttcaccgtggccgccagcttccagagcacctctgtgaagagccccaagacagtgtccccacccatcaggaagggctggagcatgtctgagcagagcgaggagagcgtgggcggccgggtggccgagaggaagcaggtggagaatgccaaggccagcaagaagaatggaaatgtgggcaagaccacctggcagaacaaggagagcaagggggagaccgggaagaggagcaaggagggccacagcctggagatggagaatgaaaacctggtggagaatggagctgacagtgatgaagatgacaacagcttcctgaagcagcagagcccccaggagcccaagagcctgaactggagcagctttgtggacaacacctttgctgaggagttcaccacccagaaccagaagagccaggatgtggagctgtgggagggggaggtggtgaaggagctgtctgtggaggagcagatcaagaggaaccgctactatgatgaagatgaagatgaggagtag

SEQ ID NO: 86611 - DNA, 2652 bp, Artificial Sequence
  derived and/or modified sequence
ataaaatggagcaaaaggagaatgtgcccccaggtcctgaggtctgcatcacccatcaggaaggggaaaagatttctgcaaatgagaatagcctggcagtccgttccacccctgccgaagatgactcccgtgactcccaggttaagagtgaggttcaacagcctgtccatcccaagccactaagtccagattccagagcctccagtctttctgaaagttctcctcccaaagcaatgaagtttcaggcacctgcaagagagacctgcgtggaatgtcagaagacagtctatccaatggagcgtctcttggccaaccagcaggtgtttcacatcagctgcttccgttgctcctattgcaacaacaaactcagtctaggaacatatgcatctttacatggaagaatctattgtaagcctcacttcaatcaactctttaaatctaagggcaactatgatgaaggctttgggcacagaccacacaaggatctatgggcaagcaaaaatgaaaacgaagagattttggagagaccagcccagcttgcaaatgcaagggagacccctcacagcccaggggtagaagatgcccctattgctaaggtgggtgtcctggctgcaagtatggaagccaaggcctcctctcagcaggagaaggaagacaagccagctgaaaccaagaagctgaggatcgcctggccaccccccactgaacttggaagttcaggaagtgccttggaggaagggatcaaaatgtcaaagcccaaatggcctcctgaagacgaaatcagcaagcccgaagttcctgaggatgtcgatctagatctgaagaagctaagacgatcttcttcactgaaggaaagaagccgcccattcactgtagcagcttcatttcaaagcacctctgtcaagagcccaaaaactgtgtccccacctatcaggaaaggctggagcatgtcagagcagagtgaagagtctgtgggtggaagagttgcagaaaggaaacaagtggaaaatgccaaggcttctaagaagaatgggaatgtgggaaaaacaacctggcaaaacaaagaatctaaaggagagacagggaagagaagtaaggaaggtcatagtttggagatggagaatgagaatcttgtagaaaatggtgcagactccgatgaagatgataacagcttcctcaaacaacaatctccacaagaacccaagtctctgaattggtcgagttttgtagacaacacctttgctgaagaattcactactcagaatcagaaatcccaggatgtggaactctgggagggagaagtggtcaaagagctctctgtggaagaacagataaagagaaatcggtattatgatgaggatgaggatgaagagtgacaaattgcaatgatgctgggccttaaattcatgttagtgttagcgagccactgccctttgtcaaaatgtgatgcacataagcaggtatcccagcatgaaatgtaatttacttggaagtaactttggaaaagaattccttcttaaaatcaaaaacaaaacaaaaaaacacaaaaaacacattctaaatactagagataactttacttaaattcttcattttagcagtgatgatatgcataagtgctgtaaggcttgtaactggggaaatattccacctgataatagcccagattctactgtattcccaaaaggcaatattaaggtagacagatgattagtagtatattgttacacactattttggaattagagaacatacagaaggaatttaggggcttaaacattacgactgaatgcactttagtataaagggcacagtttgtatatttttaaatgaataccaatttaattttttagtatttacctgttaagagattatttagtctttaaattttttaggttaattttcttgctgtgatatatatgaggaatttactactttatgtcctgctctctaaactacatcctgaactcgacgtcctgaggtataatacaacagagcactttttgaggcaattgaaaaaccaacctacactcttcggtgcttagagagatctgctgtctcccaaataagcttttgtatctgccagtgaatttactgtactccaaatgattgctttcttttctggtgatatctgtgcttctcataattactgaaagctgcaatattttagtaataccttcgggatcactgtcccccatcttccgtgttagagcaaagtgaagagtttaaaggaggaagaagaaagaactgtcttacaccacttgagctcagacctctaaaccctgtatttcccttatgatgtcccctttttgagacactaatttttaaatacttactagctctgaaatatattgatttttatcacagtattctcagggtgaaattaaaccaactataggcctttttcttgggatgattttctagtcttaaggtttggggacattataaacttgagtacatttgttgtacacagttgatattccaaattgtatggatgggagggagaggtgtcttaagctgtaggcttttctttgtactgcatttatagagatttagctttaatattttttagagatgtaaaacattctgctttcttagtcttacctagtctgaaacatttttattcaataaagattttaattaaaatttgaa

SEQ ID NO: 86612 - DNA, 1374 bp, Artificial Sequence
  derived and/or modified sequence
atggagcagaaggagaacgtgccccccggccccgaggtgtgcatcacgcatcaggagggcgaaaagatctcagccaatgagaattccctcgcagtgcgatcgacaccagccgaggatgatagccgggatagtcaggtcaaatctgaggtccagcagcctgtccaccccaagccactgtcccctgattcgcgggcgagctctctctctgaatcatccccccctaaggctatgaagaagtttcaagccccggccagggagacttgcgtggagtgccagaagacagtgtatcccatggagcgtttactagcgaatcagcaagtcttccatatttcatgttttagatgctcatattgcaataacaagttatcgctgggcacatatgcctcactgcacgggcggatttattgtaagccacacttcaaccagttgttcaaatccaagggcaactatgatgaaggcttcggccaccgccctcacaaggacctgtgggctagcaaaaacgaaaatgaagaaatcctggaacggcccgcccagttggccaatgctcgcgagacacctcattcacccggggtggaggacgcccctattgctaaggtcggagtgctggccgcctcaatggaggccaaagccagctcccagcaggaaaaggaggataagcccgccgaaacgaaaaagctccgcatcgcatggcctcctcctaccgaactgggaagttccggctctgcactggaggaggggattaagatgagcaaaccgaaatggccacctgaagatgaaatctcaaagcctgaagtacccgaagacgtggacttggaccttaaaaagctgcgcaggtcaagctcattgaaggaacgcagtagaccattcaccgtagcagcgtcattccaatccaccagtgttaagtcaccgaagacggtctcacctcctattaggaagggctggagcatgtcagaacagagtgaggagtccgtgggaggccgcgtcgctgagcggaaacaggtggagaatgctaaagccagcaaaaagaatgggaacgtgggcaaaaccacttggcagaacaaggaatcaaaaggggaaacaggcaagcggtccaaagagggccacagtctggaaatggagaatgagaacttagtagagaacggagcagactcagacgaagatgacaatagcttcctcaagcaacagtctcctcaggagccaaagtcactcaattggagcagttttgtggataacactttcgctgaagaatttactacacagaaccagaagagtcaggatgtggaactgtgggagggggaagtcgtgaaagaactctccgttgaagagcagatcaagagaaaccgttattatgatgaggacgaggacgaagagtag

SEQ ID NO: 86613 - DNA, 1371 bp, Artificial Sequence
  derived and/or modified sequence
atggagcagaaggagaacgtgccccccggccccgaggtgtgcatcactcatcaggaaggggaaaaaataagcgccaacgagaacagtttagccgttcgctccacccctgcagaagacgatagtcgagactcgcaggtaaaaagtgaagtccagcaacctgtgcaccctaagcctcttagtccagattccagggcctcttcattgagcgagtcttctccgccgaaagcgatgaaatttcaggcccccgcaagagagacttgcgtggagtgtcagaagactgtgtatcccatggagcgactgctcgctaaccaacaggtctttcacatctcctgtttcaggtgttcctattgtaataacaagctctctctcggtacctacgcatctctccacggtcggatctactgcaagccacacttcaatcagttgtttaaatcaaaaggcaattacgatgaaggcttcggacacaggcctcataaggatctgtgggccagcaagaacgaaaacgaggaaattctggaacggcctgctcagttggctaacgccagggaaactcctcattccccaggcgtcgaggacgcaccaattgccaaggtcggggttttggctgcaagtatggaggcaaaggcctccagccaacaggaaaaggaggataaaccggccgaaacaaaaaagttacgaatcgcttggccccccccaaccgagcttgggagctctggctcagctcttgaagaggggattaagatgtctaagcccaaatggcccccagaggacgagattagtaagcctgaggttccggaagacgtggacctggatctgaagaaactaaggcgctcttcctccctgaaggagcggagtcgtcccttcaccgtggctgctagttttcaatccacaagtgtgaagtcacccaagaccgtttcccctcccattagaaagggttggagtatgtcagagcagtctgaggagagtgtgggcggccgagtagcagagcggaaacaggtggagaatgcaaaggcctctaagaagaacggcaacgtgggaaagactacctggcagaacaaagaaagcaaaggcgagacagggaagcggagcaaagagggtcacagtttggagatggaaaatgagaatctggtggaaaacggcgcagactccgacgaagatgacaatagctttttaaagcagcagagtccacaggaaccaaagtcactgaactggtccagctttgtcgataatacgtttgctgaggaatttaccacacaaaaccagaagagtcaggacgttgaactttgggaaggtgaagtcgtaaaagagctttctgtggaagaacaaatcaagcgtaaccgatactacgacgaggacgaggacgaagaatag

SEQ ID NO: 86614 - DNA, 1374 bp, Artificial Sequence
  derived and/or modified sequence
atggagcaaaaagagaacgtaccaccaggcccagaggtgtgcataactcaccaggagggggaaaagatcagtgccaacgaaaactcgcttgctgtacgttccacgccagccgaagacgactccagggactcacaggttaaaagcgaagttcagcaaccagtccacccaaagccgctgagccccgactctagagcatcttctctgagtgaaagctctccaccaaaggctatgaagaagttccaagccccagctcgagaaacatgcgtggaatgccagaaaaccgtgtaccccatggagaggcttctggccaaccagcaggtgtttcacatctcctgtttcagatgcagttactgtaacaataagctcagcttagggacctacgctagcctgcacgggaggatctactgcaaaccccacttcaaccagctgtttaagagcaaagggaactacgacgaggggttcgggcaccggccacacaaggacttatgggcatcaaaaaatgaaaacgaagagatcctagagcgcccagcccagcttgccaacgctcgcgagacacctcatagccccggtgtggaggatgcacccatagctaaggtcggagtgcttgcggcatcaatggaggctaaggccagttcccagcaggagaaagaggataagcctgccgaaactaagaagctgcgaattgcctggcctccgcctacggaactgggctcgagcggctccgcccttgaagagggaattaaaatgtctaagccaaaatggccgccagaagacgagatctccaaacccgaagtacctgaagacgtggatttagacctcaaaaaactgcgcaggagttctagcttgaaagaacggtctaggcctttcacagtggctgcctccttccaatctaccagtgtaaagagccccaagaccgtaagcccccctatccggaaaggatggtctatgtccgaacaaagtgaggagagtgtcgggggacgagtcgcagaaagaaagcaggtcgaaaacgcaaaggctagtaaaaagaatggcaacgttggcaagacgacttggcagaataaggagagcaagggggaaaccggtaagagatccaaggagggccactctctggaaatggagaatgagaatcttgtggagaacggcgcagattccgatgaggatgacaatagtttcctaaagcaacagtccccgcaagagcccaaatctttgaactggtcatccttcgtcgacaatacctttgctgaggagttcacgacgcagaatcaaaaatcccaggacgtggaattatgggaaggcgaagtggtgaaggaattaagcgtggaggagcagattaagagaaatcgctattatgatgaggatgaagacgaggaatag

SEQ ID NO: 86615 - DNA, 1371 bp, Artificial Sequence
  derived and/or modified sequence
atggaacagaaagaaaatgttccgccaggacccgaagtatgtataacccaccaggagggcgaaaagattagcgctaacgaaaatagtctggcagttcgttccacccctgctgaggatgactcacgcgactctcaggttaagtccgaagtgcaacagccagtccatcctaaaccactgagccctgacagcagggcctcttctctgtccgagtcaagcccacctaaggcaatgaaatttcaggccccagcaagagagacttgtgtcgaatgccagaaaactgtgtaccccatggagaggttgctggccaaccagcaggtgtttcatattagttgcttcagatgctcttattgcaacaacaagctgagcctgggcacatacgcctcattgcatggacggatctactgcaagcctcactttaaccagttgttcaaaagcaaaggaaattacgatgaaggctttggacatcggccacataaggacctgtgggcttcgaaaaacgaaaatgaggagattttggagagacccgcacagctggccaatgccagagagactccacactctcccggagttgaggatgccccaatcgccaaggtgggtgtgctggccgcatccatggaggcaaaggcatcttctcagcaggagaaagaggataaacctgctgagaccaagaaactgaggatcgcctggccccctcccacagagcttgggagcagcgggagcgccctggaggaaggcatcaagatgtcgaagccaaaatggccccctgaagatgagatatcaaaaccagaagtcccagaggacgtggatctagacctgaagaaactgcgaagatccagctcactcaaagagagatcacgaccattcaccgtggctgcaagctttcagtcaacaagcgtgaagtctcctaagactgtgtcaccacccattcgaaagggttggagtatgagcgaacagtccgaagaatctgtcggtggcagagtggccgagcgtaaacaggttgagaacgccaaagcctcaaagaagaacggtaacgtcggtaaaacgacttggcagaacaaagaaagcaagggcgagacaggtaaacgctcaaaagaaggccactcccttgagatggaaaacgaaaatctagtcgagaacggggcagactctgatgaggacgacaacagctttcttaagcaacagagtccacaggagcccaaatcccttaattggagtagttttgtggataacacattcgccgaagagtttaccacccagaatcagaagtcacaggacgtggaactgtgggaaggcgaagtcgttaaagagctttctgtggaggagcagattaaaaggaatagatactacgacgaggacgaagatgaggagtag

SEQ ID NO: 86616 - DNA, 1374 bp, Artificial Sequence
  derived and/or modified sequence
atggagcagaaggagaacgtgccccccggccccgaggtgtgcatcacccaccaggagggcgagaagatcagcgccaacgagaacagcctggccgtgagaagcacccccgccgaggacgacagcagagacagccaggtgaagagcgaggtgcagcagcccgtgcaccccaagcccctgagccccgacagcagagccagcagcctgagcgagagcagcccccccaaggccatgaagaagttccaggcccccgccagagagacctgcgtggagtgccagaagaccgtgtaccccatggagagactgctggccaaccagcaggtgttccacatcagctgcttcagatgcagctactgcaacaacaagctgagcctgggcacctacgccagcctgcacggcagaatctactgcaagccccacttcaaccagctgttcaagagcaagggcaactacgacgagggcttcggccacagaccccacaaggacctgtgggccagcaagaacgagaacgaggagatcctggagagacccgcccagctggccaacgccagagagaccccccacagccccggcgtggaggacgcccccatcgccaaggtgggcgtgctggccgccagcatggaggccaaggccagcagccagcaggagaaggaggacaagcccgccgagaccaagaagctgagaatcgcctggcccccccccaccgagctgggcagcagcggcagcgccctggaggagggcatcaagatgagcaagcccaagtggccccccgaggacgagatcagcaagcccgaggtgcccgaggacgtggacctggacctgaagaagctgagaagaagcagcagcctgaaggagagaagcagacccttcaccgtggccgccagcttccagagcaccagcgtgaagagccccaagaccgtgagcccccccatcagaaagggctggagcatgagcgagcagagcgaggagagcgtgggcggcagagtggccgagagaaagcaggtggagaacgccaaggccagcaagaagaacggcaacgtgggcaagaccacctggcagaacaaggagagcaagggcgagaccggcaagagaagcaaggagggccacagcctggagatggagaacgagaacctggtggagaacggcgccgacagcgacgaggacgacaacagcttcctgaagcagcagagcccccaggagcccaagagcctgaactggagcagcttcgtggacaacaccttcgccgaggagttcaccacccagaaccagaagagccaggacgtggagctgtgggagggcgaggtggtgaaggagctgagcgtggaggagcagatcaagagaaacagatactacgacgaggacgaggacgaggagtag

SEQ ID NO: 86617 - DNA, 1371 bp, Artificial Sequence
  derived and/or modified sequence
atggagcagaaggagaacgtgccccccggccccgaggtgtgcatcacccaccaggagggcgagaagatcagcgccaacgagaacagcctggccgtgagaagcacccccgccgaggacgacagcagagacagccaggtgaagagcgaggtgcagcagcccgtgcaccccaagcccctgagccccgacagcagagccagcagcctgagcgagagcagcccccccaaggccatgaagttccaggcccccgccagagagacctgcgtggagtgccagaagaccgtgtaccccatggagagactgctggccaaccagcaggtgttccacatcagctgcttcagatgcagctactgcaacaacaagctgagcctgggcacctacgccagcctgcacggcagaatctactgcaagccccacttcaaccagctgttcaagagcaagggcaactacgacgagggcttcggccacagaccccacaaggacctgtgggccagcaagaacgagaacgaggagatcctggagagacccgcccagctggccaacgccagagagaccccccacagccccggcgtggaggacgcccccatcgccaaggtgggcgtgctggccgccagcatggaggccaaggccagcagccagcaggagaaggaggacaagcccgccgagaccaagaagctgagaatcgcctggcccccccccaccgagctgggcagcagcggcagcgccctggaggagggcatcaagatgagcaagcccaagtggccccccgaggacgagatcagcaagcccgaggtgcccgaggacgtggacctggacctgaagaagctgagaagaagcagcagcctgaaggagagaagcagacccttcaccgtggccgccagcttccagagcaccagcgtgaagagccccaagaccgtgagcccccccatcagaaagggctggagcatgagcgagcagagcgaggagagcgtgggcggcagagtggccgagagaaagcaggtggagaacgccaaggccagcaagaagaacggcaacgtgggcaagaccacctggcagaacaaggagagcaagggcgagaccggcaagagaagcaaggagggccacagcctggagatggagaacgagaacctggtggagaacggcgccgacagcgacgaggacgacaacagcttcctgaagcagcagagcccccaggagcccaagagcctgaactggagcagcttcgtggacaacaccttcgccgaggagttcaccacccagaaccagaagagccaggacgtggagctgtgggagggcgaggtggtgaaggagctgagcgtggaggagcagatcaagagaaacagatactacgacgaggacgaggacgaggagtag

SEQ ID NO: 86618 - protein, 491 aa, Artificial Sequence
  derived and/or modified sequence
MLTRIDNSFAEPSRSNGSMVRHSSSPYVVYPSDKPFLNSDLRRSPSKPTLAYPESNSRAIFSALKNLQDKIRRLELERIQAEESVKTLSRETIEYKKVLDEQIQERENSKNEESKHNQELTSQLLAAENKCNLLEKQLEYMRNMIKHAEMERTSVLEKQVSLERERQHDQTHVQSQLEKLDLLEQEYNKLTTMQALAEKKMQELEAKLHEEEQERKRMQAKAAELQTGLETNRLIFEDKATPCVPNARRIKKKKSKPPEKKSSRNYFGAQPHYRLCLGDMPFVAGKSTSPSHAVVANVQLVLHLMKQHSKALCNDRVINSIPLAKQVSSRGGKSKKLSVTPPSSNGINEELSEVLQTLQDEFGQMSFDHQQLAKLIQESPTVELKDKLECELEALVGRMEAKANQITKVRKYQAQLEKQKLEKQKKELKATKKTLDEERNSSSRSGITGTTNKKDFMKLRPGEKRRKNLQLLKDMQSIQNSLQSSSLCWDY

SEQ ID NO: 86619 - DNA, 1503 bp, Artificial Sequence
  derived and/or modified sequence
atggcagccgcatctgtttctgcggcatcaggcagtcacctgtcaaactctttcgctgaaccctctcggtccaacggatccatggtacggcattcatcctccccatatgttgtctatccttccgataaacctttcctcaactccgatctgcgcagaagcccatccaaacccacccttgcatatcccgagagcaatagccgggctatatttagcgcgcttaagaacctgcaggacaaaattaggcgtctggaactagagagaatccaggctgaagagtctgtgaaaacactgagtcgggagacaatagagtacaaaaaggtgctggatgaacagatacaggagcgcgaaaacagtaaaaacgaagagtccaaacataaccaagagcttacatctcagttattggccgccgagaacaaatgcaatctcctcgaaaaacagctggagtatatgaggaacatgattaagcatgccgagatggaacggacttctgtcttagaaaagcaggtgtcgctggagcgggagagacagcacgatcagactcacgtacagagccagttggagaaactggatctcttggagcaggagtacaataagctcacgacaatgcaagcacttgctgagaagaagatgcaggaactggaggcaaaactacacgaagaagagcaagagagaaagcgaatgcaggcaaaggccgctgagttgcagaccggcctggagacaaacagactgatatttgaagacaaagctactccatgtgttccgaacgccaggagaatcaagaagaagaaatctaagcctcctgaaaaaaagtcttcccggaactattttggagcccagccccactatcgcctctgcctcggggatatgccatttgtggctggaaaaagcacctccccaagtcacgcggtggttgccaatgtgcagctcgtgttgcatctaatgaaacagcatagcaaggcattatgcaatgatcgcgtcatcaactcaatcccactggctaagcaggtgtcctcaagaggaggtaagagcaagaagctcagtgtaactcccccaagcagcaatgggattaatgaagaactgagcgaggtgctgcagacgctgcaggacgagtttggccagatgagtttcgaccatcagcagctggccaaactgatccaggagtctcctaccgtggagttaaaggataagctggaatgtgaactggaggctcttgtgggacgcatggaagccaaggcaaatcagataaccaaagtacgcaaatatcaggcccaactggaaaagcagaaactagagaaacagaagaaggaattgaaggccacgaagaagaccttggacgaagaacggaacagtagctctcgcagcggcatcactggaactacaaataagaaggactttatgaagctgaggcccggtgagaagagaaggaagaatttgcagctgctgaaggacatgcagagcatccagaattccctccaatccagctccctgtgttgggattactag

SEQ ID NO: 86620 - DNA, 1476 bp, Artificial Sequence
  derived and/or modified sequence
atgctcacacgcatcgataattcgtttgccgagccgagccgttccaacggcagcatggtgcgtcattccagttccccatacgtagtctatcctagtgacaagccgttccttaactcagacctcaggagatcgcctagcaagcccaccctggcataccccgagtcaaattcacgtgctattttctccgccctaaaaaatctgcaggacaagattcggaggctcgagctggagcggatacaggcagaggaatccgtcaaaacgctgagcagggagactatcgagtacaaaaaggtgttggatgagcagattcaggaacgcgagaactctaaaaacgaggagagcaaacataatcaggagctcacttcccagctattagctgctgagaacaaatgtaatctgctggagaagcagctggagtacatgcgtaacatgataaaacacgcagagatggaaaggacctccgtcctggaaaagcaagttagtctggagagagagcggcaacacgaccaaacccacgttcagtcgcagcttgaaaagctcgatctgcttgagcaggaatataacaagttgaccaccatgcaggcgcttgcagagaagaaaatgcaggagctggaggcaaagttgcacgaggaggaacaggagagaaaaagaatgcaggcgaaggccgcggagctacagacaggcctggagaccaatcggcttattttcgaagacaaggccaccccttgcgtgccaaatgccaggcgaattaagaagaaaaaaagcaagcccccggagaagaaatcctcccgcaattatttcggtgcccagccccattatcggttatgtttgggggacatgcccttcgttgcaggcaaatccacctccccttcccacgccgtggtggcgaacgtacagctggtgcttcacctcatgaaacaacatagcaaggccctctgcaatgacagagtaatcaatagcattccactggccaagcaggttagttctcggggcggaaagtctaaaaagctgtcggtgacccccccttcttcaaacgggattaatgaggagctctctgaagtcctgcagacgcttcaggatgaatttggccagatgtccttcgatcatcaacagctagccaaacttatccaggaaagccccaccgtcgagcttaaagataagctagaatgcgaactagaggctctcgtcggcagaatggaggcgaaagccaaccaaattaccaaagtgaggaagtatcaagcccaacttgaaaagcaaaagcttgagaagcagaagaaggagctgaaagcgacaaaaaaaaccctggatgaggaaagaaatagttccagccgtagcggcatcaccggcacaacaaacaagaaggactttatgaagcttagacccggggagaagcgcagaaaaaacctacaactgctgaaagatatgcagtcaatacaaaacagcctgcagagttcttctctgtgctgggattattag

SEQ ID NO: 86621 - DNA, 1503 bp, Artificial Sequence
  derived and/or modified sequence
atggctgctgcctctgtgtctgctgccagcggcagccacctgagcaacagctttgctgagcccagccgcagcaatggctccatggtgcgccacagcagcagcccctacgtggtgtaccccagcgacaagcccttcctgaacagcgacctgcggcgcagccccagcaagcccaccctggcctacccagagagcaacagccgggccatcttcagcgccctgaagaacctgcaggacaagatccggcggctggagctggagcgcatccaggccgaggagagcgtgaagaccctgagccgggagaccatcgagtacaagaaggtgctggatgagcagatccaggagcgggagaacagcaagaatgaggagagcaagcacaaccaggagctgaccagccagctgctggccgctgagaacaagtgcaacctgctggagaagcagctggagtacatgaggaacatgatcaagcatgctgagatggagaggacctctgtgctggagaagcaggtgtccctggagcgggagcggcagcacgaccagacccacgtgcagagccagctggagaagctggacctgctggagcaggagtacaacaagctgaccaccatgcaggccctggccgagaagaagatgcaggagctggaggccaagctgcacgaggaggagcaggagaggaagaggatgcaggccaaggctgctgagctgcagacaggcctggagaccaacagactcatctttgaggacaaggccaccccctgtgtgcccaatgcccggcgcatcaagaagaagaagagcaagcccccagagaagaagagcagcaggaactactttggagcccagccccactaccgcctgtgcctgggggacatgccctttgtggccggcaagagcaccagccccagccatgctgtggtggccaacgtgcagctggtgctgcacctgatgaagcagcacagcaaggccctgtgcaatgacagagtcatcaacagcatccccctggccaagcaggtgagcagccggggcggcaagagcaagaagctgtctgtgaccccacccagcagcaatggcatcaatgaggagctgtctgaggtgctgcagaccctgcaggatgaatttggccagatgagctttgaccaccagcagctggccaagctgatccaggagagccccaccgtggagctgaaggacaagctggagtgtgagctggaggccctggtgggccgcatggaggccaaggccaaccagatcaccaaggtgaggaagtaccaggcccagctggagaagcagaagctggagaagcagaagaaggagctgaaggccaccaagaagaccctggatgaggagaggaacagcagcagccgcagcggcatcaccggcaccaccaacaagaaggacttcatgaagctgcggcctggagagaagaggaggaagaacctgcagctgctgaaggacatgcagagcatccagaacagcctgcagagcagcagcctgtgctgggactactag

SEQ ID NO: 86622 - DNA, 1476 bp, Artificial Sequence
  derived and/or modified sequence
atgctgaccagaattgacaacagctttgctgagcccagccgcagcaatggctccatggtgcgccacagcagcagcccctacgtggtgtaccccagcgacaagcccttcctgaacagcgacctgcggcgcagccccagcaagcccaccctggcctacccagagagcaacagccgggccatcttcagcgccctgaagaacctgcaggacaagatccggcggctggagctggagcgcatccaggccgaggagagcgtgaagaccctgagccgggagaccatcgagtacaagaaggtgctggatgagcagatccaggagcgggagaacagcaagaatgaggagagcaagcacaaccaggagctgaccagccagctgctggccgctgagaacaagtgcaacctgctggagaagcagctggagtacatgaggaacatgatcaagcacgccgagatggagaggacctctgtgctggagaagcaggtgtccctggagcgggagcggcagcacgaccagacccacgtgcagagccagctggagaagctggacctgctggagcaggagtacaacaagctgaccaccatgcaggccctggccgagaagaagatgcaggagctggaggccaagctgcacgaggaggagcaggagaggaagaggatgcaggccaaggctgctgagctgcagacaggcctggagaccaacagactcatctttgaggacaaggccaccccctgtgtgcccaatgcccggcgcatcaagaagaagaagagcaagcccccagagaagaagagcagcaggaactactttggagcccagccccactaccgcctgtgcctgggggacatgccctttgtggccggcaagagcaccagccccagccatgctgtggtggccaacgtgcagctggtgctgcacctgatgaagcagcacagcaaggccctgtgcaatgacagagtcatcaacagcatccccctggccaagcaggtgagcagcagaggaggcaagagcaagaagctgtctgtgaccccacccagcagcaatggcatcaatgaggagctgtctgaggtgctgcagaccctgcaggatgaatttggccagatgagctttgaccaccagcagctggccaagctgatccaggagagccccaccgtggagctgaaggacaagctggagtgtgagctggaggccctggtgggccgcatggaggccaaggccaaccagatcaccaaggtgaggaagtaccaggcccagctggagaagcagaagctggagaagcagaagaaggagctgaaggccaccaagaagaccctggatgaggagaggaacagcagcagccgcagcggcatcaccggcaccaccaacaagaaggacttcatgaagctgcggcctggagagaagaggaggaagaacctgcagctgctgaaggacatgcagagcatccagaacagcctgcagagcagcagcctgtgctgggactactag

SEQ ID NO: 86623 - DNA, 1503 bp, Artificial Sequence
  derived and/or modified sequence
atggccgccgccagcgtgagcgccgccagcggcagccacctgagcaacagcttcgctgagccatcaagatctaatggatccatggtcaggcacagtagttccccgtacgtagtgtacccttcagacaagccgttcctgaattcagacctaaggcgttctccctctaagcccactctggcttaccccgagtctaattccagagccattttcagcgccctaaagaacttacaggacaaaatacggcggctggagctagagaggatccaagcagaggagtcagtgaaaactcttagtagagaaaccatagaatataagaaagtgctagacgagcagatccaggaacgggagaattcaaagaatgaggaaagtaagcacaaccaggaactgacgtcgcagctgttggccgccgaaaacaagtgcaatctgctggaaaaacagctcgagtatatgcgaaacatgataaagcatgcagagatggaacgcacctccgtccttgagaagcaggtgagcctggaacgagaacggcaacacgaccaaacacacgtgcagtcccagcttgaaaagttggatctcctggaacaggagtacaacaaactcacaaccatgcaggccttagccgaaaagaagatgcaggagttggaggcaaaactgcatgaggaagaacaggagcggaagcgaatgcaggcaaaagctgccgagttgcagactggtctggagactaacagactgatcttcgaggacaaagccactccttgcgttcccaatgcccggaggatcaaaaagaaaaaaagcaaaccacccgagaagaagtcttctcgtaactatttcggagcccagccacattaccgactatgcctaggagacatgccctttgttgctggaaaatctacaagcccgagccatgccgtggtcgcaaacgtccagcttgttctccatctgatgaaacagcactctaaggcgctgtgcaacgacagggttatcaactctataccactagcaaagcaagtgtcatccaggggcggtaaatctaaaaagctatccgtgactccccctagctctaacgggattaacgaagaactaagcgaggttttacagacactgcaggacgagttcggccaaatgagcttcgaccaccagcaactggcgaagctcatacaggagagtcctacagtggaactcaaggacaagctcgagtgtgaactagaagccctggttgggcggatggaggccaaggccaatcaaattacgaaagtcagaaaatatcaagcccagttggaaaagcagaagctggaaaaacaaaaaaaagaacttaaggccactaagaagaccttagatgaggagcgcaatagcagctcaagatcaggaatcacagggactacaaacaagaaggactttatgaagctgcgtccaggggaaaaacgcaggaagaatttacagcttctgaaagacatgcagtccatccaaaacagtctccaaagttcctcactgtgttgggactattag

SEQ ID NO: 86624 - DNA, 1476 bp, Artificial Sequence
  derived and/or modified sequence
atgctgacccggatcgacaacagcttcgccgagcccagccggagcaacggatctatggtgaggcactccagctccccgtacgtcgtatacccatccgataaaccatttttgaacagcgacctcaggaggagtccatctaaaccaactctggcatatccggaaagtaattcccgtgccatcttctcagcactgaaaaacctgcaggacaagatcaggagactggagctcgaaaggatccaggctgaagagagcgtgaagacactgtctagagagactatcgaatataagaaggtgctggatgagcagatccaggagcgggaaaacagcaaaaatgaggaatcaaaacataatcaggagctgacgagtcagctgctcgcggcagagaacaagtgtaatttactggaaaagcaactggaatacatgcggaacatgatcaagcacgctgaaatggagaggaccagcgttctggagaagcaagtttccctcgagcgcgagcgccagcatgaccagacacatgttcaatctcagctcgagaagcttgacttgcttgagcaggaatataataaactgactactatgcaggcacttgctgagaaaaagatgcaggaactggaggcaaagttgcacgaggaggaacaggaacgcaaacgaatgcaggccaaagcagccgagctccaaaccggactggaaactaacagactcatctttgaggacaaagccacaccgtgtgttcccaatgcccgtagaatcaagaaaaaaaaatcaaagcccccagagaaaaaaagctcccgcaactacttcggggcccagccacattatcggctttgcctcggcgacatgcccttcgtggctggaaagtccacttctccatctcacgccgtcgtagccaatgtgcagttggtgctgcacctgatgaagcaacattctaaggccctctgtaacgatcgggtaataaactctatccccttagctaaacaggtgtccagcaggggtggcaaatctaagaaactgagcgttacgcccccatcatccaacggaatcaatgaggagctttcagaagtcctccagacattgcaggacgagtttgggcaaatgtcgttcgatcaccagcagctcgctaagctcattcaggagtctccaacagtggagctgaaggataaactggagtgcgagctggaggcccttgtgggaaggatggaggccaaagcaaaccagatcactaaagtcagaaagtaccaggcgcagttggagaagcagaaactggagaaacaaaagaaagagctgaaggccaccaaaaagaccttggacgaggaacgaaattcaagctcacgcagtgggattaccggaacgacgaacaagaaagactttatgaaacttaggcctggcgaaaaacgtcggaaaaacctacaactattaaaagatatgcaaagtatccaaaactccttgcagtccagctctctgtgctgggattactag

SEQ ID NO: 86625 - DNA, 1503 bp, Artificial Sequence
  derived and/or modified sequence
atggctgccgcatcagtgagcgccgcaagtggctctcacctcagcaactcatttgccgagccgagtcgctcaaacggaagcatggtcaggcattcaagctctccctacgtggtgtacccgtcagataaacctttcctcaacagcgatttacgacgctccccctccaagcccacactggcatatccagagtctaatagtcgcgcaatcttttctgcccttaaaaacctgcaagacaagattaggcgccttgagttagaaagaatccaagccgaggaatcggtcaaaacgcttagtcgcgagactatcgaatataaaaaggtcttggacgaacagatccaggaacgggaaaacagcaagaatgaggaatcaaaacacaatcaggagctgacatcgcaactgctggcagccgagaacaagtgtaacttgctcgaaaagcaactcgaatacatgcgtaacatgatcaaacatgctgagatggaacggactagcgtgctcgagaagcaggtttccctcgaacgtgagagacagcatgaccagacgcacgtgcagtcacagttggagaaactcgatttgctggaacaagaatacaataagctcacaactatgcaggcactggccgaaaaaaagatgcaggagctggaagctaaactgcatgaagaggaacaggaaaggaagcgcatgcaagctaaggcggcagaactgcagaccggccttgagaccaacaggctgattttcgaggacaaggctacaccctgcgtcccaaacgccaggcggattaagaaaaagaagtccaaaccccctgagaaaaaaagctctcggaactactttggagcacaacctcattacaggctgtgccttggcgacatgccctttgtcgccggaaagtccacttcacctagccacgcagtggtggccaatgtgcagttagtcttgcacttaatgaaacagcactcgaaagctctctgtaacgatagggttatcaactccatacctctggcaaagcaggtgtcaagtaggggcggtaaaagcaagaagctctctgtgaccccccctagctccaacgggattaacgaggagctgtctgaggtgctgcagaccttgcaggatgaattcggtcagatgtcattcgaccatcaacaattggccaagcttatacaggagagtccaaccgttgagctaaaagataaactagaatgcgagttagaggccctggtcggacgcatggaggctaaagcaaaccagatcaccaaagtcaggaagtaccaggcgcagctggaaaagcagaagctcgagaagcagaagaaagaactgaaagcaactaaaaagaccctggatgaggagaggaactctagttccaggagcgggattaccggcactacaaacaaaaaagactttatgaaactgcggcctggggagaagcgcaggaagaacctgcagcttctgaaggatatgcagtcaatccaaaatagtctgcagagttcctccttgtgctgggattattag

SEQ ID NO: 86626 - DNA, 1476 bp, Artificial Sequence
  derived and/or modified sequence
atgttaacccgtatcgacaattcgttcgctgagccctcgcggtctaacggctctatggtccgacactcttcttctccctatgtggtttacccctccgataagccttttctcaacagcgacctaagacgaagcccgtcaaagcccacactggcctatcccgagtctaactctagggcaatctttagcgcgcttaagaacctgcaagacaagatccggaggctggaactggaacgcatccaggcagaggaatctgtgaagactttatcacgagagaccattgagtacaagaaggtgcttgacgaacaaatccaggagagagaaaattccaaaaacgaggagtccaaacataatcaagaactgaccagccagctgcttgctgccgagaataaatgtaacctccttgagaaacaactcgaatatatgcgtaacatgataaagcatgccgagatggagcgaacctccgtactggaaaaacaagtgtctctagagagggaacggcagcacgaccaaacccatgtacagtcacagttagaaaaactggacctgttggagcaggaatacaataagctgacaacaatgcaggccctagccgagaagaagatgcaggagctggaagcaaagcttcatgaagaggagcaggagagaaagcgcatgcaagccaaagccgctgaactccagaccggcctcgaaactaacagactaatctttgaagacaaagcaacgccgtgtgtgcccaacgcaagacgcataaaaaagaagaaaagcaagccgccagaaaagaagagtagcaggaattattttggagcccaaccccattaccgcctgtgcctcggcgacatgccattcgtggccggtaagtccacatctccaagccatgcagtggtcgctaacgtgcaactggtactgcatctgatgaaacaacatagcaaagctctctgtaacgaccgcgtgattaattccatacctctggctaagcaagtgtcgtcccggggtggaaagagtaaaaagttgtccgtgacacccccaagtagcaatggaattaacgaggaattgtcggaggtgctgcagaccctgcaagacgaatttggtcaaatgtctttcgaccatcagcagttggccaaactcatccaagagagtcccaccgtcgaactcaaagacaagctggaatgtgaactggaagcgcttgtagggaggatggaggccaaagcgaatcagatcacgaaggtgaggaagtaccaagcacagttggaaaaacagaaactagaaaagcagaaaaaagagttgaaagccaccaagaagacactggatgaagagcgcaacagcagcagtcggagtggtatcaccggaactactaacaagaaggatttcatgaaactccgaccaggggagaagaggcgcaagaatctgcagctgttgaaagatatgcagtcgatccagaatagcctgcagtcgagctcactctgctgggattattag

SEQ ID NO: 86627 - DNA, 3178 bp, Artificial Sequence
  derived and/or modified sequence
gattggctaggaaagacgtccgttaggacgtgttgccctttctgtgtaagctgtgagcgtaggcggccctgagggggtgtgttgcaggggtttccaagcccagcaccagcacccttgcccttttccatcaggggttcagcctagggtccccgctggtgggcggctcccgagtcttggagaagagcacgagaacctagaccgcccccgaagtgcggagaccccctgggcaggctgaaagatggcggcggcgtctgtctctgcggcttctggttctcacttgtcgaacagctttgctgagccatcaaggtctaatggaagcatggttcggcattcttcatctccatatgtagtatatccttcggataagcctttccttaatagtgatctacgacgctccccaagtaagcctacacttgcctatccagaaagcaacagcagagccatattttctgctcttaagaatcttcaagataagattcgacgcttggaacttgagaggattcaggcagaagaaagtgtgaaaaccttgtctagagaaacaattgaatataagaaagtactggatgaacagatacaagaaagggagaattcaaagaatgaggaatcaaagcacaatcaagaactgacatctcagttgttagctgcagaaaataaatgcaatctattagaaaaacaattggaatacatgcgaaatatgataaagcatgccgaaatggagaggacatctgtcttagagaaacaagtttccctagaaagagaacgacaacatgatcaaacacatgttcagagccaacttgaaaaattggatcttcttgaacaggagtataacaaacttaccacaatgcaggcccttgcagaaaaaaaaatgcaagagttggaagcaaaactccatgaagaagaacaggaaaggaaacgcatgcaagctaaggcagctgagttgcagactggtctagaaacaaatagacttatctttgaagataaggcaactccgtgtgttcccaatgcaagaagaattaaaaaaaagaagtcaaaaccaccagaaaagaaaagttctaggaactattttggtgcacaaccacattatagattatgcttgggtgatatgccatttgtagctgggaagtccacaagccctagccatgccgtggtagccaatgttcagcttgtcttgcatctaatgaagcaacacagtaaagctttgtgcaatgatcgagtcatcaacagtattcctttggcaaagcaagtatcttcacgaggtggtaaaagtaagaagttgtcagtaacacctccctcctccaacggtattaatgaggagttgtcagaagtcttacagactttacaggatgaatttgggcaaatgagctttgatcaccagcagcttgcaaaacttatccaggagtcgccaaccgttgaactgaaagacaagttggagtgtgaattggaggcattagtgggaaggatggaagcaaaagccaaccaaataactaaagttcgaaaataccaagcccagctggagaaacagaagttagagaagcagaagaaggaattaaaagctaccaaaaagactcttgatgaagaaagaaacagcagcagccgttctggaatcacagggaccacaaataagaaagattttatgaaactgagacctggagaaaaaaggagaaaaaatcttcagttattgaaggacatgcaaagcatacagaattcattacaaagcagtagtttgtgttgggattactgactcataaccaggtcagaaattttattcagataatctgtacctcatcaatcagatgatgacaatttacttcccaggtctcatactcacttatgttggaattaattaatagcaggtgttaaaggacccaggcttcattacacaggcttttcatgtatgcaggatgactcaatgttaaagcatttaaatggaaaccaggggagttttaaagcccgagaaaccacacataatcttttgttgagatgagtttgctgtactgacgctgcactttgtaaacagattaccagttttttacttgtgggtgtgattttttaaaatagttctttatatataattaaaattaggtttaaattttcaaaatatgagactatgctataggcagtgcttgcttgaaaagtctcatttttaaatctccctggcatgaggtgcccacttcccctttccaaagcaaccattaaacatactttgtttctactattggtggagtttttctatatttaaaaatacatatatatttcagaggatttttattttgctttttggcatttcagactttgatcagtgttaagtgcacttgtattgctttttaatctgttaattttttaaagacccaagcagtcattttgagttatatctataaaaattataaaaggatttttgaaagtataaacaaattgtcagtgaaataaatgagattttggaataaagtgagaatgggagaagggatatgttgtgagcatataccttcacagttcttaatacctgttttgtaatcatgatattcagtcaaggcattatggtttttaatcttgaaacttagagaaccctttgaatatttgcttttactggtgtacagtatgagtggaatataaactgtacacataattatcatgttgatataaatcataatttcaactagatcaagacatgttaaccttttataaatttaaagtcaataaagcacctttttaaaggaaacactgcaactttccttaacagcctgttaataaaggctttgtgacaagctctcaaaaaatgcatttctaaataggaggacatcaatgtattgatgaagagaaaaaactagtacttagttgccacactcatgcttacatagaaagagagcccaagaatattagatttcctcatgatacaagatactacagtaacaggctttaatttaggatccttaagattttggggtattatttgtgactctcctgaaattgtaaacttgtgcttctgtgtccagttttctaatgagtaggttcgtagcttgattgaattaataattgtgagcccatagacacaagggaagtgagaaacagtgctctggtgacatgataaatatatgtgtcaaccaccatttcagctattaaaaactcctgttatctccttgtttgaatttcaggtcattaaattgtataaccatcatttgaa

SEQ ID NO: 86628 - DNA, 2910 bp, Artificial Sequence
  derived and/or modified sequence
atgttgaccagaattgataacagctttgctgagccatcaaggtctaatggaagcatggttcggcattcttcatctccatatgtagtatatccttcggataagcctttccttaatagtgatctacgacgctccccaagtaagcctacacttgcctatccagaaagcaacagcagagccatattttctgctcttaagaatcttcaagataagattcgacgcttggaacttgagaggattcaggcagaagaaagtgtgaaaaccttgtctagagaaacaattgaatataagaaagtactggatgaacagatacaagaaagggagaattcaaagaatgaggaatcaaagcacaatcaagaactgacatctcagttgttagctgcagaaaataaatgcaatctattagaaaaacaattggaatacatgcgaaatatgataaagcatgccgaaatggagaggacatctgtcttagagaaacaagtttccctagaaagagaacgacaacatgatcaaacacatgttcagagccaacttgaaaaattggatcttcttgaacaggagtataacaaacttaccacaatgcaggcccttgcagaaaaaaaaatgcaagagttggaagcaaaactccatgaagaagaacaggaaaggaaacgcatgcaagctaaggcagctgagttgcagactggtctagaaacaaatagacttatctttgaagataaggcaactccgtgtgttcccaatgcaagaagaattaaaaaaaagaagtcaaaaccaccagaaaagaaaagttctaggaactattttggtgcacaaccacattatagattatgcttgggtgatatgccatttgtagctgggaagtccacaagccctagccatgccgtggtagccaatgttcagcttgtcttgcatctaatgaagcaacacagtaaagctttgtgcaatgatcgagtcatcaacagtattcctttggcaaagcaagtatcttcacgaggtggtaaaagtaagaagttgtcagtaacacctccctcctccaacggtattaatgaggagttgtcagaagtcttacagactttacaggatgaatttgggcaaatgagctttgatcaccagcagcttgcaaaacttatccaggagtcgccaaccgttgaactgaaagacaagttggagtgtgaattggaggcattagtgggaaggatggaagcaaaagccaaccaaataactaaagttcgaaaataccaagcccagctggagaaacagaagttagagaagcagaagaaggaattaaaagctaccaaaaagactcttgatgaagaaagaaacagcagcagccgttctggaatcacagggaccacaaataagaaagattttatgaaactgagacctggagaaaaaaggagaaaaaatcttcagttattgaaggacatgcaaagcatacagaattcattacaaagcagtagtttgtgttgggattactgactcataaccaggtcagaaattttattcagataatctgtacctcatcaatcagatgatgacaatttacttcccaggtctcatactcacttatgttggaattaattaatagcaggtgttaaaggacccaggcttcattacacaggcttttcatgtatgcaggatgactcaatgttaaagcatttaaatggaaaccaggggagttttaaagcccgagaaaccacacataatcttttgttgagatgagtttgctgtactgacgctgcactttgtaaacagattaccagttttttacttgtgggtgtgattttttaaaatagttctttatatataattaaaattaggtttaaattttcaaaatatgagactatgctataggcagtgcttgcttgaaaagtctcatttttaaatctccctggcatgaggtgcccacttcccctttccaaagcaaccattaaacatactttgtttctactattggtggagtttttctatatttaaaaatacatatatatttcagaggatttttattttgctttttggcatttcagactttgatcagtgttaagtgcacttgtattgctttttaatctgttaattttttaaagacccaagcagtcattttgagttatatctataaaaattataaaaggatttttgaaagtataaacaaattgtcagtgaaataaatgagattttggaataaagtgagaatgggagaagggatatgttgtgagcatataccttcacagttcttaatacctgttttgtaatcatgatattcagtcaaggcattatggtttttaatcttgaaacttagagaaccctttgaatatttgcttttactggtgtacagtatgagtggaatataaactgtacacataattatcatgttgatataaatcataatttcaactagatcaagacatgttaaccttttataaatttaaagtcaataaagcacctttttaaaggaaacactgcaactttccttaacagcctgttaataaaggctttgtgacaagctctcaaaaaatgcatttctaaataggaggacatcaatgtattgatgaagagaaaaaactagtacttagttgccacactcatgcttacatagaaagagagcccaagaatattagatttcctcatgatacaagatactacagtaacaggctttaatttaggatccttaagattttggggtattatttgtgactctcctgaaattgtaaacttgtgcttctgtgtccagttttctaatgagtaggttcgtagcttgattgaattaataattgtgagcccatagacacaagggaagtgagaaacagtgctctggtgacatgataaatatatgtgtcaaccaccatttcagctattaaaaactcctgttatctccttgtttgaatttcaggtcattaaattgtataaccatcattt

SEQ ID NO: 86629 - DNA, 1503 bp, Artificial Sequence
  derived and/or modified sequence
atggccgccgccagcgtgagcgccgccagcggcagccacctgagcaacagcttcgccgagcccagcagaagcaacggcagcatggtgagacacagcagcagcccctacgtggtgtaccccagcgacaagcccttcctgaacagcgacctgagaagaagccccagcaagcccaccctggcctaccccgagagcaacagcagagccatcttcagcgccctgaagaacctgcaggacaagatcagaagactggagctggagagaatccaggccgaggagagcgtgaagaccctgagcagagagaccatcgagtacaagaaggtgctggacgagcagatccaggagagagagaacagcaagaacgaggagagcaagcacaaccaggagctgaccagccagctgctggccgccgagaacaagtgcaacctgctggagaagcagctggagtacatgagaaacatgatcaagcacgccgagatggagagaaccagcgtgctggagaagcaggtgagcctggagagagagagacagcacgaccagacccacgtgcagagccagctggagaagctggacctgctggagcaggagtacaacaagctgaccaccatgcaggccctggccgagaagaagatgcaggagctggaggccaagctgcacgaggaggagcaggagagaaagagaatgcaggccaaggccgccgagctgcagaccggcctggagaccaacagactgatcttcgaggacaaggccaccccctgcgtgcccaacgccagaagaatcaagaagaagaagagcaagccccccgagaagaagagcagcagaaactacttcggcgcccagccccactacagactgtgcctgggcgacatgcccttcgtggccggcaagagcaccagccccagccacgccgtggtggccaacgtgcagctggtgctgcacctgatgaagcagcacagcaaggccctgtgcaacgacagagtgatcaacagcatccccctggccaagcaggtgagcagcagaggcggcaagagcaagaagctgagcgtgaccccccccagcagcaacggcatcaacgaggagctgagcgaggtgctgcagaccctgcaggacgagttcggccagatgagcttcgaccaccagcagctggccaagctgatccaggagagccccaccgtggagctgaaggacaagctggagtgcgagctggaggccctggtgggcagaatggaggccaaggccaaccagatcaccaaggtgagaaagtaccaggcccagctggagaagcagaagctggagaagcagaagaaggagctgaaggccaccaagaagaccctggacgaggagagaaacagcagcagcagaagcggcatcaccggcaccaccaacaagaaggacttcatgaagctgagacccggcgagaagagaagaaagaacctgcagctgctgaaggacatgcagagcatccagaacagcctgcagagcagcagcctgtgctgggactactag

SEQ ID NO: 86630 - DNA, 1476 bp, Artificial Sequence
  derived and/or modified sequence
atgctgaccagaatcgacaacagcttcgccgagcccagcagaagcaacggcagcatggtgagacacagcagcagcccctacgtggtgtaccccagcgacaagcccttcctgaacagcgacctgagaagaagccccagcaagcccaccctggcctaccccgagagcaacagcagagccatcttcagcgccctgaagaacctgcaggacaagatcagaagactggagctggagagaatccaggccgaggagagcgtgaagaccctgagcagagagaccatcgagtacaagaaggtgctggacgagcagatccaggagagagagaacagcaagaacgaggagagcaagcacaaccaggagctgaccagccagctgctggccgccgagaacaagtgcaacctgctggagaagcagctggagtacatgagaaacatgatcaagcacgccgagatggagagaaccagcgtgctggagaagcaggtgagcctggagagagagagacagcacgaccagacccacgtgcagagccagctggagaagctggacctgctggagcaggagtacaacaagctgaccaccatgcaggccctggccgagaagaagatgcaggagctggaggccaagctgcacgaggaggagcaggagagaaagagaatgcaggccaaggccgccgagctgcagaccggcctggagaccaacagactgatcttcgaggacaaggccaccccctgcgtgcccaacgccagaagaatcaagaagaagaagagcaagccccccgagaagaagagcagcagaaactacttcggcgcccagccccactacagactgtgcctgggcgacatgcccttcgtggccggcaagagcaccagccccagccacgccgtggtggccaacgtgcagctggtgctgcacctgatgaagcagcacagcaaggccctgtgcaacgacagagtgatcaacagcatccccctggccaagcaggtgagcagcagaggcggcaagagcaagaagctgagcgtgaccccccccagcagcaacggcatcaacgaggagctgagcgaggtgctgcagaccctgcaggacgagttcggccagatgagcttcgaccaccagcagctggccaagctgatccaggagagccccaccgtggagctgaaggacaagctggagtgcgagctggaggccctggtgggcagaatggaggccaaggccaaccagatcaccaaggtgagaaagtaccaggcccagctggagaagcagaagctggagaagcagaagaaggagctgaaggccaccaagaagaccctggacgaggagagaaacagcagcagcagaagcggcatcaccggcaccaccaacaagaaggacttcatgaagctgagacccggcgagaagagaagaaagaacctgcagctgctgaaggacatgcagagcatccagaacagcctgcagagcagcagcctgtgctgggactactag

SEQ ID NO: 86631 - protein, 474 aa, Artificial Sequence
  derived and/or modified sequence
MAAASVSAASGSHLSNSFAEPSRSNGSMVRHSSSPYVVYPSDKPFLNSDLRRSPSKPTLAYPESNSRAIFSALKNLQDKIRRLELERIQAEESVKTLSRETIEYKKVLDEQIQERENSKNEESKHNQELTSQLLAAENKCNLLEKQLEYMRNMIKHAEMERTSVLEKQVSLERERQHDQTHVQSQLEKLDLLEQEYNKLTTMQALAEKKMQELEAKLHEEEQERKRMQAKAAELQTGLETNRLIFEDKATPCVPNARRIKKKKSKPPEKSTSPSHAVVANVQLVLHLMKQHSKALCNDRVINSIPLAKQVSSRGGKSKKLSVTPPSSNGINEELSEVLQTLQDEFGQMSFDHQQLAKLIQESPTVELKDKLECELEALVGRMEAKANQITKVRKYQAQLEKQKLEKQKKELKATKKTLDEERNSSSRSGITGTTNKKDFMKLRPGEKRRKNLQLLKDMQSIQNSLQSSSLCWDY

SEQ ID NO: 86632 - protein, 270 aa, Artificial Sequence
  derived and/or modified sequence
MAAASVSAASGSHLSNSFAEPSRSNGSMVRHSSSPYVVYPSDKPFLNSDLRRSPSKPTLAYPESNSRAIFSALKNLQDKIRRLELERIQAEESVKTLSRETIEYKKVLDEQIQERENSKNEESKHNQELTSQLLAAENKCNLLEKQLEYMRNMIKHAEMERTSVLEKQVSLERERQHDQTHVQSQLEKLDLLEQEYNKLTTMQALAEKKMQELEAKLHEEEQERKRMQAKAAELQTGLETNRLIFEDKATPCVPNARRIKKKKSKPPEKV

SEQ ID NO: 86633 - DNA, 1425 bp, Artificial Sequence
  derived and/or modified sequence
atggccgcagcctctgtgagcgctgccagcggttcccatctttctaattcctttgctgaaccatcccggtctaatggatcaatggttagacattcttcctccccttacgtcgtttacccctccgataaaccattcttaaattcagacctcaggaggtctccctctaagcctactctagcatacccagagtctaatagtagggccattttctctgctcttaagaacctccaagacaagatcaggcggctcgaacttgagcgcattcaggccgaagaaagtgttaaaacacttagtagggagaccatcgagtacaagaaagtgctggatgaacagatccaagagagggagaacagcaagaacgaggagagtaagcataaccaagagctgactagccaactgctcgccgccgaaaacaagtgcaatttactggagaagcagttagaatatatgaggaacatgataaaacatgcggagatggaaaggacaagtgtgcttgagaagcaggtcagccttgagcgcgagagacaacatgaccagacacacgtccagagccagcttgaaaaactagacttgttagagcaggagtacaacaagctgaccaccatgcaggcgctggccgagaagaagatgcaggagctcgaagccaaactgcacgaggaggagcaagaaagaaagcgcatgcaggcgaaggctgccgagctgcagacaggcctggaaactaacagattaatttttgaagataaggccaccccttgtgtgcctaatgctagaagaatcaagaagaaaaaatctaagccaccggagaaatccacaagtccatctcatgccgtggttgctaatgtccagcttgtgctccacctcatgaagcagcactcgaaggcgttatgcaatgatagggtgatcaacagcatccccctggcaaagcaggtgtctagtcggggcgggaagagcaagaaactgtccgtgactccaccttcatctaatggcattaatgaagagttgagcgaagtcctccagactctgcaggacgagttcggccagatgagctttgaccatcaacagctggctaaactgatccaggagagccccacggtggaactgaaggacaaactggagtgtgagctggaagcacttgtgggaagaatggaagccaaagctaaccaaatcactaaggtgcgcaagtatcaagcgcagctcgagaagcagaaactcgagaaacagaaaaaagagttgaaggccacaaagaagacccttgacgaggaacgcaactcaagttcgcggagtggaataacaggcacaacgaacaagaaagatttcatgaaactgcgccccggcgagaagcgaagaaaaaatctccagctcctcaaagatatgcagtccatccagaacagcctacaatcctcctcactgtgttgggattactag

SEQ ID NO: 86634 - DNA, 813 bp, Artificial Sequence
  derived and/or modified sequence
atggccgccgctagcgtatccgcagcttccgggtcccatcttagtaattcctttgctgagccaagccgcagcaacggaagcatggtcagacatagttcatctccgtacgtggtgtacccatccgacaagccattcctgaattcagacctgcggagatctcctagcaagccaacccttgcctacccagagagcaactccagagcaattttttcagctctcaagaatctgcaggataagatcagacgcctggagctggaacggattcaagccgaagagtctgtcaaaacactcagtagagagacgatcgaatacaaaaaagtcttggacgaacagatccaggagcgagaaaactctaagaatgaagaatctaagcacaaccaggaactgaccagccagctcctggccgcggagaacaaatgtaacttgctggaaaagcagctggagtacatgaggaatatgatcaaacacgctgagatggaacggacgagcgtccttgagaagcaggtgtccctggaacgtgagagacagcacgaccagactcatgtacagagccagctggagaagctggatttactggagcaggaatacaacaaactcacgacaatgcaggcactcgccgaaaagaagatgcaggaattggaggcaaagcttcatgaagaggagcaggagaggaagagaatgcaagcaaaggctgccgaactgcagacaggcctggagactaacagactgatcttcgaggacaaggctactccatgtgtgcctaatgcacggcgaataaagaagaaaaaaagtaaacctcctgagaaagtctag

SEQ ID NO: 86635 - DNA, 1425 bp, Artificial Sequence
  derived and/or modified sequence
atggctgctgcctctgtgtctgctgccagcggcagccacctgagcaacagctttgctgagcccagccgcagcaatggctccatggtgcgccacagcagcagcccctacgtggtgtaccccagcgacaagcccttcctgaacagcgacctgcggcgcagccccagcaagcccaccctggcctacccagagagcaacagccgggccatcttcagcgccctgaagaacctgcaggacaagatccggcggctggagctggagcgcatccaggccgaggagagcgtgaagaccctgagccgggagaccatcgagtacaagaaggtgctggatgagcagatccaggagcgggagaacagcaagaatgaggagagcaagcacaaccaggagctgaccagccagctgctggccgctgagaacaagtgcaacctgctggagaagcagctggagtacatgaggaacatgatcaagcatgctgagatggagaggacctctgtgctggagaagcaggtgtccctggagcgggagcggcagcacgaccagacccacgtgcagagccagctggagaagctggacctgctggagcaggagtacaacaagctgaccaccatgcaggccctggccgagaagaagatgcaggagctggaggccaagctgcacgaggaggagcaggagaggaagaggatgcaggccaaggctgctgagctgcagacaggcctggagaccaacagactcatctttgaggacaaggccaccccctgtgtgcccaatgcccggcgcatcaagaagaagaagagcaagcccccagagaagagcaccagccccagccatgctgtggtggccaacgtgcagctggtgctgcacctgatgaagcagcacagcaaggccctgtgcaatgacagagtcatcaacagcatccccctggccaagcaggtgagcagccggggcggcaagagcaagaagctgtctgtgaccccacccagcagcaatggcatcaatgaggagctgtctgaggtgctgcagaccctgcaggatgaatttggccagatgagctttgaccaccagcagctggccaagctgatccaggagagccccaccgtggagctgaaggacaagctggagtgtgagctggaggccctggtgggccgcatggaggccaaggccaaccagatcaccaaggtgaggaagtaccaggcccagctggagaagcagaagctggagaagcagaagaaggagctgaaggccaccaagaagaccctggatgaggagaggaacagcagcagccgcagcggcatcaccggcaccaccaacaagaaggacttcatgaagctgcggcctggagagaagaggaggaagaacctgcagctgctgaaggacatgcagagcatccagaacagcctgcagagcagcagcctgtgctgggactactag

SEQ ID NO: 86636 - DNA, 813 bp, Artificial Sequence
  derived and/or modified sequence
atggctgctgcctctgtgtctgctgccagcggcagccacctgagcaacagctttgctgagcccagccgcagcaatggctccatggtgcgccacagcagcagcccctacgtggtgtaccccagcgacaagcccttcctgaacagcgacctgcggcgcagccccagcaagcccaccctggcctacccagagagcaacagccgggccatcttcagcgccctgaagaacctgcaggacaagatccggcggctggagctggagcgcatccaggccgaggagagcgtgaagaccctgagccgggagaccatcgagtacaagaaggtgctggatgagcagatccaggagcgggagaacagcaagaatgaggagagcaagcacaaccaggagctgaccagccagctgctggccgctgagaacaagtgcaacctgctggagaagcagctggagtacatgaggaacatgatcaagcatgctgagatggagaggacctctgtgctggagaagcaggtgtccctggagcgggagcggcagcacgaccagacccacgtgcagagccagctggagaagctggacctgctggagcaggagtacaacaagctgaccaccatgcaggccctggccgagaagaagatgcaggagctggaggccaagctgcacgaggaggagcaggagaggaagaggatgcaggccaaggctgctgagctgcagacaggcctggagaccaacagactcatctttgaggacaaggccaccccctgtgtgcccaatgcccggcgcatcaagaagaagaagagcaagcccccagagaaggtgtag

SEQ ID NO: 86637 - DNA, 1425 bp, Artificial Sequence
  derived and/or modified sequence
atggccgccgccagcgtgagcgccgccagcggcagccacctgagcaactcatttgccgaaccatccagaagcaatggctccatggtgaggcattcttcctcaccttacgtggtgtacccatctgataaaccttttctaaacagcgacttgcgccggagtccgtccaagcccaccctggcttaccctgagagcaatagcagggccatattttcggccctgaagaaccttcaagataaaataagaagactggaactggaaagaatccaagctgaggaatctgtgaaaactctgagcagagagacaatagaatacaagaaagtgcttgacgagcagatccaggagagagagaactcaaagaatgaagagagcaagcataaccaggaacttacatcccagctactggccgcagaaaacaaatgcaaccttctagagaaacaactggagtacatgagaaacatgatcaagcacgccgagatggagcgcacctcagtccttgagaaacaggtgagcctggagagagaacgacagcacgaccagacgcatgtacagtcacagcttgagaaactggaccttttagagcaggagtataataaactcaccactatgcaggcccttgccgaaaaaaagatgcaggaactggaggccaagctccacgaagaggaacaagagaggaagagaatgcaggcgaaggccgccgaactgcaaaccggcctcgaaaccaacaggctcatttttgaggataaagcgacaccttgtgtgcctaatgcccgacgcatcaaaaaaaagaagtcaaagcctccagaaaagtccacatcaccgtctcatgctgtggtggcgaacgtgcaacttgtcttacacctgatgaaacagcattctaaggccttatgcaatgatcgcgtgattaactcaatccccttagcaaagcaggtcagctctaggggtgggaagtcaaaaaagctgagtgtgactcccccttcttccaatggaattaacgaggagcttagtgaggtcttacagacgcttcaggacgagttcgggcaaatgtcatttgatcaccagcagctggccaagctgattcaagagagtcctaccgtcgagctcaaagacaagctggagtgcgagttggaagcccttgtaggacggatggaagccaaagccaaccagatcactaaagtcagaaaatatcaggcccagttagaaaagcagaagttagagaagcagaaaaaagagctgaaggccactaagaagacattggacgaggagaggaactcgtcctctcggagcggaatcacgggcaccactaataagaaggattttatgaaactacgtccaggggaaaaacgccgcaagaacctgcagctcctgaaggatatgcagtctatccagaattccctccaatcttcaagtctctgctgggactattag

SEQ ID NO: 86638 - DNA, 813 bp, Artificial Sequence
  derived and/or modified sequence
atggccgccgccagcgtgagcgccgccagcggcagccacctgagcaattcgttcgctgagccaagtcggtctaacggctcgatggtcaggcacagctccagcccttacgtggtctatccaagcgacaaaccctttcttaatagcgatctgcggcggtccccaagcaaaccaacactggcataccccgagtcaaactctcgggcaatatttagcgctcttaaaaatctccaggataaaattagacggctcgagcttgaaaggattcaggctgaggaaagtgtcaaaactctttccagagaaaccatcgaatacaagaaggtcttggatgagcaaattcaggaacgtgagaattccaaaaatgaagagagcaagcacaatcaggaactcacatcccagctgctggccgctgaaaataagtgcaatctgctggagaagcaactggaatacatgcgcaacatgattaagcacgcggagatggagaggacgagcgttttagagaagcaggtctctttggaaagggaacgccagcacgatcaaacccacgtgcaatcgcagctcgaaaagctagacctacttgagcaggagtacaataagctgacaactatgcaggcgctcgctgaaaaaaagatgcaggaactcgaggctaagcttcatgaagaggaacaggagaggaaaagaatgcaggccaaggcagcagaattacagaccgggcttgagaccaatagactgattttcgaagacaaagcaactccttgcgtacctaatgcacgcagaatcaaaaagaaaaagtccaaaccccctgaaaaagtatag

SEQ ID NO: 86639 - DNA, 1425 bp, Artificial Sequence
  derived and/or modified sequence
atggcggctgcttcggtgtccgccgcttccggtagtcacctgtcgaactcgttcgcagagcctagcagaagcaacggttctatggtgagacacagttcctccccctacgtagtgtatcctagtgataagccatttctgaattcagatctccgtcgcagccctagcaagcctactctcgcttacccagagtctaatagccgagcaattttcagtgccttgaaaaacttgcaagataagattaggcgcctggagctcgagcgcatccaggccgaggagtcagtgaaaaccctgagcagagaaactatcgagtataagaaagtgctggatgaacagattcaggagcgtgagaactctaagaatgaagaatccaaacataaccaggagctgacctcgcaactcttagcggctgaaaataagtgcaacctgctcgaaaagcagctggaatatatgcgcaatatgattaaacatgccgaaatggagcgaaccagtgtgcttgagaaacaagtttcactcgagagagagcgtcagcatgaccagacacacgttcaaagccaactggagaaactcgaccttttggaacaggaatacaacaagctcactacaatgcaggctctggccgaaaagaagatgcaggagctggaggcgaagctccacgaagaagaacaggagcgcaagcgaatgcaggcaaaagccgcagagctccagaccggactggaaacgaatcgcctaatttttgaagataaagccaccccctgcgtacctaatgccagaaggataaagaagaaaaaaagcaagccacccgaaaaatctacctctccctcccatgcagtagttgcaaacgtgcagttagttcttcacctgatgaagcagcacagtaaggccctctgcaatgaccgggtaataaatagcataccactggctaagcaagtgtcatcaagaggcggaaaaagtaaaaaactctccgtcaccccacctagttcaaacgggatcaacgaagaactgtccgaggttttgcaaacactgcaagacgaatttgggcagatgtcctttgaccatcagcagttagcaaaactcatccaggagtcccccacagtggaactgaaggataagctggagtgcgagctggaagccctagttggcaggatggaagccaaggccaatcagattaccaaggtgcggaaatatcaggcccagttggagaaacagaaacttgaaaaacagaaaaaagagctaaaggctactaagaagacactggacgaggagcggaatagctcctccaggtccggtatcactgggactacaaataagaaggattttatgaagttacgacctggcgagaagaggagaaaaaatcttcagctactgaaggatatgcagagtatacagaatagccttcagtcttcatcgctctgttgggattactag

SEQ ID NO: 86640 - DNA, 813 bp, Artificial Sequence
  derived and/or modified sequence
atggccgctgcgagcgtctcggcagcgtccggtagtcatctgtctaattctttcgccgagccttcccgaagcaacggcagcatggtgcgtcattcatcgtccccatacgtagtttacccttcagacaaaccattcttgaatagcgatctgcgcagatctccctctaaacccaccttggcataccctgagagcaactccagagcgatcttcagcgcactcaagaacttacaagataagatccgaaggttagagctggagcgaatccaggccgaggaaagtgtgaagaccctgtccagagaaacaattgaatataagaaagtgctcgatgagcagatccaagaaagggagaatagtaagaacgaagaatctaaacataaccaagagttgacatctcagctacttgcggctgagaacaagtgtaacctcctagaaaagcaattggagtacatgcggaacatgatcaaacacgccgagatggaacgaacatcggtgctggaaaaacaggtctccctggaacgggaaagacagcatgatcagactcacgtgcagagccagctggagaaactcgacctgcttgagcaagagtacaataagctgactaccatgcaggcattggccgaaaaaaaaatgcaagaactggaagccaagcttcatgaagaagagcaggagcgaaagcgcatgcaggcaaaggccgctgaactgcaaacgggactcgaaaccaatagactgatctttgaagataaggctactccctgtgtgcctaatgctaggaggattaaaaagaagaaatcaaagccgcctgagaaggtttag

SEQ ID NO: 86641 - DNA, 3080 bp, Artificial Sequence
  derived and/or modified sequence
gtccgttaggacgtgttgccctttctgtgtaagctgtgagcgtaggcggccctgagggggtgtgttgcaggggtttccaagcccagcaccagcacccttgcccttttccatcaggggttcagcctagggtccccgctggtgggcggctcccgagtcttggagaagagcacgagaacctagaccgcccccgaagtgcggagaccccctgggcaggctgaaagatggcggcggcgtctgtctctgcggcttctggttctcacttgtcgaacagctttgctgagccatcaaggtctaatggaagcatggttcggcattcttcatctccatatgtagtatatccttcggataagcctttccttaatagtgatctacgacgctccccaagtaagcctacacttgcctatccagaaagcaacagcagagccatattttctgctcttaagaatcttcaagataagattcgacgcttggaacttgagaggattcaggcagaagaaagtgtgaaaaccttgtctagagaaacaattgaatataagaaagtactggatgaacagatacaagaaagggagaattcaaagaatgaggaatcaaagcacaatcaagaactgacatctcagttgttagctgcagaaaataaatgcaatctattagaaaaacaattggaatacatgcgaaatatgataaagcatgccgaaatggagaggacatctgtcttagagaaacaagtttccctagaaagagaacgacaacatgatcaaacacatgttcagagccaacttgaaaaattggatcttcttgaacaggagtataacaaacttaccacaatgcaggcccttgcagaaaaaaaaatgcaagagttggaagcaaaactccatgaagaagaacaggaaaggaaacgcatgcaagctaaggcagctgagttgcagactggtctagaaacaaatagacttatctttgaagataaggcaactccgtgtgttcccaatgcaagaagaattaaaaaaaagaagtcaaaaccaccagaaaagtccacaagccctagccatgccgtggtagccaatgttcagcttgtcttgcatctaatgaagcaacacagtaaagctttgtgcaatgatcgagtcatcaacagtattcctttggcaaagcaagtatcttcacgaggtggtaaaagtaagaagttgtcagtaacacctccctcctccaacggtattaatgaggagttgtcagaagtcttacagactttacaggatgaatttgggcaaatgagctttgatcaccagcagcttgcaaaacttatccaggagtcgccaaccgttgaactgaaagacaagttggagtgtgaattggaggcattagtgggaaggatggaagcaaaagccaaccaaataactaaagttcgaaaataccaagcccagctggagaaacagaagttagagaagcagaagaaggaattaaaagctaccaaaaagactcttgatgaagaaagaaacagcagcagccgttctggaatcacagggaccacaaataagaaagattttatgaaactgagacctggagaaaaaaggagaaaaaatcttcagttattgaaggacatgcaaagcatacagaattcattacaaagcagtagtttgtgttgggattactgactcataaccaggtcagaaattttattcagataatctgtacctcatcaatcagatgatgacaatttacttcccaggtctcatactcacttatgttggaattaattaatagcaggtgttaaaggacccaggcttcattacacaggcttttcatgtatgcaggatgactcaatgttaaagcatttaaatggaaaccaggggagttttaaagcccgagaaaccacacataatcttttgttgagatgagtttgctgtactgacgctgcactttgtaaacagattaccagttttttacttgtgggtgtgattttttaaaatagttctttatatataattaaaattaggtttaaattttcaaaatatgagactatgctataggcagtgcttgcttgaaaagtctcatttttaaatctccctggcatgaggtgcccacttcccctttccaaagcaaccattaaacatactttgtttctactattggtggagtttttctatatttaaaaatacatatatatttcagaggatttttattttgctttttggcatttcagactttgatcagtgttaagtgcacttgtattgctttttaatctgttaattttttaaagacccaagcagtcattttgagttatatctataaaaattataaaaggatttttgaaagtataaacaaattgtcagtgaaataaatgagattttggaataaagtgagaatgggagaagggatatgttgtgagcatataccttcacagttcttaatacctgttttgtaatcatgatattcagtcaaggcattatggtttttaatcttgaaacttagagaaccctttgaatatttgcttttactggtgtacagtatgagtggaatataaactgtacacataattatcatgttgatataaatcataatttcaactagatcaagacatgttaaccttttataaatttaaagtcaataaagcacctttttaaaggaaacactgcaactttccttaacagcctgttaataaaggctttgtgacaagctctcaaaaaatgcatttctaaataggaggacatcaatgtattgatgaagagaaaaaactagtacttagttgccacactcatgcttacatagaaagagagcccaagaatattagatttcctcatgatacaagatactacagtaacaggctttaatttaggatccttaagattttggggtattatttgtgactctcctgaaattgtaaacttgtgcttctgtgtccagttttctaatgagtaggttcgtagcttgattgaattaataattgtgagcccatagacacaagggaagtgagaaacagtgctctggtgacatgataaatatatgtgtcaaccaccatttcagctattaaaaactcctgttatctccttgtttgaatttcaggtcattaaattgtataaccatcattt

SEQ ID NO: 86642 - DNA, 2084 bp, Artificial Sequence
  derived and/or modified sequence
ccgcccccgaagtgcggagaccccctgggcaggctgaaagatggcggcggcgtctgtctctgcggcttctggttctcacttgtcgaacagctttgctgagccatcaaggtctaatggaagcatggttcggcattcttcatctccatatgtagtatatccttcggataagcctttccttaatagtgatctacgacgctccccaagtaagcctacacttgcctatccagaaagcaacagcagagccatattttctgctcttaagaatcttcaagataagattcgacgcttggaacttgagaggattcaggcagaagaaagtgtgaaaaccttgtctagagaaacaattgaatataagaaagtactggatgaacagatacaagaaagggagaattcaaagaatgaggaatcaaagcacaatcaagaactgacatctcagttgttagctgcagaaaataaatgcaatctattagaaaaacaattggaatacatgcgaaatatgataaagcatgccgaaatggagaggacatctgtcttagagaaacaagtttccctagaaagagaacgacaacatgatcaaacacatgttcagagccaacttgaaaaattggatcttcttgaacaggagtataacaaacttaccacaatgcaggcccttgcagaaaaaaaaatgcaagagttggaagcaaaactccatgaagaagaacaggaaaggaaacgcatgcaagctaaggcagctgagttgcagactggtctagaaacaaatagacttatctttgaagataaggcaactccgtgtgttcccaatgcaagaagaattaaaaaaaagaagtcaaaaccaccagaaaaggtgtgaagacagaaccaaatcaggcaaaatgctgattacttggtatagtttatgtcaaaacacccataaactgtgtggtgtactacaaccttgagagagtaaatctttcattctcaatttcttcattcagaaggtggagataagtaatacctactcctaaatttttatcctgatagtgagaaaatatataagcattttggaactacagaacaccatacaaaattagcattattagtactgcattatcttgtgctcttacaatgttttgtgtatatgtatactgattttctacttagaatgtaactgttgttttgtcaagtgcttttttccccccagcctttcctaggctaggatatatgctaacaagtactattaggagctggcttgtgatcataatgccaactatagataaggcaagtagtagcctagtagttaactgaagtttcaagttagtcatgtatagtcagtttttattatcatgtgaataaaataaaattgttttccttttcttttcattcagaaaagttctaggaactattttggtgcacaaccacattatagattatgcttgggtgatatgccatttgtagctgggaaggtgagttggtcaaactccggattctttttatacaacattgatccctgaattaagtccctgcatctgcaagtatgtctacaaatggaaggaacatttttctgtgcctttaccagtgtgtggatcacagtgatgtgaaaatgagatgtagggaggtttttggggattagggaagcaaggaagagatggggaggataccttaaagtagataaagtatatgtggaaaggaagtgataaaacagagaccctaagttgaagaaggtgttgtttcagataggggtcaaggaaataagaaatagtatgtttgtagcattggatttttagtatcaatcctgttgagttacatttagatataggtagatattcgaataagcacgtagcacattctgcttgtcctcacatccagatcatttctaggactaattctccaagaagcagtcatacgtacacttgaatcttcagtttcttcagcacttgaatgtaaagctgtattgtcatatatcaagtactgagtgaagtgcctaaaactgtgctagttgacactactttataagctgtttgtgttgctggtggttttatatttagattccaactagattgttattctggcatcttgggaagtaaatgttcttctgaattttg

SEQ ID NO: 86643 - DNA, 1425 bp, Artificial Sequence
  derived and/or modified sequence
atggccgccgccagcgtgagcgccgccagcggcagccacctgagcaacagcttcgccgagcccagcagaagcaacggcagcatggtgagacacagcagcagcccctacgtggtgtaccccagcgacaagcccttcctgaacagcgacctgagaagaagccccagcaagcccaccctggcctaccccgagagcaacagcagagccatcttcagcgccctgaagaacctgcaggacaagatcagaagactggagctggagagaatccaggccgaggagagcgtgaagaccctgagcagagagaccatcgagtacaagaaggtgctggacgagcagatccaggagagagagaacagcaagaacgaggagagcaagcacaaccaggagctgaccagccagctgctggccgccgagaacaagtgcaacctgctggagaagcagctggagtacatgagaaacatgatcaagcacgccgagatggagagaaccagcgtgctggagaagcaggtgagcctggagagagagagacagcacgaccagacccacgtgcagagccagctggagaagctggacctgctggagcaggagtacaacaagctgaccaccatgcaggccctggccgagaagaagatgcaggagctggaggccaagctgcacgaggaggagcaggagagaaagagaatgcaggccaaggccgccgagctgcagaccggcctggagaccaacagactgatcttcgaggacaaggccaccccctgcgtgcccaacgccagaagaatcaagaagaagaagagcaagccccccgagaagagcaccagccccagccacgccgtggtggccaacgtgcagctggtgctgcacctgatgaagcagcacagcaaggccctgtgcaacgacagagtgatcaacagcatccccctggccaagcaggtgagcagcagaggcggcaagagcaagaagctgagcgtgaccccccccagcagcaacggcatcaacgaggagctgagcgaggtgctgcagaccctgcaggacgagttcggccagatgagcttcgaccaccagcagctggccaagctgatccaggagagccccaccgtggagctgaaggacaagctggagtgcgagctggaggccctggtgggcagaatggaggccaaggccaaccagatcaccaaggtgagaaagtaccaggcccagctggagaagcagaagctggagaagcagaagaaggagctgaaggccaccaagaagaccctggacgaggagagaaacagcagcagcagaagcggcatcaccggcaccaccaacaagaaggacttcatgaagctgagacccggcgagaagagaagaaagaacctgcagctgctgaaggacatgcagagcatccagaacagcctgcagagcagcagcctgtgctgggactactag

SEQ ID NO: 86644 - DNA, 813 bp, Artificial Sequence
  derived and/or modified sequence
atggccgccgccagcgtgagcgccgccagcggcagccacctgagcaacagcttcgccgagcccagcagaagcaacggcagcatggtgagacacagcagcagcccctacgtggtgtaccccagcgacaagcccttcctgaacagcgacctgagaagaagccccagcaagcccaccctggcctaccccgagagcaacagcagagccatcttcagcgccctgaagaacctgcaggacaagatcagaagactggagctggagagaatccaggccgaggagagcgtgaagaccctgagcagagagaccatcgagtacaagaaggtgctggacgagcagatccaggagagagagaacagcaagaacgaggagagcaagcacaaccaggagctgaccagccagctgctggccgccgagaacaagtgcaacctgctggagaagcagctggagtacatgagaaacatgatcaagcacgccgagatggagagaaccagcgtgctggagaagcaggtgagcctggagagagagagacagcacgaccagacccacgtgcagagccagctggagaagctggacctgctggagcaggagtacaacaagctgaccaccatgcaggccctggccgagaagaagatgcaggagctggaggccaagctgcacgaggaggagcaggagagaaagagaatgcaggccaaggccgccgagctgcagaccggcctggagaccaacagactgatcttcgaggacaaggccaccccctgcgtgcccaacgccagaagaatcaagaagaagaagagcaagccccccgagaaggtgtag

SEQ ID NO: 86645 - protein, 229 aa, Artificial Sequence
  derived and/or modified sequence
MSFLQDPSFFTMGMWSIGAGALGAAALALLLANTDVFLSKPQKAALEYLEDIDLKTLEKEPRTFKAKELWEKNGAVIMAVRRPGCFLCREEAADLSSLKSMLDQLGVPLYAVVKEHIRTEVKDFQPYFKGEIFLDEKKKFYGPQRRKMMFMGFIRLGVWYNFFRAWNGGFSGNLEGEGFILGGVFVVGSGKQGILLEHREKEFGDKVNLLSVLEAAKMIKPQTLASEKK

SEQ ID NO: 86646 - protein, 218 aa, Artificial Sequence
  derived and/or modified sequence
MGMWSIGAGALGAAALALLLANTDVFLSKPQKAALEYLEDIDLKTLEKEPRTFKAKELWEKNGAVIMAVRRPGCFLCREEAADLSSLKSMLDQLGVPLYAVVKEHIRTEVKDFQPYFKGEIFLDEKKKFYGPQRRKMMFMGFIRLGVWYNFFRAWNGGFSGNLEGEGFILGGVFVVGSGKQGILLEHREKEFGDKVNLLSVLEAAKMIKPQTLASEKK

SEQ ID NO: 86647 - DNA, 690 bp, Artificial Sequence
  derived and/or modified sequence
atgtcgtttctccaggatcccagtttctttacgatgggaatgtggtccattggcgctggagccctgggggcagccgcactggccctgctcctcgctaacacggatgtgttcctctcaaagccacagaaggccgctctggagtacctggaggatatcgatctcaaaaccctcgagaaggagccacggacttttaaggcaaaagaactttgggagaagaacggcgctgtgattatggccgttcgcagacccggatgttttctatgccgggaggaggcggctgacctgtcaagcctgaagagcatgttggaccagctgggagtacctctttacgctgtcgtcaaagagcacatccgcaccgaagtgaaggattttcagccctacttcaaaggagagatctttctggatgagaagaagaagttctatggacctcaacgtcgtaaaatgatgtttatgggattcattcgcctgggtgtgtggtacaacttttttcgtgcctggaacggcggtttctctgggaatctggagggtgaaggcttcatcctcggaggggtgtttgtggtgggttcgggaaaacaaggcattttactggagcatcgggagaaggaattcggcgataaagtgaatctgctctctgtgcttgaggcagctaaaatgattaaaccgcagacgctcgcgtcagagaagaaatag

SEQ ID NO: 86648 - DNA, 690 bp, Artificial Sequence
  derived and/or modified sequence
atgtctttcctgcaagacccctcattctttacaatgggaatgtggagcattggcgcaggggcactgggcgctgccgcactggccctgctcctcgcaaacaccgacgtgttcctcagcaaaccccagaaggccgctctggagtatctagaagacatcgacctgaagacgctggaaaaggagccacgcacatttaaagcaaaggagctgtgggagaaaaatggggctgtgattatggctgtccgacgcccagggtgtttcctctgccgtgaggaagcagcagatctgagcagcctgaaatcaatgctcgaccaattgggagtgcccctgtacgcggtcgtgaaggagcatataaggaccgaagtgaaggatttccagccctattttaagggcgaaatttttctggatgagaaaaagaagttttacggaccccagcggcgaaagatgatgtttatgggattcataagactcggcgtgtggtataatttctttagagcgtggaacggaggcttctctggtaacctggagggggaaggctttattttgggcggagtcttcgttgtgggctccggaaaacagggcatccttcttgaacaccgagaaaaggaattcggcgacaaagtaaacctgctttccgtcttagaggccgcaaagatgatcaagccgcagaccttagcaagcgagaagaaatag

SEQ ID NO: 86649 - DNA, 690 bp, Artificial Sequence
  derived and/or modified sequence
atgagcttcctgcaggatcctagctttttcactatgggtatgtggtccatcggtgccggagccctgggtgccgctgccttggccctcctattggcaaatacggatgtgttcctttcgaaacctcagaaagccgcacttgagtacctggaggatatcgacttgaaaactctagagaaagaaccacgcacatttaaggccaaagagctttgggaaaaaaacggcgctgtgattatggccgtgcggaggcccggatgttttctgtgccgggaggaagcggctgacctgtcctcacttaaaagtatgctagaccagctcggggtgcctctgtacgcagtggtcaaagaacacatcaggactgaagtcaaagacttccagccatacttcaagggagaaatttttttggacgaaaagaagaagttttacggtcctcagagacgcaagatgatgttcatgggtttcattcgcctcggagtgtggtataactttttccgggcatggaatggtgggttcagcggcaacctcgaaggcgagggatttatcctggggggtgtgttcgtggtgggatcagggaaacagggcatactcttagaacatagggagaaggagttcggcgataaagttaacttgctctctgtgcttgaggctgccaaaatgatcaagcctcagacactggcgtcagagaagaagtag

SEQ ID NO: 86650 - DNA, 690 bp, Artificial Sequence
  derived and/or modified sequence
atgtctttcctgcaggacccatccttcttcaccatggggatgtggagcatcggagccggagcattgggtgcggccgcactggctctgctcttagcgaatactgacgtgttcctatcaaaacctcagaaggccgctcttgagtacctagaagacattgacctaaaaaccctagaaaaggagccaaggacgttcaaggcaaaagaactgtgggagaagaacggagctgtaatcatggccgtacggagaccagggtgcttcctctgcagagaagaggcagccgatctgtcctcgctcaagagtatgctcgatcaactgggggttcctctgtatgctgtggttaaagaacacatcagaacagaggtgaaagatttccagccctacttcaaaggcgagatctttctggacgagaagaaaaagttctatgggccccagaggagaaaaatgatgtttatgggatttattaggctgggcgtgtggtacaatttctttcgcgcatggaacggcggcttttctggtaacctggaaggggaaggatttattctgggcggcgtattcgtagtcggatctggtaagcaaggtatcctgttagagcatagggaaaaagaatttggggataaagttaacttgttgagcgtgctggaggctgcaaagatgatcaaaccacagacactcgcctccgaaaagaagtag

SEQ ID NO: 86651 - DNA, 690 bp, Artificial Sequence
  derived and/or modified sequence
atgagctttctgcaagacccctcattttttacaatggggatgtggtccatcggagccggggccctgggcgccgccgcattggccctcctgctggctaacaccgacgttttcttgtccaaacctcagaaagccgcgctcgaatacctggaggacattgatctgaagaccctcgagaaagaacctagaaccttcaaggccaaggagttatgggaaaaaaatggcgctgtcatcatggctgtccggagaccaggctgttttctttgccgagaagaggccgctgacctgagctccttgaaatccatgctcgatcagctgggcgtgccactttatgccgtggtcaaagagcacatccgaaccgaggtcaaggacttccagccttatttcaaaggagaaatctttctggacgaaaagaaaaagttttacggaccccagagaagaaagatgatgtttatgggttttatacggttaggagtgtggtataattttttcagagcctggaatggcggtttctcaggtaatcttgagggcgagggcttcattctgggcggcgtgttcgtcgtcgggagcggtaagcagggaattttactggaacaccgagagaaggaattcggggacaaagtgaatcttcttagcgtattagaagcggccaaaatgataaagcctcaaactctggccagcgagaaaaagtag

SEQ ID NO: 86652 - DNA, 690 bp, Artificial Sequence
  derived and/or modified sequence
atgtctttcctgcaggatccctccttctttaccatggggatgtggtctatcggagccggcgctctcggagccgcagctttagcacttcttctggccaatactgatgtctttctcagcaaacctcagaaggccgcactggaatacttggaggacattgacctgaaaactctcgaaaaggagccccggacattcaaagccaaagagctgtgggaaaagaacggcgcagtcatcatggccgtccgacgaccaggttgctttctatgcagggaggaggccgcagatctgtcttcactcaagagcatgctcgaccagctaggagttcccctctacgctgtcgtaaaagagcacataaggacagaagttaaagacttccagccttacttcaagggcgaaatctttttggatgaaaaaaaaaaattctacgggcctcagagaaggaagatgatgttcatgggatttattcggctcggcgtttggtataatttttttagggcgtggaatggcggattttctggcaatctggaaggagagggattcatacttggtggggtgtttgttgttgggagcggtaagcaggggattctgctcgagcaccgcgagaaagaattcggggacaaagtgaacctattaagtgtgctggaggccgccaagatgattaagccccagacactggcgagcgagaagaaatag

SEQ ID NO: 86653 - DNA, 690 bp, Artificial Sequence
  derived and/or modified sequence
atgagctttctacaggacccgtctttcttcacgatgggcatgtggagtatcggtgcaggagctttaggtgccgccgctctggctctgctgttggcaaataccgatgtgttcctgtctaaaccccaaaaggccgctctagaatacttagaggatattgaccttaaaacacttgaaaaggagccacgcacgttcaaggctaaagagttgtgggagaagaatggagctgtaatcatggccgtgagacgccccggatgctttctctgccgcgaggaagctgccgacctgtccagtctgaaatccatgctcgatcagctgggcgtcccactgtatgcagtagtgaaggaacacattagaacagaagttaaagattttcaaccttacttcaaaggagaaatatttctcgacgaaaagaagaaattttacggccctcaaaggagaaaaatgatgtttatgggatttattcgtttaggggtgtggtacaacttcttccgagcctggaacggcggcttctctggcaacctggagggagaaggattcatcttaggcggggtgtttgtcgtaggtagtggaaagcagggcattttgctcgagcaccgagagaaagaatttggcgacaaagtgaatttattatcagtgctcgaggccgctaaaatgatcaaaccccagacgctcgccagtgaaaagaaatag

SEQ ID NO: 86654 - DNA, 690 bp, Artificial Sequence
  derived and/or modified sequence
atgtcctttctccaggaccccagtttcttcacaatgggtatgtggtcaatcggagccggtgccctaggcgctgcagcactggcgctgctattagctaataccgacgtgttcctctccaaaccacaaaaggccgcactcgagtatctcgaagatattgatctcaagacgctggaaaaagaaccgaggactttcaaagctaaggagttatgggaaaagaatggagccgtcatcatggccgtgcgaagacctggctgttttctgtgtagagaggaagcggccgatctctcctccttaaaaagtatgctggaccagctcggtgtacctctatacgcagtagtgaaggagcacatcagaacagaggtcaaagatttccagccctacttcaagggagagattttcctggatgaaaaaaaaaaattttacgggcctcagagacgaaagatgatgttcatgggattcatcagactaggagtttggtacaacttttttcgcgcctggaacggcggttttagtggtaatttagaaggtgagggattcattcttggaggggtcttcgtagtggggtctggaaaacaagggattctcttagagcatcgcgagaaggaattcggggacaaagtgaatcttcttagcgtattagaagcggccaaaatgataaagcctcaaactctggccagcgagaaaaagtag

SEQ ID NO: 86655 - DNA, 690 bp, Artificial Sequence
  derived and/or modified sequence
atgtcatttcttcaggatccttcattttttactatgggcatgtggtcaattggagccggggccctgggcgccgctgcactggctctgctcttggccaatactgacgtctttctgtccaagccgcagaaggccgccctggaatacctcgaagatatcgatctaaagactctggaaaaagaacctagaacattcaaggctaaagaactttgggaaaaaaacggcgccgttatcatggccgtgagaagacccggatgcttcctgtgccgggaagaagcagccgacctctctagtctcaagagcatgcttgatcaattgggcgtgcctttatacgctgtcgtgaaagaacacatcagaacggaagtcaaggattttcagccctactttaaaggcgagatttttctggacgaaaaaaaaaaattttacggccctcagagaagaaagatgatgtttatggggtttattaggttgggggtgtggtacaatttcttcagggcctggaatggggggttctccggtaacctggaaggggagggatttatcctcgggggcgtattcgtggttggctctggaaaacaaggcattctgctcgaacatagagagaaggaatttggtgacaaggttaatctgttaagtgtgttagaagccgccaaaatgatcaagccccagacattggccagcgaaaagaagtag

SEQ ID NO: 86656 - DNA, 690 bp, Artificial Sequence
  derived and/or modified sequence
atgagcttcctgcaggaccccagcttcttcaccatgggcatgtggagcatcggcgccggcgccctgggcgccgccgccctggccctgctgctggccaacaccgacgtgttcctgagcaagccccagaaggccgccctggagtacctggaggacatcgacctgaagaccctggagaaggagcccagaaccttcaaggccaaggagctgtgggagaagaacggcgccgtgatcatggccgtgagaagacccggctgcttcctgtgcagagaggaggccgccgacctgagcagcctgaagagcatgctggaccagctgggcgtgcccctgtacgccgtggtgaaggagcacatcagaaccgaggtgaaggacttccagccctacttcaagggcgagatcttcctggacgagaagaagaagttctacggcccccagagaagaaagatgatgttcatgggcttcatcagactgggcgtgtggtacaacttcttcagagcctggaacggcggcttcagcggcaacctggagggcgagggcttcatcctgggcggcgtgttcgtggtgggcagcggcaagcagggcatcctgctggagcacagagagaaggagttcggcgacaaggtgaacctgctgagcgtgctggaggccgccaagatgatcaagccccagaccctggccagcgagaagaagtag

SEQ ID NO: 86657 - DNA, 690 bp, Artificial Sequence
  derived and/or modified sequence
atgtcatttctgcaggacccaagcttctttacaatgggtatgtggagcatcggggctggggccttgggtgctgccgctctggccctcctgctcgctaacacagacgtgttcctgagcaaaccacagaaggctgcactggaatatttggaggatatagacttgaaaactttggagaaagaaccacggacatttaaagctaaggaactttgggagaagaacggcgcggtcataatggcagtgcggcggcccgggtgctttctctgccgggaggaggcagcagacctgagttccctcaaaagcatgctcgaccaattaggagtgcctctgtacgccgtggtgaaggaacacatcagaacagaggttaaggattttcaaccgtactttaagggggagatcttcctggacgaaaagaaaaagttctacggccctcagcggcgcaagatgatgtttatggggttcatcagattgggtgtgtggtacaacttttttagagcatggaacgggggattctccggtaatttagagggcgagggcttcatcctcggcggcgtgtttgtcgtcggatcaggcaaacagggaattcttctagagcatcgcgagaaggagttcggcgacaaggtgaacttgctcagcgttctggaagccgccaagatgataaagcctcagactctagcctctgaaaagaaatag

SEQ ID NO: 86658 - DNA, 690 bp, Artificial Sequence
  derived and/or modified sequence
atgagcttcctgcaggatccgtcctttttcacaatggggatgtggtccatcggagcaggcgctctgggcgccgctgccctggcccttctgctggccaatactgacgtattcttgagcaaaccacaaaaggccgcactggagtacctggaggacatagacctcaagacattggaaaaagaacccaggactttcaaggccaaggaattgtgggaaaaaaatggcgccgtgattatggctgttaggcgtcctgggtgcttcctctgcagggaagaggctgctgaccttagtagtctgaagagcatgcttgatcaattaggcgtgcctctgtatgcggtggtaaaagaacatataagaacagaagtaaaagatttccaaccttattttaagggcgaaatattcctcgatgaaaaaaagaagttctacggccctcaacgacggaagatgatgtttatgggctttatacggcttggcgtctggtataatttcttccgcgcgtggaacggtggcttttccgggaacctcgaaggcgaaggctttattttgggaggcgtgtttgtagtcggttcaggaaaacagggcatattattggaacacagggaaaaagaattcggagacaaggtcaatctactctctgtcctggaagctgcaaagatgattaaacctcagactctggcatcagaaaaaaaatag

SEQ ID NO: 86659 - DNA, 690 bp, Artificial Sequence
  derived and/or modified sequence
atgtcttttctccaggacccctccttttttacaatgggaatgtggagcattggcgctggcgcactcggagccgctgctctggccctgctactggctaacactgatgtctttctaagcaagccccagaaagcggcactggagtatttagaggacatagatctgaagacactcgaaaaggagccaagaacctttaaggcgaaagaactgtgggaaaagaacggtgcggtcattatggccgtgcgaagaccgggttgtttcctgtgtcgcgaggaggccgctgacctgtctagtcttaaatccatgctggatcagcttggggtcccactctatgcggtcgtgaaagagcacatcagaacagaggtaaaggacttccaaccctattttaagggcgagatatttctagacgaaaaaaagaagttctacggtccccaaaggagaaaaatgatgttcatggggtttatccgtctgggggtgtggtataacttctttagggcctggaacggaggcttctctgggaatctggagggcgaagggtttattctgggtggtgtgttcgtcgtgggaagcggaaaacagggcatcctcctggagcaccgtgagaaagagttcggcgacaaggtcaatctgctatctgtgctggaggccgcaaaaatgattaaaccacagacccttgcgtcagagaagaagtag

SEQ ID NO: 86660 - DNA, 690 bp, Artificial Sequence
  derived and/or modified sequence
atgtccttcctgcaggaccccagcttcttcaccatgggcatgtggagcattggagctggggccctgggcgctgctgccctggccctgctgctggccaacacagatgtgttcctgagcaagccccagaaggccgccctggagtacctggaggacatcgacctgaagaccctggagaaggagcccaggaccttcaaggccaaggagctgtgggagaagaatggagctgtgatcatggctgtgagaagacctggctgcttcctgtgccgggaggaggccgctgacctgagcagcctgaagtccatgctggaccagctgggcgtgcccctgtatgctgtggtgaaggagcacatcagaacagaggtgaaggacttccagccctacttcaagggggagatcttcctggatgagaagaagaagttctacggcccccagaggaggaagatgatgttcatgggcttcatccggctgggcgtgtggtacaacttcttccgggcctggaatggaggcttcagcggcaacctggagggggagggcttcatcctgggcggcgtgtttgtggtgggcagcggcaagcagggcatcctgctggagcaccgggagaaggagtttggagacaaggtgaacctgctgtctgtgctggaggccgccaagatgatcaagccccagaccctggccagcgagaagaagtag

SEQ ID NO: 86661 - DNA, 2058 bp, Artificial Sequence
  derived and/or modified sequence
agtatcctctgatcacagaagagaaagctgcccctacccagggacatgatcctgagccacctggattgtgagggagaatcaggcattgatgaggaggggaatgaggaagtagtctgcctacaggggacatagctcggcacagctccacagagctaggggctgcaacttggggcatgagaagagagagcagcaagagaaccatttgagaaggctgtcctttctctgtcatcactcctgatgccctggtgagctccacggtgcaggaacctccatgtgtgtgctgcatccccaagttctggtggcagcaggtgcttagcagcccttgtccagtctcgcctgtgacactgctgctcccttcccctgtcctgacctcctggttggctgtcctgccagagccttgcctggaagatgaaattccagctaccctgtgggagcagtaacgccttcttccttcttctcaatctccagaaatgtctttcctccaggacccaagtttcttcaccatggggatgtggtccattggtgcaggagccctgggggctgctgccttggcattgctgcttgccaacacagacgtgtttctgtccaagccccagaaagcggccctggagtacctggaggatatagacctgaaaacactggagaaggaaccaaggactttcaaagcaaaggagctatgggaaaaaaatggagctgtgattatggccgtgcggaggccaggctgtttcctctgtcgagaggaagctgcggatctgtcctccctgaaaagcatgttggaccagctgggcgtccccctctatgcagtggtaaaggagcacatcaggactgaagtgaaggatttccagccttatttcaaaggagaaatcttcctggatgaaaagaaaaagttctatggtccacaaaggcggaagatgatgtttatgggatttatccgtctgggagtgtggtacaacttcttccgagcctggaacggaggcttctctggaaacctggaaggagaaggcttcatccttgggggagttttcgtggtgggatcaggaaagcagggcattcttcttgagcaccgagaaaaagaatttggagacaaagtaaacctactttctgttctggaagctgctaagatgatcaaaccacagactttggcctcagagaaaaaatgattgtgtgaaactgcccagctcagggataaccagggacattcacctgtgttcatgggatgtattgtttccactcgtgtccctaaggagtgagaaacccatttatactctactctcagtatggattattaatgtattttaatattctgtttaggcccactaaggcaaaatagccccaaaacaagactgacaaaaatctgaaaaactaatgaggattattaagctaaaacctgggaaataggaggcttaaaattgactgccaggctgggtgcagtggctcacacctgtaatcccagcactttgggaggccaaggtgagcaagtcacttgaggtcgggagttcgagaccagcctgagcaacatggcgaaaccccgtctctactaaaaatacaaaaatcacccgggtgtggtggcaggcacctgtagtcccagctacccgggaggctgaggcaggagaatcacttgaacctgggaggtggaggttgcggtgagctgagatcacaccactgtattccagcctgggtgactgagactctaactaaaaaaaaaaaaaaaaaaaaattgattgctgtgcctcattacaaatgcatatgatgtttgagtgctgttgtttgaaattatttttcttttcgggtcttcaaaaattcaagaaaagttgatgattgacttgaagattacaaaatttaaggttttttggcatgtgtgttttctattaataattggttatatgatgtcaaagtaatactttcataatagaattgacatgctctgggatagtttgacaaaggtaaattataaagtgaaatctcttgtttcattatcttccattctaacctcagagatctgtttctctagaaaaaatgtccatctctggctttaataaaattatgcatcagaaatca

SEQ ID NO: 86662 - DNA, 1723 bp, Artificial Sequence
  derived and/or modified sequence
tggcggtggcgcggtagcgcgcgatgcagcacaggctagaggctgcgcaagcgcggggcccgcccctgggaccctccgggccgggcggtttggccccttagcgcccgggcgtcggggcggtaaaaggccggcagaagggaggcacttgaggacccaagtttcttcaccatggggatgtggtccattggtgcaggagccctgggggctgctgccttggcattgctgcttgccaacacagacgtgtttctgtccaagccccagaaagcggccctggagtacctggaggatatagacctgaaaacactggagaaggaaccaaggactttcaaagcaaaggagctatgggaaaaaaatggagctgtgattatggccgtgcggaggccaggctgtttcctctgtcgagaggaagctgcggatctgtcctccctgaaaagcatgttggaccagctgggcgtccccctctatgcagtggtaaaggagcacatcaggactgaagtgaaggatttccagccttatttcaaaggagaaatcttcctggatgaaaagaaaaagttctatggtccacaaaggcggaagatgatgtttatgggatttatccgtctgggagtgtggtacaacttcttccgagcctggaacggaggcttctctggaaacctggaaggagaaggcttcatccttgggggagttttcgtggtgggatcaggaaagcagggcattcttcttgagcaccgagaaaaagaatttggagacaaagtaaacctactttctgttctggaagctgctaagatgatcaaaccacagactttggcctcagagaaaaaatgattgtgtgaaactgcccagctcagggataaccagggacattcacctgtgttcatgggatgtattgtttccactcgtgtccctaaggagtgagaaacccatttatactctactctcagtatggattattaatgtattttaatattctgtttaggcccactaaggcaaaatagccccaaaacaagactgacaaaaatctgaaaaactaatgaggattattaagctaaaacctgggaaataggaggcttaaaattgactgccaggctgggtgcagtggctcacacctgtaatcccagcactttgggaggccaaggtgagcaagtcacttgaggtcgggagttcgagaccagcctgagcaacatggcgaaaccccgtctctactaaaaatacaaaaatcacccgggtgtggtggcaggcacctgtagtcccagctacccgggaggctgaggcaggagaatcacttgaacctgggaggtggaggttgcggtgagctgagatcacaccactgtattccagcctgggtgactgagactctaactaaaaaaaaaaaaaaaaaaaaattgattgctgtgcctcattacaaatgcatatgatgtttgagtgctgttgtttgaaattatttttcttttcgggtcttcaaaaattcaagaaaagttgatgattgacttgaagattacaaaatttaaggttttttggcatgtgtgttttctattaataattggttatatgatgtcaaagtaatactttcataatagaattgacatgctctgggatagtttgacaaaggtaaattataaagtgaaatctcttgtttcattatcttccattctaacctcagagatctgtttctctagaaaaaatgtccatctctggctttaataaaattatgcatcagaaatca

SEQ ID NO: 86663 - DNA, 1741 bp, Artificial Sequence
  derived and/or modified sequence
atggcggtggcgcggtagcgcgcgatgcagcacaggctagaggctgcgcaagcgcggggcccgcccctgggaccctccgggccgggcggtttggccccttagcgcccgggcgtcggggcggtaaaaggccggcagaagggaggcacttgagaaatgtctttcctccaggacccaagtttcttcaccatggggatgtggtccattggtgcaggagccctgggggctgctgccttggcattgctgcttgccaacacagacgtgtttctgtccaagccccagaaagcggccctggagtacctggaggatatagacctgaaaacactggagaaggaaccaaggactttcaaagcaaaggagctatgggaaaaaaatggagctgtgattatggccgtgcggaggccaggctgtttcctctgtcgagaggaagctgcggatctgtcctccctgaaaagcatgttggaccagctgggcgtccccctctatgcagtggtaaaggagcacatcaggactgaagtgaaggatttccagccttatttcaaaggagaaatcttcctggatgaaaagaaaaagttctatggtccacaaaggcggaagatgatgtttatgggatttatccgtctgggagtgtggtacaacttcttccgagcctggaacggaggcttctctggaaacctggaaggagaaggcttcatccttgggggagttttcgtggtgggatcaggaaagcagggcattcttcttgagcaccgagaaaaagaatttggagacaaagtaaacctactttctgttctggaagctgctaagatgatcaaaccacagactttggcctcagagaaaaaatgattgtgtgaaactgcccagctcagggataaccagggacattcacctgtgttcatgggatgtattgtttccactcgtgtccctaaggagtgagaaacccatttatactctactctcagtatggattattaatgtattttaatattctgtttaggcccactaaggcaaaatagccccaaaacaagactgacaaaaatctgaaaaactaatgaggattattaagctaaaacctgggaaataggaggcttaaaattgactgccaggctgggtgcagtggctcacacctgtaatcccagcactttgggaggccaaggtgagcaagtcacttgaggtcgggagttcgagaccagcctgagcaacatggcgaaaccccgtctctactaaaaatacaaaaatcacccgggtgtggtggcaggcacctgtagtcccagctacccgggaggctgaggcaggagaatcacttgaacctgggaggtggaggttgcggtgagctgagatcacaccactgtattccagcctgggtgactgagactctaactaaaaaaaaaaaaaaaaaaaaattgattgctgtgcctcattacaaatgcatatgatgtttgagtgctgttgtttgaaattatttttcttttcgggtcttcaaaaattcaagaaaagttgatgattgacttgaagattacaaaatttaaggttttttggcatgtgtgttttctattaataattggttatatgatgtcaaagtaatactttcataatagaattgacatgctctgggatagtttgacaaaggtaaattataaagtgaaatctcttgtttcattatcttccattctaacctcagagatctgtttctctagaaaaaatgtccatctctggctttaataaaattatgcatcagaaatca

SEQ ID NO: 86664 - DNA, 829 bp, Artificial Sequence
  derived and/or modified sequence
tgcccagactggtcttgaactcctgggctcaagcgatcctcccaaagccctgagattacaggcgtgagccagcgcgccggacacaacctcctactttcatgaaagagtgggcacttccaacaggaggaaaatgtctttcctccaggacccaagtttcttcaccatggggatgtggtccattggtgcaggagccctgggggctgctgccttggcattgctgcttgccaacacagacgtgtttctgtccaagccccagaaagcggccctggagtacctggaggatatagacctgaaaacactggagaaggaaccaaggactttcaaagcaaaggagctatgggaaaaaaatggagctgtgattatggccgtgcggaggccaggctgtttcctctgtcgagaggaagctgcggatctgtcctccctgaaaagcatgttggaccagctgggcgtccccctctatgcagtggtaaaggagcacatcaggactgaagtgaaggatttccagccttatttcaaaggagaaatcttcctggatgaaaagaaaaagttctatggtccacaaaggcggaagatgatgtttatgggatttatccgtctgggagtgtggtacaacttcttccgagcctggaacggaggcttctctggaaacctggaaggagaaggcttcatccttgggggagttttcgtggtgggatcaggaaagcagggcattcttcttgagcaccgagaaaaagaatttggagacaaagtaaacctactttctgttctggaagctgctaagatgatcaaaccacagactttggcctcagagaaaaaatgattgtgtgaa

SEQ ID NO: 86665 - DNA, 690 bp, Artificial Sequence
  derived and/or modified sequence
atgagcttcctgcaggaccccagcttcttcaccatgggcatgtggtcaataggcgcaggtgctttaggggccgctgccttggccctgctcctggcgaataccgacgtcttcctgtcaaaaccccagaaggcagctctcgagtatctggaagatattgatctcaagactcttgagaaggaaccaagaactttcaaagctaaagagctgtgggagaaaaatggcgccgtgatcatggctgtaagaaggccagggtgttttctgtgccgggaagaggccgcagatttgtcctctcttaaatccatgctcgatcaactcggggtgccattgtacgccgtcgttaaggagcatatccgaactgaggtaaaggacttccagccttatttcaagggcgagatcttccttgacgagaaaaagaaattctacgggcctcagcggaggaaaatgatgttcatgggcttcatacggctcggcgtgtggtacaacttttttagagcctggaacgggggattttctggcaatcttgaaggcgaagggtttattctcggaggcgtgtttgttgtgggttcgggtaagcagggaattctgctagaacacagggaaaaggagttcggggataaagtgaacctgctgagcgtgctggaggccgccaagatgattaaaccacagactctcgcatcggagaagaaatag

SEQ ID NO: 86666 - DNA, 690 bp, Artificial Sequence
  derived and/or modified sequence
atgagcttcctgcaggaccccagcttcttcaccatgggcatgtggtccatcggtgccggggctctcggggccgccgcattggctctgctattggctaatacggacgtcttcttaagtaagccccaaaaggcagcactggaatacttggaggatatcgatcttaaaaccctggaaaaagaacccaggacctttaaagcaaaagaattatgggagaagaacggagcggtgataatggccgtgaggcgccccggctgcttcttatgtagagaggaggcagcggatctatccagtctcaagagtatgctcgaccagctgggcgtcccgttatatgcagtggtgaaggagcatatcaggaccgaagtgaaggacttccagccgtattttaagggggaaatctttctcgatgagaaaaagaaattttacggaccacagcggagaaaaatgatgtttatgggctttattcgcctgggtgtatggtataatttctttcgggcctggaatggaggattctctggcaatcttgaaggggaggggtttattctcgggggggtctttgtagtgggtagtgggaaacagggtatcctcctagaacacagggagaaagaattcggcgacaaagttaatctcctgtcagtgttggaagctgccaagatgattaaaccacagacccttgcttccgaaaaaaagtag

SEQ ID NO: 86667 - DNA, 690 bp, Artificial Sequence
  derived and/or modified sequence
atgagcttcctgcaggaccccagcttcttcaccatgggcatgtggtctatcggggccggcgccctcggcgcggccgctttagctcttctgctagccaatactgatgtgttcctgtcaaaaccccaaaaagccgctttagaatacctggaggacattgacctgaagacactggagaaggaaccaaggacgtttaaggcgaaagagctttgggagaagaatggggctgtcatcatggcagtcaggagaccgggttgctttctctgtcgggaagaagccgcagatttgtcttctctcaagagtatgctcgaccaattgggtgtgcccctatatgcggtggtaaaggagcacattcgaacagaggtgaaagacttccaaccatattttaagggagaaatcttcctcgatgagaagaagaagttttacggtccccagaggcgtaaaatgatgttcatggggttcatccgcctcggggtctggtacaatttctttagagcatggaacggggggttctctggcaacttagaaggcgaaggcttcatactaggtggggtgttcgtggtgggttccggtaaacaagggatcctcctggaacaccgcgaaaaagagttcggggacaaagttaacctcttgtccgtgttggaagccgccaaaatgattaaacctcagactctagcctcagagaagaagtag

SEQ ID NO: 86668 - RNA, 690 nt, Artificial Sequence
  derived and/or modified sequence
augucuuuccugcaggacccauccuucuucaccauggggauguggagcaucggagccggagcauugggugcggccgcacuggcucugcucuuagcgaauacugacguguuccuaucaaaaccucagaaggccgcucuugaguaccuagaagacauugaccuaaaaacccuagaaaaggagccaaggacguucaaggcaaaagaacugugggagaagaacggagcuguaaucauggccguacggagaccagggugcuuccucugcagagaagaggcagccgaucuguccucgcucaagaguaugcucgaucaacuggggguuccucuguaugcugugguuaaagaacacaucagaacagaggugaaagauuuccagcccuacuucaaaggcgagaucuuucuggacgagaagaaaaaguucuaugggccccagaggagaaaaaugauguuuaugggauuuauuaggcugggcgugugguacaauuucuuucgcgcauggaacggcggcuuuucugguaaccuggaaggggaaggauuuauucugggcggcguauucguagucggaucugguaagcaagguauccuguuagagcauagggaaaaagaauuuggggauaaaguuaacuuguugagcgugcuggaggcugcaaagaugaucaaaccacagacacucgccuccgaaaagaaguag

SEQ ID NO: 86669 - RNA, 690 nt, Artificial Sequence
  derived and/or modified sequence
augagcuuucugcaagaccccucauuuuuuacaauggggaugugguccaucggagccggggcccugggcgccgccgcauuggcccuccugcuggcuaacaccgacguuuucuuguccaaaccucagaaagccgcgcucgaauaccuggaggacauugaucugaagacccucgagaaagaaccuagaaccuucaaggccaaggaguuaugggaaaaaaauggcgcugucaucauggcuguccggagaccaggcuguuuucuuugccgagaagaggccgcugaccugagcuccuugaaauccaugcucgaucagcugggcgugccacuuuaugccguggucaaagagcacauccgaaccgaggucaaggacuuccagccuuauuucaaaggagaaaucuuucuggacgaaaagaaaaaguuuuacggaccccagagaagaaagaugauguuuauggguuuuauacgguuaggagugugguauaauuuuuucagagccuggaauggcgguuucucagguaaucuugagggcgagggcuucauucugggcggcguguucgucgucgggagcgguaagcagggaauuuuacuggaacaccgagagaaggaauucggggacaaagugaaucuucuuagcguauuagaagcggccaaaaugauaaagccucaaacucuggccagcgagaaaaaguag

SEQ ID NO: 86670 - RNA, 690 nt, Artificial Sequence
  derived and/or modified sequence
augucuuuccugcaggaucccuccuucuuuaccauggggauguggucuaucggagccggcgcucucggagccgcagcuuuagcacuucuucuggccaauacugaugucuuucucagcaaaccucagaaggccgcacuggaauacuuggaggacauugaccugaaaacucucgaaaaggagccccggacauucaaagccaaagagcugugggaaaagaacggcgcagucaucauggccguccgacgaccagguugcuuucuaugcagggaggaggccgcagaucugucuucacucaagagcaugcucgaccagcuaggaguuccccucuacgcugucguaaaagagcacauaaggacagaaguuaaagacuuccagccuuacuucaagggcgaaaucuuuuuggaugaaaaaaaaaaauucuacgggccucagagaaggaagaugauguucaugggauuuauucggcucggcguuugguauaauuuuuuuagggcguggaauggcggauuuucuggcaaucuggaaggagagggauucauacuuggugggguguuuguuguugggagcgguaagcaggggauucugcucgagcaccgcgagaaagaauucggggacaaagugaaccuauuaagugugcuggaggccgccaagaugauuaagccccagacacuggcgagcgagaagaaauag

SEQ ID NO: 86671 - RNA, 690 nt, Artificial Sequence
  derived and/or modified sequence
augagcuuucuacaggacccgucuuucuucacgaugggcauguggaguaucggugcaggagcuuuaggugccgccgcucuggcucugcuguuggcaaauaccgauguguuccugucuaaaccccaaaaggccgcucuagaauacuuagaggauauugaccuuaaaacacuugaaaaggagccacgcacguucaaggcuaaagaguugugggagaagaauggagcuguaaucauggccgugagacgccccggaugcuuucucugccgcgaggaagcugccgaccuguccagucugaaauccaugcucgaucagcugggcgucccacuguaugcaguagugaaggaacacauuagaacagaaguuaaagauuuucaaccuuacuucaaaggagaaauauuucucgacgaaaagaagaaauuuuacggcccucaaaggagaaaaaugauguuuaugggauuuauucguuuaggggugugguacaacuucuuccgagccuggaacggcggcuucucuggcaaccuggagggagaaggauucaucuuaggcgggguguuugucguagguaguggaaagcagggcauuuugcucgagcaccgagagaaagaauuuggcgacaaagugaauuuauuaucagugcucgaggccgcuaaaaugaucaaaccccagacgcucgccagugaaaagaaauag

SEQ ID NO: 86672 - RNA, 690 nt, Artificial Sequence
  derived and/or modified sequence
auguccuuucuccaggaccccaguuucuucacaauggguauguggucaaucggagccggugcccuaggcgcugcagcacuggcgcugcuauuagcuaauaccgacguguuccucuccaaaccacaaaaggccgcacucgaguaucucgaagauauugaucucaagacgcuggaaaaagaaccgaggacuuucaaagcuaaggaguuaugggaaaagaauggagccgucaucauggccgugcgaagaccuggcuguuuucuguguagagaggaagcggccgaucucuccuccuuaaaaaguaugcuggaccagcucgguguaccucuauacgcaguagugaaggagcacaucagaacagaggucaaagauuuccagcccuacuucaagggagagauuuuccuggaugaaaaaaaaaaauuuuacgggccucagagacgaaagaugauguucaugggauucaucagacuaggaguuugguacaacuuuuuucgcgccuggaacggcgguuuuagugguaauuuagaaggugagggauucauucuuggaggggucuucguaguggggucuggaaaacaagggauucucuuagagcaucgcgagaaggaauucggggacaaagugaaucuucuuagcguauuagaagcggccaaaaugauaaagccucaaacucuggccagcgagaaaaaguag

SEQ ID NO: 86673 - RNA, 690 nt, Artificial Sequence
  derived and/or modified sequence
augucauuucuucaggauccuucauuuuuuacuaugggcauguggucaauuggagccggggcccugggcgccgcugcacuggcucugcucuuggccaauacugacgucuuucuguccaagccgcagaaggccgcccuggaauaccucgaagauaucgaucuaaagacucuggaaaaagaaccuagaacauucaaggcuaaagaacuuugggaaaaaaacggcgccguuaucauggccgugagaagacccggaugcuuccugugccgggaagaagcagccgaccucucuagucucaagagcaugcuugaucaauugggcgugccuuuauacgcugucgugaaagaacacaucagaacggaagucaaggauuuucagcccuacuuuaaaggcgagauuuuucuggacgaaaaaaaaaaauuuuacggcccucagagaagaaagaugauguuuaugggguuuauuagguugggggugugguacaauuucuucagggccuggaaugggggguucuccgguaaccuggaaggggagggauuuauccucgggggcguauucgugguuggcucuggaaaacaaggcauucugcucgaacauagagagaaggaauuuggugacaagguuaaucuguuaaguguguuagaagccgccaaaaugaucaagccccagacauuggccagcgaaaagaaguag

SEQ ID NO: 86674 - DNA, 657 bp, Artificial Sequence
  derived and/or modified sequence
atggggatgtggagcatcggggctggcgcattgggcgcagcagccttagcactgctactcgccaacacagatgtgtttttgtccaagccccaaaaagcagccctggaatatctcgaggatattgacctgaagacacttgaaaaagagcccagaacctttaaggcgaaggagctctgggagaaaaacggcgctgtgattatggcggtacgcagacccggatgcttcctttgtcgggaggaggccgcagatctgagctctctgaaatccatgctggaccagctgggagtccccctgtacgccgtcgtcaaggagcatatccggaccgaagtaaaggatttccaaccctattttaagggagaaatttttctggacgagaagaagaaattctacggccctcagagaagaaaaatgatgtttatgggctttattaggctgggcgtttggtataacttctttagggcctggaacgggggattcagtggtaatctggaaggcgaaggattcatactgggaggagtgtttgtagtagggagtgggaaacaaggtatcctgctcgaacaccgagagaaagagttcggtgataaagttaatttgttgtctgttctcgaggccgcaaagatgatcaaaccccagactctcgcttccgagaaaaagtag

SEQ ID NO: 86675 - DNA, 657 bp, Artificial Sequence
  derived and/or modified sequence
atgggaatgtggtctattggtgccggcgccctcggggctgcagccttagctctgctactggcgaataccgatgtgttcctgagcaaacctcagaaagccgcattagaatatctggaggacatcgatctaaaaaccttggaaaaagaaccacgaacatttaaagccaaagaactgtgggaaaaaaacggtgccgtcattatggcggtgcgcagacctggttgcttcctgtgccgcgaagaggccgccgatctttcgagtttaaaaagcatgctggatcaattaggcgtcccactgtacgctgtggtgaaggaacacattcgcacagaagtgaaggatttccaaccttattttaagggagaaatttttctggacgaaaagaagaaattctatggtcctcagagacgaaaaatgatgttcatgggctttattcgtctgggggtgtggtacaatttctttcgggcgtggaacgggggtttttccggcaatctcgagggggaagggtttatccttggaggagtttttgtggtcggaagtggtaagcaagggattttgctagagcatagagagaaagagtttggagacaaagtgaacctgctcagcgtgttggaggccgctaaaatgatcaaaccccagacacttgcgtctgagaaaaagtag

SEQ ID NO: 86676 - DNA, 657 bp, Artificial Sequence
  derived and/or modified sequence
atgggtatgtggtcaattggtgccggcgccctcggagccgccgccctggcattgctgctcgcaaacaccgacgtgttcttatctaaaccacaaaaggctgcacttgaatatcttgaagatattgatctgaagactttggaaaaagaacctcgaacatttaaagcgaaagagctgtgggagaagaacggggctgtgatcatggcagtcagaaggccagggtgttttctgtgcagagaggaagccgctgatcttagctcactaaagtccatgttagaccaactgggggtcccgttgtacgcagttgttaaggagcacatcaggacagaggttaaagacttccagccttactttaaaggcgagatcttcctggacgagaagaagaagttttacggtccccagcggagaaaaatgatgtttatgggttttatacggctgggcgtttggtataacttttttagggcatggaatggagggttcagtggcaacctggagggggaggggtttatcctaggaggggtgtttgttgtgggaagtggtaaacaggggatattgctggaacatagagagaaggaattcggtgacaaagtgaatctgttaagcgtgctggaagccgctaagatgatcaaaccacaaacacttgcctcagaaaaaaaatag

SEQ ID NO: 86677 - DNA, 657 bp, Artificial Sequence
  derived and/or modified sequence
atgggcatgtggagcatcggcgccggcgccctgggcgccgccgccctggccctgctgctggccaacaccgacgtgttcctgagcaagccccagaaggccgccctggagtacctggaggacatcgacctgaagaccctggagaaggagcccagaaccttcaaggccaaggagctgtgggagaagaacggcgccgtgatcatggccgtgagaagacccggctgcttcctgtgcagagaggaggccgccgacctgagcagcctgaagagcatgctggaccagctgggcgtgcccctgtacgccgtggtgaaggagcacatcagaaccgaggtgaaggacttccagccctacttcaagggcgagatcttcctggacgagaagaagaagttctacggcccccagagaagaaagatgatgttcatgggcttcatcagactgggcgtgtggtacaacttcttcagagcctggaacggcggcttcagcggcaacctggagggcgagggcttcatcctgggcggcgtgttcgtggtgggcagcggcaagcagggcatcctgctggagcacagagagaaggagttcggcgacaaggtgaacctgctgagcgtgctggaggccgccaagatgatcaagccccagaccctggccagcgagaagaagtag

SEQ ID NO: 86678 - DNA, 657 bp, Artificial Sequence
  derived and/or modified sequence
atggggatgtggtccattggcgctggggcgcttggtgcagcagccttggcactcctgttggccaacacagatgtctttctctctaaacctcagaaggccgctctggaataccttgaggacatcgatctgaaaacactggagaaggaaccaaggactttcaaggctaaggagctgtgggaaaagaatggagctgtgataatggccgtgaggaggccaggttgctttctttgcagagaagaggcagcggaccttagctctctgaaatccatgctggaccagctcggcgtgccactttacgcagtggtgaaggagcacatccggaccgaagttaaggattttcagccctattttaaaggtgagattttcctggacgagaagaagaaattttacggtcctcagcgccgcaagatgatgttcatggggttcatcaggctgggcgtgtggtataatttcttccgggcttggaatggaggttttagcggcaatcttgagggcgagggatttatcctgggcggtgtctttgtggtggggtctggtaaacagggtattcttctggaacatagagaaaaagaattcggagacaaggtcaacctgctctcagttctggaggccgccaaaatgatcaagccccagactttagcgagtgaaaaaaagtag

SEQ ID NO: 86679 - DNA, 657 bp, Artificial Sequence
  derived and/or modified sequence
atgggcatgtggagcatcggggccggggccctgggcgccgccgccctggccctgctgctggccaacacagatgtgttcctgagcaagccccagaaggccgccctggagtacctggaggacatcgacctgaagaccctggagaaggagcccaggaccttcaaggccaaggagctgtgggagaagaatggagctgtgatcatggctgtgcggcggcccggctgcttcctgtgccgggaggaggccgctgacctgagcagcctgaagtccatgctggaccagctgggcgtgcccctgtatgctgtggtgaaggagcacatcagaacagaggtgaaggacttccagccctacttcaagggggagatcttcctggatgagaagaagaagttctacggcccccagaggaggaagatgatgttcatgggcttcatccggctgggcgtgtggtacaacttcttccgggcctggaatggaggcttcagcggcaacctggagggggagggcttcatcctgggcggcgtgtttgtggtgggcagcggcaagcagggcatcctgctggagcaccgggagaaggagtttggagacaaggtgaacctgctgtctgtgctggaggccgccaagatgatcaagccccagaccctggccagcgagaagaagtag

SEQ ID NO: 86680 - DNA, 657 bp, Artificial Sequence
  derived and/or modified sequence
atgggcatgtggagcatcggcgccggcgccctgggcgccgccgccctcgcgctgctgctggctaacaccgacgtattcctaagcaagccacagaaggcggccctggaatatctcgaggatatagacctgaagacactggaaaaggaacctagaaccttcaaagccaaggagctgtgggagaagaatggggccgtgatcatggcggtgagacgacccggttgcttcctttgtagggaagaggcggctgatttgtcctctctcaagagtatgctcgaccagctgggggttcccttatacgcagtggtaaaggaacacatacggacagaggtcaaggactttcagccctattttaagggggagatctttctggatgaaaaaaagaagttctacggtcctcagaggcgcaaaatgatgttcatggggtttattaggttgggcgtctggtacaatttctttcgcgcctggaacgggggattttctggtaacctggagggcgagggctttattctgggtggggtcttcgttgttggcagcgggaagcagggaatactattggaacacagggagaaggaatttggcgacaaagtgaacctcctttcggtcctggaggcagcaaaaatgattaaaccccagacccttgcatccgagaaaaagtag

SEQ ID NO: 86681 - RNA, 657 nt, Artificial Sequence
  derived and/or modified sequence
augggaauguggucuauuggugccggcgcccucggggcugcagccuuagcucugcuacuggcgaauaccgauguguuccugagcaaaccucagaaagccgcauuagaauaucuggaggacaucgaucuaaaaaccuuggaaaaagaaccacgaacauuuaaagccaaagaacugugggaaaaaaacggugccgucauuauggcggugcgcagaccugguugcuuccugugccgcgaagaggccgccgaucuuucgaguuuaaaaagcaugcuggaucaauuaggcgucccacuguacgcuguggugaaggaacacauucgcacagaagugaaggauuuccaaccuuauuuuaagggagaaauuuuucuggacgaaaagaagaaauucuaugguccucagagacgaaaaaugauguucaugggcuuuauucgucugggggugugguacaauuucuuucgggcguggaacggggguuuuuccggcaaucucgagggggaaggguuuauccuuggaggaguuuuuguggucggaagugguaagcaagggauuuugcuagagcauagagagaaagaguuuggagacaaagugaaccugcucagcguguuggaggccgcuaaaaugaucaaaccccagacacuugcgucugagaaaaaguag

SEQ ID NO: 86682 - RNA, 657 nt, Artificial Sequence
  derived and/or modified sequence
auggguauguggucaauuggugccggcgcccucggagccgccgcccuggcauugcugcucgcaaacaccgacguguucuuaucuaaaccacaaaaggcugcacuugaauaucuugaagauauugaucugaagacuuuggaaaaagaaccucgaacauuuaaagcgaaagagcugugggagaagaacggggcugugaucauggcagucagaaggccaggguguuuucugugcagagaggaagccgcugaucuuagcucacuaaaguccauguuagaccaacugggggucccguuguacgcaguuguuaaggagcacaucaggacagagguuaaagacuuccagccuuacuuuaaaggcgagaucuuccuggacgagaagaagaaguuuuacgguccccagcggagaaaaaugauguuuauggguuuuauacggcugggcguuugguauaacuuuuuuagggcauggaauggaggguucaguggcaaccuggagggggagggguuuauccuaggagggguguuuguugugggaagugguaaacaggggauauugcuggaacauagagagaaggaauucggugacaaagugaaucuguuaagcgugcuggaagccgcuaagaugaucaaaccacaaacacuugccucagaaaaaaaauag

SEQ ID NO: 86683 - DNA, 213 bp, Artificial Sequence
  derived and/or modified sequence
atggccgaggtgaagagcatgttcagagaggtgctgcccaagcagggccccctgttcgtggaggacatcatgaccatggtgctgtgcaagcccaagctgctgcccctgaagagcctgaccctggagaagctggagaagatgcaccaggccgcccagaacaccatcagacagcaggagatggccgagaaggaccagagacagatcacccactag

SEQ ID NO: 86684 - DNA, 213 bp, Artificial Sequence
  derived and/or modified sequence
atggcagaggtcaaatcaatgttccgtgaagtgcttcccaaacagggcccactctttgtcgaggatataatgactatggtgctctgtaagcccaaactgctgccccttaagtctcttaccctggagaaactggaaaaaatgcatcaggccgctcaaaacactatcaggcaacaggaaatggcggaaaaggatcagaggcaaattacccattag

SEQ ID NO: 86685 - DNA, 213 bp, Artificial Sequence
  derived and/or modified sequence
atggcagaggtgaaatctatgttccgcgaagtccttcccaagcagggccccctgtttgtggaggacataatgactatggtcctgtgcaaaccgaagctgctgccgctgaaatccctgacgttggagaaactcgaaaaaatgcaccaagcagctcaaaacaccattagacagcaggagatggctgaaaaagatcagagacaaatcactcattag

SEQ ID NO: 86686 - DNA, 213 bp, Artificial Sequence
  derived and/or modified sequence
atggccgaggtgaagtccatgttccgggaggtgctgcccaagcagggccccctgtttgtggaggacatcatgaccatggtgctgtgcaagcccaagctgctgcccctgaagagcctgaccctggagaagctggagaagatgcaccaggccgcccagaacaccatccggcagcaggagatggccgagaaggaccagaggcagatcacccactag

SEQ ID NO: 86687 - DNA, 213 bp, Artificial Sequence
  derived and/or modified sequence
atggccgaggtgaagagcatgttccgggaggtgctgcccaagcagggccccctcttcgttgaggatattatgactatggtgctctgtaaacctaaattgcttccactaaagtcgctgactctggagaagctggagaaaatgcaccaggcggcgcagaatacaattcggcagcaggagatggcagagaaggatcaaaggcagatcacacattag

SEQ ID NO: 86688 - DNA, 213 bp, Artificial Sequence
  derived and/or modified sequence
atggccgaggtgaagagcatgttccgggaggtgctgcccaagcagggcccgctcttcgtcgaggatatcatgacaatggtgctctgcaaacccaagctacttccattaaagtctttgaccctggaaaaacttgaaaaaatgcaccaagctgcccagaacaccattcgccagcaggagatggccgagaaagaccaaaggcagattactcactag

SEQ ID NO: 86689 - DNA, 213 bp, Artificial Sequence
  derived and/or modified sequence
atggccgaggtgaagagcatgttccgcgaggtgctgcctaaacaaggaccactttttgtggaggacattatgactatggtgctgtgtaagcccaaattattgccccttaaatctttaactctggaaaagctggaaaagatgcaccaggctgctcagaatacaattcgacagcaagaaatggccgaaaaggatcaacggcaaatcacacactag

SEQ ID NO: 86690 - DNA, 213 bp, Artificial Sequence
  derived and/or modified sequence
atggctgaggtcaagagcatgtttcgcgaggtgttaccaaagcaggggccactatttgtggaggacataatgacaatggtcctctgtaagcccaaactcctcccactgaagtcactaacattggaaaagcttgagaagatgcaccaggctgcacagaataccatcaggcaacaggagatggccgagaaggaccagcgccaaatcacccattag

SEQ ID NO: 86691 - protein, 527 aa, Artificial Sequence
  derived and/or modified sequence
MSLQMVTVSNNIALIQPGFSLMNFDGQVFFFGQKGWPKRSCPTGVFHLDVKHNHVKLKPTIFSKDSCYLPPLRYPATCTFKGSLESEKHQYIIHGGKTPNNEVSDKIYVMSIVCKNNKKVTFRCTEKDLVGDVPEARYGHSINVVYSRGKSMGVLFGGRSYMPSTHRTTEKWNSVADCLPCVFLVDFEFGCATSYILPELQDGLSFHVSIAKNDTIYILGGHSLANNIRPANLYRIRVDLPLGSPAVNCTVLPGGISVSSAILTQTNNDEFVIVGGYQLENQKRMICNIISLEDNKIEIREMETPDWTPDIKHSKIWFGSNMGNGTVFLGIPGDNKQVVSEGFYFYMLKCAEDDTNEEQTTFTNSQTSTEDPGDSTPFEDSEEFCFSAEANSFDGDDEFDTYNEDDEEDESETGYWITCCPTCDVDINTWVPFYSTELNKPAMIYCSHGDGHWVHAQCMDLAERTLIHLSAGSNKYYCNEHVEIARALHTPQRVLPLKKPPMKSLRKKGSGKILTPAKKSFLRRLFD

SEQ ID NO: 86692 - protein, 71 aa, Artificial Sequence
  derived and/or modified sequence
MSLQMVTVSNNIALIQPGFSLMNFDGQVFFFGQKGWPKRSCPTGVFHLDVKHNHVKLKPTIFSKDSCYLPP

SEQ ID NO: 86693 - protein, 150 aa, Artificial Sequence
  derived and/or modified sequence
MSLQMVTVSNNIALIQPGFSLMNFDGQVFFFGQKGWPKRSCPTGVFHLDVKHNHVKLKPTIFSKDSCYLPPLRYPATCTFKGSLESEKHQYIIHGGKTPNNEVSDKIYVMSIVCKNNKKVTFRCTEKDLVGDVPEARYGHSINVVYSRGK

SEQ ID NO: 86694 - DNA, 1584 bp, Artificial Sequence
  derived and/or modified sequence
atgtcactccagatggttactgtgtcaaataatatcgccttaatacaacccggttttagtctgatgaacttcgacggccaggtcttcttcttcggtcagaaaggctggccaaaacgctcttgccctaccggcgtctttcacttagatgtgaagcacaaccatgtcaaactcaaacctactatcttcagtaaggacagctgctaccttccaccgttacgctaccccgccacctgcaccttcaagggaagtctcgaatctgagaagcatcagtacattatacacggcggcaagaccccgaataacgaagttagtgacaaaatatatgtcatgtcgattgtctgtaaaaacaacaagaaagtgacatttcgttgcacagagaaagacctggttggggacgtgcccgaagcaagatatggccattccattaatgtggtctattctaggggaaaatcaatgggggtgctctttgggggtcggtcttacatgcctagtacccacaggactacagagaagtggaactccgtggcagattgtttgccttgcgtgtttctggtcgattttgagttcggttgtgcaacgagctatattttacccgaactccaagacggcctaagctttcacgtgtcgattgccaaaaacgacacgatctacatcctcggggggcactcactcgccaacaatatccgaccagcaaacctttatcgcattcgtgtggatttacccctgggatctccagctgtaaactgcacggtcctgccaggagggatttctgtaagctccgcaatacttacgcagaccaataatgacgaatttgtcatagtaggtggctaccaactggagaaccaaaagcggatgatttgcaacattatttcactcgaagataataaaatcgagattcgtgagatggagacacctgactggacaccagacattaaacactcaaaaatctggttcggatcaaatatggggaacgggacggtattcctgggcatcccgggcgataataagcaggtagtaagcgaagggttctatttttacatgctcaaatgtgccgaagacgatacaaacgaggagcagaccacttttaccaactctcaaacgtctacggaagatcctggcgactcgaccccttttgaggatagcgaagagttctgcttttcggccgaagccaactcgtttgatggggatgatgaatttgacacttacaacgaggatgatgaggaggacgaatctgagaccgggtactggattacttgctgtcctacttgcgatgtcgatatcaacacctgggtgcctttctatagcactgagctgaacaagcccgcgatgatttactgttcccatggtgacgggcactgggtccacgcgcagtgcatggatctcgcagagaggaccctgatccacttgtctgctggcagcaacaagtattattgcaacgaacatgtggagattgcgcgcgctcttcatacaccccagcgtgtgttgcctctcaaaaagccacccatgaagagcttgagaaagaagggttctgggaagatcctgacaccagccaagaaatctttcctacgacgcttgtttgactag

SEQ ID NO: 86695 - DNA, 216 bp, Artificial Sequence
  derived and/or modified sequence
atgagcctgcagatggtgacagtgtccaataacatagcattgattcagcctgggtttagtctcatgaacttcgatggccaggtctttttcttcggccagaaaggttggccgaaacgatcttgtccgacgggcgtctttcacctcgatgtcaagcacaatcacgtgaagctcaagcccacaattttttcaaaggacagttgctatctgccaccatag

SEQ ID NO: 86696 - DNA, 453 bp, Artificial Sequence
  derived and/or modified sequence
atgtccctccagatggtcaccgtgtccaataacatagccctcattcagccaggttttagcctgatgaacttcgacggccaagtattcttctttggtcaaaaaggctggccgaagcggtcctgtcccacaggcgtcttccacctggacgtcaaacacaatcatgtgaagttaaaacccacaatattctctaaagactcctgctacctcccccctctgcggtatccagcgacgtgtactttcaagggaagcctcgagtccgagaaacatcagtacatcattcatggcggaaagacgcccaacaacgaggtttctgataagatttatgtgatgtctatcgtttgcaaaaacaacaagaaagtcaccttcaggtgtacggaaaaggacctggtgggagatgtgccagaggcacggtatgggcattcaataaacgtcgtctattccagggggaagtag

SEQ ID NO: 86697 - DNA, 1584 bp, Artificial Sequence
  derived and/or modified sequence
atgagcctgcagatggtgacagtgagcaacaacatcgccctgatccagcccggcttcagcctgatgaactttgatggccaggtgttcttcttcggccagaagggctggcccaagaggagctgccccactggagtcttccacctggatgtgaagcacaaccacgtgaagctgaagcccaccatcttcagcaaggacagctgctacctgccccccctgcgctacccagccacctgcaccttcaagggcagcctggagagcgagaagcaccagtacatcatccacggcggcaagacccccaacaatgaggtgtctgacaagatctacgtgatgagcatcgtgtgcaagaacaacaagaaggtgaccttccgctgcacagagaaggacctggtgggagatgtgcctgaggcccgctatggccacagcatcaacgtggtgtacagccggggcaagtccatgggcgtgctgtttggaggccgcagctacatgcccagcacccacaggaccacagagaagtggaacagcgtggccgactgcctgccctgtgtgttcctggtggactttgaatttggctgtgccaccagctacatcctgcctgagctgcaggacggcctgtccttccacgtgtccatcgccaagaatgacaccatctacatcctgggcggccacagcctggccaacaacatccggcctgccaacctgtaccgcatccgggtggacctgcccctgggcagccctgctgtgaactgcaccgtgctgcccggcggcatctctgtgagcagcgccatcctgacccagaccaacaatgatgaatttgtgattgtgggcggctaccagctggagaaccagaagaggatgatctgcaacatcatcagcctggaggacaacaagattgagatccgggagatggagaccccagactggaccccagacatcaagcacagcaagatctggtttggcagcaacatgggaaatggcaccgtcttcctgggcatccctggggacaacaagcaggtggtgtctgagggcttctacttctacatgctgaagtgtgccgaggatgacaccaatgaggagcagaccaccttcaccaacagccagaccagcacagaggaccccggggacagcaccccatttgaagattctgaggagttctgcttctctgctgaggccaacagctttgatggagatgatgaatttgacacctacaatgaagatgatgaggaggatgaaagtgaaacaggctactggatcacctgctgccccacctgtgatgtggacatcaacacctgggtgcccttctacagcacagagctgaacaagccagccatgatctactgcagccatggagatggccactgggtgcacgcccagtgcatggacctggccgagaggaccctcatccacctgtctgctggcagcaacaagtactactgcaatgaacatgtggagatcgcccgggccctgcacaccccccagagggtgctgcccctgaagaagccacccatgaagagcctgaggaagaagggcagcggcaagatcctgaccccagccaagaagagcttcctgcggcggctgtttgattag

SEQ ID NO: 86698 - DNA, 216 bp, Artificial Sequence
  derived and/or modified sequence
atgagcctgcagatggtgacagtgagcaacaacatcgccctgatccagcccggcttcagcctgatgaactttgatggccaggtgttcttcttcggccagaagggctggcccaagaggagctgccccactggagtcttccacctggatgtgaagcacaaccacgtgaagctgaagcccaccatcttcagcaaggacagctgctacctgcccccatag

SEQ ID NO: 86699 - DNA, 453 bp, Artificial Sequence
  derived and/or modified sequence
atgagcctgcagatggtgacagtgagcaacaacatcgccctgatccagcccggcttcagcctgatgaactttgatggccaggtgttcttcttcggccagaagggctggcccaagaggagctgccccactggagtcttccacctggatgtgaagcacaaccacgtgaagctgaagcccaccatcttcagcaaggacagctgctacctgccccccctgcgctacccagccacctgcaccttcaagggcagcctggagagcgagaagcaccagtacatcatccacggcggcaagacccccaacaatgaggtgtctgacaagatctacgtgatgagcatcgtgtgcaagaacaacaagaaggtgaccttccgctgcacagagaaggacctggtgggagatgtgcctgaggcccgctatggccacagcatcaacgtggtgtacagccggggcaagtag

SEQ ID NO: 86700 - DNA, 1584 bp, Artificial Sequence
  derived and/or modified sequence
atgagcctgcagatggtgaccgtgagcaacaacatcgccctgatccagccaggtttctccctaatgaacttcgacggtcaggtattcttctttgggcagaaagggtggccaaagaggtcgtgccccacaggggtttttcatctagacgtcaagcacaaccatgtgaagttgaagcccacaatcttcagtaaggactcttgctacctaccacctttgaggtatcctgctacatgtacctttaaaggctccctggagtctgagaagcaccagtacattatccacggcggcaaaacccctaataacgaggtatctgataaaatatacgtgatgagcatagtatgtaaaaacaacaagaaagtgacctttagatgcaccgagaaggacctagttggtgatgtgccagaggctagatacggtcactccatcaatgtcgtatactcgagaggtaagtctatgggcgttctgtttggcggtcgctcctatatgccttctacccaccggaccaccgaaaaatggaattctgtcgcagattgcctgccctgtgtcttcctcgttgactttgaattcggttgcgcaaccagctacattctgcctgaactgcaggatggactgagttttcatgttagtatcgccaagaacgacactatatacatcctcggaggccacagcctggctaacaacattcgcccagccaacctctatcgaatcagagtcgaccttcccctcggctcccctgctgtgaattgcacagtcctgccagggggcatttccgtatcctcggctatacttacacaaaccaataatgatgagttcgtgattgtgggggggtatcagcttgagaaccaaaagagaatgatctgcaatatcatttccctggaagataacaaaatcgaaattcgggaaatggagacccctgattggacacccgacataaagcacagcaagatatggtttggatcgaacatgggaaacggaacagtatttttggggatccctggcgataacaagcaggttgttagcgaaggcttctatttctatatgttaaaatgtgccgaagacgacaccaatgaagagcagacaacattcacaaattcccaaacttccaccgaggatccgggcgatagtaccccctttgaggactccgaggaattctgctttagcgccgaggctaatagttttgacggcgatgacgagtttgacacctataacgaggacgacgaagaggacgagtccgagacagggtattggattacatgttgccctacatgtgacgtcgatattaacacttgggtgcctttctactctaccgagctgaacaagcccgctatgatctactgtagtcatggggacggacattgggtgcatgcccagtgcatggacctcgctgaacgcacgttaatccatttgagcgccggcagtaataagtactattgcaatgagcacgtggagattgccagggcactgcacacaccacagcgggttctgccactgaaaaagcccccaatgaaatctctaaggaagaagggatcgggcaagattctgactcccgcaaaaaagtccttcctgcgacgtctgttcgattag

SEQ ID NO: 86701 - DNA, 216 bp, Artificial Sequence
  derived and/or modified sequence
atgagcctgcagatggtgaccgtgagcaacaacatcgccctgatccagcccgggttctccttgatgaactttgacggccaggtgttcttttttgggcaaaagggttggcccaagcgtagctgcccgaccggcgtgtttcatctggatgtcaagcataaccatgttaagctgaagcctaccatcttcagtaaggactcttgttatttgcctccatag

SEQ ID NO: 86702 - DNA, 453 bp, Artificial Sequence
  derived and/or modified sequence
atgagcctgcagatggtgaccgtgagcaacaacatcgccctgatccagccaggcttcagcttaatgaattttgatggtcaggtcttttttttcgggcagaagggatggcccaaacgctcttgccccactggcgtctttcacctggatgtgaaacacaatcatgtaaaactgaaaccaacgattttctctaaggatagctgttaccttccccccctcagatatccagcgacctgcacgttcaaggggtccttagaatccgaaaagcaccagtacatcatacacggagggaagactccgaataatgaggtcagcgataagatttacgtaatgagtatagtgtgtaaaaataataagaaagtgacatttcggtgcacggaaaaggacctggtgggagatgttcctgaagctaggtatgggcattcaattaacgttgtgtacagtagagggaaatag

SEQ ID NO: 86703 - DNA, 1584 bp, Artificial Sequence
  derived and/or modified sequence
atgagtcttcagatggtcacagttagtaacaatatcgcactgattcagcccggattcagcttgatgaacttcgacggtcaggtgtttttttttggccagaagggttggccaaaaagatcctgccctaccggcgtgttccatctggacgtaaagcacaaccatgtcaagcttaaaccaaccatcttctctaaagattcttgttacctgccgcctctgcggtaccctgctacctgtaccttcaagggcagtttggagtctgaaaaacaccagtatatcattcatggaggcaagacaccaaataatgaggtgtccgataaaatttacgtgatgagcattgtgtgtaagaataacaaaaaagtaacttttaggtgcaccgaaaaggacctcgtcggtgacgttccagaggccagatatggacacagtatcaacgtggtgtactcgagaggtaagtctatgggtgttttgtttgggggaagatcatatatgccatctacacatcggaccacagaaaagtggaatagcgtagccgattgtcttccatgcgtgtttctcgtcgacttcgagttcggctgtgctacatcttacattctaccagagcttcaggatgggctttccttccacgtgtctattgcgaagaatgataccatctatatactcggaggacactctcttgccaacaatataaggccagctaacttatatagaattagggtcgacctgcctctgggttctcctgcggtgaactgcacagtcctgcccggaggtattagtgtttctagtgccattttaactcagactaataacgacgagttcgtaatcgtcgggggataccagttagaaaaccagaagagaatgatctgcaatattatctctttagaggataacaaaatagaaatccgagaaatggaaaccccggattggacaccggatatcaagcattcgaagatatggttcggcagtaatatgggcaacggaaccgtctttctggggatccccggagacaataaacaggtcgtgtcggaaggtttctacttttacatgctcaaatgcgcagaagacgatacaaacgaagaacaaaccaccttcacaaattctcagacttcaaccgaagaccctggagactcaaccccctttgaggattctgaggaattttgcttctctgctgaggccaattccttcgacggggacgatgagtttgatacatacaatgaagatgacgaagaagacgaaagtgagacgggctattggatcacatgttgtcctacatgtgatgtcgatattaacacgtgggttccgttttatagtactgagttaaacaaaccggctatgatctactgctcccatggcgacggacactgggtacacgcccagtgtatggatctcgctgagaggacgctgatccatttgtctgccggatctaacaaatactattgcaatgaacacgttgaaatagcccgtgcgcttcatacaccgcaaagagtgctgccacttaagaaaccccctatgaaaagcctcagaaagaaaggctccgggaagatcctgacaccggctaaaaaatcgtttttgcgaaggttgtttgactag

SEQ ID NO: 86704 - DNA, 216 bp, Artificial Sequence
  derived and/or modified sequence
atgtctctccagatggtgaccgttagcaataatatcgcgctgatccaacctggattcagcctcatgaactttgatgggcaggtttttttttttggccaaaaaggatggccaaaacgctcgtgtcccaccggggtgttccatttggatgtgaagcataatcatgttaaattgaagccaacgatattctccaaggacagctgctaccttcccccttag

SEQ ID NO: 86705 - DNA, 453 bp, Artificial Sequence
  derived and/or modified sequence
atgtcactgcaaatggtgaccgtttccaacaacattgccctaatacagccgggtttctccctgatgaacttcgatggccaggtgttcttcttcggccagaaagggtggcccaagagatcctgcccaaccggcgtgtttcatttggacgtgaagcataaccatgtgaagctgaaaccaacaatctttagcaaggattcttgctatcttccacccctgaggtaccctgccacatgtactttcaaaggcagcctcgagtctgaaaaacatcagtacattattcacgggggtaagaccccgaacaatgaagtgtcagacaaaatttatgttatgtcaattgtgtgtaagaataacaagaaagtgacttttagatgcactgagaaggacctggtcggcgatgtgcccgaggcccgatatggccatagcattaacgtggtctatagcagaggaaagtag

SEQ ID NO: 86706 - DNA, 2388 bp, Artificial Sequence
  derived and/or modified sequence
actctctttacagtcagccttctgcttgccacagtcatagtgggcagtcagtgaatcttccccaagtgctgacaattaatacctggtttagcggcaaagattcagagaggcgtgagcagcccctctggccttcagacaaaaatctacgtaccatcagaaactatgtctctgcagatggtaacagtcagtaataacatagccttaattcagccaggcttctcactgatgaattttgatggacaagttttcttctttggacaaaaaggctggcccaaaagatcctgccccactggagttttccatctggatgtaaagcataaccatgtcaaactgaagcctacaattttctctaaggattcctgctacctccctcctcttcgctacccagccacttgcacattcaaaggcagcttggagtctgaaaagcatcaatacatcatccatggagggaaaacaccaaacaatgaggtttcagataagatttatgtcatgtctattgtttgcaagaacaacaaaaaggttacttttcgctgcacagagaaagacttggtaggagatgttcctgaagccagatatggtcattccattaatgtggtgtacagccgagggaaaagtatgggtgttctctttggaggacgctcatacatgccttctacccacagaaccacagaaaaatggaatagtgtagctgactgcctgccctgtgttttcctggtggattttgaatttgggtgtgctacatcatacattcttccagaacttcaggatgggctatcttttcatgtctctattgccaaaaatgacaccatctatattttaggaggacattcacttgccaataatatccggcctgccaacctgtacagaataagggttgatcttcccctgggtagcccagctgtgaattgcacagtcttgccaggaggaatctctgtctccagtgcaatcctgactcaaactaacaatgatgaatttgttattgttggtggctatcagcttgaaaatcaaaaaagaatgatctgcaacatcatctctttagaggacaacaagatagaaattcgtgagatggagaccccagattggaccccagacattaagcacagcaagatatggtttggaagcaacatgggaaatggaactgtttttcttggcataccaggagacaataaacaagttgtttcagaaggattctatttctatatgttgaaatgtgctgaagatgatactaatgaagagcagacaacattcacaaacagtcaaacatcaacagaagatccaggggattccactccctttgaagactctgaagaattttgtttcagtgcagaagcaaatagttttgatggtgatgatgaatttgacacctataatgaagatgatgaagaagatgagtctgagacaggctactggattacatgctgccctacttgtgatgtggatatcaacacttgggtaccattctattcaactgagctcaacaaacccgccatgatctactgctctcatggggatgggcactgggtccatgctcagtgcatggatctggcagaacgcacactcatccatctgtcagcaggaagcaacaagtattactgcaatgagcatgtggagatagcaagagctctacacactccccaaagagtcctacccttaaaaaagcctccaatgaaatccctccgtaaaaaaggttctggaaaaatcttgactcctgccaagaaatcctttcttagaaggttgtttgattagttttgcaaaagcctttcagattcaggtgtatggaatttttgaatctatttttaaaatcataacattgattttaaaaatacatttttgtttatttaaaatgcctatgttttcttttagttacatgaattaagggccagaaaaaagtgtttataatgcaatgataaataaagtcattctagaccctatacattttgaaaatattttacccaaatactcaatttactaatttattcttcactgaggatttctgatctgattttttattcaacaaaccttaaacacccagaagcagtaataatcatcgaggtatgtttatatttattatataagtcttggtaacaaataacctataaagtgtttatgacaaatttagccaataaagaaattaacacccaaaagaattaaattgattattttgtgcaacataacaattcggcagttggccaaaacttaaaagcaagatctactacatcccacattagtgttctttatataccttcaagcaaccctttggattatgcccatgaacaagttagtttctcatagctttacagatgtagatataaatataaatatatgtatacatatagatagataatgttctccactgacacaaaagaagaaataaataatctacatcaa

SEQ ID NO: 86707 - DNA, 569 bp, Artificial Sequence
  derived and/or modified sequence
actctctttacagtcagccttctgcttgccacagtcatagtgggcagtcagtgaatcttccccaagtgctgacaattaatacctggtttagcggcaaagattcagagaggcgtgagcagcccctctggccttcagggattcaaagatccatctttcggttctgtaagacagtcacggcttttgtaacctcggtgcccccttcaacctcccgccccaagcacctccagggtcgtcaggggtgtagttttgagtcgcgctcctaagcatccagacaggcaggacaccgtaacgacatctctgccgggagtcccttcagactgcggtctccagacaaaaatctacgtaccatcagaaactatgtctctgcagatggtaacagtcagtaataacatagccttaattcagccaggcttctcactgatgaattttgatggacaagttttcttctttggacaaaaaggctggcccaaaagatcctgccccactggagttttccatctggatgtaaagcataaccatgtcaaactgaagcctacaattttctctaaggattcctgctacctccctcc

SEQ ID NO: 86708 - DNA, 572 bp, Artificial Sequence
  derived and/or modified sequence
aaaagtccccaggagaggctccagcaataccagggtagcggtttgcccgacaccgctccgggcgctgcagccttccggcaacccggacgttggacaaaaatctacgtaccatcagaaactatgtctctgcagatggtaacagtcagtaataacatagccttaattcagccaggcttctcactgatgaattttgatggacaagttttcttctttggacaaaaaggctggcccaaaagatcctgccccactggagttttccatctggatgtaaagcataaccatgtcaaactgaagcctacaattttctctaaggattcctgctacctccctcctcttcgctacccagccacttgcacattcaaaggcagcttggagtctgaaaagcatcaatacatcatccatggagggaaaacaccaaacaatgaggtttcagataagatttatgtcatgtctattgtttgcaagaacaacaaaaaggttacttttcgctgcacagagaaagacttggtaggagatgttcctgaagccagatatggtcattccattaatgtggtgtacagccgagggaaaag

SEQ ID NO: 86709 - DNA, 1584 bp, Artificial Sequence
  derived and/or modified sequence
atgagcctgcagatggtgaccgtgagcaacaacatcgccctgatccagcccggcttcagcctgatgaacttcgacggccaggtgttcttcttcggccagaagggctggcccaagagaagctgccccaccggcgtgttccacctggacgtgaagcacaaccacgtgaagctgaagcccaccatcttcagcaaggacagctgctacctgccccccctgagataccccgccacctgcaccttcaagggcagcctggagagcgagaagcaccagtacatcatccacggcggcaagacccccaacaacgaggtgagcgacaagatctacgtgatgagcatcgtgtgcaagaacaacaagaaggtgaccttcagatgcaccgagaaggacctggtgggcgacgtgcccgaggccagatacggccacagcatcaacgtggtgtacagcagaggcaagagcatgggcgtgctgttcggcggcagaagctacatgcccagcacccacagaaccaccgagaagtggaacagcgtggccgactgcctgccctgcgtgttcctggtggacttcgagttcggctgcgccaccagctacatcctgcccgagctgcaggacggcctgagcttccacgtgagcatcgccaagaacgacaccatctacatcctgggcggccacagcctggccaacaacatcagacccgccaacctgtacagaatcagagtggacctgcccctgggcagccccgccgtgaactgcaccgtgctgcccggcggcatcagcgtgagcagcgccatcctgacccagaccaacaacgacgagttcgtgatcgtgggcggctaccagctggagaaccagaagagaatgatctgcaacatcatcagcctggaggacaacaagatcgagatcagagagatggagacccccgactggacccccgacatcaagcacagcaagatctggttcggcagcaacatgggcaacggcaccgtgttcctgggcatccccggcgacaacaagcaggtggtgagcgagggcttctacttctacatgctgaagtgcgccgaggacgacaccaacgaggagcagaccaccttcaccaacagccagaccagcaccgaggaccccggcgacagcacccccttcgaggacagcgaggagttctgcttcagcgccgaggccaacagcttcgacggcgacgacgagttcgacacctacaacgaggacgacgaggaggacgagagcgagaccggctactggatcacctgctgccccacctgcgacgtggacatcaacacctgggtgcccttctacagcaccgagctgaacaagcccgccatgatctactgcagccacggcgacggccactgggtgcacgcccagtgcatggacctggccgagagaaccctgatccacctgagcgccggcagcaacaagtactactgcaacgagcacgtggagatcgccagagccctgcacaccccccagagagtgctgcccctgaagaagccccccatgaagagcctgagaaagaagggcagcggcaagatcctgacccccgccaagaagagcttcctgagaagactgttcgactag

SEQ ID NO: 86710 - DNA, 216 bp, Artificial Sequence
  derived and/or modified sequence
atgagcctgcagatggtgaccgtgagcaacaacatcgccctgatccagcccggcttcagcctgatgaacttcgacggccaggtgttcttcttcggccagaagggctggcccaagagaagctgccccaccggcgtgttccacctggacgtgaagcacaaccacgtgaagctgaagcccaccatcttcagcaaggacagctgctacctgcccccctag

SEQ ID NO: 86711 - DNA, 453 bp, Artificial Sequence
  derived and/or modified sequence
atgagcctgcagatggtgaccgtgagcaacaacatcgccctgatccagcccggcttcagcctgatgaacttcgacggccaggtgttcttcttcggccagaagggctggcccaagagaagctgccccaccggcgtgttccacctggacgtgaagcacaaccacgtgaagctgaagcccaccatcttcagcaaggacagctgctacctgccccccctgagataccccgccacctgcaccttcaagggcagcctggagagcgagaagcaccagtacatcatccacggcggcaagacccccaacaacgaggtgagcgacaagatctacgtgatgagcatcgtgtgcaagaacaacaagaaggtgaccttcagatgcaccgagaaggacctggtgggcgacgtgcccgaggccagatacggccacagcatcaacgtggtgtacagcagaggcaagtag

SEQ ID NO: 86712 - protein, 414 aa, Artificial Sequence
  derived and/or modified sequence
MTKARLFRLWLVLGSVFMILLIIVYWDSAGAAHFYLHTSFSRPHTGPPLPTPGPDRDRELTADSDVDEFLDKFLSAGVKQSDLPRKETEQPPAPGSMEESVRGYDWSPRDARRSPDQGRQQAERRSVLRGFCANSSLAFPTKERAFDDIPNSELSHLIVDDRHGAIYCYVPKVACTNWKRVMIVLSGSLLHRGAPYRDPLRIPREHVHNASAHLTFNKFWRRYGKLSRHLMKVKLKKYTKFLFVRDPFVRLISAFRSKFELENEEFYRKFAVPMLRLYANHTSLPASAREAFRAGLKVSFANFIQYLLDPHTEKLAPFNEHWRQVYRLCHPCQIDYDFVGKLETLDEDAAQLLQLLQVDRQLRFPPSYRNRTASSWEEDWFAKIPLAWRQQLYKLYEADFVLFGYPKPENLLRD

SEQ ID NO: 86713 - protein, 245 aa, Artificial Sequence
  derived and/or modified sequence
MTKARLFRLWLVLGSVFMILLIIVYWDSAGAAHFYLHTSFSRPHTGPPLPTPGPDRDRELTADSDVDEFLDKFLSAGVKQSDLPRKETEQPPAPGSMEESVRGYDWSPRDARRSPDQGRQQAERRSVLRGFCANSSLAFPTKERAFDDIPNSELSHLIVDDRHGAIYCYVPKVACTNWKRVMIVLSGSLLHRGAPYRDPLRIPREHVHNASAHLTFNKFWRRYGKLSRHLMKVKLKKYTKFLFVR

SEQ ID NO: 86714 - DNA, 1245 bp, Artificial Sequence
  derived and/or modified sequence
atgaccaaggccagactgttcagactgtggctggtgctgggcagcgtgttcatgatcctgctgatcatcgtgtactgggacagcgccggcgccgcccacttctacctgcacaccagcttcagcagaccccacaccggcccccccctgcccacccccggccccgacagagacagagagctgaccgccgacagcgacgtggacgagttcctggacaagttcctgagcgccggcgtgaagcagagcgacctgcccagaaaggagaccgagcagccccccgcccccggcagcatggaggagagcgtgagaggctacgactggagccccagagacgccagaagaagccccgaccagggcagacagcaggccgagagaagaagcgtgctgagaggcttctgcgccaacagcagcctggccttccccaccaaggagagagccttcgacgacatccccaacagcgagctgagccacctgatcgtggacgacagacacggcgccatctactgctacgtgcccaaggtggcctgcaccaactggaagagagtgatgatcgtgctgagcggcagcctgctgcacagaggcgccccctacagagaccccctgagaatccccagagagcacgtgcacaacgccagcgcccacctgaccttcaacaagttctggagaagatacggcaagctgagcagacacctgatgaaggtgaagctgaagaagtacaccaagttcctgttcgtgagagaccccttcgtgagactgatcagcgccttcagaagcaagttcgagctggagaacgaggagttctacagaaagttcgccgtgcccatgctgagactgtacgccaaccacaccagcctgcccgccagcgccagagaggccttcagagccggcctgaaggtgagcttcgccaacttcatccagtacctgctggacccccacaccgagaagctggcccccttcaacgagcactggagacaggtgtacagactgtgccacccctgccagatcgactacgacttcgtgggcaagctggagaccctggacgaggacgccgcccagctgctgcagctgctgcaggtggacagacagctgagattcccccccagctacagaaacagaaccgccagcagctgggaggaggactggttcgccaagatccccctggcctggagacagcagctgtacaagctgtacgaggccgacttcgtgctgttcggctaccccaagcccgagaacctgctgagagactag

SEQ ID NO: 86715 - DNA, 738 bp, Artificial Sequence
  derived and/or modified sequence
atgaccaaggccagactgttcagactgtggctggtgctgggcagcgtgttcatgatcctgctgatcatcgtgtactgggacagcgccggcgccgcccacttctacctgcacaccagcttcagcagaccccacaccggcccccccctgcccacccccggccccgacagagacagagagctgaccgccgacagcgacgtggacgagttcctggacaagttcctgagcgccggcgtgaagcagagcgacctgcccagaaaggagaccgagcagccccccgcccccggcagcatggaggagagcgtgagaggctacgactggagccccagagacgccagaagaagccccgaccagggcagacagcaggccgagagaagaagcgtgctgagaggcttctgcgccaacagcagcctggccttccccaccaaggagagagccttcgacgacatccccaacagcgagctgagccacctgatcgtggacgacagacacggcgccatctactgctacgtgcccaaggtggcctgcaccaactggaagagagtgatgatcgtgctgagcggcagcctgctgcacagaggcgccccctacagagaccccctgagaatccccagagagcacgtgcacaacgccagcgcccacctgaccttcaacaagttctggagaagatacggcaagctgagcagacacctgatgaaggtgaagctgaagaagtacaccaagttcctgttcgtgagatag

SEQ ID NO: 86716 - DNA, 1245 bp, Artificial Sequence
  derived and/or modified sequence
atgaccaaagccaggctatttcggctttggttagtgctgggtagcgtgtttatgattttgctgatcatcgtgtactgggacagtgccggtgcggcacacttctacttgcatacttcatttagtcggccccacacaggcccccctcttcccacccctggaccagatcgcgatcgcgaactgactgcagactcggatgtcgatgagttcctggataagtttctcagcgctggggtgaagcaatccgacttgcccaggaaggagaccgaacagccacctgcgcctggctctatggaagagagcgttcggggatacgactggtcaccgagggatgcccgacggtcccccgaccagggcaggcagcaggccgagaggaggagtgtactgcgcggcttttgtgctaactccagccttgccttccccacaaaggaacgagccttcgatgatatcccaaattcggaactgtcacatctgatcgtggacgacaggcatggagctatttattgctacgtccccaaggtggcctgcacgaattggaaaagagtgatgatcgtgttgtccggaagtctgttgcaccgaggagctccctaccgagaccccctccgtatcccaagagagcacgttcacaatgccagtgctcacctgacattcaacaaattctggcgccgatatgggaaactgtccagacacctgatgaaggtaaaacttaagaaatatacgaaatttctgttcgttagagacccgtttgtcagactgatcagcgcgttccggtccaaattcgagctggaaaacgaagaattttaccgcaaatttgcagttcccatgctgcggctgtatgccaaccataccagtctccccgcctctgctagggaggctttccgcgcaggcctcaaggtcagcttcgccaattttattcagtatttgctcgaccctcatactgagaaactggctcctttcaacgaacactggaggcaggtatatagactgtgccacccctgccagattgactatgattttgtcggaaaactcgaaacactcgatgaagacgctgctcagctgctccagctgctgcaggtcgacagacagcttcgatttccacccagctatcgcaataggaccgccagttcatgggaggaggattggtttgccaaaattcccctggcatggcgccagcagctgtacaagctctacgaggctgactttgtattattcggctatcccaaaccagagaacctgctccgagattag

SEQ ID NO: 86717 - DNA, 738 bp, Artificial Sequence
  derived and/or modified sequence
atgacaaaggcacgcctgttcagactgtggctggtgttaggttccgtttttatgatcttactgattattgtttattgggactctgccggcgccgcccacttctacctgcacacatcattctctagaccccatacaggacctcctctgcccacgcctgggccagatagagatcgagagctcactgccgatagcgatgtagatgagtttctggacaagttcctgagcgctggtgtcaaacagtctgatctgccaaggaaagagactgaacaaccacccgccccgggttccatggaagagagcgtaagggggtacgattggagccctcgagacgctaggcgctccccagaccaggggagacagcaggccgagcggaggagtgtgttgagagggttttgtgccaattccagtttagccttcccaactaaggagcgagctttcgatgatattcccaattcggagctctcccacctgattgtagatgataggcacggcgcaatttactgctacgtccccaaggtcgcatgcacaaactggaagcgggtgatgattgtcttatctggaagcctactacatagaggagctccgtaccgcgacccgcttcgcatacctagggaacacgttcacaacgcctcagcccacctgacttttaataaattctggaggcgctacggtaagctcagtcgacacttaatgaaagttaagctgaagaaatacaccaagtttctgttcgtgagatag

SEQ ID NO: 86718 - DNA, 1245 bp, Artificial Sequence
  derived and/or modified sequence
atgaccaaggcccggctcttccggctgtggctggtgctgggctctgtgttcatgatcctgctgatcatcgtgtactgggacagcgctggagctgcccacttctacctgcacaccagcttcagccggccccacactggaccacccctgcccaccccaggccctgaccgggaccgggagctgacagctgacagtgatgtggatgagttcctggacaagttcctgtctgctggggtgaagcagagcgacctgcccaggaaggagacagagcagcccccagcccctggctccatggaggagagcgtgcggggctatgactggagccccagagatgcccggcgcagcccagaccagggccggcagcaggccgagcggcgctctgtgctgcggggcttctgtgccaacagcagcctggccttccccaccaaggagcgggcctttgatgacatccccaacagcgagctgagccacctgattgtggatgacagacatggagccatctactgctacgtgcccaaggtggcctgcaccaactggaagagggtgatgattgtgctgagcggcagcctgctgcacagaggagccccctacagagaccccctgcgcatcccccgggagcacgtgcacaatgccagcgcccacctgaccttcaacaagttctggaggagatatggcaagctgagccgccacctgatgaaggtgaagctgaagaagtacaccaagttcctgtttgtgcgggacccctttgtgcggctcatcagcgccttccgcagcaagtttgagctggagaatgaggagttctacaggaagtttgctgtgcccatgctgcggctgtatgccaaccacaccagcctgcctgccagcgcccgggaggccttccgggccggcctgaaggtgtcctttgccaacttcatccagtacctgctggacccccacacagagaagctggcccccttcaatgagcactggaggcaggtgtaccgcctgtgccacccctgccagattgattatgactttgtgggcaagctggagaccctggatgaagatgctgcccagctgctgcagctgctgcaggtggaccggcagctgcgcttccccccatcctacagaaacagaacagccagctcctgggaggaggactggtttgccaagatccccctggcctggaggcagcagctgtacaagctgtatgaggccgactttgtgctgtttggctaccccaagccagagaacctgctgcgggactag

SEQ ID NO: 86719 - DNA, 738 bp, Artificial Sequence
  derived and/or modified sequence
atgaccaaggcccggctcttccggctgtggctggtgctgggctctgtgttcatgatcctgctgatcatcgtgtactgggacagcgctggagctgcccacttctacctgcacaccagcttcagccggccccacactggaccacccctgcccaccccaggccctgaccgggaccgggagctgacagctgacagtgatgtggatgagttcctggacaagttcctgtctgctggggtgaagcagagcgacctgcccaggaaggagacagagcagcccccagcccctggctccatggaggagagcgtgcggggctatgactggagccccagagatgcccggcgcagcccagaccagggccggcagcaggccgagcggcgctctgtgctgcggggcttctgtgccaacagcagcctggccttccccaccaaggagcgggcctttgatgacatccccaacagcgagctgagccacctgattgtggatgacagacatggagccatctactgctacgtgcccaaggtggcctgcaccaactggaagagggtgatgattgtgctgagcggcagcctgctgcacagaggagccccctacagagaccccctgcgcatcccccgggagcacgtgcacaatgccagcgcccacctgaccttcaacaagttctggaggagatatggcaagctgagccgccacctgatgaaggtgaagctgaagaagtacaccaagttcctgtttgtgaggtag

SEQ ID NO: 86720 - DNA, 1245 bp, Artificial Sequence
  derived and/or modified sequence
atgaccaaggcccggctgttccggctgtggctggtgctgggcagcgtgttcatgattcttcttataatcgtttactgggattccgccggcgctgcgcacttctatctccatactagcttctcaagaccacacacaggtccccccctgccaactcccgggccagatcgggacagagaactgaccgctgactccgacgtagatgagtttttagacaagttcctgtctgccggggttaaacagagcgatcttccccgcaaagagacggagcaaccaccagccccagggagcatggaagagagcgttcgaggctacgattggtctccacgggatgcccggcggagcccagatcaggggaggcagcaggcggagaggcggagcgttctaagaggtttttgtgctaactcttcgctggccttcccaactaaagagagggcttttgacgacattcccaattccgagctgagccacctaatagttgacgacagacacggcgctatctactgttatgttcccaaagtcgcctgcactaattggaaacgtgtgatgatcgtgcttagcgggtccttattacatcgcggtgctccatatcgggaccctctgcgaattcctagggagcacgtacataacgctagtgctcatcttacgttcaataaattttggcgccgctacggcaaactgtccaggcacctgatgaaagtgaagctaaagaagtacactaaatttctttttgttagagatccatttgtgaggcttatctccgcgttccgtagcaagtttgagctggagaacgaggagttttaccgtaagttcgctgtgccgatgttgaggctttacgctaaccacacatctttgcctgcatctgctagagaggcattcagggccggactgaaagtgtcttttgcgaattttattcagtatttattagatcctcacaccgaaaaattggctcccttcaacgaacactggcggcaggtttataggttatgccacccctgccaaatcgattacgatttcgtggggaagttggagactttagatgaggatgccgcccagctgttgcagctactgcaagtcgatagacagctgaggttccccccctcctacaggaatagaacggcaagttcttgggaagaggactggtttgcaaagatccctcttgcctggaggcagcagctctacaagctatacgaagccgacttcgtcctgtttgggtaccctaagccagagaatctgctgagagattag

SEQ ID NO: 86721 - DNA, 738 bp, Artificial Sequence
  derived and/or modified sequence
atgaccaaggcccggctgttccggctgtggctggtgctgggcagcgttttcatgatactgctcatcattgtgtattgggacagcgcgggcgccgctcatttctatctccacacttcgttttcaagacctcacactgggcctcccctccccacacccggacctgacagagatagggagcttactgctgattctgacgtggatgagttcctcgacaaattcttgtcagctggcgtaaaacagagtgatctcccccggaaagagacagaacagccaccagctccagggagtatggaagagagcgtcaggggatatgactggtcacccagagatgctagaagatccccagaccagggacggcagcaggccgaacgacggagcgtgcttagaggcttttgcgcaaattcaagcttagcatttccaactaaagagcgggccttcgacgatatccccaacagtgagctttcccacttaatcgtggacgatcgacatggcgctatctattgttatgtgcctaaggtggcttgtaccaattggaagagggtgatgatcgtgctgtccggctctctgctccacagaggtgccccttacagggaccctctgcggatcccacgagagcatgtacataacgcaagcgcccacctcacattcaacaaattctggagacgctacggtaagctgtcaagacatctcatgaaggtaaagttaaagaagtatacgaagtttctgtttgtgcgctag

SEQ ID NO: 86722 - DNA, 1245 bp, Artificial Sequence
  derived and/or modified sequence
atgacgaaggctagacttttcaggctgtggctcgttcttggaagtgttttcatgattctcttaataatcgtctactgggatagtgccggtgcagcacatttctacctgcacacctccttctcccggcctcacacaggacccccactacctaccccagggcctgaccgcgatcgtgagctgaccgcagactctgacgtcgacgaattcctggataaattcctgagcgcaggggtaaaacagtctgaccttccgcgaaaagagactgagcaacctcccgcaccaggatcaatggaggaatcggttcgagggtacgattggagtcccagggatgccaggagatcaccagaccagggcagacaacaagccgagcgtaggtccgttcttagggggttctgcgccaactcctccctggcctttcccaccaaagagagagcctttgatgatattcctaattcagagctgagccatcttattgttgacgataggcacggcgcaatctactgttatgtccccaaggtggcgtgcacaaattggaagagggtgatgatcgtgttatccggcagcctcctgcatcgaggggcaccctacagagatcccctccgcatacccagagagcacgtgcacaacgcctccgcccacctaaccttcaacaagttctggaggagatacggaaagctgtcacggcacctgatgaaggtgaagcttaagaagtataccaaatttctgttcgtgagggacccattcgtcaggttgattagcgcattccggtctaaattcgagctggaaaacgaggaattctatagaaagtttgcagtgcctatgctccgtctttatgctaaccacacaagcctgcccgcatcagccagagaagctttcagagccggtctaaaggtcagctttgccaacttcatccagtatttgctcgacccgcacaccgaaaaacttgctccatttaatgagcattggaggcaggtctatcgcctgtgccacccctgtcagattgactacgacttcgtggggaagttggagacccttgacgaggatgcagctcagctgctccagctgttgcaagttgataggcagttacgctttccgccttcctaccgcaatcggactgccagcagttgggaagaggactggttcgccaagattcccctggcctggcgtcagcaactctacaaactctatgaagccgacttcgtgctcttcggataccctaaacccgaaaatttgttgcgggattag

SEQ ID NO: 86723 - DNA, 738 bp, Artificial Sequence
  derived and/or modified sequence
atgacaaaggctagattgtttcgactctggttggttttaggcagcgtgttcatgatcctgctgatcatcgtgtactgggactctgcgggagctgcccacttctatctgcatacttcattcagccggccacacaccgggcctcccctgcctactccaggtcccgacagggatagggaactgactgcggactcagatgtggacgagtttctcgataagttcctgagcgccggagtaaaacagtcagatctgccgagaaaggagacagaacagcctccggctcccggatctatggaagagtccgttcgtggctacgattggagccccagagacgccaggaggagcccagatcagggcagacagcaggcagaaaggcgaagcgtgctgcgcggtttttgcgctaatagcagcttagccttcccaactaaggagagagcattcgatgacattcctaactcagagctttcccatttgattgtggatgatcgccatggagcaatttattgttatgtgcctaaggttgcatgcaccaattggaaaagagttatgatagtgttatcaggatccctcttacatcggggtgcaccctaccgagatccattgcggatcccaagagaacacgtgcacaatgcttccgctcacctgaccttcaacaaattttggcgtagatacggaaaactcagtcggcatctcatgaaggtcaagcttaagaaatacacaaaatttctgttcgtgagatag

SEQ ID NO: 86724 - DNA, 2103 bp, Artificial Sequence
  derived and/or modified sequence
gggctgcctctggggggtccgctagtcgcggggcggcggcggcggctgcgggcgcgaggttcccagcaggatgccccggctctgcaggaagctgaagtgagaggcccggagagggcccagcccgcccggggcaggatgaccaaggcccggctgttccggctgtggctggtgctggggtcggtgttcatgatcctgctgatcatcgtgtactgggacagcgcaggcgccgcgcacttctacttgcacacgtccttctctaggccgcacacggggccgccgctgcccacgcccgggccggacagggacagggagctcacggccgactccgatgtcgacgagtttctggacaagtttctcagtgctggcgtgaagcagagcgaccttcccagaaaggagacggagcagccgcctgcgccggggagcatggaggagagcgtgagaggctacgactggtccccgcgcgacgcccggcgcagcccagaccagggccggcagcaggcggagcggaggagcgtgctgcggggcttctgcgccaactccagcctggccttccccaccaaggagcgcgcattcgacgacatccccaactcggagctgagccacctgatcgtggacgaccggcacggggccatctactgctacgtgcccaaggtggcctgcaccaactggaagcgcgtgatgatcgtgctgagcggaagcctgctgcaccgcggtgcgccctaccgcgacccgctgcgcatcccgcgcgagcacgtgcacaacgccagcgcgcacctgaccttcaacaagttctggcgccgctacgggaagctctcccgccacctcatgaaggtcaagctcaagaagtacaccaagttcctcttcgtgcgcgaccccttcgtgcgcctgatctccgccttccgcagcaagttcgagctggagaacgaggagttctaccgcaagttcgccgtgcccatgctgcggctgtacgccaaccacaccagcctgcccgcctcggcgcgcgaggccttccgcgctggcctcaaggtgtccttcgccaacttcatccagtacctgctggacccgcacacggagaagctggcgcccttcaacgagcactggcggcaggtgtaccgcctctgccacccgtgccagatcgactacgacttcgtggggaagctggagactctggacgaggacgccgcgcagctgctgcagctactccaggtggaccggcagctccgcttccccccgagctaccggaacaggaccgccagcagctgggaggaggactggttcgccaagatccccctggcctggaggcagcagctgtataaactctacgaggccgactttgttctcttcggctaccccaagcccgaaaacctcctccgagactgaaagctttcgcgttgctttttctcgcgtgcctggaacctgacgcacgcgcactccagtttttttatgacctacgattttgcaatctgggcttcttgttcactccactgcctctatccattgagtactgtatcgatattgttttttaagattaatatatttcaggtatttaatacgaaatgtggaagggaatgctggagtaaaatatcccctctcccctccgcccgcccacccgcccgcccgctcgcccgctcgcccgctcctgtggtttttctgagcgtgcgggcgccgggaggggatgctgaggctgatggagctgcctccagggctagggccactcaccggaggagggcggggcctgcacttgaagtcaggccgcacctgtctgtttttggaagggtagccgacaaatccttccagagggaaagttctttgtttaagtgttgtacttgaaaaggtcaatcttcagggcttcctgtttgaagtcaagtcagaggtaaaccggtcagttacagaagcaggatttctaggatttctaactccagctgttcccatactgtctagtttaaattatggctgttaaggccgggcgggtgactcaggcaggtaatcccagaactttgggaggcccagacagaaggatcgcttgaggtcaggaatttgagacctggccaacatggtgaaaccctgtctctactaaaaaaaaaaaaaaaaaaaaaaaaaaaa

SEQ ID NO: 86725 - DNA, 921 bp, Artificial Sequence
  derived and/or modified sequence
ggatccccagctcccgagggcccccgtgtgcctgctgtcacctgaacggggctccccggccccgccgaccgcagccctggagcctgcagacgccagcagcaccggcaggttcccagcaggatgccccggctctgcaggaagctgaagtgagaggcccggagagggcccagcccgcccggggcaggatgaccaaggcccggctgttccggctgtggctggtgctggggtcggtgttcatgatcctgctgatcatcgtgtactgggacagcgcaggcgccgcgcacttctacttgcacacgtccttctctaggccgcacacggggccgccgctgcccacgcccgggccggacagggacagggagctcacggccgactccgatgtcgacgagtttctggacaagtttctcagtgctggcgtgaagcagagcgaccttcccagaaaggagacggagcagccgcctgcgccggggagcatggaggagagcgtgagaggctacgactggtccccgcgcgacgcccggcgcagcccagaccagggccggcagcaggcggagcggaggagcgtgctgcggggcttctgcgccaactccagcctggccttccccaccaaggagcgcgcattcgacgacatccccaactcggagctgagccacctgatcgtggacgaccggcacggggccatctactgctacgtgcccaaggtggcctgcaccaactggaagcgcgtgatgatcgtgctgagcggaagcctgctgcaccgcggtgcgccctaccgcgacccgctgcgcatcccgcgcgagcacgtgcacaacgccagcgcgcacctgaccttcaacaagttctggcgccgctacgggaagctctcccgccacctcatgaaggtcaagctcaagaagtacaccaagttcctcttcgtgcgcg

SEQ ID NO: 86726 - protein, 142 aa, Artificial Sequence
  derived and/or modified sequence
MHQPPESTAAAAAAADISARKMAHPAMFPRRGSGSGSASALNAAGTGVGSNATSSEDFPPPSLLQPPPPAASSTSGPQPPPPQSLNLLSQAQLQAQPLAPGGTQMKKKSGFQITSVTPAQISASISSNNSIAEDTESYDDLD

SEQ ID NO: 86727 - protein, 570 aa, Artificial Sequence
  derived and/or modified sequence
MHQPPESTAAAAAAADISARKMAHPAMFPRRGSGSGSASALNAAGTGVGSNATSSEDFPPPSLLQPPPPAASSTSGPQPPPPQSLNLLSQAQLQAQPLAPGGTQMKKKSGFQITSVTPAQISASISSNNSIAEDTESYDDLDESHTEDLSSSEILDVSLSRATDLGEPERSSSEETLNNFQEAETPGAVSPNQPHLPQPHLPHLPQQNVVINGNAHPHHLHHHHQIHHGHHLQHGHHHPSHVAVASASITGGPPSSPVSRKLSTTGSSDSITPVAPTSAVSSSGSPASVMTNMRAPSTTGGIGINSVTGTSTVNNVNITAVGSFNPNVTSSMLGNVNISTSNIPSAAGVSVGPGVTSGVNVNILSGMGNGTISSSAAVSSVPNAAAGMTGGSVSSQQQQPTVNTSRFRVVKLDSSSEPFKKGRWTCTEFYEKENAVPATEGVLINKVVETVKQNPIEVTSERESTSGSSVSSSVSTLSHYTESVGSGEMGAPTVVVQQQQQQQQQQQQQPALQGVTLQQMDFGSTGPQSIPAVSIPQSISQSQISQVQLQSQELSYLTMKVVLLIVYLCM

SEQ ID NO: 86728 - DNA, 429 bp, Artificial Sequence
  derived and/or modified sequence
atgcaccagccccccgagagcaccgccgccgccgccgccgccgccgacatcagcgccagaaagatggcccaccccgccatgttccccagaagaggcagcggcagcggcagcgccagcgccctgaacgccgccggcaccggcgtgggcagcaacgccaccagcagcgaggacttccccccccccagcctgctgcagccccccccccccgccgccagcagcaccagcggcccccagcccccccccccccagagcctgaacctgctgagccaggcccagctgcaggcccagcccctggcccccggcggcacccagatgaagaagaagagcggcttccagatcaccagcgtgacccccgcccagatcagcgccagcatcagcagcaacaacagcatcgccgaggacaccgagagctacgacgacctggactag

SEQ ID NO: 86729 - DNA, 1713 bp, Artificial Sequence
  derived and/or modified sequence
atgcaccagccccccgagagcaccgccgccgccgccgccgccgccgacatcagcgccagaaagatggcccaccccgccatgttccccagaagaggcagcggcagcggcagcgccagcgccctgaacgccgccggcaccggcgtgggcagcaacgccaccagcagcgaggacttccccccccccagcctgctgcagccccccccccccgccgccagcagcaccagcggcccccagcccccccccccccagagcctgaacctgctgagccaggcccagctgcaggcccagcccctggcccccggcggcacccagatgaagaagaagagcggcttccagatcaccagcgtgacccccgcccagatcagcgccagcatcagcagcaacaacagcatcgccgaggacaccgagagctacgacgacctggacgagagccacaccgaggacctgagcagcagcgagatcctggacgtgagcctgagcagagccaccgacctgggcgagcccgagagaagcagcagcgaggagaccctgaacaacttccaggaggccgagacccccggcgccgtgagccccaaccagccccacctgccccagccccacctgccccacctgccccagcagaacgtggtgatcaacggcaacgcccacccccaccacctgcaccaccaccaccagatccaccacggccaccacctgcagcacggccaccaccaccccagccacgtggccgtggccagcgccagcatcaccggcggcccccccagcagccccgtgagcagaaagctgagcaccaccggcagcagcgacagcatcacccccgtggcccccaccagcgccgtgagcagcagcggcagccccgccagcgtgatgaccaacatgagagcccccagcaccaccggcggcatcggcatcaacagcgtgaccggcaccagcaccgtgaacaacgtgaacatcaccgccgtgggcagcttcaaccccaacgtgaccagcagcatgctgggcaacgtgaacatcagcaccagcaacatccccagcgccgccggcgtgagcgtgggccccggcgtgaccagcggcgtgaacgtgaacatcctgagcggcatgggcaacggcaccatcagcagcagcgccgccgtgagcagcgtgcccaacgccgccgccggcatgaccggcggcagcgtgagcagccagcagcagcagcccaccgtgaacaccagcagattcagagtggtgaagctggacagcagcagcgagcccttcaagaagggcagatggacctgcaccgagttctacgagaaggagaacgccgtgcccgccaccgagggcgtgctgatcaacaaggtggtggagaccgtgaagcagaaccccatcgaggtgaccagcgagagagagagcaccagcggcagcagcgtgagcagcagcgtgagcaccctgagccactacaccgagagcgtgggcagcggcgagatgggcgcccccaccgtggtggtgcagcagcagcagcagcagcagcagcagcagcagcagcagcccgccctgcagggcgtgaccctgcagcagatggacttcggcagcaccggcccccagagcatccccgccgtgagcatcccccagagcatcagccagagccagatcagccaggtgcagctgcagagccaggagctgagctacctgaccatgaaggtggtgctgctgatcgtgtacctgtgcatgtag

SEQ ID NO: 86730 - DNA, 429 bp, Artificial Sequence
  derived and/or modified sequence
atgcatcagccacctgagagtacggctgctgccgcagctgccgctgatatttctgcccggaagatggcccacccagcaatgtttcccagacgggggagtgggtcaggctcggcttcagcactcaatgccgcagggacaggagttgggagtaatgcaactagcagcgaagactttccacctccatcactccttcagcccccccctcctgctgcctccagcacgagtggtccgcagcctccacctccccaatctctaaacctcttaagccaagcccagctgcaagctcaacctctcgcccccggcgggactcagatgaagaagaagtcagggttccagattacatccgtgacacctgcacagattagcgcgtccattagttccaacaatagcattgccgaggatacagagtcctatgatgacctcgattag

SEQ ID NO: 86731 - DNA, 1713 bp, Artificial Sequence
  derived and/or modified sequence
atgcaccagcctcccgagagtaccgccgccgctgctgcagcagcagatatcagcgcacgaaaaatggctcaccctgcaatgttcccacggaggggttctggctcaggaagtgcctctgctctcaacgccgccggtactggggtaggcagtaacgccacgagcagtgaggatttccccccaccttccctccttcagcctcctccaccagccgcatcttctacatcagggccacagccaccacccccacagtccctcaacttgcttagccaggcacagcttcaggctcaacctctcgctccgggcggaacccagatgaaaaaaaaatcagggttccaaattacaagcgtcacaccagctcagatatcagcatctatttctagcaataatagcattgccgaggacactgagagttatgatgatttggatgagagtcacactgaagaccttagctccagcgaaatcctcgacgtcagcctcagccgggccactgatctgggtgagccagagaggtcaagtagcgaggaaacattaaacaattttcaagaggccgaaacacctggagccgtgtcacctaaccagcctcatctcccacagccgcatctcccacatctcccgcagcagaacgtcgtgattaacggcaatgcccacccccaccatctgcaccaccaccatcagattcaccatggtcaccatctccagcacggacaccaccatccatcccatgtggctgtcgcctcagcctctatcacaggaggaccaccctcttctcccgtcagcagaaaactatccactaccggttcttctgactccattactcctgtggccccaaccagtgccgtcagctctagtggttctcctgccagtgtcatgaccaacatgcgggcaccctcaactacagggggcattggcattaattctgtcaccggcacgagcacagtaaataacgttaacattactgcagtggggtcctttaacccaaacgtgaccagctcaatgttagggaatgtgaatatttccaccagcaacatacctagcgctgccggagtttcagtagggcctggagtgacttccggtgtgaacgtcaacattctttcaggaatgggcaatggcacaatcagttcgtccgccgccgtaagttcagttccaaacgcagccgcagggatgacaggagggagtgtctctagccagcagcaacagccaaccgtgaacacatctcggttcagagtagtcaaacttgatagcagcagcgaaccctttaagaaaggtagatggacttgcactgagttttatgagaaggagaatgccgtacccgccaccgagggcgtgctgatcaataaggtcgtcgagactgtgaagcagaaccctatagaggtgaccagcgagcgcgaatcaacctctggcagttctgtaagcagttccgtcagtacgctatcacactacactgaatcagtcggctccggagaaatgggtgcgcctactgtcgtggtgcagcagcagcaacagcagcagcagcaacagcagcagcagcctgcacttcagggggtcacattgcagcagatggactttggcagtacagggcctcaatcaatacccgccgttagcattccgcaatctattagccaatctcaaatctctcaggtgcagctgcaatcccaggaactgagttatctcacgatgaaggttgttctcttaatcgtatatctatgtatgtag

SEQ ID NO: 86732 - DNA, 429 bp, Artificial Sequence
  derived and/or modified sequence
atgcaccagcccccagagagcacagctgctgctgctgctgctgctgacatcagcgccaggaagatggcccacccagccatgttcccccggcggggcagcggcagcggcagcgccagcgccctgaatgctgctggcaccggggtgggcagcaatgccaccagcagcgaggacttccccccacccagcctgctgcagcccccacctcctgctgccagcagcaccagcggcccccagcccccaccaccccagagcctgaacctgctgagccaggcccagctgcaggcccagcccctggcccctgggggcacccagatgaagaagaagagcggcttccagatcacctctgtgaccccagcccagatcagcgccagcatcagcagcaacaacagcattgctgaggacacagagagctatgatgacctggactag

SEQ ID NO: 86733 - DNA, 1713 bp, Artificial Sequence
  derived and/or modified sequence
atgcaccagcccccagagagcacagctgctgctgctgctgctgctgacatcagcgccaggaagatggcccacccagccatgttcccccggcggggcagcggcagcggcagcgccagcgccctgaatgctgctggcaccggggtgggcagcaatgccaccagcagcgaggacttccccccacccagcctgctgcagcccccacctcctgctgccagcagcaccagcggcccccagcccccaccaccccagagcctgaacctgctgagccaggcccagctgcaggcccagcccctggcccctgggggcacccagatgaagaagaagagcggcttccagatcacctctgtgaccccagcccagatcagcgccagcatcagcagcaacaacagcattgctgaggacacagagagctatgatgacctggatgagagccacacagaggacctgagcagcagcgagatcctggatgtgtccctgagccgggccacagacctgggggagcctgagaggagcagcagcgaggagaccctgaacaacttccaggaggccgagaccccaggagctgtgagccccaaccagccccacctgccccagccccacctgccccacctgccccagcagaatgtggtgatcaatggaaatgcccacccccaccacctgcaccaccaccaccagatccaccacggccaccacctgcagcacggccaccaccaccccagccacgtggccgtggccagcgccagcatcaccggcggcccccccagcagccctgtgtccaggaagctgagcaccaccggcagcagtgacagcatcacccctgtggcccccaccagcgctgtgagcagcagcggcagccctgcctctgtgatgaccaacatgagggcccccagcaccactggaggcatcggcatcaacagcgtgacaggcaccagcacagtgaacaacgtgaacatcacagctgtgggcagcttcaaccccaacgtgaccagctccatgctgggcaatgtgaacatcagcaccagcaacatccccagcgctgctggggtgtctgtgggccctggggtgaccagcggcgtgaatgtgaacatcctgagcggcatgggaaatggcaccatcagcagcagcgctgctgtgtcctctgtgcccaatgctgctgctggcatgactggaggctctgtgagcagccagcagcagcagcccaccgtgaacaccagccgcttccgggtggtgaagctggacagcagcagcgagcccttcaagaagggccgctggacctgcacagagttctatgagaaggaaaatgctgtgcctgccacagaaggagtgctgatcaacaaggtggtggagaccgtgaagcagaaccccatcgaggtgaccagcgagcgggagagcaccagcggcagctctgtgagcagctctgtgtccaccctgagccactacacagaatctgtgggcagcggggagatgggcgcccccaccgtggtggtgcagcagcagcagcagcagcagcagcagcagcagcagcagcctgccctgcagggcgtgaccctgcagcagatggactttggcagcacaggcccccagagcatcccagctgtgtccatcccccagagcatcagccagagccagatcagccaggtgcagctgcagagccaggagctgagctacctgaccatgaaggtggtgctgctgattgtgtacctgtgcatgtag

SEQ ID NO: 86734 - DNA, 429 bp, Artificial Sequence
  derived and/or modified sequence
atgcaccagccccccgagagcaccgccgccgccgccgccgccgccgacattagtgcacgaaagatggcacaccctgctatgtttcctaggcgagggagcggcagcggtagtgcctcggctctcaatgccgccgggactggcgtggggagcaacgcaacgtcttccgaggacttcccaccaccgtcccttctccaaccacccccccctgccgcctcatccacctctggacctcagcctcccccaccacagtcacttaacctactctcacaagctcagttacaggcccagccactcgcccccgggggcactcagatgaagaaaaagtccgggtttcaaatcacctcagtaacacctgcacagatatccgcctccatttcatcaaataacagtatcgccgaagataccgaaagctatgatgacctggactag

SEQ ID NO: 86735 - DNA, 1713 bp, Artificial Sequence
  derived and/or modified sequence
atgcaccagccccccgagagcaccgccgccgccgccgccgccgccgatattagtgctagaaagatggcccacccagccatgttccctagacgaggctccggatccgggagtgccagcgctctgaacgcggcaggtacaggagtgggctctaacgccaccagctccgaagacttcccgcctcccagcctactgcagcctcccccgcccgcggcaagttcgacttcagggccacagccacccccacctcagtcactgaacttgctttctcaggcccaactacaggcgcaacccctcgctcctggcgggacccagatgaaaaagaagtccggcttccagattacctcagtgactcccgctcagatatcagcctctatctcgagtaataacagcatcgcagaggatactgagtcatatgacgacctcgatgagagtcacactgaggatctgtcttcatccgagattctcgacgtgagcctcagtagggcaaccgacctaggcgaaccagaacggagcagcagcgaagagacgctcaataactttcaagaggccgagacacctggcgccgtgagtccgaaccagcctcatctcccacagccccacctcccccacctgccacagcagaatgttgtgattaacggaaatgcccaccctcatcacttgcaccaccatcatcagattcatcatggccaccacctgcagcacggtcatcaccacccttctcacgtcgctgtggccagtgccagtataactggtggacctccgagtagtccagtgtcgaggaaactgtctactactgggagcagtgattcaattacacccgtggccccaacaagcgccgtctcatcatccgggagtcctgcttccgtcatgaccaacatgagagcccctagcacgaccgggggtataggcattaactcggtgaccggaaccagtacagtgaacaatgtcaatataacggcagtgggcagtttcaatcccaatgtgacttctagtatgttggggaatgttaatatcagtacatcaaatattccctccgcagctggggtgtctgttggcccaggggtgactagcggggtaaacgtcaacattttatcggggatgggcaatgggaccatcagctctagcgcagctgtaagctcagtacctaatgcagccgccggaatgaccggcggctccgtgtcttcacaacagcagcagcccacggtcaatacctcccgttttagggtcgtcaagttggactctagctccgaaccattcaagaaggggcgctggacttgcacagaattttacgaaaaagagaacgcggtgcccgccaccgaaggggtgcttattaataaggtggtggaaaccgtgaagcagaaccccattgaggttacgagtgagcgtgaatccaccagtggatctagcgtgtcatccagcgtgtccacactgtcacattacaccgagtccgtgggatctggtgagatgggagctcctacagtagtcgttcagcagcagcagcagcagcagcagcaacagcaacaacagcctgccttacagggggtgactttacagcagatggactttggcagtacaggaccacaatcaatcccggccgtgtctatccctcaaagcatcagccagagccagatctcacaggtccagcttcagtcccaggaactgagctatctgaccatgaaggtggtcctactcattgtgtacctgtgtatgtag

SEQ ID NO: 86736 - DNA, 429 bp, Artificial Sequence
  derived and/or modified sequence
atgcaccagcccccagaatccacagcggctgccgctgcagccgcagatatatctgcccgtaagatggcacatccagccatgtttccccgacgaggttctgggtccggcagcgccagtgcgctgaacgccgcaggaaccggcgtaggctccaacgcaacaagcagtgaggactttccccctccgtccctcctacagcccccaccgccagccgcttcttccacctccgggccacagcctcctcccccacaaagcctgaatcttctgagccaggcccaacttcaggcgcagcccctggcacctggcggtacccagatgaaaaagaagtcagggtttcagatcacaagcgttacccccgctcaaatctctgcgtctatcagttcaaataattctattgccgaggacactgagagctacgacgacctcgactag

SEQ ID NO: 86737 - DNA, 1713 bp, Artificial Sequence
  derived and/or modified sequence
atgcaccaaccaccggagagcactgctgccgctgccgctgcggctgatataagcgcacggaagatggcccaccctgcgatgttcccaaggcgaggttctgggtcaggttccgcaagcgctctcaacgctgccggaactggagtgggctctaatgcaacgagcagcgaggatttccctccaccctccctcctgcaaccgccaccgcctgcggcaagtagcacatctggccctcagcctcctcctcctcaaagcctcaacctgcttagtcaggcacagctgcaagcccaacctctggcccctgggggaacccagatgaagaagaagagcggattccagataaccagtgtgacaccagcacagatctccgcctccattagcagcaataatagcatcgcggaagatactgaatcctatgacgacctggacgagagtcacaccgaagatctcagctctagtgagatcttagatgttagtttatctagggccaccgatcttggtgaaccggagagatctagctcagaggaaacactgaataatttccaagaagcagagacacccggagccgtttctccgaaccagccgcatttgccccagccacacctcccccatttaccccagcagaacgttgtgataaatggtaacgcacaccctcaccaccttcaccaccaccaccagattcatcacggtcaccatctacaacatggccaccatcacccaagtcatgtcgccgtagcttctgcctcaattactggcggacccccttccagccctgtctccaggaagttaagcacgacaggaagctcagatagcataaccccagtagctcctacatccgccgtgagcagttcaggcagtcccgcaagcgtaatgactaatatgagagctcctagtactacggggggaattggaattaactcagtaacaggcacatctacagtcaataacgtgaacattaccgcagtcgggagcttcaaccccaatgtcacgagcagtatgctcggaaatgttaacatatccacttcaaacatccctagtgccgctggtgtatccgtcggccctggcgtgaccagcggcgtgaatgtaaatattctgtctggaatgggtaacggaactatctcatcctctgctgctgtgagcagcgtgcccaacgcagcggctgggatgactggaggttctgtgtccagtcagcagcagcaacccactgtaaacaccagccgatttagggtggttaaacttgattcttcttcagaacctttcaagaaaggcagatggacctgtacagagttttatgagaaagaaaacgccgtacccgctaccgagggagtgctcatcaacaaagtggtcgaaaccgtgaagcaaaatccgattgaagtgacaagcgagcgggaatctacctcaggctcctctgtttcatctagcgtgagcactctatcacattacacagagtccgtgggatccggtgagatgggcgcacctaccgtggtcgtgcagcagcaacagcagcaacagcagcaacagcaacaacaacccgctctgcagggtgtgactctgcaacagatggactttggcagcacaggtccccagtctataccagctgtatccatccctcagtccatcagccagtctcagatttctcaggtgcagctgcagtcccaggagctttcttacctgacaatgaaagttgtgctgctcatcgtttatctttgtatgtag

SEQ ID NO: 86738 - DNA, 690 bp, Artificial Sequence
  derived and/or modified sequence
cgctgcaccagcccgtctggccaccaacgccgcggagaaaggagccgccgccgcctgcggccctctcccgcccggtcgcgggagcagcgggctcgctctcgaaggcaggagcgaccggcgcctttggctgaggaggaggagaaggaggaatcgcgccaggcggagcgtcaggtcccgttttcctctccggcgtctccaatacaaagattacggtgcagaaggaaattgcactcgtctcctccgcgcccccggtacccaacacaatgcaccagccgcctgagtccaccgccgcggccgccgccgctgcagacattagcgctaggaagatggcgcacccggcaatgttccctcgaaggggcagcggtagtggcagcgcctctgctctcaatgcagcaggtaccggcgtcggtagtaatgccacatcttccgaggattttccgcctccgtcgctgcttcagccgccgccccctgcagcatcttctacgtcgggaccacagcctccgcctccacaaagcctgaacctcctttcgcaggctcagctgcaggcacagcctcttgcgccaggcggaactcaaatgaaaaagaaaagtggcttccagataactagcgttactcctgctcagatctccgctagtatcagctctaacaacagtatagcagaggacactgagagctatgatgatctggatg

SEQ ID NO: 86739 - DNA, 2335 bp, Artificial Sequence
  derived and/or modified sequence
ctttccgaagctcgctctcgaaggcaggagcgaccggcgcctttggctgaggaggaggagaaggaggaatcgcgccaggcggagcgtcaggtcccgttttcctctccggcgtctccaatacaaagattacggtgcagaaggaaattgcactcgtctcctccgcgcccccggtacccaacacaatgcaccagccgcctgagtccaccgccgcggccgccgccgctgcagacattagcgctaggaagatggcgcacccggcaatgttccctcgaaggggcagcggtagtggcagcgcctctgctctcaatgcagcaggtaccggcgtcggtagtaatgccacatcttccgaggattttccgcctccgtcgctgcttcagccgccgccccctgcagcatcttctacgtcgggaccacagcctccgcctccacaaagcctgaacctcctttcgcaggctcagctgcaggcacagcctcttgcgccaggcggaactcaaatgaaaaagaaaagtggcttccagataactagcgttactcctgctcagatctccgctagtatcagctctaacaacagtatagcagaggacactgagagctatgatgatctggatgaatctcacacggaagatctctcttcttcggagatccttgatgtgtcactttccagggctactgacttaggggagcccgaacgcagctcctcagaagagaccctaaataacttccaggaagccgagacacctggggcagtctctcccaaccagccccaccttcctcagcctcatttgcctcaccttccacaacagaatgttgtgatcaatgggaatgctcatccacaccacctccatcaccaccatcagattcatcatgggcaccacctccaacatggtcaccaccatccatctcatgttgctgtggccagtgcatccattactggtgggccaccctcaagcccagtatctagaaaactctctacaactggaagctctgacagtatcacaccagttgcaccaacttctgctgtatcatccagtggttcacctgcatctgtaatgactaatatgcgtgctccaagtactacaggtggaataggtataaattctgttactggcactagtacagtaaataatgttaacattactgctgtgggtagttttaatcctaatgtgacaagcagcatgcttggtaatgttaatataagtacaagcaatattcctagtgctgctggtgtgagtgttgggcctggagttaccagtggtgttaatgtgaatatcttgagtggcatgggcaatggtactatttcttcctctgctgctgttagcagtgttcctaatgcagctgcagggatgactgggggatcggtttcaagtcagcagcaacaaccaacagttaacacttcgaggttcagagttgtgaagttagattctagttctgagccctttaaaaaaggtagatggacttgcactgagttctatgaaaaagaaaatgctgtacctgctacagaaggtgtgctgataaataaagtggtggagactgtaaagcaaaatccgatagaagtgacttctgaaagggagagcactagtgggagttcagtgagcagtagtgtcagcacactgagtcactatacagagagtgtgggaagtggagagatgggagcccctactgtggtggtgcagcagcagcagcagcaacaacaacaacaacagcaacaaccagctctccaaggtgtgaccctccaacagatggattttggtagcactggtccacagagtattccagcagttagtataccacagagtatttctcagtcacagatctcacaagtacaattacagtctcaagaactgagctatcttaccatgaaggttgttttgcttattgtatatttgtgtatgtagtgtaactattttgtacaatagaggactgtaactactatttaggttgtacagattgaaatttagttgtttcattggctgtctgaggaggtgtggacttttatatatagatctacataaaaactgctacatgacaaaaaccacacctaaagaaattttaagaatttggcacagttactcactttgtgtaatctgaaatctagctgctgaatacgctgaagtaaatccttgttcactgaagtctttcaattgagctggttgaatactttgaaaaatgctcagttctaactaatgaaatggatttcccagtaggggtttctgcatatcacctgtatagtagttatatgcatatgtttctgtgcatgttctctacacaattgtaaggtgtcactgtatttaactgttgcacttgtcaactttcaataaagcatataaatgttgat

SEQ ID NO: 86740 - DNA, 606 bp, Artificial Sequence
  derived and/or modified sequence
atggagaagatcaaggccagactgaaggccgagttcgaggccctggagagcgaggagagacacctgaaggagtacaagcaggagatggacctgctgctgcaggagaagatggcccacgtggaggagctgagactgatccacgccgacatcaacgtgatggagaacaccatcaagcagagcgagaacgacctgaacaagctgctggagagcaccagaagactgcacgacgagtacaagcccctgaaggagcacgtggacgccctgagaatgaccctgggcctgcagagactgcccgacctgtgcgaggaggaggagaagctgagcctggactacttcgagaagcagaaggccgagtggcagaccgagccccaggagccccccatccccgagagcctggccgccgccgccgccgccgcccagcagctgcaggtggccagaaagcaggacaccagacagaccgccaccttcagacagcagcccccccccatgaaggcctgcctgagctgccaccagcagatccacagaaacgcccccatctgccccctgtgcaaggccaagagcagaagcagaaaccccaagaagcccaagagaaagcaggacgagtag

SEQ ID NO: 86741 - DNA, 606 bp, Artificial Sequence
  derived and/or modified sequence
atggaaaagattaaagctagactcaaagctgaatttgaggccctggagtccgaagaacgccacctcaaggaatacaaacaggaaatggatcttctccttcaagagaagatggcacacgttgaggagctacgcctgatccacgccgatatcaacgtgatggagaatacaatcaagcaatctgagaatgacctcaacaagcttctagagtctacaaggcgactgcacgatgagtacaagcctttgaaggaacatgtggatgccctgcgcatgacgctcggcctccagagactgcctgacctgtgcgaagaggaagagaagctgtccttggattattttgaaaaacagaaggcagaatggcagaccgaaccacaggagccccctatccccgagagtctggccgcagccgccgccgcggctcagcagttacaagttgcccggaagcaagatacgaggcagacggcaacattcaggcagcagcccccacccatgaaagcctgccttagctgtcatcagcagattcacagaaatgccccaatctgtccgttatgtaaggcaaagagtcgctccaggaacccgaaaaagcctaagcggaaacaggacgagtag

SEQ ID NO: 86742 - DNA, 606 bp, Artificial Sequence
  derived and/or modified sequence
atggagaagatcaaggcccggctgaaggccgagtttgaggccctggagagcgaggagcggcacctgaaggagtacaagcaggagatggacctgctgctgcaggagaagatggcccacgtggaggagctgcggctcatccacgccgacatcaacgtgatggagaacaccatcaagcagagtgaaaatgacctgaacaagctgctggagagcacccggcggctgcatgatgagtacaagcccctgaaggagcacgtggatgccctgaggatgaccctgggcctgcagaggctgcctgacctgtgtgaggaggaggagaagctgagcctggactactttgagaagcagaaggccgagtggcagacagagccccaggagccccccatccctgagagcctggccgctgctgctgctgctgcccagcagctgcaggtggccaggaagcaggacacccggcagacagccaccttccggcagcagcccccacccatgaaggcctgcctgagctgccaccagcagatccacagaaatgcccccatctgccccctgtgcaaggccaagagccgcagcaggaaccccaagaagcccaagaggaagcaggatgaatag

SEQ ID NO: 86743 - DNA, 606 bp, Artificial Sequence
  derived and/or modified sequence
atggagaagatcaaggcccggctgaaggccgagttcgaggccctggagtccgaggagcgccatctgaaggagtacaagcaggagatggacttgcttctgcaagagaagatggctcatgtcgaagaactgcgattgattcatgccgacataaatgtgatggaaaataccatcaagcagagcgagaacgatcttaacaagcttttggagagtactagacgcttgcatgatgagtataaacccctcaaagagcacgtcgatgctctgcggatgacacttggcctgcagagacttcccgatctttgcgaagaagaagaaaaactctccctggactactttgaaaaacagaaggcagagtggcagacagagccacaggagcccccaatccctgagtcacttgcagcagccgccgccgctgcgcagcagctgcaggttgcgaggaaacaggacacgcgccaaacggctactttccgtcagcaacccccgccaatgaaggcatgtctttcgtgccatcagcagatccaccgcaacgcccctatttgtcccctctgcaaggctaagagtagatcgagaaaccctaaaaagcctaagcgaaagcaagatgagtag

SEQ ID NO: 86744 - DNA, 606 bp, Artificial Sequence
  derived and/or modified sequence
atggagaagataaaggccagactgaaagcagagtttgaagcactggagtcagaagagcgacatctgaaggaatacaaacaggagatggatcttctactccaagaaaagatggcccatgtggaagagctccgtctgatccatgctgatattaatgtgatggagaacactataaagcaatctgaaaacgacctgaacaagttactggaatctacccgcaggctccacgacgagtataaacccttgaaggagcacgtggacgccctgcggatgaccctaggcctgcagcgtctgcccgacctctgcgaagaggaggaaaaactgagccttgattactttgaaaagcagaaggccgagtggcaaactgagcctcaggagcctcccatacccgaaagtctggccgcagccgctgctgccgcacagcaattgcaggtggctaggaagcaggacaccagacagaccgctaccttcagacaacaaccaccccctatgaaagcctgcttaagctgccatcagcagatccacaggaacgctcccatttgtcccctgtgtaaggctaaatctagatctaggaaccccaaaaagcccaagaggaaacaggatgagtag

SEQ ID NO: 86745 - protein, 2237 aa, Artificial Sequence
  derived and/or modified sequence
MVRFGDELGGRYGGPGGGERARGGGAGGAGGPGPGGLQPGQRVLYKQSIAQRARTMALYNPIPVKQNCFTVNRSLFVFSEDNVVRKYAKRITEWPPFEYMILATIIANCIVLALEQHLPDGDKTPMSERLDDTEPYFIGIFCFEAGIKIIALGFVFHKGSYLRNGWNVMDFVVVLTGILATAGTDFDLRTLRAVRVLRPLKLVSGIPSLQVVLKSIMKAMVPLLQIGLLLFFAILMFAIIGLEFYMGKFHKACFPNSTDAEPVGDFPCGKEAPARLCEGDTECREYWPGPNFGITNFDNILFAILTVFQCITMEGWTDILYNTNDAAGNTWNWLYFIPLIIIGSFFMLNLVLGVLSGEFAKERERVENRRAFLKLRRQQQIERELNGYLEWIFKAEEVMLAEEDRNAEEKSPLDVLKRAATKKSRNDLIHAEEGEDRFADLCAVGSPFARASLKSGKTESSSYFRRKEKMFRFFIRRMVKAQSFYWVVLCVVALNTLCVAMVHYNQPRRLTTTLYFAEFVFLGLFLTEMSLKMYGLGPRSYFRSSFNCFDFGVIVGSVFEVVWAAIKPGSSFGISVLRALRLLRIFKVTKYWSSLRNLVVSLLNSMKSIISLLFLLFLFIVVFALLGMQLFGGQFNFQDETPTTNFDTFPAAILTVFQILTGEDWNAVMYHGIESQGGVSKGMFSSFYFIVLTLFGNYTLLNVFLAIAVDNLANAQELTKDEEEMEEAANQKLALQKAKEVAEVSPMSAANISIAARQQNSAKARSVWEQRASQLRLQNLRASCEALYSEMDPEERLRFATTRHLRPDMKTHLDRPLVVELGRDGARGPVGGKARPEAAEAPEGVDPPRRHHRHRDKDKTPAAGDQDRAEAPKAESGEPGAREERPRPHRSHSKEAAGPPEARSERGRGPGPEGGRRHHRRGSPEEAAEREPRRHRAHRHQDPSKECAGAKGERRARHRGGPRAGPREAESGEEPARRHRARHKAQPAHEAVEKETTEKEATEKEAEIVEADKEKELRNHQPREPHCDLETSGTVTVGPMHTLPSTCLQKVEEQPEDADNQRNVTRMGSQPPDPNTIVHIPVMLTGPLGEATVVPSGNVDLESQAEGKKEVEADDVMRSGPRPIVPYSSMFCLSPTNLLRRFCHYIVTMRYFEVVILVVIALSSIALAAEDPVRTDSPRNNALKYLDYIFTGVFTFEMVIKMIDLGLLLHPGAYFRDLWNILDFIVVSGALVAFAFSGSKGKDINTIKSLRVLRVLRPLKTIKRLPKLKAVFDCVVNSLKNVLNILIVYMLFMFIFAVIAVQLFKGKFFYCTDESKELERDCRGQYLDYEKEEVEAQPRQWKKYDFHYDNVLWALLTLFTVSTGEGWPMVLKHSVDATYEEQGPSPGYRMELSIFYVVYFVVFPFFFVNIFVALIIITFQEQGDKVMSECSLEKNERACIDFAISAKPLTRYMPQNRQSFQYKTWTFVVSPPFEYFIMAMIALNTVVLMMKFYDAPYEYELMLKCLNIVFTSMFSMECVLKIIAFGVLNYFRDAWNVFDFVTVLGSITDILVTEIAETNNFINLSFLRLFRAARLIKLLRQGYTIRILLWTFVQSFKALPYVCLLIAMLFFIYAIIGMQVFGNIALDDDTSINRHNNFRTFLQALMLLFRSATGEAWHEIMLSCLSNQACDEQANATECGSDFAYFYFVSFIFLCSFLMLNLFVAVIMDNFEYLTRDSSILGPHHLDEFIRVWAEYDPAACGRISYNDMFEMLKHMSPPLGLGKKCPARVAYKRLVRMNMPISNEDMTVHFTSTLMALIRTALEIKLAPAGTKQHQCDAELRKEISVVWANLPQKTLDLLVPPHKPDEMTVGKVYAALMIFDFYKQNKTTRDQMQQAPGGLSQMGPVSLFHPLKATLEQTQPAVLRGARVFLRQKSSTSLSNGGAIQNQESGIKESVSWGTQRTQDAPHEARPPLERGHSTEIPVGRSGALAVDVQMQSITRRGPDGEPQPGLESQGRAASMPRLAAETQPVTDASPMKRSISTLAQRPRGTHLCSTTPDRPPPSQASSHHHHHRCHRRRDRKQRSLEKGPSLSADMDGAPSSAVGPGLPPGEGPTGCRRERERRQERGRSQERRQPSSSSSEKQRFYSCDRFGGREPPKPKPSLSSHPTSPTAGQEPGPHPQAGSAVGFPNTTPCCRETPSASPWPLALELALTLTWGSVWTVRPLSTPCLRTLSLSRRLWPPTRAAPPGLPTCPP

SEQ ID NO: 86746 - DNA, 6714 bp, Artificial Sequence
  derived and/or modified sequence
atggttcggttcggagacgagctcggcggacgctacgggggccccgggggtggagagcgcgcccgtggcggcggcgccgggggggccggaggccctgggcctggcggtctgcagcccgggcagagggtattgtataaacagtccattgctcagagggccagaaccatggccttgtataaccctatccctgtcaagcagaattgttttacagtgaaccgaagtctctttgtgttttccgaggataacgtagtcaggaagtacgccaagaggataactgagtggcctccatttgaatacatgatcctcgccactatcatagctaactgcattgtgctagcactggagcagcacttgccagatggggataagacacctatgagcgaacgattggacgacaccgagccctacttcattggcatcttctgctttgaggccgggatcaagatcatcgcgctgggcttcgtgtttcataaaggaagctacttgaggaatggctggaatgtgatggactttgtggtggtacttacaggaatcctagcaacagccgggaccgacttcgatctgagaaccctcagagccgttagagttctccggcctctgaaactggtatccggcatccctagcctgcaggttgtgctgaaaagcatcatgaaggctatggtgccactcctccaaataggacttctcctgttcttcgcaatcttgatgttcgccataattgggctggaattctatatgggtaagttccataaagcttgttttccgaattcaactgatgctgaacccgttggcgattttccttgcgggaaagaagcacccgccagactgtgtgagggtgatactgagtgccgtgaatactggcctggaccaaattttggaataaccaactttgataacatactgtttgccatcctcacagtgttccagtgtataacaatggagggctggacagatattctctataatacaaatgacgctgcggggaacacttggaattggctctattttattccactgattatcataggtagcttctttatgctgaatcttgtactcggagttctgagtggagagttcgctaaggaacgcgagagagtagaaaaccgtcgggctttcctcaaattgcgacgccaacagcagatcgagcgggaactgaatggctatcttgagtggatatttaaggcggaggaagtaatgctcgcagaagaagatcgtaacgccgaggaaaagtctccactggacgtactgaaaagagcggctacaaagaaatctaggaacgacctgatacacgcggaagaaggagaggaccgtttcgccgacttgtgcgctgtgggctctccattcgccagagcaagcctcaaaagcggcaagacagaaagttcatcctactttagacgtaaggagaaaatgttcagattctttattcgtcggatggtcaaggctcagtctttttattgggtagtactatgtgttgtggcactgaatactctatgtgtcgccatggtgcactacaaccagcctcgccgtctgacgaccaccctctattttgcagagttcgtatttctcggcttattcctcacagaaatgagcctcaagatgtatggcctcgggcctagaagctactttcgcagtagcttcaattgcttcgacttcggcgtgattgtaggaagcgtttttgaggtcgtgtgggctgctatcaagccagggtcttcgtttggaatttcagtactgcgggccctgagattgcttcgcatcttcaaggtcactaaatattggtccagcctgagaaatctagtagtatcactgctgaatagcatgaaatccataatcagccttttatttctgttgttcctattcattgtggtattcgccttgctcggcatgcagttattcggcggccagtttaactttcaggatgaaacccccacgactaatttcgatactttcccagcagccatcttgactgtcttccagatcctgacaggcgaagattggaatgctgtcatgtatcacggtatcgagtcgcaggggggggtgagcaaaggcatgttttccagtttttacttcatcgtcctgacactgtttgggaactataccctgctgaacgtttttcttgctatagccgtcgataacttagccaatgcacaggagctgaccaaggatgaagaggagatggaagaggccgccaatcagaaactcgcactgcaaaaggctaaagaggtggctgaagtttcccccatgagcgccgccaacattagtattgctgctagacagcaaaattcagctaaagcgaggagtgtctgggagcaacgcgcctcacagttacgtctccagaacctgagagccagctgcgaggccctttattctgaaatggaccccgaagagcgcctgcgcttcgcaacaacacgacacctgcgcccggatatgaaaactcatctcgacaggccactggtcgttgaactgggtagggacggcgccagaggacctgtgggaggaaaggcacgtcccgaggccgccgaagctcccgaaggcgtggatccaccccgaagacaccataggcacagggacaaggataagacaccagccgcgggcgatcaggacagagcagaagctcctaaggctgagtcgggggagccaggcgcccgagaagagcgacctcgcccacataggtctcacagcaaggaagcagcaggccctccggaggcccgttccgagcgcggccggggacctggacctgaaggggggagaaggcaccaccggagggggagtccggaggaggccgcggaaagggagcctcgccgtcaccgcgcgcaccggcaccaggacccctccaaggagtgtgccggtgccaagggtgagaggcgcgccagacacagaggtggtccgcgtgcagggcctagggaagccgagtcaggcgaggagcccgcccgacgccaccgggcgagacacaaagcacagcccgctcatgaggccgtcgagaaagagacaaccgagaaggaagcaacagagaaggaggcggagattgtcgaggcagataaggagaaggaactgagaaatcatcaacccagggaaccccattgtgatctggaaacaagcggaactgtcactgtaggacctatgcatacgctaccttctacttgtcttcaaaaggtcgaggaacaacccgaagacgctgataatcagaggaacgttactcgaatgggttcgcagcctcccgatcctaataccatcgtacatatccccgtcatgctcactgggcctctgggggaggctacggtcgtgccttctgggaacgtggacctggagagtcaagccgagggtaagaaggaagtcgaggctgacgacgtaatgcgtagtggtccgaggcccatcgtgccctactcctctatgttttgcctctcacccaccaacctcctgcgtcgattctgccattatattgtgacgatgcgctacttcgaagtcgtgatccttgtggtgatcgctctgagttccatagccttagccgccgaggaccccgttcgaaccgacagtcccaggaataatgccctaaaataccttgattacattttcactggcgtgtttaccttcgagatggtcatcaaaatgatagacttaggactgctgttgcatccgggtgcatattttcgcgacctgtggaatattctagactttattgtggtcagtggcgctcttgttgccttcgcgtttagcggatctaagggaaaggatattaatactatcaaatcccttcgggtactgcgcgtacttaggccgctgaagaccataaagaggctgcccaagctcaaggctgtatttgactgcgttgtaaatagcctcaagaatgtactgaacatcttgatcgtatacatgcttttcatgtttattttcgctgtgattgcagtacagttgttcaagggcaagtttttttattgcaccgatgagagtaaagagctagagcgcgactgccgggggcagtatctggattacgagaaggaagaggtcgaagcccagcctaggcagtggaagaagtacgatttccattacgataacgtgctttgggctctgctaactttatttaccgtatccaccggcgaaggctggccaatggtcctgaagcactcagtagacgccacatatgaggagcagggaccaagtccaggttatagaatggagctgagcatcttctatgtggtatactttgtagtgtttcctttttttttcgtgaacatcttcgtggccctcatcattatcacttttcaggagcagggtgacaaagtgatgtctgagtgctcccttgaaaagaatgagagggcctgcatcgacttcgcaatctctgccaagcctctcacacgctacatgccccagaatcggcagagcttccagtataagacgtggacattcgttgttagtcccccctttgaatacttcatcatggcgatgattgcactgaacacagttgtcctcatgatgaaattctacgacgctccatacgaatacgagctcatgttaaagtgcctgaacatcgtgtttacatctatgttctccatggagtgtgtcctcaagataattgctttcggggtactgaactatttcagggatgcttggaacgtgtttgactttgtgacagtgctgggatccatcaccgatattcttgtcacagagatcgcagaaacaaacaatttcatcaatttgagcttcttgcggctttttcgcgcggcccgcctcatcaagcttcttaggcagggatacacgatcagaatacttctgtggactttcgtccagtctttcaaggccctcccgtacgtttgccttcttatagctatgctgtttttcatttatgccattatcggaatgcaggtgtttggaaatatcgcactcgatgatgacacatcaatcaacaggcataataattttcggacctttttgcaagctctgatgcttctctttagatcggcaactggcgaggcctggcacgaaatcatgcttagctgtctgtccaaccaagcttgtgacgagcaggcgaacgctactgagtgtgggagcgacttcgcttatttctatttcgtgtcgttcatctttctgtgttcattcctcatgttgaatttatttgtagcagtgattatggataactttgagtaccttacacgcgattcatctattttggggccacaccatctggatgaattcatccgcgtctgggcagagtacgacccggcggcatgcggccgtatctcttataatgacatgttcgaaatgctgaagcatatgtcgcctcccctgggactgggtaagaaatgccctgctagggtggcatacaagagactggtgcggatgaacatgccgatctcgaacgaggacatgaccgttcatttcacctcgaccctgatggctttaattcgcacagcacttgagattaagctcgctcctgcggggaccaagcagcaccagtgcgacgcagagctgcgcaaggagatctctgtggtatgggccaatctgccacaaaaaacccttgacctgcttgtgcctccccacaaacctgacgagatgaccgtcggtaaagtgtacgcagccctcatgatcttcgatttctataagcagaataagaccaccagagatcaaatgcaacaggctcccggaggtttatcccagatgggtccagtgtctctgttccacccactgaaagccacgctcgagcagacacagccagccgtactgagaggagctagggtttttctccgacaaaaatcttccacatccctgtctaatgggggagcgattcaaaaccaggagagcggaatcaaagagtcagtgagttgggggacgcagcggactcaggatgctccacacgaggctcgtccgccccttgagcgaggccatagtactgagatccccgtcggacgttcgggagctttagccgtcgatgtacaaatgcagtccatcacgagacggggtcctgacggagaaccacaacccgggctcgagtcacaagggcgcgccgcctccatgccacggcttgccgcagagacacagccggttactgatgcgagcccaatgaaacggagtatttctaccctcgcacagagaccccggggaactcacctgtgcagcaccactccagacagacccccacccagtcaggcaagctcacaccaccaccatcataggtgccacaggcgacgggacagaaaacaaagatcgctggagaaaggccccagtctgagtgcagatatggacggggctccttcatccgctgtgggtccgggtctgccccccggagagggcccgactgggtgccgccgcgagcgagagcgtcggcaagaacgcgggagaagccaggagaggagacagccttcctctagttcgtccgaaaaacaaagattttattcttgcgataggtttggcggacgagaaccaccaaagccaaagccctcgctgtcgagccacccaaccagcccaaccgccggacaggaaccaggtccacaccctcaagccgggagcgccgtcgggttcccgaataccaccccttgctgtcgggagacgccatctgcaagtccctggcccctggctcttgaactcgcactcaccttgacttggggaagtgtctggactgtgcggcccctgtccacgccttgtttgcggaccctaagtttgagccgccgactttggccacctacaagagccgcccctcccggtttaccaacctgccctccatag

SEQ ID NO: 86747 - DNA, 6714 bp, Artificial Sequence
  derived and/or modified sequence
atggtgcgctttggagatgagctgggcggccgctatggaggccctgggggcggggagcgggcccggggcggcggggccggcggggccggcggccctggccctgggggcctgcagcccggccagagggtgctgtacaagcagagcatcgcccagagggcccggaccatggccctgtacaaccccatccctgtgaagcagaactgcttcaccgtgaacagaagcctgtttgtgttttctgaggacaacgtggtgaggaaatatgccaagaggatcacagagtggcccccatttgagtacatgatcctggccaccatcatcgccaactgcatcgtgctggccctggagcagcacctgcctgatggagacaagacccccatgtctgagcggctggatgacacagagccctacttcatcggcatcttctgctttgaagctggcatcaagatcatcgccctgggctttgtgttccacaagggcagctacctgagaaatggctggaatgtgatggactttgtggtggtgctgaccggcatcctggccacagctggaacagactttgacctgcggaccctgcgggctgtgcgggtgctgcggcccctgaagctggtgtctggcatccccagcctgcaggtggtgctgaagagcatcatgaaggccatggtgcccctgctgcagatcggcctgctgctcttctttgccatcctgatgtttgccatcatcggcctggagttctacatgggcaagttccacaaggcctgcttccccaacagcacagatgctgagcctgtgggggacttcccctgtgggaaggaggccccagcccggctgtgtgagggggacacagagtgccgggagtactggccaggccccaactttggcatcaccaactttgacaacatcctgtttgccatcctgaccgtcttccagtgcatcaccatggagggctggacagacatcctgtacaacaccaatgatgctgctggcaacacctggaactggctgtacttcatccccctcatcatcatcggcagcttcttcatgctgaacctggtgctgggcgtgctgagcggggagtttgccaaggagcgggagcgggtggagaacagaagagccttcctgaagctgcggcggcagcagcagatcgagcgggagctgaatggctacctggagtggatcttcaaggccgaggaggtgatgctggccgaggaggacagaaatgctgaggagaagagccccctggatgtgctgaagagagctgccaccaagaagagcagaaatgacctgattcatgctgaggagggagaagatagatttgctgacctgtgtgctgtgggcagcccctttgcccgggccagcctgaagagcggcaagacagagagcagcagctacttccggaggaaggagaagatgttccgcttcttcatccggaggatggtgaaggcccagagcttctactgggtggtgctgtgtgtggtggccctgaacaccctgtgtgtggccatggtgcactacaaccagccccggcggctgaccaccaccctgtactttgctgagtttgtgttcctgggcctcttcctgacagagatgagcctgaagatgtatggcctgggccccaggagctacttccgcagcagcttcaactgctttgattttggagtcatcgtgggctctgtgtttgaggtggtgtgggccgccatcaagccaggcagcagctttggcatctctgtgctgcgggccctgcggctgctgcgcatcttcaaggtgaccaagtactggagcagcctgaggaacctggtggtgtccctgctgaacagcatgaagagcatcatcagcctgctcttcctgctcttcctgttcatcgtggtgtttgccctgctgggcatgcagctgtttggaggccagttcaacttccaggatgagacccccaccaccaactttgacaccttccctgctgccatcctgactgtgttccagatcctgactggagaggactggaatgctgtgatgtaccatggaattgagagccagggcggcgtgtccaagggcatgttcagcagcttctacttcatcgtgctgaccctgtttggaaactacaccctgctgaatgtgttcctggccatcgctgtggacaacctggccaatgcccaggagctgaccaaggatgaggaggagatggaggaggccgccaaccagaagctggccctgcagaaggccaaggaggtggccgaggtgagccccatgtctgctgccaacatcagcattgctgcccggcagcagaacagcgccaaggcccggtctgtgtgggagcagagggccagccagctgcggctgcagaacctgcgggccagctgtgaggccctgtacagcgagatggaccctgaggagcggctgcgctttgccaccaccaggcacctgcggccagacatgaagacccacctggaccggcccctggtggtggagctgggcagagatggagcccggggccctgtgggcggcaaggcccggcctgaggccgctgaggcccctgagggcgtggaccccccaagaagacaccaccgccaccgggacaaggacaagaccccagctgctggggaccaggacagagctgaggcccccaaggccgagagcggggagcccggggcccgggaggagcggccccggccccacaggagccacagcaaggaggccgccggccccccagaggcccggtctgagcggggccggggccctggccctgagggcggccgccgccaccaccggcggggcagccctgaggaggccgctgagcgggagcccaggaggcaccgggcccaccgccaccaggaccccagcaaagaatgtgccggggccaagggggagcggcgggcccggcaccggggcggcccccgggccggcccccgggaggccgagagcggggaggagcccgcccggcggcaccgggcccggcacaaggcccagcctgcccatgaagctgtggagaaggagaccacagagaaggaggccacagagaaggaggccgagatcgtggaggccgacaaggagaaggagctgaggaaccaccagccccgggagccccactgtgacctggagaccagcggcaccgtgacagtgggccccatgcacaccctgcccagcacctgcctgcagaaggtggaggagcagccagaagatgctgacaaccagagaaatgtgaccaggatgggcagccagcccccagaccccaacaccatcgtgcacatccctgtgatgctgaccggccccctgggggaggccaccgtggtgcccagcggaaatgtggacctggagagccaggccgagggcaagaaggaggtggaggctgatgatgtgatgaggagcggcccccggcccatcgtgccctacagctccatgttctgcctgagccccaccaacctgctgcggcgcttctgccactacatcgtgaccatgagatactttgaggtggtgatcctggtggtgattgccctgagcagcatcgccctggccgctgaggaccctgtgaggacagacagccccagaaataatgccctgaagtacctggactacatcttcaccggggtcttcacctttgagatggtgatcaagatgattgacctgggcctgctgctgcaccctggggcctacttccgggacctgtggaacatcctggacttcatcgtggtgtctggggccctggtggcctttgccttcagcggcagcaagggcaaggacatcaacaccatcaagagcctgcgggtgctgcgggtgctgcggcccctgaagaccatcaagaggctgcccaagctgaaggctgtgtttgactgtgtggtgaacagcctgaagaatgtgctgaacatcctgattgtgtacatgctgttcatgttcatctttgctgtgattgctgtgcagctgttcaagggcaagttcttctactgcacagatgagagcaaggagctggagcgggactgccggggccagtacctggactatgagaaggaggaggtggaggcccagccccggcagtggaagaagtatgacttccactatgacaacgtgctgtgggccctgctgaccctcttcaccgtgtccactggagagggctggcccatggtgctgaagcacagcgtggatgccacctatgaggagcagggccccagccctggctacaggatggagctgagcatcttctacgtggtgtactttgtggtgttccccttcttctttgtgaacatctttgtggccctgatcatcatcaccttccaggagcagggcgacaaggtgatgtctgaatgttccctggagaagaatgaaagagcctgcatcgactttgccatcagcgccaagcccctgacccgctacatgccccagaaccggcagagcttccagtacaagacctggacctttgtggtgtccccaccatttgagtacttcatcatggccatgattgccctgaacacagtggtgctgatgatgaagttctatgatgccccctatgaatatgagctgatgctgaagtgcctgaacatcgtgttcacctccatgttctccatggagtgtgtgctgaagatcatcgcctttggagtgctgaactacttcagagatgcctggaatgtgtttgattttgtgacagtgctgggcagcatcacagacatcctggtgacagaaattgctgagaccaacaacttcatcaacctgtccttcctgcggctcttccgggccgcccggctcatcaagctgctgcggcagggctacaccatccgcatcctgctgtggacctttgtgcagagcttcaaggccctgccctacgtgtgcctgctgattgccatgctgttcttcatctatgccatcatcggcatgcaggtgtttggaaacatcgccctggatgatgacaccagcatcaacagacacaacaacttccgcaccttcctgcaggccctgatgctgctcttccgcagcgccactggagaggcctggcatgagatcatgctgagctgcctgagcaaccaggcctgtgatgagcaggccaatgccacagaatgtggcagtgactttgcctacttctactttgtgtccttcatcttcctgtgcagcttcctgatgctgaacctgtttgtggccgtcatcatggacaactttgagtacctgacccgggacagcagcatcctgggcccccaccacctggatgagttcatccgggtgtgggccgagtatgaccctgctgcctgtggccgcatctcctacaatgacatgtttgagatgctgaagcacatgagcccccccctgggcctgggcaagaagtgcccagcccgggtggcctacaagaggctggtgaggatgaacatgcccatcagcaatgaagacatgacagtgcacttcaccagcaccctgatggccctgatcagaacagccctggagatcaagctggccccagctggcaccaagcagcaccagtgtgatgctgagctgaggaaggagatctctgtggtgtgggccaacctgccccagaagaccctggacctgctggtgcccccccacaagccagatgagatgacagtgggcaaggtgtatgctgccctgatgatctttgacttctacaagcagaacaagaccacccgggaccagatgcagcaggcccctgggggcctgagccagatgggccctgtgtccctcttccaccccctgaaggccaccctggagcagacccagcctgctgtgctgcggggggcccgggtcttcctgcggcagaagagcagcaccagcctgagcaatggaggagccatccagaaccaggagagcggcatcaaggagagcgtgtcctggggcacccagaggacccaggatgcccctcatgaggcccggccccccctggagcggggccacagcacagagatccctgtgggccgcagcggggccctggccgtggatgtgcagatgcagagcatcacccggcggggcccagatggagagccccagcccggcctggagagccagggccgggccgcctccatgccccggctggccgctgagacccagcctgtgacagatgccagccccatgaagaggagcatcagcaccctggcccagaggccccggggcacccacctgtgcagcaccaccccagaccggcccccacccagccaggccagcagccaccaccaccaccaccgctgccacagaagaagagacaggaagcagaggagcctggagaagggccccagcctgtctgctgacatggatggagcccccagcagcgctgtgggccctggcctgcccccaggagagggccccaccggctgcagaagagagcgggagcggcggcaggagcggggccgcagccaggagcggcggcagcccagcagcagcagcagcgagaagcagcgcttctacagctgtgacagatttggaggccgggagccccccaagcccaagcccagcctgagcagccaccccaccagccccacagctggccaggagcccggcccccacccccaggccggcagcgctgtgggcttccccaacaccaccccctgctgccgggagacccccagcgccagcccctggcccctggccctggagctggccctgaccctgacctggggctctgtgtggacagtgcggcccctgagcaccccctgcctgcggaccctgagcctgagccggcggctgtggccacccaccagggctgcccctcctggcctgcccacctgccccccatag

SEQ ID NO: 86748 - DNA, 6714 bp, Artificial Sequence
  derived and/or modified sequence
atggtgcggttcggcgacgagctgggcggccggtacggcggccccggaggcggagagagagctaggggcggtggcgctgggggagcagggggccccggaccaggtgggctgcagcccggacaacgtgtgctctacaagcaatctatcgcccagagggcccgaaccatggctctgtacaatcccattccagtgaagcaaaactgtttcactgttaataggtcccttttcgtgtttagtgaggacaatgtggtacgcaaatatgctaaaaggatcactgagtggccaccgtttgaatatatgatcttggccactatcattgccaactgcatcgtgttagcactggagcagcacctccctgacggagacaaaacaccgatgtctgagcggttggatgacaccgagccgtatttcatcggaatcttctgctttgaggccgggatcaagattatcgcacttggcttcgtatttcataaagggtcatacctccgaaacggatggaatgtcatggactttgtcgtcgtgttgacaggcattctggcaaccgctggcacagatttcgatttgcgcacactgcgcgccgtccgcgtgctgcgcccacttaaattggtgagcggaatcccctcacttcaggtggtcttgaagtctatcatgaaagcgatggtgccgctgctgcagatcggcctgctcttgttttttgcaatcctgatgttcgcgattatcgggttggagttttatatggggaagttccacaaggcctgctttcctaacagtaccgacgccgagccggtgggtgattttccatgtggtaaggaggcacccgcgcgactgtgtgagggagataccgagtgccgagaatattggcctggtcctaactttgggataacaaacttcgataatattctgttcgcaattcttacagtcttccaatgtatcactatggaaggctggactgacatactatataataccaatgatgctgccgggaacacctggaattggttgtattttataccgctgatcataataggctctttctttatgctgaacttggtcctcggagtcctaagcggagaatttgccaaagaacgggaaagagtggaaaatcgccgggcatttttaaaactgagacgacaacagcagatcgagcgcgagctgaatggttacctggaatggattttcaaggctgaagaagtaatgttagctgaagaggatcgaaatgccgaggaaaagtcaccactggacgttctgaagagagccgcaacgaaaaaatcgcgaaatgatctgattcatgctgaggagggcgaggataggttcgccgacctctgcgccgtgggctcgccctttgcacgtgccagcctgaaaagtggcaagactgaaagttctagttattttcgcaggaaggaaaaaatgttccgctttttcatccgtcgaatggtcaaagctcaaagtttttattgggtggtgctctgcgttgtagctttaaataccttgtgtgtggctatggtacactataaccagcccagacgactcacaaccacgttatacttcgcagaatttgtgtttttaggcctcttcctcacggagatgagtcttaagatgtatgggctgggacccagatcctattttagaagttctttcaattgcttcgattttggcgtgatagtgggctccgtgtttgaggtagtgtgggccgccattaagccaggcagttcgtttggtatctctgttctccgcgccctccgtttactgcgaatattcaaagtgactaagtactggagcagtctacgaaatctggtagtgagcctcttaaattctatgaagtctattatttctttacttttcctgctgttcttgtttatcgtggtgttcgcgctgctcggcatgcagctgttcggcggacagtttaacttccaagacgaaacaccaacaactaatttcgacacattcccagctgctatcctgactgttttccaaattctgactggggaagattggaacgcagtcatgtaccatggtattgagtcccagggtggggtctctaaagggatgttttccagcttttatttcatcgtcttgacattgtttggtaattataccctgctgaacgtgttcctcgccatcgctgtggacaatctcgctaacgcccaagagctgacaaaggatgaggaggagatggaagaagcggccaatcaaaagctggcactccagaaagccaaggaagtcgcagaagtatcaccaatgagtgctgctaacatctcgatcgctgctcgacagcaaaactcggctaaggccaggagcgtgtgggagcagagagctagccaactgcggttacaaaacctaagagctagctgcgaggcgctctacagtgaaatggaccccgaggaacggcttcgcttcgccacaacaagacaccttcgccccgacatgaaaacacacttagatcggcccttggtggttgagcttggtagagacggagctcgtgggcccgtcggcggaaaagctcggcccgaggcagccgaagctcctgagggagtagaccctcccagaaggcatcaccgccatcgggacaaagacaaaactccagcagccggcgaccaagaccgcgcggaggcaccaaaggctgaaagtggcgagcctggggctagagaagaacgaccccggccccaccgctcacattccaaagaggctgccggccctcccgaggctagatccgagcgcggcaggggacccggccctgaggggggacgcaggcatcaccgaagagggtccccggaagaagctgcagagcgggagccacggcgccacagggcccaccggcatcaggatccttccaaagaatgtgccggtgctaagggtgaacgacgggcacggcacagggggggccctcgagcagggccaagagaggctgagagtggcgaggaacctgccaggcggcacagagcccgacataaagctcagcccgctcatgaagctgtggaaaaagagacaactgaaaaggaggcaaccgagaaggaggctgaaattgtcgaagccgataaagaaaaggagttgaggaatcaccagcctcgcgaacctcattgtgacctcgaaacttcaggaaccgttactgtggggcccatgcacaccctgcccagtacatgtctgcagaaggtggaggaacagcccgaagatgcagataatcaaaggaatgtgactaggatggggtcacaaccacctgacccgaacaccatagtgcatatcccagtcatgctgactgggccacttggggaggccacagtggttcctagtggtaatgttgatctagaatcacaggccgaaggaaaaaaagaagtagaagccgacgatgtgatgaggagtggaccgcgacccatcgttccttactccagtatgttttgcctatcccccaccaacttgctgcggcgattctgccactacattgtgactatgcggtattttgaggtggttatcttggttgtgatcgcactgtccagcatcgctcttgctgctgaggaccccgtgcgcacggattctccaagaaacaacgccttgaagtatctggactacatcttcactggggttttcacatttgagatggtgattaaaatgatcgacctgggcctccttctccacccaggcgcatacttccgtgatctctggaatatcctggactttatcgtcgtgtctggcgcactcgtggccttcgctttcagcgggagcaagggtaaggatatcaacaccataaaatctttgcgtgttctacgcgtgctccggcctcttaaaacgattaaacgtctaccgaaactgaaagcggtgttcgattgtgtggtcaattccctcaagaacgtgctgaatatcctaattgtctatatgctattcatgtttatattcgcagtgatcgccgttcaacttttcaaagggaaattcttttattgcacagacgagtccaaagagctggaaagggattgcagaggccagtacttggattatgagaaagaggaggtcgaagcccagccacggcagtggaaaaagtatgactttcactacgacaatgtcctgtgggcactgcttaccctgtttaccgtgtctaccggcgagggctggcccatggtgctgaagcacagtgtagatgcgacctatgaagaacagggccccagtccagggtatcgcatggaactttctattttctacgttgtctatttcgtcgtgttcccgtttttttttgtgaacattttcgttgccttaatcatcattacctttcaggaacaaggggacaaggtcatgtctgaatgcagtctagaaaagaacgaaagagcgtgtattgacttcgccatcagcgcaaaacccctgacaaggtatatgcctcaaaatcggcagagctttcaatataagacctggacctttgtcgtctctcccccttttgaatacttcattatggctatgattgcattgaacactgttgtcctgatgatgaagttctatgatgccccctatgagtatgaactaatgctcaagtgcctaaatattgtgttcacctcaatgtttagcatggagtgcgttctgaagattattgccttcggagttctgaactacttcagggacgcctggaatgttttcgacttcgttacagtactcgggtcgattacggacatcctggttacagaaatcgcagagaccaataatttcatcaacttgagcttcttgcgtctcttccgggcggcccggctgataaagttacttaggcagggctacactatacggatacttctgtggaccttcgtgcagtcattcaaagcattgccatacgtgtgtcttctgattgcaatgctgttctttatctatgccattatcggcatgcaggtcttcggtaatattgctctggacgacgacacctctatcaaccgccataataacttcagaaccttcctccaggccctgatgctgctgtttcgtagtgccacaggagaggcgtggcacgaaatcatgctgtcatgcctaagcaaccaggcctgtgacgagcaggccaacgctacagagtgcggttctgatttcgcctatttctacttcgtgagcttcattttcctttgttcttttctgatgttaaatttgttcgttgctgtgatcatggataattttgaatacttaacacgtgatagcagcatcctgggaccacaccacttggacgagtttattagagtctgggctgaatacgaccccgctgcctgcggcagaatctcctacaacgacatgtttgaaatgcttaagcacatgtcaccacctctcggcctgggtaagaaatgtcccgcacgggtagcttacaagagactggtgcgcatgaatatgccgatctctaacgaggacatgaccgtgcattttacatccaccctcatggccctcatcagaactgcactggagatcaagctggccccagctggaaccaaacagcatcagtgcgatgccgaacttcgtaaagaaatttcagtggtgtgggcgaatctcccccagaaaactttggatctcctggtgcctcctcacaaaccagatgagatgacggtgggaaaggtgtacgctgctctgatgatattcgatttctacaaacagaataaaacaactagggatcagatgcagcaggcacccggaggcctgtcccagatggggcctgtgtctctgttccatccactgaaggctacccttgagcagacacagcccgccgtcttgcgtggtgcaagagtatttctgaggcaaaaaagctctacatcgctgtctaatgggggggcaatccaaaatcaggagagtggcatcaaagaaagcgtaagctgggggactcagcggacccaggatgccccacatgaagcaagaccgccattggaacgaggacattcaactgagataccggtcggacggtcaggtgccctagccgttgatgtccagatgcagtcaataactaggcgcgggcctgatggcgagccacagccaggtttagaaagccagggaagggccgctagcatgccaaggctggccgccgaaacccagccagttacagacgcctcacctatgaaacgaagcatcagcaccctggcacagcgacctcgaggcacgcacctgtgttctactacacctgatcggccacctcccagccaggccagctctcaccatcatcaccaccggtgtcataggagaagagatcggaagcagcggtccctagagaaaggaccttccctaagcgccgacatggatggggcccccagttcggccgtcggacccggtctccctcctggcgagggccctacaggctgccgcagggagagggagcggagacaggaaaggggaaggagtcaggaaaggaggcagccttcttcatcttcctcggagaaacagcgtttttatagctgcgaccgatttggtgggcgggaaccaccgaaacccaagccatctctgagcagtcatcctacctcacctaccgctggtcaggaacccgggccccacccccaagccgggtctgcggtggggtttccaaacaccaccccgtgctgtagggaaacccccagcgcatctccatggcctctcgccctcgaactcgcactaacacttacatggggttccgtgtggactgtccggcctctgagtaccccctgtttgcggacactgtcactcagtaggagactgtggcctccaacgagagccgccccgcctggcctcccgacttgcccgccatag

SEQ ID NO: 86749 - DNA, 6714 bp, Artificial Sequence
  derived and/or modified sequence
atggtgcgctttggagatgagctgggaggcaggtacggtggcccaggtgggggtgagagggctcgtggcggtggggctggcggagccggtggcccaggccctggcggactgcagcctggccagagagttctgtacaagcagtctattgcgcagcgcgcaaggactatggccctgtacaacccaattcccgtgaagcagaactgcttcactgtgaatcggagtctgttcgtcttttcagaggataacgtcgtacgcaagtatgcaaagcgtatcaccgagtggccgccatttgaatacatgatcctggccacaattatagcaaattgtattgtgctagccctcgagcagcatctgcccgacggcgacaaaactcctatgtcggagaggctggatgataccgaaccttactttatcggcatattttgttttgaagctgggattaagattatcgctttaggattcgtgttccacaagggctcctatctccgcaatggatggaacgtgatggactttgtggtggtactcacaggcattttggcgaccgccggaacagacttcgacctgaggacccttcgagcagttcgagtgctgaggccactgaaactggtttccggaataccaagcttacaggttgtgctcaaaagtattatgaaagccatggtccctctcctgcaaatcgggctgttgctcttctttgccattcttatgtttgccatcataggactcgaattttatatgggcaaatttcataaagcctgtttccccaatagcactgacgcagagccagtgggagatttcccctgcggtaaggaggctcccgcaaggttgtgtgagggagacactgaatgtagggagtactggcctggacctaattttggcataacaaattttgataatattctctttgcaatactcaccgtctttcaatgtattactatggagggatggacggacatattatacaacacaaatgatgctgcgggaaacacttggaactggctgtactttatcccgcttattataatcggatccttttttatgcttaacctggtactcggcgtcctgtcaggagaattcgctaaggaaagagagagagtggaaaaccgcagggcgtttctgaaacttaggaggcagcaacagatcgagcgggagctgaatggatacctggagtggatctttaaagcagaagaggtgatgctggctgaagaggatcgtaacgcggaagaaaagagtcctctcgacgttctgaaaagagcagccacgaagaagtcacgcaacgatttaattcacgccgaggaaggagaggaccgctttgctgatctgtgtgcggtgggctcgccatttgccagagcgtctttgaagtccggcaagactgagtctagcagttattttcgcaggaaggagaaaatgttcagattttttattaggcgaatggtcaaggcacagtccttctactgggtagtgctctgcgttgtcgccttaaataccctctgcgtggctatggttcactataaccaacctcggagactcacaacaactttgtactttgcggagttcgtgttcctggggctatttcttactgagatgagtctaaagatgtatggactgggcccacgatcttactttcgcagttctttcaattgtttcgatttcggtgtgatcgttggaagcgtgtttgaggtagtctgggccgctattaagccgggttcttcattcggaatctcagtgctgcgggcactccgcctccttaggatctttaaggttactaagtactggagcagcttaagaaatttagtggtcagtctgctgaactcaatgaagagtattatttcacttctgtttctgttatttctcttcatcgtggtctttgctctgctgggcatgcagctgtttgggggtcaattcaacttccaggacgaaacaccgacaacgaatttcgatacttttcctgcagcaatactcaccgtatttcagatcctgaccggcgaggattggaacgcagtgatgtatcacggaatcgaatctcaaggcggtgtgagtaagggtatgttttccagcttctacttcatcgtgttgacactgttcggaaactacacgctgctgaatgtcttcctcgctatcgccgtggataacctggccaacgctcaagaactaaccaaggacgaagaggaaatggaggaggccgctaatcagaaactggcactgcagaaggccaaggaagtcgctgaggtctctcccatgtccgctgcgaacatatcgatcgccgctcgccaacagaacagcgcaaaggccaggtccgtgtgggagcagcgggcaagtcagctgcgactgcagaacttgcgtgcttcctgtgaggcactgtattcggaaatggatcctgaagagagattacggtttgctactacccgccacctacgacctgatatgaagacacacctagatcgtcccctcgtggtggaattggggagagacggagcccgtggccctgtggggggaaaggccaggcccgaagctgccgaggcccctgaaggagtggatccacccaggagacaccaccgccacagggataaggataagacccccgcagccggtgaccaggatagggccgaagcacctaaggccgaatcaggagagccgggagccagagaggaacggcctagaccacaccggtctcactccaaggaggctgccggaccccctgaagccaggtctgagaggggcaggggccctgggcctgaagggggaagaagacatcaccgcagaggctcccccgaagaggcggctgagagggagcccaggaggcatcgcgctcatagacatcaggacccttcaaaggagtgtgccggagctaagggtgagaggcgcgcacgccaccgtggcggacccagggcaggcccaagggaggccgagtccggcgaagagccggctcgtcggcacagggccaggcataaggctcagcctgcccacgaagcggtggaaaaggagaccaccgaaaaagaggccactgaaaaggaggcagaaattgtggaagctgataaggagaaagaacttcggaatcaccaaccgagggaaccgcactgcgatcttgagaccagcggaaccgtgacagtcggaccaatgcatacccttccttctacttgcctacagaaggtcgaagaacagcccgaggacgctgacaaccagaggaatgtgacccgcatgggtagccaaccgccagatcctaataccattgtgcatatccctgtgatgctgaccgggcctctgggtgaggccaccgttgtgccttctggcaacgtcgacctggagagccaggcagaggggaagaaggaagttgaggctgatgacgttatgagaagtggaccccgacccatcgtaccgtattcatccatgttctgtttgagcccaaccaacctcctgcgcaggttctgtcattacattgtgactatgaggtatttcgaggtcgttatcttagtggttatcgccctcagtagcattgctcttgccgctgaagatcctgtgaggacagactctcccaggaataacgcactcaaatatctggactatatttttactggagtgtttaccttcgaaatggttatcaagatgatcgacttgggtttgctgctgcatccaggcgcatacttcagagatttgtggaacatattggacttcattgtagtgagtggtgccctagtggcattcgccttctccggcagtaaggggaaggatatcaacactatcaagtccctgcgagtacttcgcgtgttgaggcctctgaaaacaatcaagaggctgcctaagcttaaagcagtgtttgattgcgtcgtgaactctctaaagaatgtattaaatatcctcattgtgtacatgctgtttatgttcatttttgctgtgatagcggtccaactctttaagggaaaatttttttactgtactgatgagtcaaaggagcttgagagagactgtaggggtcaatacctcgactacgaaaaggaggaggtcgaggcccaacccaggcagtggaaaaagtacgacttccattacgataacgtgctatgggccttactcacactatttaccgtttccacaggtgagggctggcctatggtgttaaagcactccgtagacgcgacttatgaggaacagggtcctagcccaggatacagaatggagctgtctattttttacgtcgtttattttgttgtgttccccttctttttcgtcaacatcttcgtggccctgattatcattacgttccaggaacagggggacaaggtgatgtcagaatgctccctagagaaaaatgagagagcttgtattgactttgccataagcgccaagcctctcacacggtatatgccacaaaatagacagtccttccagtataaaacgtggactttcgtggtttctcccccatttgagtacttcatcatggctatgattgccttaaatacggtggtactgatgatgaagttttacgatgccccatatgaatatgagctgatgctcaagtgtctgaatattgtgttcacctcaatgttcagcatggaatgtgtgttgaagataatcgcctttggtgtcttgaactattttcgcgatgcttggaacgtcttcgattttgtcaccgtgttgggtagcatcacagacatcctcgtgactgaaatcgccgaaactaacaattttatcaacctcagcttcctgaggctgtttagagctgccaggctcattaagctactgagacaaggatatacaataaggatactgctgtggacgttcgtgcaatcgttcaaggccctgccttacgtgtgcttgctcattgccatgctgtttttcatctatgcaataatcggaatgcaggtgttcggcaatatcgccctggatgacgacacctcaatcaaccgacacaacaacttccgaaccttcttgcaagcgcttatgctgctgtttcgctcagcaactggagaagcctggcacgaaatcatgctatcatgtctcagtaatcaggcctgcgacgagcaggccaacgccaccgaatgcggtagcgacttcgcgtatttttactttgtatctttcatttttctatgctcctttttgatgctcaacctgttcgtggctgtgattatggataatttcgaatacctcacacgggattcctccatactgggacctcaccatctggatgagtttatcagggtctgggccgaatatgatccagctgcatgcggaagaatttcttataatgacatgtttgaaatgctgaaacacatgagcccgccactggggttaggtaaaaagtgtccagccagggtcgcttataaaaggttggtgagaatgaatatgccaatatccaatgaagacatgacagtgcattttacttcaacacttatggctcttattcgcacggccctcgagatcaagttagctcctgccggaaccaaacaacaccagtgcgacgccgaactgcgtaaagagatcagcgtcgtctgggctaatttgccccagaaaactctcgacttgttggtgcctcctcataagcctgatgagatgaccgtgggaaaggtttatgccgctctcatgatatttgacttttataagcagaacaagacgacgcgggaccagatgcagcaagcgccaggagggctgtctcagatggggcctgtttctctgttccacccgctgaaggctaccctcgaacaaactcagcccgctgtcttgcgtggcgctagggttttcctccgccagaagagctcaacatcgctcagcaacggtggagcgatccagaaccaggaatcagggattaaggagagcgtgagttggggcacgcaaaggacccaggacgcaccccacgaggcacgtccacctctggaacggggtcacagcacggagatacccgtaggaagaagtggcgctcttgcagtggatgtgcagatgcagtctatcactagaagagggccagacggagaaccacagccgggactagagagtcagggcagagccgctagcatgccccgattagcggctgagactcaaccagtcacagatgcctcacctatgaagcgctcaatctctaccctggctcagaggccaagggggacccacctgtgcagtactacgcccgaccggccacctccgtcacaagcctcatctcaccaccatcatcatagatgtcataggcgccgtgatcggaagcaacgatccctcgaaaaaggacctagcctgagtgccgacatggatggggctcctagtagcgccgttggacctgggttgccacctggcgaggggcctactggatgtcggagggagagagaaagacgccaggagcggggaaggagtcaggaacggaggcaacctagctcgagctctagcgagaaacagcgcttctactcgtgtgaccggttcggcggaagggaacctccaaagcctaaacccagcttgagctctcaccccacctctccaacagcaggccaagaacctggtccgcatcctcaggcaggctcggcagtgggcttccccaacactactccctgttgccgcgaaaccccctcagcctctccttggcctctggcactggagttggcactaactctgacttgggggtctgtgtggaccgtgcgaccactcagcactccttgtctgcgcaccctcagcctctctcgtcggttgtggcctccaacacgagctgccccaccagggctgcccacctgtcctccataa

SEQ ID NO: 86750 - DNA, 7158 bp, Artificial Sequence
  derived and/or modified sequence
gcggcggcggctgcggcggtggggccgggcgaggtccgctgcggtcccggcggctccgtggctgctccgctctgagcgcctggcgcgccccgcgccctccctgccggggccgctgggccggggatgcacgcggggcccgggagccatggtccgcttcggggacgagctgggcggccgctatgggggccccggcggcggagagcgggcccggggcggcggggccggcggggcggggggcccgggtcccggggggctgcagcccggccagcgggtcctctacaagcaatcgatcgcgcagcgcgcgcggaccatggcgctgtacaaccccatcccggtcaagcagaactgcttcaccgtcaaccgctcgctcttcgtcttcagcgaggacaacgtcgtccgcaaatacgcgaagcgcatcaccgagtggcctccattcgagtatatgatcctggccaccatcatcgccaactgcatcgtgctggccctggagcagcacctccctgatggggacaaaacgcccatgtccgagcggctggacgacacggagccctatttcatcgggatcttttgcttcgaggcagggatcaaaatcatcgctctgggctttgtcttccacaagggctcttacctgcggaacggctggaacgtcatggacttcgtggtcgtcctcacagggatccttgccacggctggaactgacttcgacctgcgaacactgagggctgtgcgtgtgctgaggcccctgaagctggtgtctgggattccaagtttgcaggtggtgctcaagtccatcatgaaggccatggttccactcctgcagattgggctgcttctcttctttgccatcctcatgtttgccatcattggcctggagttctacatgggcaagttccacaaggcctgtttccccaacagcacagatgcggagcccgtgggtgacttcccctgtggcaaggaggccccagcccggctgtgcgagggcgacactgagtgccgggagtactggccaggacccaactttggcatcaccaactttgacaatatcctgtttgccatcttgacggtgttccagtgcatcaccatggagggctggactgacatcctctataatacaaacgatgcggccggcaacacctggaactggctctacttcatccctctcatcatcatcggctccttcttcatgctcaacctggtgctgggcgtgctctcgggggagtttgccaaggagcgagagagggtggagaaccgccgcgccttcctgaagctgcgccggcagcagcagatcgagcgagagctcaacgggtacctggagtggatcttcaaggcggaggaagtcatgctggccgaggaggacaggaatgcagaggagaagtcccctttggacgtgctgaagagagcggccaccaagaagagcagaaatgacctgatccacgcagaggagggagaggaccggtttgcagatctctgtgctgttggatcccccttcgcccgcgccagcctcaagagcgggaagacagagagctcgtcatacttccggaggaaggagaagatgttccggttttttatccggcgcatggtgaaggctcagagcttctactgggtggtgctgtgcgtggtggccctgaacacactgtgtgtggccatggtgcattacaaccagccgcggcggcttaccacgaccctgtattttgcagagtttgttttcctgggtctcttcctcacagagatgtccctgaagatgtatggcctggggcccagaagctacttccggtcctccttcaactgcttcgactttggggtcatcgtggggagcgtctttgaagtggtctgggcggccatcaagccgggaagctcctttgggatcagtgtgctgcgggccctccgcctgctgaggatcttcaaagtcacgaagtactggagctccctgcggaacctggtggtgtccctgctgaactccatgaagtccatcatcagcctgctcttcttgctcttcctgttcattgtggtcttcgccctgctggggatgcagctgtttgggggacagttcaacttccaggatgagactcccacaaccaacttcgacaccttccctgccgccatcctcactgtcttccagatcctgacgggagaggactggaatgcagtgatgtatcacgggatcgaatcgcaaggcggcgtcagcaaaggcatgttctcgtccttttacttcattgtcctgacactgttcggaaactacactctgctgaatgtctttctggccatcgctgtggacaacctggccaacgcccaagagctgaccaaggatgaagaggagatggaagaagcagccaatcagaagcttgctctgcaaaaggccaaagaagtggctgaagtcagccccatgtctgccgcgaacatctccatcgccgccaggcagcagaactcggccaaggcgcgctcggtgtgggagcagcgggccagccagctacggctgcagaacctgcgggccagctgcgaggcgctgtacagcgagatggaccccgaggagcggctgcgcttcgccactacgcgccacctgcggcccgacatgaagacgcacctggaccggccgctggtggtggagctgggccgcgacggcgcgcgggggcccgtgggaggcaaagcccgacctgaggctgcggaggcccccgagggcgtcgaccctccgcgcaggcaccaccggcaccgcgacaaggacaagacccccgcggcgggggaccaggaccgagcagaggccccgaaggcggagagcggggagcccggtgcccgggaggagcggccgcggccgcaccgcagccacagcaaggaggccgcggggcccccggaggcgcggagcgagcgcggccgaggcccaggccccgagggcggccggcggcaccaccggcgcggctccccggaggaggcggccgagcgggagccccgacgccaccgcgcgcaccggcaccaggatccgagcaaggagtgcgccggcgccaagggcgagcggcgcgcgcggcaccgcggcggcccccgagcggggccccgggaggcggagagcggggaggagccggcgcggcggcaccgggcccggcacaaggcgcagcctgctcacgaggctgtggagaaggagaccacggagaaggaggccacggagaaggaggctgagatagtggaagccgacaaggaaaaggagctccggaaccaccagccccgggagccacactgtgacctggagaccagtgggactgtgactgtgggtcccatgcacacactgcccagcacctgtctccagaaggtggaggaacagccagaggatgcagacaatcagcggaacgtcactcgcatgggcagtcagcccccagacccgaacactattgtacatatcccagtgatgctgacgggccctcttggggaagccacggtcgttcccagtggtaacgtggacctggaaagccaagcagaggggaagaaggaggtggaagcggatgacgtgatgaggagcggcccccggcctatcgtcccatacagctccatgttctgtttaagccccaccaacctgctccgccgcttctgccactacatcgtgaccatgaggtacttcgaggtggtcattctcgtggtcatcgccttgagcagcatcgccctggctgctgaggacccagtgcgcacagactcgcccaggaacaacgctctgaaatacctggattacattttcactggtgtctttacctttgagatggtgataaagatgatcgacttgggactgctgcttcaccctggagcctatttccgggacttgtggaacattctggacttcattgtggtcagtggcgccctggtggcgtttgctttctcaggatccaaagggaaagacatcaataccatcaagtctctgagagtccttcgtgtcctgcggcccctcaagaccatcaaacggctgcccaagctcaaggctgtgtttgactgtgtggtgaactccctgaagaatgtcctcaacatcttgattgtctacatgctcttcatgttcatatttgccgtcattgcggtgcagctcttcaaagggaagtttttctactgcacagatgaatccaaggagctggagagggactgcaggggtcagtatttggattatgagaaggaggaagtggaagctcagcccaggcagtggaagaaatacgactttcactacgacaatgtgctctgggctctgctgacgctgttcacagtgtccacgggagaaggctggcccatggtgctgaaacactccgtggatgccacctatgaggagcagggtccaagccctgggtaccgcatggagctgtccatcttctacgtggtctactttgtggtctttcccttcttcttcgtcaacatctttgtggctttgatcatcatcaccttccaggagcagggggacaaggtgatgtctgaatgcagcctggagaagaacgagagggcttgcattgacttcgccatcagcgccaaacccctgacacggtacatgccccaaaaccggcagtcgttccagtataagacgtggacatttgtggtctccccgccctttgaatacttcatcatggccatgatagccctcaacactgtggtgctgatgatgaagttctatgatgcaccctatgagtacgagctgatgctgaaatgcctgaacatcgtgttcacatccatgttctccatggaatgcgtgctgaagatcatcgcctttggggtgctgaactatttcagagatgcctggaatgtctttgactttgtcactgtgttgggaagtattactgatattttagtaacagagattgcggaaacgaacaatttcatcaacctcagcttcctccgcctctttcgagctgcgcggctgatcaagctgctccgccagggctacaccatccgcatcctgctgtggacctttgtccagtccttcaaggccctgccctacgtgtgtctgctcattgccatgctgttcttcatctacgccatcatcggcatgcaggtgtttgggaatattgccctggatgatgacaccagcatcaaccgccacaacaacttccggacgtttttgcaagccctgatgctgctgttcaggagcgccacgggggaggcctggcacgagatcatgctgtcctgcctgagcaaccaggcctgtgatgagcaggccaatgccaccgagtgtggaagtgactttgcctacttctacttcgtctccttcatcttcctgtgctcctttctgatgttgaacctctttgtggctgtgatcatggacaattttgagtacctcacgcgggactcttccatcctaggtcctcaccacttggatgagttcatccgggtctgggctgaatacgacccggctgcgtgtgggcgcatcagttacaatgacatgtttgagatgctgaaacacatgtccccgcctctggggctggggaagaaatgccctgctcgagttgcttacaagcgcctggttcgcatgaacatgcccatctccaacgaggacatgactgttcacttcacgtccacgctgatggccctcatccggacggcactggagatcaagctggccccagctgggacaaagcagcatcagtgtgacgcggagttgaggaaggagatttccgttgtgtgggccaatctgccccagaagactttggacttgctggtaccaccccataagcctgatgagatgacagtggggaaggtttatgcagctctgatgatattcgacttctacaagcagaacaaaaccaccagagaccagatgcagcaggctcctggaggcctctcccagatgggtcctgtgtccctgttccaccctctgaaggccaccctggagcagacacagccggctgtgctccgaggagcccgggttttccttcgacagaagagttccacctccctcagcaatggcggggccatacaaaaccaagagagtggcatcaaagagtctgtctcctggggcactcaaaggacccaggatgcaccccatgaggccaggccacccctggagcgtggccactccacagagatccctgtggggcggtcaggagcactggctgtggacgttcagatgcagagcataacccggaggggccctgatggggagccccagcctgggctggagagccagggtcgagcggcctccatgccccgccttgcggccgagactcagcccgtcacagatgccagccccatgaagcgctccatctccacgctggcccagcggccccgtgggactcatctttgcagcaccaccccggaccgcccaccccctagccaggcgtcgtcgcaccaccaccaccaccgctgccaccgccgcagggacaggaagcagaggtccctggagaaggggcccagcctgtctgccgatatggatggcgcaccaagcagtgctgtggggccggggctgcccccgggagaggggcctacaggctgccggcgggaacgagagcgccggcaggagcggggccggtcccaggagcggaggcagccctcatcctcctcctcggagaagcagcgcttctactcctgcgaccgctttgggggccgtgagcccccgaagcccaagccctccctcagcagccacccaacgtcgccaacagctggccaggagccgggaccccacccacaggccggctcagccgtgggctttccgaacacaacgccctgctgcagagagaccccctcagccagcccctggcccctggctctcgaattggctctgacccttacctggggcagcgtctggacagtgaggcctctgtccacgccctgcctgaggacactctcactttcgaggaggctgtggccaccaactcgggccgctcctccaggacttcctacgtgtcctccctgacctcccagtctcaccctctccgccgcgtgcccaacggttaccactgcaccctgggactcagctcgggtggccgagcacggcacagctaccaccaccctgaccaagaccactggtgctagctgcaccgtgaccgctcagacgcctgcatgcagcaggcgtgtgttccagtggatgagttttatcatccacacggggcagccggccctcgggggaggccttgcccaccttggtgaggctcctgtggcccctccctccccctcctcccctcttttactctagacgacgaataaagccctgtt

SEQ ID NO: 86751 - DNA, 6714 bp, Artificial Sequence
  derived and/or modified sequence
atggtgagattcggcgacgagctgggcggcagatacggcggccccggcggcggcgagagagccagaggcggcggcgccggcggcgccggcggccccggccccggcggcctgcagcccggccagagagtgctgtacaagcagagcatcgcccagagagccagaaccatggccctgtacaaccccatccccgtgaagcagaactgcttcaccgtgaacagaagcctgttcgtgttcagcgaggacaacgtggtgagaaagtacgccaagagaatcaccgagtggccccccttcgagtacatgatcctggccaccatcatcgccaactgcatcgtgctggccctggagcagcacctgcccgacggcgacaagacccccatgagcgagagactggacgacaccgagccctacttcatcggcatcttctgcttcgaggccggcatcaagatcatcgccctgggcttcgtgttccacaagggcagctacctgagaaacggctggaacgtgatggacttcgtggtggtgctgaccggcatcctggccaccgccggcaccgacttcgacctgagaaccctgagagccgtgagagtgctgagacccctgaagctggtgagcggcatccccagcctgcaggtggtgctgaagagcatcatgaaggccatggtgcccctgctgcagatcggcctgctgctgttcttcgccatcctgatgttcgccatcatcggcctggagttctacatgggcaagttccacaaggcctgcttccccaacagcaccgacgccgagcccgtgggcgacttcccctgcggcaaggaggcccccgccagactgtgcgagggcgacaccgagtgcagagagtactggcccggccccaacttcggcatcaccaacttcgacaacatcctgttcgccatcctgaccgtgttccagtgcatcaccatggagggctggaccgacatcctgtacaacaccaacgacgccgccggcaacacctggaactggctgtacttcatccccctgatcatcatcggcagcttcttcatgctgaacctggtgctgggcgtgctgagcggcgagttcgccaaggagagagagagagtggagaacagaagagccttcctgaagctgagaagacagcagcagatcgagagagagctgaacggctacctggagtggatcttcaaggccgaggaggtgatgctggccgaggaggacagaaacgccgaggagaagagccccctggacgtgctgaagagagccgccaccaagaagagcagaaacgacctgatccacgccgaggagggcgaggacagattcgccgacctgtgcgccgtgggcagccccttcgccagagccagcctgaagagcggcaagaccgagagcagcagctacttcagaagaaaggagaagatgttcagattcttcatcagaagaatggtgaaggcccagagcttctactgggtggtgctgtgcgtggtggccctgaacaccctgtgcgtggccatggtgcactacaaccagcccagaagactgaccaccaccctgtacttcgccgagttcgtgttcctgggcctgttcctgaccgagatgagcctgaagatgtacggcctgggccccagaagctacttcagaagcagcttcaactgcttcgacttcggcgtgatcgtgggcagcgtgttcgaggtggtgtgggccgccatcaagcccggcagcagcttcggcatcagcgtgctgagagccctgagactgctgagaatcttcaaggtgaccaagtactggagcagcctgagaaacctggtggtgagcctgctgaacagcatgaagagcatcatcagcctgctgttcctgctgttcctgttcatcgtggtgttcgccctgctgggcatgcagctgttcggcggccagttcaacttccaggacgagacccccaccaccaacttcgacaccttccccgccgccatcctgaccgtgttccagatcctgaccggcgaggactggaacgccgtgatgtaccacggcatcgagagccagggcggcgtgagcaagggcatgttcagcagcttctacttcatcgtgctgaccctgttcggcaactacaccctgctgaacgtgttcctggccatcgccgtggacaacctggccaacgcccaggagctgaccaaggacgaggaggagatggaggaggccgccaaccagaagctggccctgcagaaggccaaggaggtggccgaggtgagccccatgagcgccgccaacatcagcatcgccgccagacagcagaacagcgccaaggccagaagcgtgtgggagcagagagccagccagctgagactgcagaacctgagagccagctgcgaggccctgtacagcgagatggaccccgaggagagactgagattcgccaccaccagacacctgagacccgacatgaagacccacctggacagacccctggtggtggagctgggcagagacggcgccagaggccccgtgggcggcaaggccagacccgaggccgccgaggcccccgagggcgtggacccccccagaagacaccacagacacagagacaaggacaagacccccgccgccggcgaccaggacagagccgaggcccccaaggccgagagcggcgagcccggcgccagagaggagagacccagaccccacagaagccacagcaaggaggccgccggcccccccgaggccagaagcgagagaggcagaggccccggccccgagggcggcagaagacaccacagaagaggcagccccgaggaggccgccgagagagagcccagaagacacagagcccacagacaccaggaccccagcaaggagtgcgccggcgccaagggcgagagaagagccagacacagaggcggccccagagccggccccagagaggccgagagcggcgaggagcccgccagaagacacagagccagacacaaggcccagcccgcccacgaggccgtggagaaggagaccaccgagaaggaggccaccgagaaggaggccgagatcgtggaggccgacaaggagaaggagctgagaaaccaccagcccagagagccccactgcgacctggagaccagcggcaccgtgaccgtgggccccatgcacaccctgcccagcacctgcctgcagaaggtggaggagcagcccgaggacgccgacaaccagagaaacgtgaccagaatgggcagccagccccccgaccccaacaccatcgtgcacatccccgtgatgctgaccggccccctgggcgaggccaccgtggtgcccagcggcaacgtggacctggagagccaggccgagggcaagaaggaggtggaggccgacgacgtgatgagaagcggccccagacccatcgtgccctacagcagcatgttctgcctgagccccaccaacctgctgagaagattctgccactacatcgtgaccatgagatacttcgaggtggtgatcctggtggtgatcgccctgagcagcatcgccctggccgccgaggaccccgtgagaaccgacagccccagaaacaacgccctgaagtacctggactacatcttcaccggcgtgttcaccttcgagatggtgatcaagatgatcgacctgggcctgctgctgcaccccggcgcctacttcagagacctgtggaacatcctggacttcatcgtggtgagcggcgccctggtggccttcgccttcagcggcagcaagggcaaggacatcaacaccatcaagagcctgagagtgctgagagtgctgagacccctgaagaccatcaagagactgcccaagctgaaggccgtgttcgactgcgtggtgaacagcctgaagaacgtgctgaacatcctgatcgtgtacatgctgttcatgttcatcttcgccgtgatcgccgtgcagctgttcaagggcaagttcttctactgcaccgacgagagcaaggagctggagagagactgcagaggccagtacctggactacgagaaggaggaggtggaggcccagcccagacagtggaagaagtacgacttccactacgacaacgtgctgtgggccctgctgaccctgttcaccgtgagcaccggcgagggctggcccatggtgctgaagcacagcgtggacgccacctacgaggagcagggccccagccccggctacagaatggagctgagcatcttctacgtggtgtacttcgtggtgttccccttcttcttcgtgaacatcttcgtggccctgatcatcatcaccttccaggagcagggcgacaaggtgatgagcgagtgcagcctggagaagaacgagagagcctgcatcgacttcgccatcagcgccaagcccctgaccagatacatgccccagaacagacagagcttccagtacaagacctggaccttcgtggtgagcccccccttcgagtacttcatcatggccatgatcgccctgaacaccgtggtgctgatgatgaagttctacgacgccccctacgagtacgagctgatgctgaagtgcctgaacatcgtgttcaccagcatgttcagcatggagtgcgtgctgaagatcatcgccttcggcgtgctgaactacttcagagacgcctggaacgtgttcgacttcgtgaccgtgctgggcagcatcaccgacatcctggtgaccgagatcgccgagaccaacaacttcatcaacctgagcttcctgagactgttcagagccgccagactgatcaagctgctgagacagggctacaccatcagaatcctgctgtggaccttcgtgcagagcttcaaggccctgccctacgtgtgcctgctgatcgccatgctgttcttcatctacgccatcatcggcatgcaggtgttcggcaacatcgccctggacgacgacaccagcatcaacagacacaacaacttcagaaccttcctgcaggccctgatgctgctgttcagaagcgccaccggcgaggcctggcacgagatcatgctgagctgcctgagcaaccaggcctgcgacgagcaggccaacgccaccgagtgcggcagcgacttcgcctacttctacttcgtgagcttcatcttcctgtgcagcttcctgatgctgaacctgttcgtggccgtgatcatggacaacttcgagtacctgaccagagacagcagcatcctgggcccccaccacctggacgagttcatcagagtgtgggccgagtacgaccccgccgcctgcggcagaatcagctacaacgacatgttcgagatgctgaagcacatgagcccccccctgggcctgggcaagaagtgccccgccagagtggcctacaagagactggtgagaatgaacatgcccatcagcaacgaggacatgaccgtgcacttcaccagcaccctgatggccctgatcagaaccgccctggagatcaagctggcccccgccggcaccaagcagcaccagtgcgacgccgagctgagaaaggagatcagcgtggtgtgggccaacctgccccagaagaccctggacctgctggtgcccccccacaagcccgacgagatgaccgtgggcaaggtgtacgccgccctgatgatcttcgacttctacaagcagaacaagaccaccagagaccagatgcagcaggcccccggcggcctgagccagatgggccccgtgagcctgttccaccccctgaaggccaccctggagcagacccagcccgccgtgctgagaggcgccagagtgttcctgagacagaagagcagcaccagcctgagcaacggcggcgccatccagaaccaggagagcggcatcaaggagagcgtgagctggggcacccagagaacccaggacgccccccacgaggccagaccccccctggagagaggccacagcaccgagatccccgtgggcagaagcggcgccctggccgtggacgtgcagatgcagagcatcaccagaagaggccccgacggcgagccccagcccggcctggagagccagggcagagccgccagcatgcccagactggccgccgagacccagcccgtgaccgacgccagccccatgaagagaagcatcagcaccctggcccagagacccagaggcacccacctgtgcagcaccacccccgacagacccccccccagccaggccagcagccaccaccaccaccacagatgccacagaagaagagacagaaagcagagaagcctggagaagggccccagcctgagcgccgacatggacggcgcccccagcagcgccgtgggccccggcctgccccccggcgagggccccaccggctgcagaagagagagagagagaagacaggagagaggcagaagccaggagagaagacagcccagcagcagcagcagcgagaagcagagattctacagctgcgacagattcggcggcagagagccccccaagcccaagcccagcctgagcagccaccccaccagccccaccgccggccaggagcccggcccccacccccaggccggcagcgccgtgggcttccccaacaccaccccctgctgcagagagacccccagcgccagcccctggcccctggccctggagctggccctgaccctgacctggggcagcgtgtggaccgtgagacccctgagcaccccctgcctgagaaccctgagcctgagcagaagactgtggccccccaccagagccgccccccccggcctgcccacctgccccccctag

SEQ ID NO: 86752 - protein, 345 aa, Artificial Sequence
  derived and/or modified sequence
MQLEIQVALNFIISYLYNKLPRRRVNIFGEELERLLKKKYEGHWYPEKPYKGSGFRCIHIGEKVDPVIEQASKESGLDIDDVRGNLPQDLSVWIDPFEVSYQIGEKGPVKVLYVDDNNENGCELDKEIKNSFNPEAQVFMPISDPASSVSSSPSPPFGHSAAVSPTFMPRSTQPLTFTTATFAATKFGSTKMKNSGRSNKVARTSPINLGLNVNDLLKQKAISSSMHSLYGLGLGSQQQPQQQQQPAQPPPPPPPPQQQQQQKTSALSPNAKEFIFPNMQGQGSSTNGMFPGDSPLNLSPLQYSNAFDVFAAYGGLNEKSFVDGLNFSLNNMQYSNQQFQPVMAN

SEQ ID NO: 86753 - DNA, 1038 bp, Artificial Sequence
  derived and/or modified sequence
atgcagctggagatccaggtggccctgaacttcatcatcagctacctgtacaacaagctgcccagaagaagagtgaacatcttcggcgaggagctggagagactgctgaagaagaagtacgagggccactggtaccccgagaagccctacaagggcagcggcttcagatgcatccacatcggcgagaaggtggaccccgtgatcgagcaggccagcaaggagagcggcctggacatcgacgacgtgagaggcaacctgccccaggacctgagcgtgtggatcgaccccttcgaggtgagctaccagatcggcgagaagggccccgtgaaggtgctgtacgtggacgacaacaacgagaacggctgcgagctggacaaggagatcaagaacagcttcaaccccgaggcccaggtgttcatgcccatcagcgaccccgccagcagcgtgagcagcagccccagcccccccttcggccacagcgccgccgtgagccccaccttcatgcccagaagcacccagcccctgaccttcaccaccgccaccttcgccgccaccaagttcggcagcaccaagatgaagaacagcggcagaagcaacaaggtggccagaaccagccccatcaacctgggcctgaacgtgaacgacctgctgaagcagaaggccatcagcagcagcatgcacagcctgtacggcctgggcctgggcagccagcagcagccccagcagcagcagcagcccgcccagcccccccccccccccccccccccccagcagcagcagcagcagaagaccagcgccctgagccccaacgccaaggagttcatcttccccaacatgcagggccagggcagcagcaccaacggcatgttccccggcgacagccccctgaacctgagccccctgcagtacagcaacgccttcgacgtgttcgccgcctacggcggcctgaacgagaagagcttcgtggacggcctgaacttcagcctgaacaacatgcagtacagcaaccagcagttccagcccgtgatggccaactag

SEQ ID NO: 86754 - DNA, 1038 bp, Artificial Sequence
  derived and/or modified sequence
atgcagctggaaattcaggtcgcactaaactttattatttcctacctctataacaagcttcctaggcggcgggtgaacatatttggcgaagagctggaaagactgctgaagaagaaatatgagggccactggtatcccgaaaaaccttataaagggagtgggtttaggtgtatccacataggcgaaaaggtcgacccagtgattgaacaagcctccaaagaaagcggcctcgatattgacgatgttcggggtaatctcccacaggacctctctgtctggattgatccctttgaagtctcttatcagatcggggagaagggcccagtcaaggtactgtacgtggacgataataatgaaaacgggtgcgagttggataaggagattaagaactcctttaatccggaggcgcaggtgtttatgccaattagcgatccggcaagctctgtgtcctcatccccaagccccccttttggccattccgcagcggtgtctcctacgttcatgcctcgatccacccagccgctgacgtttactacagccacctttgcggcgaccaaatttggatccaccaagatgaagaatagtgggagatcaaacaaggtggcccggacctccccgatcaatttgggtctgaatgttaacgacttactgaaacagaaagcgatctcaagctccatgcactctctctatggtctgggattgggcagtcagcagcagccccaacaacagcagcagcccgcacaaccacctccccctccaccccctcctcagcaacagcagcagcaaaagacctccgccctgtctcccaacgctaaggaatttatattccctaatatgcagggccagggtagctccaccaacggaatgttccctggcgactcccctctcaatctgtcccctctgcagtattcgaatgcattcgacgtattcgcagcctacggcgggctaaacgagaagtcattcgtcgacggcttgaatttttcacttaacaatatgcagtactcgaaccagcagttccaacctgtgatggccaattag

SEQ ID NO: 86755 - DNA, 1038 bp, Artificial Sequence
  derived and/or modified sequence
atgcagttagaaattcaggttgccctgaattttataatatcctatctctataataagttgcccaggaggagagtgaacatattcggggaggaactggagaggctgctaaaaaagaagtacgagggtcattggtatcccgagaagccttataagggttccggctttcggtgtatccacattggtgaaaaggttgacccagttatagaacaggctagcaaggaatcgggcttggatatcgacgacgtgaggggcaatcttcctcaggacctcagcgtttggattgatccgttcgaagtgagttaccagattggcgaaaaggggcccgtgaaagttctatacgtggacgataacaatgagaatgggtgcgaactagataaagagatcaagaactctttcaatccagaagctcaggtgttcatgcctatttctgatcccgcatcttcggtgagttcctccccgtcaccccctttcggccactccgctgctgtcagcccaacattcatgcccagaagcacacagcccctgacgttcacaaccgccacctttgcagccaccaagttcggcagtactaaaatgaaaaatagtgggaggtctaataaagtggcgagaacctccccaatcaacctgggactcaatgtaaatgacttacttaagcagaaggctataagttcgtccatgcatagcctgtacggcctcggcttaggcagtcagcaacaaccacaacaacagcagcagcccgcacagcctcctccaccaccgcccccaccccaacaacagcagcagcaaaaaacatcagccctcagcccaaacgccaaggagttcattttccccaacatgcaaggccaagggagctctacaaatggaatgttccccggagacagtcccttaaacctgtctccactgcaatatagcaatgctttcgacgtgtttgctgcttatggtggactgaatgagaaaagcttcgtggacggactgaacttctccctgaataacatgcagtattcgaaccaacagttccagcccgtaatggctaattag

SEQ ID NO: 86756 - DNA, 1038 bp, Artificial Sequence
  derived and/or modified sequence
atgcagctggagatccaggtggccctgaacttcatcatctcctacctgtacaacaagctgcccaggagaagagtgaacatctttggagaggagctggagcggctgctgaagaagaagtatgagggccactggtacccagagaagccctacaagggcagcggcttccgctgcatccacatcggggagaaggtggaccccgtcatcgagcaggccagcaaggagagcggcctggacattgatgatgtgcggggcaacctgccccaggacctgtctgtgtggattgacccctttgaggtgtcctaccagattggagagaagggccctgtgaaggtgctgtatgtggatgacaacaatgaaaatggctgtgagctggacaaggagatcaagaacagcttcaaccctgaggcccaggtgttcatgcccatcagtgaccctgccagctctgtgagcagcagccccagccccccatttggccacagcgctgctgtgagccccaccttcatgcccaggagcacccagcccctgaccttcaccacagccacctttgctgccaccaagtttggcagcaccaagatgaagaacagcggccgcagcaacaaggtggcccggaccagccccatcaacctgggcctgaatgtgaatgacctgctgaagcagaaggccatcagcagctccatgcacagcctgtatggcctgggcctgggcagccagcagcagccccagcagcagcagcagcctgcccagcccccacctcctcctcctccaccccagcagcagcagcagcagaagaccagcgccctgagccccaatgccaaggagttcatcttccccaacatgcagggccagggcagcagcaccaacggcatgtttcctggggacagccccctgaacctgagccccctgcagtacagcaatgcctttgatgtgtttgctgcctatggaggcctgaatgagaagagctttgtggatggcctgaacttcagcctgaacaacatgcagtacagcaaccagcagttccagcctgtgatggccaactag

SEQ ID NO: 86757 - DNA, 1038 bp, Artificial Sequence
  derived and/or modified sequence
atgcagctggagatccaggtggccctgaacttcatcatcagctacctttacaataagctgcctcgaaggagggtgaacatctttggcgaggaattagaacgattgctcaagaagaagtatgaggggcattggtatcctgaaaaaccatataaaggcagtggatttcggtgcattcacattggcgaaaaggtggatcccgtaattgagcaggcatccaaagaatccgggcttgatatcgatgacgtgcggggaaatcttccccaagacttgtctgtctggatagacccgtttgaagtgtcttaccagatcggggagaaaggcccagtgaaggtgttatacgtggacgacaacaacgagaatggttgtgagctagataaggaaattaaaaacagcttcaatccggaggcccaggtctttatgcccatctctgaccctgcttcctccgtgtcctctagtccttcaccaccttttggacacagcgccgcagtgagtccaacttttatgcctagaagtacacagcctctgacctttacaacggcaacattcgcggccaccaagtttggctcaactaaaatgaagaactccggtcggtccaacaaggtcgcacgaacttctcctatcaatcttgggttgaatgtgaatgacctgcttaaacagaaggctattagttcatccatgcactctctctacggcctaggcctgggctcacagcaacagcctcagcagcagcagcagccggctcaaccacctccacccccaccaccccctcagcaacagcagcagcagaagacgtcggctctgtcaccgaatgccaaagagttcatcttcccaaatatgcagggacaggggtctagcactaacgggatgttccctggagattctcccctgaacctgagccccctgcagtacagcaacgcttttgacgtctttgctgcctatggcggcctgaatgaaaagagtttcgtcgatggactgaatttctccttaaataatatgcagtatagtaatcagcagtttcagccagtgatggcaaactag

SEQ ID NO: 86758 - DNA, 1038 bp, Artificial Sequence
  derived and/or modified sequence
atgcagctggagatccaggtggccctgaacttcatcatcagctacctttataacaaactgccacgaagacgcgtgaacatcttcggagaggaattagagcggctgctcaagaagaaatacgaaggccactggtacccagagaaaccttacaagggcagtgggtttaggtgtattcatatcggggagaaagtcgatcccgttattgagcaggcctctaaggagtcaggacttgacattgacgatgtgcgaggaaatctgccccaagatctctccgtctggatagacccttttgaagtgtcataccagatcggcgaaaaaggaccagtcaaagttctttatgtcgacgataacaatgagaacggctgtgagttagacaaggagattaagaacagcttcaacccagaagcccaggtgttcatgcctatttcggaccctgccagtagtgtgagttctagccctagccctcctttcggccacagtgccgccgtgtcacctacgttcatgccaaggtcaactcagcccctgaccttcaccaccgctacattcgctgccaccaagttcgggagcacgaaaatgaagaactctgggcgctctaataaggttgcgagaacctctcccatcaaccttggattgaatgtcaatgatctgcttaaacagaaggccatatcttcaagcatgcacagcctctatgggctgggtctgggatcccaacaacaaccccaacagcagcagcagcccgcgcagcctcctcctcctcccccaccaccacagcagcagcagcaacagaagacttccgctctgagcccaaatgcaaaagagtttatcttccccaacatgcagggccaaggttcctcaaccaacggaatgttccctggcgactcccctctcaatctgtcaccactgcaatactccaacgcgttcgacgtctttgctgcctacggcggactcaatgagaaaagctttgtggacggcctcaatttttctctcaataacatgcagtattccaatcagcagtttcaaccagtgatggcaaactag

SEQ ID NO: 86759 - DNA, 1038 bp, Artificial Sequence
  derived and/or modified sequence
atgcagctggagattcaagtcgccttgaactttattatctcttatttatacaacaaattgcctcggagaagggtcaacatctttggcgaggaacttgagcgactcctgaaaaagaagtacgagggccattggtaccctgaaaagccttataagggatctgggttcaggtgcattcatatcggggaaaaggttgacccagtgattgaacaggcttctaaagagtccggcctggatatcgatgatgtgagaggaaacctcccccaggatctgagtgtgtggattgacccatttgaagtgtcctatcaaatcggagaaaaaggtccagtgaaagtcctgtacgtggacgataataacgaaaacggctgcgaacttgacaaagagatcaagaattccttcaaccccgaagcccaggtgttcatgcccatcagtgaccctgcttcctccgtgtcctcaagcccaagtccgccttttggacacagtgctgctgtctcaccgactttcatgcctaggtcaacacagcctttaactttcacgactgccacatttgcagccaccaaatttgggtcaacaaaaatgaagaactccggccgttctaacaaggtagccagaactagtcccattaatttggggctgaacgtgaatgaccttctaaaacagaaagccatttcgtcaagtatgcacagcctctacggtcttgggctgggaagccaacagcagcctcagcagcaacagcagccggcacagcctcccccaccccctccaccacctcaacagcaacaacagcagaagacgtcagctctgtctccaaatgcaaaggagttcattttccccaatatgcagggtcaaggctcaagcactaacggtatgttccctggcgactctcctttgaacctatccccattacagtactcaaatgcctttgatgtgtttgccgcatatgggggtcttaacgagaagtctttcgtggatggcctcaatttttccctgaacaatatgcagtactccaaccagcaattccagccagtcatggcgaactag

SEQ ID NO: 86760 - DNA, 1038 bp, Artificial Sequence
  derived and/or modified sequence
atgcagttagagatccaggttgccctaaatttcatcatatcgtatttatataacaagctgccacggcgaagagtgaatatctttggggaggaactggagcgactccttaaaaaaaagtacgaaggacattggtatccagagaaaccatacaaaggttccgggttccggtgtatccacatcggcgaaaaggtcgatcccgtgattgagcaggcctctaaggagtctggccttgacatcgacgacgttagaggaaatctgcctcaggacctctctgtgtggatcgaccccttcgaggtatcctaccagattggagaaaagggccctgtgaaagtgttgtacgtagacgataacaacgaaaacgggtgtgagctggataaagaaattaagaactctttcaatcccgaggcacaggttttcatgcccatatccgacccagctagcagcgtcagcagctccccatcacccccttttggccattctgccgcagtgagccctacattcatgccccgatccacacagcccctgacattcacaacagccacctttgctgctactaaatttggttctacgaagatgaaaaacagtgggcgaagcaacaaggtggcaagaacatctcccatcaatctgggcttaaacgtaaatgatcttttaaagcagaaggccatctcttcctcaatgcactctctgtatgggctgggactcggttctcagcagcagccccagcagcagcagcagccagctcagccaccaccaccacctcctccaccacagcagcagcaacagcaaaaaaccagtgccctatcacccaacgccaaggaatttatattccccaatatgcagggacagggatcttcaacaaacggtatgttccccggagactcaccactcaatctctcccctttacagtactccaatgccttcgatgtgtttgccgcatatggcggtctgaatgaaaagagcttcgtggatggtctgaatttcagtcttaacaatatgcaatactccaaccaacaatttcagcccgttatggccaattag

SEQ ID NO: 86761 - DNA, 1467 bp, Artificial Sequence
  derived and/or modified sequence
agtgcggttccttctaaaaaggagaggcgggagagtcagggtggagaaggcggctccaaccagattttgcgtccacaaagccaaaagcttctaggcctggcatgtacggcgggtttgtgcccgaggagcacagctggtctacacgggcccgccccgtagacaccctactcctcgactttccccttttcccagtccgagtttgacgtcggtctcctggataccaggcagccaatcgcctcgttgcgaagggaccagcgcagccaatcaggcgtcgttgctacctgaacaagatcactcaaggtgaaggataatctactaataccagcactttgaatgaaaatttgtttctctgccacaaactgaacatcttttttttttttttttttttttggtgggggagttgaaacctaattttgtggcgtagcagctatgcagcttgaaatccaagtagcactaaattttattatttcgtatttgtacaataagcttcccaggagacgtgtcaacatttttggtgaagaacttgaaagacttcttaagaagaaatatgaagggcactggtatcctgaaaagccatacaaaggatcggggtttagatgtatacacataggggagaaagtggacccagtgattgaacaagcatccaaagagagtggtttggacattgatgatgttcgtggcaatctgccacaggatcttagtgtttggatcgacccatttgaggtttcttaccaaattggtgaaaagggaccagtgaaggtgctttacgtggatgataataatgaaaatggatgtgagttggataaggagatcaaaaacagctttaacccagaggcccaggtttttatgcccataagtgacccagcctcatcagtgtccagctctccatcgcctccttttggtcactctgctgctgtaagccctaccttcatgccccggtccactcagcctttaacctttaccactgccacttttgctgccaccaagttcggctctaccaaaatgaagaatagtggccgtagcaacaaggttgcacgtacttctcccatcaacctcggcttgaatgtgaatgacctcttgaagcagaaagccatctcttcctcaatgcactctctgtatgggcttggcttgggtagccagcagcagccacagcaacagcagcagccagcccagccgccaccgccaccaccaccaccacagcagcaacaacagcagaaaacctctgctctttctcctaatgccaaggaatttatttttcctaatatgcagggtcaaggtagtagtaccaatggaatgttcccaggtgacagcccccttaacctcagtcctctccagtacagtaatgcctttgatgtgtttgcagcctatggaggcctcaatgagaaatcttttgtagatggcttgaattttagcttaaataacatgcagtattctaaccagcaattccagcctgttatggctaactaa

SEQ ID NO: 86762 - DNA, 2229 bp, Artificial Sequence
  derived and/or modified sequence
gaagctctggcccggcgtgtagcgggcgcactacggggacgctgggccgggcaccgggctgtgtggagaagtgagcgcgctcgtctgacccccgtgcccgccaccccgagccactaacggcgatctcccaaggcctgcccgaggcctctgtcctctgtcctcagccccgcagcggcaacgtcttgcactcggcgagctcgccgctcccgaccctcccgcgcccccgccctgccgcgctgctccccgcccagccgcgggtctgtggtccaagccgccccgaagcagcccgaacaagatcactcaaggtgaaggataatctactaataccagcactttgaatgaaaatttgtttctctgccacaaactgaacatcttttttttttttttttttttttggtgggggagttgaaacctaattttgtggcgtagcagctatgcagcttgaaatccaagtagcactaaattttattatttcgtatttgtacaataagcttcccaggagacgtgtcaacatttttggtgaagaacttgaaagacttcttaagaagaaatatgaagggcactggtatcctgaaaagccatacaaaggatcggggtttagatgtatacacataggggagaaagtggacccagtgattgaacaagcatccaaagagagtggtttggacattgatgatgttcgtggcaatctgccacaggatcttagtgtttggatcgacccatttgaggtttcttaccaaattggtgaaaagggaccagtgaaggtgctttacgtggatgataataatgaaaatggatgtgagttggataaggagatcaaaaacagctttaacccagaggcccaggtttttatgcccataagtgacccagcctcatcagtgtccagctctccatcgcctccttttggtcactctgctgctgtaagccctaccttcatgccccggtccactcagcctttaacctttaccactgccacttttgctgccaccaagttcggctctaccaaaatgaagaatagtggccgtagcaacaaggttgcacgtacttctcccatcaacctcggcttgaatgtgaatgacctcttgaagcagaaagccatctcttcctcaatgcactctctgtatgggcttggcttgggtagccagcagcagccacagcaacagcagcagccagcccagccgccaccgccaccaccaccaccacagcagcaacaacagcagaaaacctctgctctttctcctaatgccaaggaatttatttttcctaatatgcagggtcaaggtagtagtaccaatggaatgttcccaggtgacagcccccttaacctcagtcctctccagtacagtaatgcctttgatgtgtttgcagcctatggaggcctcaatgagaaatcttttgtagatggcttgaattttagcttaaataacatgcagtattctaaccagcaattccagcctgttatggctaactaaaaaaaagaaaatgtatcgtacaagttaaaatgcacgggcccaagggggattttttttttcacctccttgagaatttttttttttaagcttatagtaaggatacattcaagcttggttaaaaaaataataataaaacatgcatcatttttcatttgccaaccaagcacaaagttattttatactgactgtatattttaaagtatactctcagatatggcctcttacagtatttaagatatagcaaggacatggctgatttttttttataaaaattggcactaataagtgggtttattggtcttttctaattgtataatttaatttagtacaaagtttgtaaaatatcagaggatatatatatattgtttctacgacatggtattgcatttatatctttttactacagtgatctgtgacagcagcagcttcatgttgtattttttttactgaaattgtaaaatatccatcttaaagacatcaactattctaaaaattgtgtacaggatattcctttagtggtggaattaaaatgtacgaatacttgctttttcaaaaaaatgtattttctgttaaaagtttaaagatttttgctatatattatggaagaaaaatgtaatcgtaaatattaattttgtacctatattgtgcaatacttgaaaaaaacggtataaaagtattttgagtcagtgtcttacatgttaagagggactgaaatagtttatattaagtttgtattaaaattctttaaaattaaaaa

SEQ ID NO: 86763 - DNA, 567 bp, Artificial Sequence
  derived and/or modified sequence
atgagcaccagaagaagacacgtgggcaacagagccaaccccgaccccaactgctgcctgggcgtgttcggcctgagcctgtacaccaccgagagagacctgagagaggtgttcagcaagtacggccccatcgccgacgtgagcatcgtgtacgaccagcagagcagaagaagcagaggcttcgccttcgtgtacttcgagaacgtggacgacgccaaggaggccaaggagagagccaacggcatggagctggacggcagaagaatcagagtggacttcagcatcaccaagagaccccacacccccacccccggcatctacatgggcagacccacctacggcagcagcagaagaagagactactacgacagaggctacgacagaggctacgacgacagagactactacagcagaagctacagaggcggcggcggcggcggcggcggctggagagccgcccaggacagagaccagatctacagaagaagaagccccagcccctactacagcagaggcggctacagaagcagaagcagaagcagaagctacagccccagaagatactag

SEQ ID NO: 86764 - DNA, 867 bp, Artificial Sequence
  derived and/or modified sequence
atgagcgacagcggcgagcagaactacggcgagagagagagcagaagcgccagcagaagcggcagcgcccacggcagcggcaagagcgccagacacacccccgccagaagcagaagcaaggaggacagcagaagaagcagaagcaagagcagaagcagaagcgagagcagaagcagaagcagaagaagcagcagaagacactacaccagaagcagaagcagaagcagaagccacagaagaagcagaagcagaagctacagcagagactacagaagaagacacagccacagccacagccccatgagcaccagaagaagacacgtgggcaacagagccaaccccgaccccaactgctgcctgggcgtgttcggcctgagcctgtacaccaccgagagagacctgagagaggtgttcagcaagtacggccccatcgccgacgtgagcatcgtgtacgaccagcagagcagaagaagcagaggcttcgccttcgtgtacttcgagaacgtggacgacgccaaggaggccaaggagagagccaacggcatggagctggacggcagaagaatcagagtggacttcagcatcaccaagagaccccacacccccacccccggcatctacatgggcagacccacctacggcagcagcagaagaagagactactacgacagaggctacgacagaggctacgacgacagagactactacagcagaagctacagaggcggcggcggcggcggcggcggctggagagccgcccaggacagagaccagatctacagaagaagaagccccagcccctactacagcagaggcggctacagaagcagaagcagaagcagaagctacagccccagaagatactag

SEQ ID NO: 86765 - DNA, 567 bp, Artificial Sequence
  derived and/or modified sequence
atgtccacccgacggcgacacgtgggcaatcgagccaacccggatccaaactgctgcctgggggttttcgggctctccctgtataccaccgaaagagacctccgtgaggtgttttcaaaatacggacctatcgctgatgtcagtattgtgtatgaccagcagtcacgacgctctagaggtttcgccttcgtctactttgagaatgttgacgacgccaaagaagccaaggaaagggccaatgggatggagctcgacggcaggagaatcagggtggatttctcaatcaccaagcgtccgcacacaccaacgcccggaatttacatgggaagacccacttacggctcttctagaagaagagattactacgatcgaggttacgatcggggatacgatgatcgagattattactctcggtcctaccgggggggagggggaggaggaggaggctggagagcggcccaagatagggaccagatttacagacgaagaagcccaagcccttattactctcggggggggtaccgttccagaagccggtcaagaagttactcaccccgcaggtattag

SEQ ID NO: 86766 - DNA, 867 bp, Artificial Sequence
  derived and/or modified sequence
atgtcggactctggagagcagaattacggggaacgggaaagtaggtccgctagccgcagtgggtctgcccacggttccgggaagtccgccaggcacacccctgcgagaagtaggtcgaaggaagattcccgccggagcagatcaaagagtcggagtcgcagcgagtcccggtcaaggagccgcagatcttctcgacgacattatactcgatcaaggagccggtcaagaagccacaggaggtcccgctcacggtcttactcacgtgattaccgaagacgccacagccattcccactctccgatgtcaacaaggcgccgccatgtggggaatagggcgaaccccgacccaaattgctgccttggagtctttggcctgagcctgtacactactgagcgcgatctgagagaggtttttagcaaatacgggcccatcgctgatgtgtcaatagtgtacgaccagcaatcacgaaggagccggggttttgctttcgtttacttcgagaacgtggacgatgctaaggaggccaaagaaagagctaacggcatggaactggacggacgccgtataagagttgacttcagcatcactaaaaggccccatactcctactccagggatatacatggggcggccgacatacgggagttcaaggagacgcgattattacgaccgcggctacgatcggggctatgacgatcgtgattactattcacggtcgtataggggaggcggaggagggggcggcggttggcgtgcagctcaggaccgagatcaaatctatcggcggcgctccccaagcccttactacagtaggggtggctataggtctagaagcaggtcaagatcatatagtcctaggaggtactag

SEQ ID NO: 86767 - DNA, 567 bp, Artificial Sequence
  derived and/or modified sequence
atgagcaccaggagaagacatgtgggcaacagagccaacccagaccccaactgctgcctgggcgtgtttggcctgagcctgtacaccacagagcgggacctgcgggaggtgttcagcaaatatggccccatcgcagatgtgtccatcgtgtatgaccagcagagccgccgcagccggggctttgcctttgtgtactttgaaaatgtggatgatgccaaggaggccaaggagcgggccaacggcatggagctggatggaagacgcatccgggtggacttcagcatcaccaagaggccccacacccccaccccaggcatctacatgggccggcccacctacggcagcagcagaagaagagactactatgaccggggctatgaccggggctatgatgaccgggactactacagccgcagctaccggggcggcggcggcggcggcggcggctggagggctgcccaggaccgggaccagatctacagaagaagaagccccagcccctactacagccggggcggctaccgcagccgcagccgcagccgcagctacagcccccggcgctactag

SEQ ID NO: 86768 - DNA, 867 bp, Artificial Sequence
  derived and/or modified sequence
atgtctgacagcggggagcagaactatggagagcgggagagccgcagcgccagccgcagcggcagcgcccacggcagcggcaagagcgcccggcacaccccagcccggagccgcagcaaagaagacagccgccgcagccgcagcaagagccgcagccgctctgagagccgcagccgcagcagaagaagcagcagaagacactacaccaggagccgcagccgcagccgcagccacagaagaagccgcagccgcagctacagccgggactacagaagaagacacagccacagccacagccccatgagcaccaggagaagacatgtgggcaacagagccaacccagaccccaactgctgcctgggcgtgtttggcctgagcctgtacaccacagagcgggacctgcgggaggtgttcagcaaatatggccccatcgcagatgtgtccatcgtgtatgaccagcagagccgccgcagccggggctttgcctttgtgtactttgaaaatgtggatgatgccaaggaggccaaggagcgggccaacggcatggagctggatggaagacgcatccgggtggacttcagcatcaccaagaggccccacacccccaccccaggcatctacatgggccggcccacctacggcagcagcagaagaagagactactatgaccggggctatgaccggggctatgatgaccgggactactacagccgcagctaccggggcggcggcggcggcggcggcggctggagggctgcccaggaccgggaccagatctacagaagaagaagccccagcccctactacagccggggcggctaccgcagccgcagccgcagccgcagctacagcccccggcgctactag

SEQ ID NO: 86769 - DNA, 567 bp, Artificial Sequence
  derived and/or modified sequence
atgagcacccggcggcggcacgtgggcaaccgggccaaccccgaccctaactgttgcttgggggtgtttggactctctttgtacacgacagaaagagacctgagggaagtgtttagtaaatacgggcccatcgctgacgtgtctattgtatacgaccagcaatcccgtagatcccgaggctttgcgtttgtctattttgaaaatgtggacgatgctaaagaggcaaaagagcgggctaatggcatggaactggacggacgacgaattagggtagattttagtatcaccaagaggccccacacaccaacacccggaatctacatggggcgtcctacctatgggtcctctcgtcggagggattattacgaccgggggtatgatcggggatacgacgaccgcgattactatagtcgctcctatcgcggcggtggaggcggaggcggaggctggcgcgcggcacaggaccgggatcagatctatcggagaagaagcccttccccatactattcaagaggtggctacagaagccggtcgagatcccggtcttacagccctcggcggtactag

SEQ ID NO: 86770 - DNA, 867 bp, Artificial Sequence
  derived and/or modified sequence
atgagcgacagcggcgagcagaactacggcgagcgggagagccggtccgctagtaggtcaggctctgcacacggctccggaaaatcggcccgccacactccagcgagaagccgctcgaaggaagattcccgtaggtcccgctccaagtctcgcagccgctctgagtctcgctctcgtagtcggaggtccagccgtcgtcattataccagaagcagatcacggagcaggagccacagaagatccaggtcccgttcctattcacgtgattaccgccgcaggcactcgcatagccacagtcctatgtcaaccaggcgcagacatgtggggaatagagccaatccagaccccaactgctgccttggcgtgtttggtctatcactctacactaccgaaagagatcttcgggaagtattttccaaatatgggcctattgccgatgtgtccattgtgtatgatcagcagtcgcgacggtccagaggattcgcttttgtctacttcgagaacgtggatgacgcaaaagaggctaaagagagagctaacgggatggaactagatgggaggcgaattcgcgtcgattttagcatcactaagagaccacatactcctacacccggcatctatatgggcaggcctacttacggctcaagtaggagaagggactactatgacaggggatatgatcgaggctacgacgaccgggattattactccaggtcctatcgaggagggggaggtggtggaggcggctggcgggccgcacaggacagggatcaaatctataggaggaggtctccctctccatactattccagaggagggtaccggagccggtcccgctcaagaagctactcaccacgcagatattag

SEQ ID NO: 86771 - DNA, 567 bp, Artificial Sequence
  derived and/or modified sequence
atgagtaccagacgccgtcatgtgggcaaccgggctaaccctgatccgaattgttgtcttggagtcttcggcctgtccctctacacgactgagagggacctgcgggaggtattttcaaaatatggacctattgccgacgtgagcatcgtttatgatcagcagtctcggaggagtcggggtttcgcctttgtttattttgagaatgtcgacgatgcaaaggaggctaaagagagggctaatggtatggagctcgacggtcgcagaatccgagtggacttttctattaccaagaggccacacacgcccacccccggtatctacatgggacggcctacttacggctcttcacggcgacgtgactactatgaccggggatatgatcgaggatacgatgaccgtgactactatagccggtcctatagggggggaggaggcggagggggtgggtggagagccgcacaggatcgggatcagatctaccgtcggagaagcccctcgccatactactctaggggaggctaccgcagccggagtcgatctcgcagttactcaccgaggcgatattag

SEQ ID NO: 86772 - DNA, 867 bp, Artificial Sequence
  derived and/or modified sequence
atgagtgacagcggtgagcagaattatggggagagagaatccagatctgccagtcgctctgggagcgcccatggaagcggtaaaagcgccagacatacaccggctcggtctcgcagcaaggaggatagcagaaggtccagatctaagagtagatcgcggagcgagtctcgcagccgttccaggcgaagctcccgcaggcattatacgcgaagtagaagccgatcccgatctcatcgccgtagcaggtcaagatcttactcccgggactacagacggagacattctcacagtcactctccaatgagtactcggagaaggcatgtcggcaacagagccaacccagaccccaattgttgtctgggggtgttcggattatctctgtacactacagaacgtgacctgagggaagtgttttctaagtacggccctattgccgacgtctctattgtatatgatcagcagtctaggagaagccggggattcgcctttgtgtatttcgaaaatgtggacgatgcaaaggaagccaaagaaagggcaaacggcatggaactggatggccgtcggatacgcgtcgatttttccataaccaagcgcccacatacaccaacgccaggaatctacatgggtcgaccgacctatggctcatcccgacgcagagactactacgacagagggtacgacagaggctacgatgaccgtgattattattctagatcctaccgcggtgggggtggtggtggcggtgggtggagagctgcacaggatagggaccagatctaccgcaggcgctcacccagtccgtactattccaggggagggtaccgatccaggagccgctccaggagctattctcctaggaggtattag

SEQ ID NO: 86773 - DNA, 976 bp, Artificial Sequence
  derived and/or modified sequence
agagcgaggaggggcgaggccaagaaagcgcgcgtttctgggaggggaggagcctggctaaggagcgccgcgtcacatccggtagagttagagcccgtgcggaggcggtgcggagcatttcggctctgagcggctgggcgaccggcgcgtcgtgcggggctgcggcggagcctccttaaggaaggtgcaagaggttggcagcttcgattgaagcacatcgaccggcgacagcagccaggagtcatgagcgacagcggcgagcagaactacggcgagcgggtctagatccagaagaagctcccgaaggcattatacccggtcacggtctcgctcccgctcccatagacgatcacgtagcaggtcttacagtcgagattatcgtagacggcacagccacagccattctcccatgtctactcgcaggcgtcatgttgggaatcgggcaaatcctgatcctaactgttgtcttggagtatttgggctgagcttgtacaccacagaaagagatctaagagaagtgttctctaaatatggtcccattgccgatgtgtctattgtatatgaccagcagtctaggcgttcaagaggatttgcctttgtatattttgaaaatgtagatgatgccaaggaagctaaagaacgtgccaatggaatggagcttgatgggcgtaggatcagagttgatttctctataacaaaaagaccacatacgccaacaccaggaatttacatggggagacctacctatggcagctctcgccgtcgggattactatgacagaggatatgatcggggctatgatgatcgggactactatagcagatcatacagaggaggaggtggaggaggaggaggatggagagctgcccaagacagggatcagatttatagaaggcggtcaccttctccttactatagtcgtggaggatacagatcacgttccagatctcgatcatactcacctcgtcgctattaa

SEQ ID NO: 86774 - DNA, 2952 bp, Artificial Sequence
  derived and/or modified sequence
gtgcgggacgcgctgcagctggagaggaaaggcagagcgaggaggggcgaggccaagaaagcgcgcgtttctgggaggggaggagcctggctaaggagcgccgcgtcacatccggtagagttagagcccgtgcggaggcggtgcggagcatttcggctctgagcggctgggcgaccggcgcgtcgtgcggggctgcggcggagcctccttaaggaaggtgcaagaggttggcagcttcgattgaagcacatcgaccggcgacagcagccaggagtcatgagcgacagcggcgagcagaactacggcgagcgggaatcccgttctgcttccagaagtggaagtgctcacggatcggggaaatctgcaaggcatacccctgcaaggtctcgctccaaggaagattccaggcgttccagatcaaagtccaggtcccgatctgaatctaggtctagatccagaagaagctcccgaaggcattatacccggtcacggtctcgctcccgctcccatagacgatcacgtagcaggtcttacagtcgagattatcgtagacggcacagccacagccattctcccatgtctactcgcaggcgtcatgttgggaatcgggcaaatcctgatcctaactgttgtcttggagtatttgggctgagcttgtacaccacagaaagagatctaagagaagtgttctctaaatatggtcccattgccgatgtgtctattgtatatgaccagcagtctaggcgttcaagaggatttgcctttgtatattttgaaaatgtagatgatgccaaggaagctaaagaacgtgccaatggaatggagcttgatgggcgtaggatcagagttgatttctctataacaaaaagaccacatacgccaacaccaggaatttacatggggagacctacctatggcagctctcgccgtcgggattactatgacagaggatatgatcggggctatgatgatcgggactactatagcagatcatacagaggaggaggtggaggaggaggaggatggagagctgcccaagacagggatcagatttatagaaggcggtcaccttctccttactatagtcgtggaggatacagatcacgttccagatctcgatcatactcacctcgtcgctattaaagcatgaagactttctgaaacctgccctagagctgggatattgtttgtgggcaatattttttattgtctcttgtttaaaaagtgaacagtgcctagtgaagttaggtgacttttacaccttttacgatgactacttttggtggagttgaaatgctgttttcattctgcatttgtgtagtttggtgctttgttccaagttaagtgttttcagaaaagtatgttttgcatgtatttttttacagtctaaattttgactgctgagaagtttctattgtacaaaacttcatttaaaaggtttttctactgaatccagggtattctgaagatcgaagcctgtgtaaaatgctaccaaatggcaaaaagcaacaataaacagtttgatttttacttttctttctaacatatcaatgcttagcagaactattcagattgtcagtagtaaatttaaagacaaatgcccgttttcctccagtccatgaaacataccatacttatatacctgcaactaagtgtttaaaattatgctctgtaactctgtactgctagtattagaactaaaaatcttaaaatacagccagtgcttaatgcttatatcaatgtggatttgtcggcttttatgtaatctgtaatatgtatagcaggaaatacgaagagttacacagtgtatgccttaaaaggctgtttcttaaaggtgttacaaggggataatggtatttcaactagttatcagcaagtgacaatacattccaccacaaatacactcttgttcttctagcttttagactatatgaaaaaaccgggtgcttcaaagtacatgataagggaacactatacctgtcatggatgaactgaagactttgcctgttcattttttaaatattattttcaggtcctttgcttaccaaaggaggcccaatttcactcaaatgttttgagaactgtgtttaaataaacgcaaatgaaaagaaaaatgttggtgcagctgttcacaaagaagtgttcttgttctattataattagagttcttctgtagtttaatcgttagggcagtgtgttccttgggctgaggtgtatctttgctattttgggctgggttgagggggggatgaatttctgtattcctggaaaattcagagtgcataactaggtattagagtgatctccatttggggatggagttacagtaaataactagactgcgggtactttaatacatgttcttattattttgcatttaagtaattttcatgaccaattgtagggatgttgctacaggtgggttattttgttgccttgctaacctttatcgcatctaggtattagtatgtttcaggtactttgggaagaactttacatataatctttagcaatgaaatgatgtagagtaacttaccttagttcaaatagctgtttaagtggcaatgccacgatctgaattgaacctaggtgatcttagtccacagttctcttgatcatgatgtctcaaatctgggtacctgggtgatggaaaataccagtaatggagcataggcagtattggcaggtcttaatttgtaaaacttactgtccagggtgttttcagtgtttgccaacttgtggtaaattaatatgcttagagaactacccttaggtttgtttctgataagcatgtggaaacaacttagtatatgcctgatgggttatttcaaattgttctcaatgagttttgaaacaagaatttgtagtatttatatataaagttgagttttagggtgtggtcccagagggggttgtgttatggatggatacattaaaggctgagaaacctgg

SEQ ID NO: 86775 - protein, 163 aa, Artificial Sequence
  derived and/or modified sequence
MDSAGQGVAARTPAVEGLTEAEEEELRAELTKVEEEIVTLRQVLAAKERHCGELKRRLGLSTLGELKQNLSRSWHDVQVSSAYKKTQETLSQAGQKTSAALSTVGSAISRKLGDMRNSATFKSFEDRVGTIKSKVVGDRENGSDNLPSSAGSGDKPLSDPAPF

SEQ ID NO: 86776 - DNA, 492 bp, Artificial Sequence
  derived and/or modified sequence
atggacagcgccggccagggcgtggccgccagaacccccgccgtggagggcctgaccgaggccgaggaggaggagctgagagccgagctgaccaaggtggaggaggagatcgtgaccctgagacaggtgctggccgccaaggagagacactgcggcgagctgaagagaagactgggcctgagcaccctgggcgagctgaagcagaacctgagcagaagctggcacgacgtgcaggtgagcagcgcctacaagaagacccaggagaccctgagccaggccggccagaagaccagcgccgccctgagcaccgtgggcagcgccatcagcagaaagctgggcgacatgagaaacagcgccaccttcaagagcttcgaggacagagtgggcaccatcaagagcaaggtggtgggcgacagagagaacggcagcgacaacctgcccagcagcgccggcagcggcgacaagcccctgagcgaccccgcccccttctag

SEQ ID NO: 86777 - DNA, 492 bp, Artificial Sequence
  derived and/or modified sequence
atggactcagccggacagggagtagcggcccgtacaccggccgtggaaggactgaccgaggccgaggaggaagagctgagggcagagttgactaaggtcgaagaggaaatagtgacgctgcggcaggttctggccgccaaagaacggcattgtggtgagttgaaaaggcggctgggcctgagcacattaggcgaactgaaacagaacttatctcggtcctggcacgacgtgcaggtctctagtgcctataaaaagacacaggaaaccttatcacaggccggacagaagacctccgcagctcttagtactgtgggttccgctatttcccgaaagctgggtgatatgcggaattccgccacattcaagtcctttgaggacagggttgggaccattaagagcaaagtagtgggcgatcgggagaatggatcagacaatctgcctagctccgcaggttctggggataagcctctgtccgatccggcgccattctag

SEQ ID NO: 86778 - DNA, 492 bp, Artificial Sequence
  derived and/or modified sequence
atggattctgctggccagggcgtggccgcccggaccccagctgtggagggcctgacagaagctgaggaggaggagctgcgggcagagctgaccaaggtggaggaggagatcgtgaccctgcggcaggtgctggccgccaaggagcggcactgtggggagctgaagaggcggctgggcctgagcaccctgggggagctgaagcagaacctgagccgctcctggcatgatgtgcaggtgtcctctgcctacaagaagacccaggagaccctgagccaggccggccagaagaccagcgctgccctgagcacagtgggcagcgccatcagcaggaagctgggggacatgaggaacagcgccaccttcaagagctttgaagatagagtgggcaccatcaagagcaaggtggtgggggaccgggagaatggaagtgacaacctgcccagcagcgctggcagcggggacaagcccctgagtgaccctgcccccttctag

SEQ ID NO: 86779 - DNA, 492 bp, Artificial Sequence
  derived and/or modified sequence
atggacagcgccggccagggcgtggccgcccggacccccgccgtggagggcctgactgaggctgaggaggaggaactgcgggccgagctgactaaagtggaggaggagattgtgaccctcaggcaggtgttggcagctaaggagagacactgcggcgagctgaagagacgactggggctgtctacactgggggagttaaagcagaatctcagccgcagctggcacgatgtgcaggtgtcctccgcctacaaaaagacacaggagaccttgtctcaggcgggtcagaagactagcgcagcgctgtctactgtggggtccgctatcagccgcaagcttggtgatatgcgcaattcagctacatttaaatcctttgaggaccgcgtcggcacaatcaaaagtaaagtcgtaggtgatagggagaacggcagcgataatttgcctagctccgcgggaagcggggataaacccttatccgatcccgctcccttttag

SEQ ID NO: 86780 - DNA, 492 bp, Artificial Sequence
  derived and/or modified sequence
atggactccgccggacagggcgtggcagcccgaacccccgctgtagaaggacttaccgaggccgaggaagaagaattacgagctgagcttaccaaggtcgaggaagaaatcgtgactctgaggcaggtgctggcagctaaagagagacattgtggcgagctgaaacgcaggctgggacttagtacactcggggagctcaagcagaacttaagcaggtcttggcacgatgtccaagttagcagtgcctacaagaagacccaggaaaccctctcacaagccggacagaagacttccgctgcactctcaaccgtgggcagcgcaatcagcaggaagttgggggacatgcggaacagtgcgacattcaagtcattcgaagaccgcgtgggcaccattaagtccaaggtcgtgggagatcgcgagaatggaagtgacaacttgcctagtagtgccggatccggcgacaaacctttatcagatccagcaccattctag

SEQ ID NO: 86781 - DNA, 1063 bp, Artificial Sequence
  derived and/or modified sequence
gattacgaaacgccgcggagctgaggcagttccgctggctagtgtgtacgcggcgagcttctcccggcgccgcccgctcggctcccatagcgcccgcgacagcggtccggacgccgcccgaacatggactccgccggccaaggtgtggctgcccggactcctgctgttgagggtctgacagaggctgaggaggaggagctcagggctgagcttaccaaggtggaagaggaaattgtcactctgcgccaggtcctggcagccaaggagaggcactgtggagagctcaagaggaggctgggcctctccaccctgggggagctgaaacagaacctgtccaggagctggcatgacgtgcaggtctctagcgcctacaagaagactcaggaaactctttcacaggcaggacagaagacttcagctgccctgtccacagtgggctctgccatcagcaggaagcttggagacatgaggaactctgcgaccttcaagtcgtttgaggaccgagttgggaccataaagtctaaggttgtgggtgacagagagaacggcagtgacaacctcccttcctcagcggggagtggtgacaagcccctgtcggatcccgcacctttctaagcctgtggttgcttcacccgctgcagagcacacgcaacccagcctcagcatcacagccgcagctctgttcagcggagcagccagccagggcggatgagcagagccggccctgaggacagtcctgcccatgaatttgaagaacacaggcttgtacacagatgttttacactcacgtttgtagatgaaacagatcactgtgctgtccttcctaggggtgcaggaagtggacagggcggagggtttgaaagaatattgagccaaagcccaggctccctttgggaatcatgttagcccatcagaatgttgaaggattgaagagttctaagcataaaataagtggcattttctgacttcttcctcctcctccttccctgactcacagaaggaatgcaatcacccagcaagtcctacctgttacgcaattttttatctcaaaatgccgaacgag

SEQ ID NO: 86782 - protein, 19 aa, Artificial Sequence
  derived and/or modified sequence
MSSVAVLTQESFAEHRSGL

SEQ ID NO: 86783 - protein, 1235 aa, Artificial Sequence
  derived and/or modified sequence
MHLAERDRWLFVATVMMHFVSIKSGFPGLCVGVRSTMSSVAVLTQESFAEHRSGLVPQQIKVATLNSEEESDPPTYKDAFPPLPEKAACLESAQEPSGAWGNKIRPIKASVITQVFHVPLEERKYKDMNQFGEGEQAKICLEIMQRTGAHLELSLAKDQGLSIMVSGKLDAVMKARKDIVARLQTQASATVAIPKEHHRFVIGKNGEKLQDLELKTATKIQIPRPDDPSNQIKITGTKEGIEKARHEVLLISAEQDKRAVERLEVEKAFHPFIAGPYNRLVGEIMQETGTRINIPPPSVNRTEIVFTGEKEQLAQAVARIKKIYEEKANSFTVSSVAAPSWLHRFIIGKKGQNLAKITQQMPKVHIEFTEGEDKITLEGPTEDVNVAQEQIEGMVKDLINRMDYVEINIDHKFHRHLIGKSGANINRIKDQYKVSVRIPPDSEKSNLIRIEGDPQGVQQAKRELLELASRMENERTKDLIIEQRFHRTIIGQKGERIREIRDKFPEVIINFPDPAQKSDIVQLRGPKNEVEKCTKYMQKMVADLVENSYSISVPIFKQFHKNIIGKGGANIKKIREESNTKIDLPAENSNSETIIITGKRANCEAARSRILSIQKDLANIAEVEVSIPAKLHNSLIGTKGRLIRSIMEECGGVHIHFPVEGSGSDTVVIRGPSSDVEKAKKQLLHLAEEKQTKSFTVDIRAKPEYHKFLIGKGGGKIRKVRDSTGARVIFPAAEDKDQDLITIIGKEDAVREAQKELEALIQNLDNVVEDSMLVDPKHHRHFVIRRGQVLREIAEEYGGVMVSFPRSGTQSDKVTLKGAKDCVEAAKKRIQEIIEDLEAQVTLECAIPQKFHRSVMGPKGSRIQQITRDFSVQIKFPDREENAVHSTEPVVQENGDEAGEGREAKDCDPGSPRRCDIIIISGRKEKCEAAKEALEALVPVTIEVEVPFDLHRYVIGQKGSGIRKMMDEFEVNIHVPAPELQSDIIAITGLAANLDRAKAGLLERVKELQAEQEDRALRSFKLSVTVDPKYHPKIIGRKGAVITQIRLEHDVNIQFPDKDDGNQPQDQITITGYEKNTEAARDAILRIVGELEQMVSEDVPLDHRVHARIIGARGKAIRKIMDEFKVDIRFPQSGAPDPNCVTVTGLPENVEEAIDHILNLEEEYLADVVDSEALQVYMKPPAHEEAKAPSRGFVVRDAPWTASSSEKAPDMSSSEEFPSFGAQVAPKTLPWGPKR

SEQ ID NO: 86784 - DNA, 165 bp, Artificial Sequence
  derived and/or modified sequence
atgagttctgtcgcggtgctcactcaggagtcttttgccgagcataggtcaggactggtgcctcagcagattaaggtggcaaccctgaacagcgaggaagagagtgaccctcctacttataaggatgcattcccgccgcttcccgagaaggcggcgtgcttgtag

SEQ ID NO: 86785 - DNA, 675 bp, Artificial Sequence
  derived and/or modified sequence
atgagcagtgtggctgtactgacgcaggagagcttcgccgaacaccgcagcggtcttgttccccagcagatcaaggtggctaccctcaatagcgaggaggaatcagacccccctacgtacaaggacgcattccctcccctgcctgagaaggccgcctgcctggaaagcgcccaggagccaagcggagcctggggcaacaagatcaggcctattaaggctagcgtcatcacacaagtatttcatgtcccactggaagaacggaaatacaaagatatgaaccagttcggagagggggaacaggctaagatttgtctggagatcatgcagcgaactggagcccatctcgaactgagcctggcaaaagatcagggactctctatcatggtgtccggaaagctggatgctgttatgaaagccagaaaagacatcgttgctagattacaaacacaagcgtccgcgactgtagcaatcccgaaagaacaccaccgatttgtaatcgggaagaacggagaaaaattgcaggacctagaattgaagactgctaccaagatacagatccctcgcccggatgacccatcaaatcagatcaagataactggcaccaaagaaggcatcgagaaagcgcgccacgaggtccttctcattagtgcagagcaagacaaacgcgccgtttag

SEQ ID NO: 86786 - DNA, 3708 bp, Artificial Sequence
  derived and/or modified sequence
atgcacttagctgagagggatcggtggttgttcgtggctacagtgatgatgcacttcgtgagcatcaagagcggttttccagggctctgcgtgggcgttcgcagcacaatgagttccgtggcagtgttgacccaggagtcctttgccgaacataggtccggtctagttccccagcagattaaagttgcaacgctgaattccgaagaagagtcagatccccccacatacaaggacgccttcccaccattgcccgagaaggcagcatgcctggagtcagctcaggaaccatcaggagcatggggtaacaagatccgtcctattaaagcctctgtgatcacgcaagtatttcatgtgccgctcgaagagaggaagtacaaggacatgaaccagtttggggagggcgagcaggccaagatctgtctggaaattatgcagagaacaggagcgcatctggaattgagtctggccaaggatcaggggctctccattatggtgagtggcaaactcgacgccgtcatgaaggcacggaaggacattgttgctcgccttcaaacccaggcctccgccacggtggcgatccctaaggagcaccaccgcttcgtgattggcaagaatggagaaaagcttcaggacttggaacttaagacggctacgaagattcagatcccaaggcctgacgacccatccaatcaaatcaagatcaccggaacaaaggagggcatcgagaaagctcgtcatgaggtactattgatcagcgcggagcaggacaagcgcgccgtagagagactcgaggtggaaaaggctttccatcccttcattgcgggaccctataaccgtttggtcggtgagattatgcaggaaactgggacgcggatcaacattccccctccatccgtgaaccgcaccgagattgtgtttaccggagagaaggagcaactggctcaggccgttgcacgtattaagaaaatatacgaagagaaggccaattcgttcacagtatccagcgtcgcagctccctcttggctccacaggttcattattgggaaaaaaggccagaacctcgcgaagatcacacagcagatgccgaaggtgcacatcgaatttactgaaggcgaggacaaaattacgctggagggtccaactgaggatgttaacgtagcccaagaacagattgaagggatggtgaaggatctgattaatagaatggattatgtcgagatcaatattgaccacaagttccaccggcacctgataggcaaaagcggggcaaatataaataggattaaagaccagtataaggttagcgttagaatccccccagactccgaaaagtccaacttaataagaatcgaaggggacccccagggagtgcaacaggctaagcgcgaactgctagagctggcctcccggatggagaatgaaaggaccaaagacctaatcattgagcagaggttccaccgaacgatcattggacagaaaggagagcgtatcagggaaatacgagataaattccccgaggtgattataaattttccggaccccgcacagaagagtgatattgtgcagctgaggggcccgaagaacgaagtcgagaaatgtacgaaatacatgcaaaagatggtggctgatttggtggaaaactcgtattccatcagcgtgcctatcttcaagcagttccataaaaatatcattgggaaggggggagccaatattaagaagattcgcgaggaaagtaacacaaagattgacttaccagccgaaaactctaattcagagaccatcattattaccggcaaaagggccaattgtgaagccgcccgcagcagaatactctccatccagaaggacctagctaatatcgcagaggtagaagtaagtattccagcaaaactccacaattcgctgatcggaactaaggggcgcctgattagatccattatggaggagtgtggtggagtgcacattcattttcctgtcgagggatctggaagcgatacagtggtgatccggggtccctcttcagacgttgagaaggctaaaaagcagctccttcacttagctgaggagaagcagacaaaatccttcactgttgacatccgggcaaagccagaatatcataagttcctcatcggcaaaggcggaggaaaaataagaaaggtgcgtgacagcactggcgccagggtgatctttcctgccgctgaggacaaagaccaggacctgattaccatcatcggtaaggaggacgcagtccgggaggcccagaaagaattggaagccctaatacagaacctcgacaatgttgtcgaggattccatgctggtagacccgaagcaccatcgccattttgtcattcgtcggggacaagtgttgagggagatcgccgaggagtatggcggagtgatggttagtttcccccgcagcggcactcagagcgataaggtcacactgaaaggggctaaggattgcgtggaagccgctaagaaaagaatacaggaaataattgaagatttggaggctcaagtgaccctggagtgcgcaattccccaaaagtttcataggtccgtgatgggccccaagggtagtaggatacagcagattactcgggacttctccgtccagatcaagttccctgaccgggaagagaatgcggtgcactctactgagccggttgtccaggagaacggcgatgaggcaggcgagggccgcgaagccaaagattgcgaccctggcagccctcgacggtgtgacataattataataagcggcaggaaggagaaatgtgaggctgcaaaggaggctctcgaggcacttgtacccgtgaccattgaggtggaggtgcccttcgatctgcacagatacgtgattggccagaagggcagcgggataagaaaaatgatggatgagttcgaggtgaatattcacgtccctgcgccggagctacagtccgatatcatcgccatcactggactggcagccaacctggatagagcaaaggccgggctgctcgaacgagtgaaagagttgcaagcagagcaggaggaccgggctctccggtcatttaaactttccgtgaccgtcgacccaaaataccatcctaaaataataggccggaaaggcgctgtgatcacccagattaggctcgagcatgatgtcaatatccagtttcccgataaggatgatggaaaccagcctcaggatcaaattactattaccggctacgaaaagaacacggaagcggcaagagatgcgattcttaggatagtgggggagctggagcagatggtgagcgaggacgtcccactggaccacagagtgcacgcccgcatcatcggtgccaggggaaaagctattcgtaagatcatggatgaatttaaggtggatattaggttcccccaatctggcgcgccagatcccaattgtgtgacagtgaccggtctgcctgagaatgtggaagaagccattgaccacattctcaatctcgaggaagagtacctcgctgatgtagtcgactcagaggcacttcaggtctacatgaaacccccagcacacgaggaggccaaggccccatcacgtggattcgtagtgcgggatgccccctggactgcgagtagcagtgagaaggcgcccgatatgagtagttcagaggagttcccttcttttggcgcccaggtggcccccaagacactgccttggggaccaaagcgctag

SEQ ID NO: 86787 - DNA, 666 bp, Artificial Sequence
  derived and/or modified sequence
atgagtagtgtagctgtgctgactcaggagagctttgctgaacacagaagcggattggtgcctcaacagatcaaagtcgcaactctaaattccgaggaagagtccgacccccctacctataaggatgcattcccgccactcccagaaaaggctgcttgcctggagtccgcccaggagcctagcggcgcttgggggaacaaaattagaccgatcaaagccagcgtgatcactcaggtttttcatgttcctcttgaggagcgcaagtacaaagatatgaaccagttcggggaaggggagcaagccaaaatatgcttggagattatgcagcggacaggagctcatttggaattaagtctcgctaaagaccagggcctctccattatggttagtggcaaactcgacgcggtcatgaaagcacgcaaggatatcgtcgcccggctgcaaactcaggctagcgccactgtggccattcccaaagagcaccacaggtttgtcatcgggaagaacggcgagaagctgcaggatctggagctgaaaactgcaacaaagatccagatccctcgacctgatgatccaagtaaccagatcaaaatcacaggaactaaagagggcattgagaaggcccgccacgaagtcctcttgatcagtgcagaacaagacaaatag

SEQ ID NO: 86788 - DNA, 426 bp, Artificial Sequence
  derived and/or modified sequence
atgtcttcggtcgctgtcctgacacaggagtcatttgcagaacacagaagcggactggtgccccaacagattaaagtcgctacacttaactctgaagaagaatctgatcctcccacctacaaagacgcatttcctcccctgccagaaaaggctgcttgcctggagtctgctcaggaacccagtggggcgtggggcaacaaaattaggcccattaaggcttctgtgatcacacaggttttccacgtgcccttggaggagcgcaaatacaaggacatgaatcagtttggcgaaggggaacaggccaagatatgtctggaaatcatgcaaaggacaggtgcccatcttgagctgtccctggcaaaagaccagggcctctcgattatggtgtctggtaaattggatgcggttatgaaggcaaggaagtag

SEQ ID NO: 86789 - DNA, 381 bp, Artificial Sequence
  derived and/or modified sequence
atgagttctgtggctgtcctcacacaggaatccttcgcagagcaccgatctggactggttcctcagcagattaaagtcgctacgctgaactcagaagaggaaagcgaccctcctacatataaggatgcattccccccgcttccagaaaaagccgcgtgcttagagtcagctcaagaaccctcgggcgcctggggcaataagatccgaccaatcaaggcaagtgtcatcacacaggtgttccacgtgcccctcgaggagagaaagtacaaagacatgaatcagtttggcgagggagagcaggcaaaaatctgtctggaaatcatgcagcgaaccggagcccacctcgaactgagcctggccaaggatcagggcctgagctag

SEQ ID NO: 86790 - DNA, 444 bp, Artificial Sequence
  derived and/or modified sequence
atgtcatcggtggccgtgttgacgcaagaaagctttgccgaacacaggtccgggctggtccctcagcaaatcaaagtggccaccctgaatagtgaggaggagtctgatccccctacctataaagatgcgttccctccactccccgagaaggccgcgtgtttagaatccgcccaggagccttcaggggcatggggaaacaaaatccggcccattaaggcctcagtcattacgcaggtgttccacgtgcccctggaggaacgaaaatacaaggacatgaaccagtttggggagggggagcaagccaaaatatgcctcgagatcatgcaaagaactggcgcacatctggaattgtccctcgctaaggatcaaggactgtcgatcatggtgtccgggaagctggatgccgttatgaaagctcggaaggatatcgtcgctaggctgtag

SEQ ID NO: 86791 - DNA, 495 bp, Artificial Sequence
  derived and/or modified sequence
atgagctcagttgcagtgttaactcaggagtcctttgccgaacatcgctcaggtctagtgcctcagcaaattaaggtggccactctgaactctgaggaggagtccgatcctcccacgtacaaagatgcatttccccccctgccggagaaagccgcttgcctcgagtctgcccaggaaccgagcggggcctggggaaataagattcgccctataaaagcgtctgtgatcacgcaggttttccatgtccctctggaggagcgcaagtacaaagatatgaaccagtttggagaaggagagcaggccaaaatatgtctcgaaatcatgcagcggactggagctcacctcgaactttctctggctaaggatcagggcctgagcatcatggtgtcagggaagctggacgcagttatgaaggcaagaaaagatatcgttgccaggctgcagacacaggcgtctgcaactgtagcaatcccaaaagagcaccatcggttttag

SEQ ID NO: 86792 - DNA, 581 bp, Artificial Sequence
  derived and/or modified sequence
aagcgtagcctcttctcctttaccaagatggcggcttgtccctgtttcgccacagttcctaccttatgagctcggttttcttatgcttataagagtggaacagcaaaagctggcaggctgacagaggcggcctcaggacggaccttctggctactgaccgttttgctgctaccacttataaccacctggttaagtcgagatttggaggtggtttagtttggggcctggatgcaccttgcagagagagaccgctggctttttgtagcaactgtcatgatgcattttgtaagcattaagagtggttttcccggattgtgtgtaggtgtgagatcaaccatgagttccgttgcagttttgacccaagagagttttgctgaacaccgaagtgggctggttccgcaacaaatcaaagttgccactctaaattcagaagaggagagcgaccctccaacctacaaggatgccttccctccacttcctgagaaagctgcttgcctggaaagtgcccaggaaccctctggagcctgggggaacaagatccgacccatcaaggcttctgtcatcactcaggtgttccatgt

SEQ ID NO: 86793 - DNA, 525 bp, Artificial Sequence
  derived and/or modified sequence
atatagaggctgggggtggggggggaggtcaagcgtagcctcttctcctttaccaagatggcggcttgtccctgtttcgccacagttcctaccttatgagctcggttttcttatgcttataagagtggaacagacacatgcctcactcctgtcagcagttccaccttttcatggttgaggagcacatgtggtcgccagcctcccatctccagagtcccctaaggcaagatccccagtggattagaaaggactgaaggacttttacaggctaacagcaagaagaacaaagtaactgcaaaatagacggagaattcttgaagacggtagctcttggtcaccataagcgctgcagagaccccgaggtccacattctgttgtagcaaaagctggcaggctgacagaggcggcctcaggacggaccttctggctactgaccgttttgctgtggttttcccggattgtgtgtaggtgtgagatcaaccatgagttccgttgcagttttgacccaagagagttttgctgaac

SEQ ID NO: 86794 - DNA, 559 bp, Artificial Sequence
  derived and/or modified sequence
atatagaggctgggggtggggggggaggtcaagcgtagcctcttctcctttaccaagatggcggcttgtccctgtttcgccacagttcctaccttatgagctcggttttcttatgcttataagagtggaacagcaaaagctggcaggctgacagaggcggcctcaggacggaccttctggctactgaccgttttgctgctaccacttataaccacctggttaagtcgagatttggaggtggtttagtttggggcctggatgcaccttgcagagagagaccgctggctttttgtagcaactgtcatgatgcatttttggttttcccggattgtgtgtaggtgtgagatcaaccatgagttccgttgcagttttgacccaagagagttttgctgaacaccgaagtgggctggttccgcaacaaatcaaagttgccactctaaattcagaagaggagagcgaccctccaacctacaaggatgccttccctccacttcctgagaaagctgcttgcctggaaagtgcccaggaaccctctggagcctgggggaacaagatccga

SEQ ID NO: 86795 - DNA, 578 bp, Artificial Sequence
  derived and/or modified sequence
tcggagcgtcccggcttctcccgcgcggggggcgagtaagccagcggcaggaccagcgggcgggggcccacgaacacatgcctcactcctgtcagcagttccaccttttcatggttgaggagcacatgtggtcgccagcctcccatctccagagtcccctaagatccccagtggattagaaaggactgaaggacttttacaggctaacagcaagaagaacaaagtaactgcaaaatagacggagaattcttgaagacggtagctcttggtcaccataagcgctgcagagaccccgaggtccacattctgttgtagcaaaagctggcaggctgacagaggcggcctcaggacggaccttctggctactgaccgttttgctgtggttttcccggattgtgtgtaggtgtgagatcaaccatgagttccgttgcagttttgacccaagagagttttgctgaacaccgaagtgggctggttccgcaacaaatcaaagttgccactctaaattcagaagaggagagcgaccctccaacctacaaggatgccttccctccacttcctgagaaagctgcttgcct

SEQ ID NO: 86796 - DNA, 929 bp, Artificial Sequence
  derived and/or modified sequence
agaaacttgcctgagtattggtgttagtaaccaaagcataaatatcttgaccttttctgattttgaggtaaaaagatctgagttgtaaaatgtagataagtaacttttctctggtttcctctctctcctctcccacttcccatcccataccagcaaaagctggcaggctgacagaggcggcctcaggacggaccttctggctactgaccgttttgctgtggttttcccggattgtgtgtaggtgtgagatcaaccatgagttccgttgcagttttgacccaagagagttttgctgaacaccgaagtgggctggttccgcaacaaatcaaagttgccactctaaattcagaagaggagagcgaccctccaacctacaaggatgccttccctccacttcctgagaaagctgcttgcctggaaagtgcccaggaaccctctggagcctgggggaacaagatccgacccatcaaggcttctgtcatcactcaggtgttccatgtacccctggaggagagaaaatacaaggatatgaaccagtttggagaaggtgaacaagcaaaaatctgccttgagatcatgcagagaactggtgctcacttggagctgtctttggccaaagaccaaggcctctccatcatggtgtcaggaaagctggatgctgtcatgaaagctcggaaggacattgttgctagactgcagactcaggcctcagcaactgttgccattcccaaagaacaccatcgctttgttattggcaaaaatggagagaaactgcaagacttggagctaaaaactgcaaccaaaatccagatcccacgcccagatgaccccagcaatcagatcaagatcactggcaccaaagagggcatcgagaaagctcgccatgaagtcttactcatctctgccgagcaggacaaacgtgctgtgga

SEQ ID NO: 86797 - DNA, 544 bp, Artificial Sequence
  derived and/or modified sequence
aagcgtagcctcttctcctttaccaagatggcggcttgtccctgtttcgccacagttcctaccttatgagctcggttttcttatgcttataagagtggaacagacacatgcctcactcctgtcagcagttccaccttttcatggttgaggagcacatgtggtcgccagcctcccatctccagagtcccctaaggcaagcaaaagctggcaggctgacagaggcggcctcaggacggaccttctggctactgaccgttttgctgtggttttcccggattgtgtgtaggtgtgagatcaaccatgagttccgttgcagttttgacccaagagagttttgctgaacaccgaagtgggctggttccgcaacaaatcaaagttgccactctaaattcagaagaggagagcgaccctccaacctacaaggatgccttccctccacttcctgagaaagctgcttgcctggaaagtgcccaggaaccctctggagcctgggggaacaagatccgacccatcaaggcttctgtcatcactcaggtgttccatg

SEQ ID NO: 86798 - DNA, 530 bp, Artificial Sequence
  derived and/or modified sequence
gattcaaaaagtatttgagaacctactaggtgctagacaccaaccgaggcaatgagtatgggtgacaacatgtgccctgccctcacagcaccaatagtccactggacaaataccatctggaacatcaggtaaacacctaagcctgtctggaggaaatctaatttgggcggaatcccacaagcacagactagcaaaagctggcaggctgacagaggcggcctcaggacggaccttctggctactgaccgttttgctgtggttttcccggattgtgtgtaggtgtgagatcaaccatgagttccgttgcagttttgacccaagagagttttgctgaacaccgaagtgggctggttccgcaacaaatcaaagttgccactctaaattcagaagaggagagcgaccctccaacctacaaggatgccttccctccacttcctgagaaagctgcttgcctggaaagtgcccaggaaccctctggagcctgggggaacaagatccgacccatcaaggcttctgtcatcactcaggtg

SEQ ID NO: 86799 - DNA, 594 bp, Artificial Sequence
  derived and/or modified sequence
ggagcgtcccggcttctcccgcgcggggggcgagtaagccagcggcaggaccagcgggcgggggcccacgacaaaagctggcaggctgacagaggcggcctcaggacggaccttctggctactgaccgttttgctgctaccacttataaccacctggttaagtcgagatttggaggtggtttagtttggggcctggatgcaccttgcagagagagaccgctggctttttgtagcaactgtcatgatgcattttgtaagcattaagagtggttttcccggattgtgtgtaggtgtgagatcaaccatgagttccgttgcagttttgacccaagagagttttgctgaacaccgaagtgggctggttccgcaacaaatcaaagttgccactctaaattcagaagaggagagcgaccctccaacctacaaggatgccttccctccacttcctgagaaagctgcttgcctggaaagtgcccaggaaccctctggagcctgggggaacaagatccgacccatcaaggcttctgtcatcactcaggtgttccatgtacccctggaggagagaaaatacaaggatatgaaccagtttggaga

SEQ ID NO: 86800 - DNA, 459 bp, Artificial Sequence
  derived and/or modified sequence
cgcgcggggggcgagtaagccagcggcaggaccagcgggcgggggcccacgaacacatgcctcactcctgtcagcagttccaccttttcatggttgaggagcacatgtggtcgccagcctcccatctccagagtcccctaaggcaagatccccagtggattagaaaggactgaaggacttttacaggctaacagcaagaagaacaaagtaactgcaaaatagacggagaattcttgaagacggtagctcttggtcaccataagcgctgcagagaccccgaggtccacattctgttgtagcaaaagctggcaggctgacagaggcggcctcaggacggaccttctggctactgaccgttttgctgtggttttcccggattgtgtgtaggtgtgagatcaaccatgagttccgttgcagttttgacccaagagagttttgctgaacaccgaagtgggctgg

SEQ ID NO: 86801 - DNA, 4283 bp, Artificial Sequence
  derived and/or modified sequence
ggagcgtcccggcttctcccgcgcggggggcgagtaagccagcggcaggaccagcgggcgggggcccacgacaaaagctggcaggctgacagaggcggcctcaggacggaccttctggctactgaccgttttgctgctaccacttataaccacctggttaagtcgagatttggaggtggtttagtttggggcctggatgcaccttgcagagagagaccgctggctttttgtagcaactgtcatgatgcattttgtaagcattaagagtggttttcccggattgtgtgtaggtgtgagatcaaccatgagttccgttgcagttttgacccaagagagttttgctgaacaccgaagtgggctggttccgcaacaaatcaaagttgccactctaaattcagaagaggagagcgaccctccaacctacaaggatgccttccctccacttcctgagaaagctgcttgcctggaaagtgcccaggaaccctctggagcctgggggaacaagatccgacccatcaaggcttctgtcatcactcaggtgttccatgtacccctggaggagagaaaatacaaggatatgaaccagtttggagaaggtgaacaagcaaaaatctgccttgagatcatgcagagaactggtgctcacttggagctgtctttggccaaagaccaaggcctctccatcatggtgtcaggaaagctggatgctgtcatgaaagctcggaaggacattgttgctagactgcagactcaggcctcagcaactgttgccattcccaaagaacaccatcgctttgttattggcaaaaatggagagaaactgcaagacttggagctaaaaactgcaaccaaaatccagatcccacgcccagatgaccccagcaatcagatcaagatcactggcaccaaagagggcatcgagaaagctcgccatgaagtcttactcatctctgccgagcaggacaaacgtgctgtggagaggctagaagtagaaaaggcattccaccccttcatcgctgggccgtataatagactggttggcgagatcatgcaggagacaggcacgcgcatcaacatccccccacccagcgtgaaccggacagagattgtcttcactggagagaaggaacagttggctcaggctgtggctcgcatcaagaagatttatgaggagaaggccaatagcttcaccgtctcctctgtcgccgccccttcctggcttcaccgtttcatcattggcaagaaagggcagaacctggccaaaatcactcagcagatgccaaaggttcacatcgagttcacagagggcgaagacaagatcaccctggagggccctacagaggatgtcaatgtggcccaggaacagatagaaggcatggtcaaagatttgattaaccggatggactatgtggagatcaacatcgaccacaagttccacaggcacctcattgggaagagcggtgccaacataaacagaatcaaagaccagtacaaggtgtccgtgcgcatccctcctgacagtgagaagagcaatttgatccgcatcgagggggacccacagggcgtgcagcaggccaagcgagagctgctggagcttgcatctcgcatggaaaatgagcgtaccaaggatctaatcattgagcaaagatttcatcgcacaatcattgggcagaagggtgaacggatccgtgaaattcgtgacaaattcccagaggtcatcattaactttccagacccagcacaaaaaagtgacattgtccagctcagaggacctaagaatgaggtggaaaaatgcacaaaatacatgcagaagatggtggcagatctggtggaaaatagctattcaatttctgttccgatcttcaaacagtttcacaagaatatcattgggaaaggaggcgcaaacattaaaaagattcgtgaagaaagcaacaccaaaatcgaccttccagcagagaatagcaattcagagaccattatcatcacaggcaagcgagccaactgcgaagctgcccggagcaggattctgtctattcagaaagacctggccaacatagccgaggtagaggtctccatccctgccaagctgcacaactccctcattggcaccaagggccgtctgatccgctccatcatggaggagtgcggcggggtccacattcactttcccgtggaaggttcaggaagcgacaccgttgttatcaggggcccttcctcggatgtggagaaggccaagaagcagctcctgcatctggcggaggagaagcaaaccaagagtttcactgttgacatccgcgccaagccagaataccacaaattcctcatcggcaaggggggcggcaaaattcgcaaggtgcgcgacagcactggagcacgtgtcatcttccctgcggctgaggacaaggaccaggacctgatcaccatcattggaaaggaggacgccgtccgagaggcacagaaggagctggaggccttgatccaaaacctggataatgtggtggaagactccatgctggtggaccccaagcaccaccgccacttcgtcatccgcagaggccaggtcttgcgggagattgctgaagagtatggcggggtgatggtcagcttcccacgctctggcacacagagcgacaaagtcaccctcaagggcgccaaggactgtgtggaggcagccaagaaacgcattcaggagatcattgaggacctggaagctcaggtgacattagaatgtgctataccccagaaattccatcgatctgtcatgggccccaaaggttccagaatccagcagattactcgggatttcagtgttcaaattaaattcccagacagagaggagaacgcagttcacagtacagagccagttgtccaggagaatggggacgaagctggggaggggagagaggctaaagattgtgaccccggctctccaaggaggtgtgacatcatcatcatctctggccggaaagaaaagtgtgaggctgccaaggaagctctggaggcattggttcctgtcaccattgaagtagaggtgccctttgaccttcaccgttacgttattgggcagaaaggaagtgggatccgcaagatgatggatgagtttgaggtgaacatacatgtcccggcacctgagctgcagtctgacatcatcgccatcacgggcctcgctgcaaatttggaccgggccaaggctggactgctggagcgtgtgaaggagctacaggccgagcaggaggaccgggctttaaggagttttaagctgagtgtcactgtagaccccaaataccatcccaagattatcgggagaaagggggcagtaattacccaaatccggttggagcatgacgtgaacatccagtttcctgataaggacgatgggaaccagccccaggaccaaattaccatcacagggtacgaaaagaacacagaagctgccagggatgctatactgagaattgtgggtgaacttgagcagatggtttctgaggacgtcccgctggaccaccgcgttcacgcccgcatcattggtgcccgcggcaaagccattcgcaaaatcatggacgaattcaaggtggacattcgcttcccacagagcggagccccagaccccaactgcgtcactgtgacggggctcccagagaatgtggaggaagccatcgaccacatcctcaatctggaggaggaatacctagctgacgtggtggacagtgaggcgctgcaggtatacatgaaacccccagcacacgaagaggccaaggcaccttccagaggctttgtggtgcgggacgcaccctggaccgccagcagcagtgagaaggctcctgacatgagcagctctgaggaatttcccagctttggggctcaggtggctcccaagaccctcccttggggccccaaacgataatgatcaaaaagaacagaaccctctccagcctgctgacccaaacccaaccacacaatggtttgtctcaatctgacccagcggctggaccctccgtaaattgttgacgctcttcccccttcccgaggtcccgcagggagcctagcgcctggctgtgtgtgcggccgctcctccaggcctggccgtgcccgctcaggacctgctccactgtttaacactaaaccaaggtcatgagcattcgtgctaagataacagactccagctcctggtccacccggcatgtcagtcagcactctggccttcatcacgagagctccgcagccgtggctaggattccacttcctgtgtcatgacctcaggaaataaacgtccttgactttat

SEQ ID NO: 86802 - DNA, 1096 bp, Artificial Sequence
  derived and/or modified sequence
gtcaagcgtagcctcttctcctttaccaagatggcggcttgtccctgtttcgccacagttcctaccttatgagctcggttttcttatgcttataagagtggaacagcagttccaccttttcatggttgaggagcacatgtggtcgccagcctcccatctccagagtcccctaaggcaagatccccagtggattagaaaggactgaaggacttttacaggctaacagcaagaagaacaaagtaactgcaaaatagacggagaattcttgaagacggtagctcttggtcaccataagcgctgcagagaccccgaggtccacattctgttgtagcaaaagctggcaggctgacagaggcggcctcaggacggaccttctggctactgaccgttttgctgtggttttcccggattgtgtgtaggtgtgagatcaaccatgagttccgttgcagttttgacccaagagagttttgctgaacaccgaagtgggctggttccgcaacaaatcaaagttgccactctaaattcagaagaggagagcgaccctccaacctacaaggatgccttccctccacttcctgagaaagctgcttgcctggaaagtgcccaggaaccctctggagcctgggggaacaagatccgacccatcaaggcttctgtcatcactcaggtgttccatgtacccctggaggagagaaaatacaaggatatgaaccagtttggagaaggtgaacaagcaaaaatctgccttgagatcatgcagagaactggtgctcacttggagctgtctttggccaaagaccaaggcctctccatcatggtgtcaggaaagctggatgctgtcatgaaagctcggaaggacattgttgctagactgcagactcaggcctcagcaactgttgccattcccaaagaacaccatcgctttgttattggcaaaaatggagagaaactgcaagacttggagctaaaaactgcaaccaaaatccagatcccacgcccagatgaccccagcaatcagatcaagatcactggcaccaaagagggcatcgagaaagctcgccatgaagtcttactcatctctgccgagcaggacaaa

SEQ ID NO: 86803 - DNA, 612 bp, Artificial Sequence
  derived and/or modified sequence
acaacagacagccttaggggaaatggggaaactggagaaaagggctcttatcccaaaaggaccagatccattggaacagatagagcaaaagctggcaggctgacagaggcggcctcaggacggaccttctggctactgaccgttttgctgtggttttcccggattgtgtgtaggtgtgagatcaaccatgagttccgttgcagttttgacccaagagagttttgctgaacaccgaagtgggctggttccgcaacaaatcaaagttgccactctaaattcagaagaggagagcgaccctccaacctacaaggatgccttccctccacttcctgagaaagctgcttgcctggaaagtgcccaggaaccctctggagcctgggggaacaagatccgacccatcaaggcttctgtcatcactcaggtgttccatgtacccctggaggagagaaaatacaaggatatgaaccagtttggagaaggtgaacaagcaaaaatctgccttgagatcatgcagagaactggtgctcacttggagctgtctttggccaaagaccaaggcctctccatcatggtgtcaggaaagctggatgctgtcatgaaagctcggaagga

SEQ ID NO: 86804 - DNA, 708 bp, Artificial Sequence
  derived and/or modified sequence
ggggacgtggccttcctgtgcccgggctggggcccgccgccccgcgggggagggcggagctggcgcggcccctagctttctccttctggtgtggggcccgaggtcagagcccagcacaacaacccttcttctggttcagccgcccagcggttatgtggggtacgggaaagatgatccagccatgcaggagagcaccagtggttctgtgaggattttacttcaaaatacaaaagctggcaggctgacagaggcggcctcaggacggaccttctggctactgaccgttttgctgtggttttcccggattgtgtgtaggtgtgagatcaaccatgagttccgttgcagttttgacccaagagagttttgctgaacaccgaagtgggctggttccgcaacaaatcaaagttgccactctaaattcagaagaggagagcgaccctccaacctacaaggatgccttccctccacttcctgagaaagctgcttgcctggaaagtgcccaggaaccctctggagcctgggggaacaagatccgacccatcaaggcttctgtcatcactcaggtgttccatgtacccctggaggagagaaaatacaaggatatgaaccagtttggagaaggtgaacaagcaaaaatctgccttgagatcatgcagagaactggtgctcacttggagctgtctttggccaaagaccaaggcctctcca

SEQ ID NO: 86805 - DNA, 598 bp, Artificial Sequence
  derived and/or modified sequence
ggtggcatctgcgaaagttcctccatgcaggatgggtgccgacttccagaacttgcaaaagctggcaggctgacagaggcggcctcaggacggaccttctggctactgaccgttttgctgtggttttcccggattgtgtgtaggtgtgagatcaaccatgagttccgttgcagttttgacccaagagagttttgctgaacaccgaagtgggctggttccgcaacaaatcaaagttgccactctaaattcagaagaggagagcgaccctccaacctacaaggatgccttccctccacttcctgagaaagctgcttgcctggaaagtgcccaggaaccctctggagcctgggggaacaagatccgacccatcaaggcttctgtcatcactcaggtgttccatgtacccctggaggagagaaaatacaaggatatgaaccagtttggagaaggtgaacaagcaaaaatctgccttgagatcatgcagagaactggtgctcacttggagctgtctttggccaaagaccaaggcctctccatcatggtgtcaggaaagctggatgctgtcatgaaagctcggaaggacattgttgctagactg

SEQ ID NO: 86806 - DNA, 566 bp, Artificial Sequence
  derived and/or modified sequence
ctcggagcgtcccggcttctcccgcgcggggggcgagtaagccagcggcaggaccagcgggcgggggcccacgaacacatgcctcactcctgtcagcagttccaccttttcatggttgaggagcacatgtggtcgccagcctcccatctccagagtcccctaaggcaaggtgactcaccctcctacttcacagagttcttggtcctccccagacagcctttgaaggttcctttcaatcctgcgatttcatgacctggtttctagatccccagtggattagaaaggactgaaggacttttacaggctaacagcaagaagaacaaagtaactgcaaaatagacggagaattcttgaagacggtagctcttggtcaccataagcgctgcagagaccccgaggtccacattctgttcaaaagctggcaggctgacagaggcggcctcaggacggaccttctggctactgaccgttttgctgtggttttcccggattgtgtgtaggtgtgagatcaaccatgagttccgttgcagttttgacccaagagagttttgctgaacaccgaagtg

SEQ ID NO: 86807 - DNA, 996 bp, Artificial Sequence
  derived and/or modified sequence
gcttctcccgcgcggggggcgagtaagccagcggcaggaccagcgggcgggggcccacgaacacatgcctcactcctgtcagcagttccaccttttcatggttgaggagcacatgtggtcgccagcctcccatctccagagtcccctaaggcaaggtgactcaccctcctacttcacagagttcttggtcctccccagacagcctttgaaggttcctttcaatcctgcgatttcatgacctggtttctagatccccagtggattagaaaggactgaaggacttttacaggctaacagcaagaagaacaaagtaactgcaaaatagacggagaattcttgaagacggtagctcttggtcaccataagcgctgcagagaccccgaggtccacattctgttgtagcaaaagctggcaggctgacagaggcggcctcaggacggaccttctggctactgaccgttttgctgtggttttcccggattgtgtgtaggtgtgagatcaaccatgagttccgttgcagttttgacccaagagagttttgctgaacaccgaagtgggctggttccgcaacaaatcaaagttgccactctaaattcagaagaggagagcgaccctccaacctacaaggatgccttccctccacttcctgagaaagctgcttgcctggaaagtgcccaggaaccctctggagcctgggggaacaagatccgacccatcaaggcttctgtcatcactcaggtgttccatgtacccctggaggagagaaaatacaaggatatgaaccagtttggagaaggtgaacaagcaaaaatctgccttgagatcatgcagagaactggtgctcacttggagctgtctttggccaaagaccaaggcctctccatcatggtgtcaggaaagctggatgctgtcatgaaagctcggaaggacattgttgctagactgcagactcaggcctcagcaactgttgccattcccaaagaacaccatcgcttt

SEQ ID NO: 86808 - DNA, 420 bp, Artificial Sequence
  derived and/or modified sequence
ccgcgcggggggcgagtaagccagcggcaggaccagcgggcgggggcccacgagtcagagcccagcacaacaacccttcttctggttcagccgcccagcggttatgtggggtacgggaaagatgatccagccatgcaggagagcaccagtggttctgtgaggattttacttcaaaatacaaaagctggcaggctgacagaggcggcctcaggacggaccttctggctactgaccgttttgctgtggttttcccggattgtgtgtaggtgtgagatcaaccatgagttccgttgcagttttgacccaagagagttttgctgaacaccgaagtgggctggttccgcaacaaatcaaagttgccactctaaattcagaagaggagagcgaccctccaacctacaaggatgccttccctccact

SEQ ID NO: 86809 - DNA, 165 bp, Artificial Sequence
  derived and/or modified sequence
atgagctctgtggccgtgctgacccaggagagctttgctgagcacaggagcggcctggtgccccagcagatcaaggtggccaccctgaacagcgaggaggagagtgacccccccacctacaaggatgccttcccccccctgcctgagaaggccgcctgcctgtag

SEQ ID NO: 86810 - DNA, 675 bp, Artificial Sequence
  derived and/or modified sequence
atgagctctgtggccgtgctgacccaggagagctttgctgagcacaggagcggcctggtgccccagcagatcaaggtggccaccctgaacagcgaggaggagagtgacccccccacctacaaggatgccttcccccccctgcctgagaaggccgcctgcctggagagcgcccaggagcccagcggggcctggggcaacaagatccggcccatcaaggccagcgtcatcacccaggtgttccacgtgcccctggaggagaggaagtacaaggacatgaaccagtttggagagggggagcaggccaagatctgcctggagatcatgcagaggactggagcccacctggagctgagcctggccaaggaccagggcctgagcatcatggtgtctgggaagctggatgctgtgatgaaggccaggaaggacatcgtggcccggctgcagacccaggccagcgccaccgtggccatccccaaggagcaccaccgcttcgtcatcggcaagaatggagagaagctgcaggacctggagctgaagacagccaccaagatccagatccccaggccagatgaccccagcaaccagatcaagatcaccggcaccaaggagggcatcgagaaggcccggcatgaggtgctgctgatctctgctgagcaggacaagagagctgtgtag

SEQ ID NO: 86811 - DNA, 3708 bp, Artificial Sequence
  derived and/or modified sequence
atgcacctggccgagcgggaccgctggctgtttgtggccaccgtgatgatgcactttgtgtccatcaagagcggcttccctggcctgtgtgtgggcgtgcgcagcaccatgagctctgtggccgtgctgacccaggagagctttgctgagcacaggagcggcctggtgccccagcagatcaaggtggccaccctgaacagcgaggaggagagtgacccccccacctacaaggatgccttcccccccctgcctgagaaggccgcctgcctggagagcgcccaggagcccagcggggcctggggcaacaagatccggcccatcaaggccagcgtcatcacccaggtgttccacgtgcccctggaggagaggaagtacaaggacatgaaccagtttggagagggggagcaggccaagatctgcctggagatcatgcagaggactggagcccacctggagctgagcctggccaaggaccagggcctgagcatcatggtgtctgggaagctggatgctgtgatgaaggccaggaaggacatcgtggcccggctgcagacccaggccagcgccaccgtggccatccccaaggagcaccaccgcttcgtcatcggcaagaatggagagaagctgcaggacctggagctgaagacagccaccaagatccagatccccaggccagatgaccccagcaaccagatcaagatcaccggcaccaaggagggcatcgagaaggcccggcatgaggtgctgctgatctctgctgagcaggacaagagagctgtggagcggctggaggtggagaaggccttccaccccttcatcgccggcccctacaaccggctggtgggggagatcatgcaggagaccggcacccgcatcaacatccccccacccagcgtgaacagaacagagatcgtgttcaccggggagaaggagcagctggcccaggccgtggcccgcatcaagaagatctatgaggagaaggccaacagcttcaccgtgtcctctgtggccgcccccagctggctgcaccgcttcatcatcggcaagaagggccagaacctggccaagatcacccagcagatgcccaaggtgcacatcgagttcacagaaggagaggacaagatcaccctggagggccccacagaagatgtgaatgtggcccaggagcagatcgagggcatggtgaaggacctgatcaacaggatggactatgtggagatcaacatcgaccacaagttccaccgccacctgattggcaagagcggggccaacatcaaccgcatcaaggaccagtacaaggtgtctgtgcgcatccccccagacagcgagaagagcaacctgatccgcatcgagggggacccccagggcgtgcagcaggccaagcgggagctgctggagctggccagcaggatggagaatgaaagaaccaaggacctgatcatcgagcagcgcttccacaggaccatcatcggccagaagggggagcgcatccgggagatccgggacaagtttcctgaggtgatcatcaacttcccagaccctgcccagaagagtgacatcgtgcagctgcggggccccaagaatgaggtggagaagtgcaccaagtacatgcagaagatggtggccgacctggtggagaacagctacagcatctctgtgcccatcttcaagcagttccacaagaacatcatcggcaagggcggggccaacatcaagaagatccgggaggagagcaacaccaagattgacctgcctgctgagaacagcaacagcgagaccatcatcatcaccgggaagagggccaactgtgaggccgcccggagccgcatcctgagcatccagaaggacctggccaacattgctgaggtggaggtgtccatcccagccaagctgcacaacagcctcatcggcaccaagggccgcctcatccgcagcatcatggaggagtgtggcggcgtgcacatccacttccctgtggagggcagcggcagtgacacagtggtgatccggggccccagcagtgatgtggagaaggccaagaagcagctgctgcacctggccgaggagaagcagaccaagagcttcaccgtggacatccgggccaagccagagtaccacaagttcctgattggcaagggcggcggcaagatcaggaaggtgcgggacagcactggagcccgggtcatcttccctgctgctgaggacaaggaccaggacctgatcaccatcatcggcaaggaggatgctgtgcgggaggcccagaaggagctggaggccctgatccagaacctggacaacgtggtggaggacagcatgctggtggaccccaagcaccaccgccacttcgtcatcagaagaggccaggtgctgcgggagattgctgaggagtatggaggagtgatggtgtccttccccaggagcggcacccagagcgacaaggtgaccctgaagggggccaaggactgtgtggaggccgccaagaagaggatccaggagatcatcgaggacctggaggcccaggtgaccctggagtgtgccatcccccagaagttccacaggtctgtgatgggccccaagggcagccgcatccagcagatcacccgggacttctctgtgcagatcaagttcccagaccgggaggagaatgctgtgcacagcacagagcctgtggtgcaggagaatggagatgaggccggggagggccgggaggccaaggactgtgaccccggcagcccccggcgctgtgacatcatcatcatcagcggcaggaaggagaagtgtgaggccgccaaggaggccctggaggccctggtgcctgtgaccatcgaggtggaggtgccctttgacctgcacagatatgtgattggccagaagggcagcggcatcaggaagatgatggatgaatttgaggtgaacatccacgtgcctgcccctgagctgcagagcgacatcatcgccatcaccggcctggccgccaacctggaccgggccaaggccggcctgctggagcgggtgaaggagctgcaggccgagcaggaggaccgggccctgcgctccttcaagctgtctgtgacagtggaccccaagtaccaccccaagatcattggaaggaagggggccgtcatcacccagatccggctggagcatgatgtgaacatccagttcccagacaaggatgatggcaaccagccccaggaccagatcaccatcaccggctatgagaagaacacagaagctgccagagatgccatcctgagaattgtgggggagctggagcagatggtgtctgaagatgtgcccctggaccaccgggtgcacgcccgcatcatcggggcccggggcaaggccatcaggaagatcatggatgagttcaaggtggacatccgcttcccccagagcggggccccagaccccaactgtgtgacagtgacaggcctgcctgaaaatgtggaggaggccatcgaccacatcctgaacctggaggaggagtacctggctgatgtggtggacagcgaggccctgcaggtgtacatgaagcccccagcccacgaggaggccaaggcccccagccggggctttgtggtgagagatgccccctggacagccagcagcagcgagaaggccccagacatgagcagcagcgaggagttccccagctttggagcccaggtggcccccaagaccctgccctggggccccaagaggtag

SEQ ID NO: 86812 - DNA, 666 bp, Artificial Sequence
  derived and/or modified sequence
atgagctctgtggccgtgctgacccaggagagctttgctgagcacaggagcggcctggtgccccagcagatcaaggtggccaccctgaacagcgaggaggagagtgacccccccacctacaaggatgccttcccccccctgcctgagaaggccgcctgcctggagagcgcccaggagcccagcggggcctggggcaacaagatccggcccatcaaggccagcgtcatcacccaggtgttccacgtgcccctggaggagaggaagtacaaggacatgaaccagtttggagagggggagcaggccaagatctgcctggagatcatgcagaggactggagcccacctggagctgagcctggccaaggaccagggcctgagcatcatggtgtctgggaagctggatgctgtgatgaaggccaggaaggacatcgtggcccggctgcagacccaggccagcgccaccgtggccatccccaaggagcaccaccgcttcgtcatcggcaagaatggagagaagctgcaggacctggagctgaagacagccaccaagatccagatccccaggccagatgaccccagcaaccagatcaagatcaccggcaccaaggagggcatcgagaaggcccggcatgaggtgctgctgatctctgctgagcaggacaagtag

SEQ ID NO: 86813 - DNA, 426 bp, Artificial Sequence
  derived and/or modified sequence
atgagctctgtggccgtgctgacccaggagagctttgctgagcacaggagcggcctggtgccccagcagatcaaggtggccaccctgaacagcgaggaggagagtgacccccccacctacaaggatgccttcccccccctgcctgagaaggccgcctgcctggagagcgcccaggagcccagcggggcctggggcaacaagatccggcccatcaaggccagcgtcatcacccaggtgttccacgtgcccctggaggagaggaagtacaaggacatgaaccagtttggagagggggagcaggccaagatctgcctggagatcatgcagaggactggagcccacctggagctgagcctggccaaggaccagggcctgagcatcatggtgtctgggaagctggatgctgtgatgaaggccaggaagtag

SEQ ID NO: 86814 - DNA, 381 bp, Artificial Sequence
  derived and/or modified sequence
atgagctctgtggccgtgctgacccaggagagctttgctgagcacaggagcggcctggtgccccagcagatcaaggtggccaccctgaacagcgaggaggagagtgacccccccacctacaaggatgccttcccccccctgcctgagaaggccgcctgcctggagagcgcccaggagcccagcggggcctggggcaacaagatccggcccatcaaggccagcgtcatcacccaggtgttccacgtgcccctggaggagaggaagtacaaggacatgaaccagtttggagagggggagcaggccaagatctgcctggagatcatgcagaggactggagcccacctggagctgagcctggccaaggaccagggcctgtcctag

SEQ ID NO: 86815 - DNA, 444 bp, Artificial Sequence
  derived and/or modified sequence
atgagctctgtggccgtgctgacccaggagagctttgctgagcacaggagcggcctggtgccccagcagatcaaggtggccaccctgaacagcgaggaggagagtgacccccccacctacaaggatgccttcccccccctgcctgagaaggccgcctgcctggagagcgcccaggagcccagcggggcctggggcaacaagatccggcccatcaaggccagcgtcatcacccaggtgttccacgtgcccctggaggagaggaagtacaaggacatgaaccagtttggagagggggagcaggccaagatctgcctggagatcatgcagaggactggagcccacctggagctgagcctggccaaggaccagggcctgagcatcatggtgtctgggaagctggatgctgtgatgaaggccaggaaggacatcgtggcccggctgtag

SEQ ID NO: 86816 - DNA, 495 bp, Artificial Sequence
  derived and/or modified sequence
atgagctctgtggccgtgctgacccaggagagctttgctgagcacaggagcggcctggtgccccagcagatcaaggtggccaccctgaacagcgaggaggagagtgacccccccacctacaaggatgccttcccccccctgcctgagaaggccgcctgcctggagagcgcccaggagcccagcggggcctggggcaacaagatccggcccatcaaggccagcgtcatcacccaggtgttccacgtgcccctggaggagaggaagtacaaggacatgaaccagtttggagagggggagcaggccaagatctgcctggagatcatgcagaggactggagcccacctggagctgagcctggccaaggaccagggcctgagcatcatggtgtctgggaagctggatgctgtgatgaaggccaggaaggacatcgtggcccggctgcagacccaggccagcgccaccgtggccatccccaaggagcaccaccgcttctag

SEQ ID NO: 86817 - DNA, 165 bp, Artificial Sequence
  derived and/or modified sequence
atgagcagcgtggccgtgctgacccaggagagcttcgccgagcaccgaagtggcctggttccacagcagatcaaagtggctactcttaacagtgaagaggagtccgaccccccaacatacaaggatgcctttccaccccttccagagaaggcagcttgcctatag

SEQ ID NO: 86818 - DNA, 675 bp, Artificial Sequence
  derived and/or modified sequence
atgagcagcgtggccgtgctgacccaggagagcttcgccgagcacagatccggcctggttccccaacagataaaggtggccacgttaaacagtgaggaagaaagtgacccccctacctacaaggatgcctttccacccttaccagagaaagcggcttgcctggaaagtgcccaggaaccaagcggggcctggggaaacaagattaggcctatcaaagcctcggtgatcacccaggtgttccacgtacctctagaggagcggaagtacaaggacatgaatcaatttggagaaggagagcaggccaagatctgcctggagataatgcaacggacaggcgcacatctagaactgagtttggcaaaagatcagggtctgagtataatggtgagcggcaaactggatgctgtcatgaaggcccgcaaagacatcgtcgcccggttgcagacacaggcgagcgccaccgtcgccatccccaaggaacaccataggtttgtcatcggaaagaatggcgagaagctgcaggacttagaactgaaaacagcaacaaagattcagataccccgcccagacgacccgagcaatcagattaagattacagggactaaggaaggtatagaaaaagctcggcatgaggtcctgctaatatcagcagaacaggataaaagagcagtgtag

SEQ ID NO: 86819 - DNA, 3708 bp, Artificial Sequence
  derived and/or modified sequence
atgcacctggccgagcgggaccggtggctgttcgtggccaccgtgatgatgcattttgtctctatcaaatccggtttccccggactttgtgtcggcgtccgctcgaccatgagcagcgttgccgtactgactcaagaatcttttgccgagcatagatcgggtctggtccctcagcagatcaaggttgccacattgaattcggaagaggagtctgacccacctacctacaaagatgcgttccccccgctgccagagaaggcagcttgtctagaaagtgcgcaggagccaagcggggcctggggaaataagattagaccaataaaggccagcgttattacacaggtgtttcatgtgcctctcgaggagagaaagtacaaagacatgaaccagtttggcgagggcgagcaggctaagatatgtctcgaaatcatgcagcgcacgggtgcacacctggagctctccttggctaaagaccagggcctgagcattatggtgagcggaaagctggacgccgtcatgaaagccagaaaggatatagtcgctagactgcagacccaggcttccgccacagtcgccatccccaaagagcaccataggttcgttataggtaaaaacggcgaaaagctacaggatctggaactgaaaacggcaactaaaatccagatcccacgacctgacgatccctcaaaccagataaaaatcacagggacaaaggagggaatcgagaaagcacgacacgaagtactgctaatttctgcagaacaggataagcgggccgtagaaaggctggaggtggaaaaagcattccatccctttattgccggcccctataataggttggtgggcgaaatcatgcaggaaaccggcactagaatcaatataccccctccatcggtgaaccgcaccgagatcgtgttcacaggggagaaagaacaattggctcaagctgtcgctcgaattaagaagatctacgaggagaaggccaatagtttcaccgtttcctccgttgccgcaccgtcgtggctgcatcgctttatcattggtaagaaaggacaaaacctagctaagataacacagcaaatgcctaaagtgcatattgagtttaccgagggagaggacaagattacactcgaagggcccacggaggacgtgaacgttgctcaggaacagattgaaggcatggtcaaggacctgattaaccgcatggattatgttgagatcaatattgatcataaattccaccgacaccttatcggcaaaagcggcgcgaacatcaaccgcatcaaagaccagtacaaagtgagcgtgcggatcccaccagactccgagaaatctaacctcatccgcatcgagggagacccccagggggtgcaacaggcaaaaagggaactattggaattggcgtcccgaatggagaatgagaggacaaaggatctgatcattgaacagaggttccaccgaaccatcatcggccaaaaaggtgagcggattagggagatacgcgacaagttccccgaggtgatcatcaactttccagatcccgcacagaagagcgacatcgtgcaattacgaggacctaagaacgaggtagagaagtgcacaaagtacatgcagaagatggtggccgacctcgtggaaaactcatactctatttcagtgccaatattcaagcaattccacaagaacatcatcggcaaaggaggagccaatatcaaaaagatccgcgaggagtccaatactaagattgatttgcctgctgaaaattccaattccgagaccattattattacaggaaaacgggctaattgtgaggccgcccggtcacgtatactgtctattcagaaggatctggcaaatatcgcagaagtcgaagttagcatacctgcaaaactacacaattctttaatcgggaccaagggtcgcctcattcggagtattatggaagagtgtggaggcgtacacatacactttcccgtggaaggatcaggatccgacacagtagtgatccgggggcctagctcggatgtagagaaagcaaaaaaacagctcctccacctggctgaagaaaagcagaccaaatccttcaccgtcgacattagagccaaaccagaataccacaagtttctgattggcaagggcggggggaaaatccgcaaagtgcgggacagtactggcgcaagagtgatattccccgctgccgaggacaaagatcaagacttgatcaccattatcgggaaggaagacgccgtcagggaagcacagaaagaactggaggctctcatccagaacctggacaatgtggtggaggactctatgcttgtggatcccaaacatcacagacacttcgtaataagaaggggacaggtgctgcgcgagatagccgaggagtacggaggcgtaatggtctcgttcccaagatctggcacacagtctgacaaagttaccttgaagggcgcaaaggattgcgtggaggcagcaaagaagaggatccaggaaatcattgaagatctggaggcccaggtcacgcttgaatgcgccatcccccaaaaattccatagatccgtgatgggacctaagggaagcagaattcagcagatcacacgggacttttctgtgcagatcaaatttcccgaccgagaggagaacgccgtgcacagcaccgagccagtggtgcaagaaaacggggatgaggcaggggaggggcgggaggccaaagattgtgaccccggctctcctcggcgctgtgacataataatcatttcaggcaggaaggagaagtgtgaggcagccaaggaggcgctcgaagcgctggtcccagtgacaatcgaggtcgaagtgccattcgatctccatcgttacgttattggtcagaaggggtcaggcatccgaaaaatgatggacgaattcgaagtcaatattcacgtgccagcgcccgagttacaatcagatataatagctattacaggactagccgccaacttagaccgggctaaggcagggttactggaacgggtcaaagagctgcaggctgagcaggaggatcgagcattacggtctttcaagctgtccgttacggtcgaccctaagtaccatccaaaaatcatcggacggaagggcgctgtgatcacacagatcagactggagcacgacgtcaacatacaattcccagacaaagacgatggcaatcagccccaggatcaaataacgatcaccgggtacgagaagaataccgaagccgccagagatgccatcctgcggattgtcggggaattggaacagatggtgtctgaggatgtgcctctagatcaccgtgtgcatgccagaattattggggcacgcggcaaagcgattagaaagataatggatgagttcaaggtcgacatcaggttcccacagagcggagccccagacccgaactgtgtgacggtgacaggtctgcctgaaaacgtggaggaagccatagaccatatacttaacctggaggaggaatacctcgccgacgtcgtcgactccgaagccttgcaagtctacatgaagcctccggcacacgaggaagctaaagcaccctctcggggcttcgtggtccgcgatgccccatggacagcctccagcagcgagaaggcgccggatatgtctagtagtgaggagtttcctagctttggggcacaggtcgcaccaaagactctcccttgggggccaaagcgatag

SEQ ID NO: 86820 - DNA, 666 bp, Artificial Sequence
  derived and/or modified sequence
atgagcagcgtggccgtgctgacccaggagagcttcgccgagcacaggagcggtttggtgccccagcagatcaaggtggccaccctgaattctgaggaggaatccgaccctcctacctacaaggacgcttttccccctctacctgagaaagctgcctgtctggaaagcgcccaggagccctccggagcttggggaaataagatcagaccgatcaaggccagcgttatcacccaagttttccacgtccctctggaagagcgtaaatacaaagacatgaatcaattcggggaaggagagcaggccaagatttgcctggagattatgcaacggacaggtgcgcatctggaactttcccttgcaaaggaccagggcctgtcaattatggtgtccgggaagctcgatgccgtgatgaaagcacgaaaggatattgtggccagactgcagacccaggcctcagccacagttgcgatccctaaagagcatcataggtttgtgattgggaagaacggggagaagttacaggatttggaactcaaaaccgccacaaagattcagattccacggcctgatgacccctccaatcagatcaagattaccggtactaaggagggcattgagaaggcccggcatgaggtgctactgatttctgccgaacaagataaatag

SEQ ID NO: 86821 - DNA, 426 bp, Artificial Sequence
  derived and/or modified sequence
atgagcagcgtggccgtgctgacccaggagagcttcgccgagcaccgatccgggctcgtgccacagcagatcaaagtggcaactctgaatagcgaggaggagtccgacccaccaacttataaggacgctttccctcctctgccagaaaaggccgcatgtctcgagagtgcccaggagccgtccggcgcgtggggaaacaagatcaggccgataaaggcatccgttatcacgcaagtgttccacgtgccgttggaagagcgaaaatataaggacatgaatcagttcggcgagggcgagcaagcaaaaatctgtctggaaatcatgcaacgcacaggtgcccacctcgagctatcgctggcaaaggaccagggcctcagcatcatggtcagcggcaagttggacgctgtgatgaaggcacggaagtag

SEQ ID NO: 86822 - DNA, 381 bp, Artificial Sequence
  derived and/or modified sequence
atgagcagcgtggccgtgctgacccaggagagcttcgccgagcaccggtcgggcttagtcccccagcagataaaagttgctacgctcaactctgaagaggaatccgacccaccaacatataaggatgctttcccaccgctgccggaaaaggccgcctgtctcgaaagcgcacaggagccctctggtgcctggggcaataaaatcagacccattaaagcaagtgtaatcacgcaagtcttccacgtgcctctggaagagaggaaatacaaggatatgaaccagttcggagagggggaacaggctaaaatctgcctggagattatgcagagaactggggcacatctagagctgtccctggctaaagatcagggcctgagctag

SEQ ID NO: 86823 - DNA, 444 bp, Artificial Sequence
  derived and/or modified sequence
atgagcagcgtggccgtgctgacccaggagagcttcgccgagcacagatcagggctggtgccgcaacagatcaaggtggcgaccttgaattcagaggaggagagcgatccaccaacttataaggacgcattccctccactgccggagaaggcagcatgtctagagagtgcccaagaaccttctggagcatgggggaacaagatccgaccaatcaaagccagtgttataacccaggtttttcacgtacccctcgaggaacgcaagtacaaagacatgaaccagtttggggaaggcgagcaagcgaaaatctgtctggagattatgcagcgcaccggagcgcacctcgaactgtcactggcaaaagaccagggtttatctattatggtatcaggaaagctcgatgcggtgatgaaggctagaaaagacatcgtcgcgcgcttgtag

SEQ ID NO: 86824 - DNA, 495 bp, Artificial Sequence
  derived and/or modified sequence
atgagcagcgtggccgtgctgacccaggagagcttcgccgagcaccggagtggcctggttcctcagcagatcaaggtggctacccttaatagcgaggaggaaagtgaccccccaacctataaagacgcatttccacctctgcctgagaaggccgcttgcctggaaagcgcacaggaaccgagtggagcctggggaaataaaattcgtccaatcaaggcatccgtcatcactcaggtgttccacgttcctctcgaagagagaaaatacaaggatatgaaccagtttggggagggagagcaggccaagatttgtcttgaaataatgcagcgcacgggcgctcacctggagctgtctttggccaaagatcaggggctgtccatcatggtcagcggcaagctggacgcggtgatgaaagcgagaaaggacatagtggctaggctgcagactcaggcatccgcaaccgtggcgatccctaaggaacatcatcgcttttag

SEQ ID NO: 86825 - DNA, 165 bp, Artificial Sequence
  derived and/or modified sequence
atgtcatccgtcgccgttctcactcaagagtcatttgccgagcatagatcaggcttagtgccccagcaaatcaaagttgcaactcttaatagcgaggaggagagtgacccacccacttacaaggacgcatttcccccactccctgagaaagccgcatgcctgtag

SEQ ID NO: 86826 - DNA, 675 bp, Artificial Sequence
  derived and/or modified sequence
atgtcctccgtggccgttctgacccaagaaagcttcgcagagcaccgatcaggactggtacctcagcagataaaagttgcaacattgaactctgaagaagaatctgacccgcctacgtacaaggatgcatttcccccactcccggaaaaggccgcttgcctggagagtgctcaggagccgtctggtgcgtggggtaataaaattcgacccattaaggcaagtgtcattacccaggtttttcatgtccccctggaggagaggaaatacaaagacatgaatcagtttggcgaaggcgagcaagctaaaatttgcctggagattatgcaacgcaccggcgcacacttggagctctcacttgcaaaggaccaaggcctatccatcatggtctctgggaagctcgacgctgtcatgaaggctcgaaaagacatagtggctaggttacaaacacaagcatcagcaaccgtggccatccctaaagagcaccatcgttttgtaatcggaaaaaacggggagaagttgcaggacttagaacttaagacggcaaccaagattcagatccctaggcccgacgatcctagcaatcagatcaagatcaccggaaccaaggaagggatagaaaaagccagacatgaggtcctactgatctctgccgaacaggataagagggcagtgtag

SEQ ID NO: 86827 - DNA, 3708 bp, Artificial Sequence
  derived and/or modified sequence
atgcacttagccgagagagataggtggctgttcgtcgccacggtaatgatgcatttcgtgtccatcaagagtggctttcctgggctctgcgtgggtgtgcgaagtaccatgtcctctgttgcggtcctcacccaggaatcctttgccgagcataggtctggactggtgccccaacagattaaggtcgccactttaaactcggaagaggaatctgatccaccgacctataaagatgcgttcccccctcttcccgagaaggccgcatgcttggagtcggcccaagagccttctggtgcctggggaaacaagattcggcctatcaaggcgagtgtgatcacgcaggtgtttcacgttcccctcgaagagagaaagtacaaagacatgaatcaattcggggagggcgagcaagctaagatttgtctggaaattatgcagaggacaggcgctcacctggagctgagcttagctaaggatcagggattatccatcatggtttctgggaaattggacgccgtcatgaaagctaggaaggacattgttgcccgactccagacccaagccagtgcaacagttgctatccccaaggagcatcacagattcgtcattggtaaaaacggcgaaaagctccaggatctggagcttaaaaccgcgacaaaaatccagatcccaaggcccgatgatccatcaaatcagatcaaaattactgggaccaaagagggtatcgagaaggccagacacgaggtgctgcttatctctgctgagcaggacaagcgcgcagttgaacggctggaagtggagaaggcttttcacccattcattgcgggaccgtacaatcgcctggtcggagagattatgcaggaaacaggcaccagaattaacatacccccaccatcagtgaacaggaccgagatcgtatttaccggggagaaggagcagttggcccaggccgtggcccgtatcaagaagatctacgaagaaaaggcaaattcgttcaccgtatcaagcgtggccgctccttcttggctgcacagattcattattggcaaaaagggccagaatctggcaaagattacccaacagatgccgaaagtgcacatcgaattcacagaaggagaggacaagattactctagaaggccctaccgaagatgtaaacgtggcccaagagcagatcgagggcatggtcaaggacctgatcaaccggatggattacgtggagatcaacattgaccataaattccacaggcatctcatcggcaagagcggcgcaaacatcaacaggataaaggaccagtataaagtctccgttagaattcctccagacagtgagaagagtaacctgattagaattgagggggaccctcagggcgtccagcaagccaaacgcgaacttcttgaattggcctctcgaatggagaacgaacgcaccaaagatctgataattgaacaaagattccacagaacaattattggccaaaagggagagcgtattagagagatccgagacaaatttccggaggtcattatcaacttcccagaccccgcacagaaatcggatatagttcaactccgcggaccgaagaacgaggttgaaaagtgtaccaagtacatgcaaaagatggttgctgacctggtagagaactcttattccatctcagtgccaatcttcaaacagttccacaagaacattatcgggaaaggcggagcaaacatcaagaagatcagagaagagagcaacaccaaaattgacctgccagccgaaaattcaaacagtgaaacgatcattattaccggtaaacgagctaactgcgaggcggcaaggtcccgcatcctgagcatccagaaagacctcgctaacattgcagaggtggaagtgtctattccagcaaaactgcacaattctttaattggaacgaaaggccgactgatccgcagcattatggaggaatgtggaggggttcatatccatttccctgtggagggttcaggctccgatacagtggtgattagagggccatcttctgatgttgaaaaagccaaaaaacagttgttgcatttggccgaggagaaacagaccaagtcatttaccgtggatatccgggcaaaaccagagtaccataaatttctcattggaaaaggaggaggtaaaatccggaaggtccgggattctactggcgcaagagttatttttccggcagccgaagataaagatcaggacctgattactatcatcgggaaggaagacgctgtgcgcgaggcacaaaaagaactggaggcgctcatccagaacctggataatgtggttgaggattccatgttggttgacccaaaacaccaccgacatttcgtaattcgacgcggtcaggttctcagggagatcgccgaagagtacgggggtgtgatggtttcattccccagaagtggtacccagagcgacaaggtgactctgaaaggggctaaggattgtgtggaggccgctaagaaaagaattcaagaaatcatcgaggatttggaggcacaagtgaccctcgaatgcgccatacctcagaaatttcatagatcagtgatgggtcccaagggttctcggatacagcagatcacgagggacttcagtgtacagatcaaatttcccgatagagaggagaatgcagtgcactcaacagagcccgtggtgcaagaaaatggcgatgaagctggtgaaggcagagaagcaaaagattgcgaccctggatcccccagacgttgtgacataatcattataagcggtcgcaaagagaagtgcgaggcagccaaggaagccctcgaagcactcgtaccagtgactatcgaggtggaggtccctttcgacctgcacagatatgtgatcggtcagaagggaagcgggattcgcaaaatgatggatgaatttgaggtgaacattcacgtgccggcacccgaactgcagagcgatataattgcaataaccggtctggcagcgaaccttgacagagcaaaagcaggtctgctcgagcgcgtcaaggagctccaggcggaacaagaagatcgtgcactgcgcagttttaaacttagcgtcacagttgatccgaagtaccatccaaagataataggcaggaagggggctgtgatcacgcagattcgtcttgagcacgacgtgaacatccagttccctgacaaagacgatggaaatcagccgcaggaccagattaccattactggatatgaaaaaaatactgaggccgctagggatgccatcctgcggattgtgggcgagcttgagcaaatggtgagtgaggatgtgcctctcgatcaccgtgtgcacgctcggatcattggggctcggggtaaggctatccgcaaaataatggacgaatttaaagtcgacatcaggttcccacagagcggagcacccgaccctaactgtgttaccgttacaggattgcccgaaaacgtggaagaggcaatcgaccacattcttaaccttgaagaagaatatctagcggacgtggtagacagcgaagctctccaggtctacatgaaacctccggctcacgaagaggccaaggccccaagtagaggctttgtcgtgagagatgcaccctggacagcctcgagttccgagaaggcaccagacatgtctagtagtgaggaattcccatcattcggcgcacaagtggctcctaagaccctgccctggggcccaaagcgttag

SEQ ID NO: 86828 - DNA, 666 bp, Artificial Sequence
  derived and/or modified sequence
atgtccagtgtggccgtgctgactcaagaatccttcgctgaacaccgctccggcctggtgccccagcagattaaggtggcgacactgaacagtgaggaggaatccgatccacccacgtataaggacgccttcccgcctctgccggagaaggccgcttgcttagaatcagctcaggaaccgagcggcgcttgggggaacaagattagacccattaaggcatcagtaatcacgcaggtcttccacgtaccattagaagagagaaagtacaaagacatgaaccagttcggggagggagaacaggctaagatatgtttggagatcatgcaaaggaccggcgctcacctggaattgagcctggcgaaagatcaagggcttagcatcatggtgtcgggaaagctcgatgctgtcatgaaggcaagaaaggacatagtagcacgattgcagacacaggcctctgccacggtcgcgatccctaaagaacatcacagattcgttattgggaagaacggcgaaaaactgcaagatcttgaacttaagactgctacgaagattcaaattcccagaccagatgaccccagtaatcagattaaaatcacaggtacaaaagaagggattgaaaaggcacggcacgaggtgctactgatttccgcagagcaagataagtag

SEQ ID NO: 86829 - DNA, 426 bp, Artificial Sequence
  derived and/or modified sequence
atgtcaagcgtggccgttttgactcaggaatcttttgccgaacatagatccgggttggtaccacaacagatcaaggtggctacactgaactccgaggaggagagcgatccacccacgtacaaagatgcttttcctccattgccagagaaagccgcatgtctcgagtccgctcaggaaccgagcggcgcatgggggaataagatccgcccaataaaggcatcggtcatcacacaggtctttcacgtgcccctggaggagaggaaatacaaggacatgaaccaattcggagaaggagagcaggcaaaaatttgtctggagattatgcagaggacaggagcccatctggaactcagcttggccaaagaccagggtctctcgatcatggtgagtggtaagctggatgctgttatgaaagcaagaaaatag

SEQ ID NO: 86830 - DNA, 381 bp, Artificial Sequence
  derived and/or modified sequence
atgtcctcggtcgctgtgctgacccaggagagctttgcagagcaccgcagcggtctcgtcccccagcaaatcaaggttgctaccctgaatagtgaggaagagtccgaccctcccacttacaaggacgcctttcccccactgcccgaaaaagccgcttgtttggagtccgcccaggaacccagtggagcttgggggaacaaaattcgacccataaaagccagcgtgattacccaagtcttccacgtgcccctggaagagcgcaagtataaagacatgaatcagtttggcgaaggcgagcaggccaaaatatgcctggagataatgcaacgaacgggcgctcatctggagctgtctctggcgaaagatcagggcctgtcttag

SEQ ID NO: 86831 - DNA, 444 bp, Artificial Sequence
  derived and/or modified sequence
atgagcagcgtggctgtgcttactcaggagtcatttgccgagcataggtctggcctcgtcccgcaacagataaaggttgcgactctgaacagcgaagaggagtcggacccgcctacttacaaggacgcctttccacctttgcctgaaaaggcagcatgtttggaatccgctcaggagccaagcggggcatggggcaacaaaatccgccctatcaaggcatccgtcatcacccaggtgttccatgtgcccctggaggaaaggaaatacaaggacatgaaccagttcggcgaaggcgaacaggccaaaatctgtctggagattatgcaaaggacgggagcccacctggagctcagtctggcgaaagatcaggggctgagcatcatggtctcggggaagctggacgccgtcatgaaggcaaggaaagatattgtagcaagactttag

SEQ ID NO: 86832 - DNA, 495 bp, Artificial Sequence
  derived and/or modified sequence
atgtctagcgttgccgtgctcacccaggagtcgtttgcagaacataggagcgggctggtgcctcaacagatcaaggtcgccacactcaacagtgaagaggaatccgatcccccaacatataaagatgcgttccctccactcccggagaaagctgcatgccttgagagcgcccaggagcccagcggagcctgggggaataaaattcgacctattaaggccagtgtgatcacacaggtgttccatgtgcccctggaagaacgcaagtataaagatatgaatcagtttggagaaggagagcaggctaagatctgtctggagatcatgcagagaaccggcgcacatcttgagttaagtctagcaaaggatcaggggttgtccatcatggtttccggcaaactggatgcggtgatgaaagcacgtaaggacatcgtggccagactgcagactcaggcctctgctactgtcgccattccaaaggaacatcacagattttag

SEQ ID NO: 86833 - DNA, 165 bp, Artificial Sequence
  derived and/or modified sequence
atgagcagcgtggccgtgctgacccaggagagcttcgccgagcacagaagcggcctggtgccccagcagatcaaggtggccaccctgaacagcgaggaggagagcgacccccccacctacaaggacgccttcccccccctgcccgagaaggccgcctgcctgtag

SEQ ID NO: 86834 - DNA, 675 bp, Artificial Sequence
  derived and/or modified sequence
atgagcagcgtggccgtgctgacccaggagagcttcgccgagcacagaagcggcctggtgccccagcagatcaaggtggccaccctgaacagcgaggaggagagcgacccccccacctacaaggacgccttcccccccctgcccgagaaggccgcctgcctggagagcgcccaggagcccagcggcgcctggggcaacaagatcagacccatcaaggccagcgtgatcacccaggtgttccacgtgcccctggaggagagaaagtacaaggacatgaaccagttcggcgagggcgagcaggccaagatctgcctggagatcatgcagagaaccggcgcccacctggagctgagcctggccaaggaccagggcctgagcatcatggtgagcggcaagctggacgccgtgatgaaggccagaaaggacatcgtggccagactgcagacccaggccagcgccaccgtggccatccccaaggagcaccacagattcgtgatcggcaagaacggcgagaagctgcaggacctggagctgaagaccgccaccaagatccagatccccagacccgacgaccccagcaaccagatcaagatcaccggcaccaaggagggcatcgagaaggccagacacgaggtgctgctgatcagcgccgagcaggacaagagagccgtgtag

SEQ ID NO: 86835 - DNA, 3708 bp, Artificial Sequence
  derived and/or modified sequence
atgcacctggccgagagagacagatggctgttcgtggccaccgtgatgatgcacttcgtgagcatcaagagcggcttccccggcctgtgcgtgggcgtgagaagcaccatgagcagcgtggccgtgctgacccaggagagcttcgccgagcacagaagcggcctggtgccccagcagatcaaggtggccaccctgaacagcgaggaggagagcgacccccccacctacaaggacgccttcccccccctgcccgagaaggccgcctgcctggagagcgcccaggagcccagcggcgcctggggcaacaagatcagacccatcaaggccagcgtgatcacccaggtgttccacgtgcccctggaggagagaaagtacaaggacatgaaccagttcggcgagggcgagcaggccaagatctgcctggagatcatgcagagaaccggcgcccacctggagctgagcctggccaaggaccagggcctgagcatcatggtgagcggcaagctggacgccgtgatgaaggccagaaaggacatcgtggccagactgcagacccaggccagcgccaccgtggccatccccaaggagcaccacagattcgtgatcggcaagaacggcgagaagctgcaggacctggagctgaagaccgccaccaagatccagatccccagacccgacgaccccagcaaccagatcaagatcaccggcaccaaggagggcatcgagaaggccagacacgaggtgctgctgatcagcgccgagcaggacaagagagccgtggagagactggaggtggagaaggccttccaccccttcatcgccggcccctacaacagactggtgggcgagatcatgcaggagaccggcaccagaatcaacatccccccccccagcgtgaacagaaccgagatcgtgttcaccggcgagaaggagcagctggcccaggccgtggccagaatcaagaagatctacgaggagaaggccaacagcttcaccgtgagcagcgtggccgcccccagctggctgcacagattcatcatcggcaagaagggccagaacctggccaagatcacccagcagatgcccaaggtgcacatcgagttcaccgagggcgaggacaagatcaccctggagggccccaccgaggacgtgaacgtggcccaggagcagatcgagggcatggtgaaggacctgatcaacagaatggactacgtggagatcaacatcgaccacaagttccacagacacctgatcggcaagagcggcgccaacatcaacagaatcaaggaccagtacaaggtgagcgtgagaatcccccccgacagcgagaagagcaacctgatcagaatcgagggcgacccccagggcgtgcagcaggccaagagagagctgctggagctggccagcagaatggagaacgagagaaccaaggacctgatcatcgagcagagattccacagaaccatcatcggccagaagggcgagagaatcagagagatcagagacaagttccccgaggtgatcatcaacttccccgaccccgcccagaagagcgacatcgtgcagctgagaggccccaagaacgaggtggagaagtgcaccaagtacatgcagaagatggtggccgacctggtggagaacagctacagcatcagcgtgcccatcttcaagcagttccacaagaacatcatcggcaagggcggcgccaacatcaagaagatcagagaggagagcaacaccaagatcgacctgcccgccgagaacagcaacagcgagaccatcatcatcaccggcaagagagccaactgcgaggccgccagaagcagaatcctgagcatccagaaggacctggccaacatcgccgaggtggaggtgagcatccccgccaagctgcacaacagcctgatcggcaccaagggcagactgatcagaagcatcatggaggagtgcggcggcgtgcacatccacttccccgtggagggcagcggcagcgacaccgtggtgatcagaggccccagcagcgacgtggagaaggccaagaagcagctgctgcacctggccgaggagaagcagaccaagagcttcaccgtggacatcagagccaagcccgagtaccacaagttcctgatcggcaagggcggcggcaagatcagaaaggtgagagacagcaccggcgccagagtgatcttccccgccgccgaggacaaggaccaggacctgatcaccatcatcggcaaggaggacgccgtgagagaggcccagaaggagctggaggccctgatccagaacctggacaacgtggtggaggacagcatgctggtggaccccaagcaccacagacacttcgtgatcagaagaggccaggtgctgagagagatcgccgaggagtacggcggcgtgatggtgagcttccccagaagcggcacccagagcgacaaggtgaccctgaagggcgccaaggactgcgtggaggccgccaagaagagaatccaggagatcatcgaggacctggaggcccaggtgaccctggagtgcgccatcccccagaagttccacagaagcgtgatgggccccaagggcagcagaatccagcagatcaccagagacttcagcgtgcagatcaagttccccgacagagaggagaacgccgtgcacagcaccgagcccgtggtgcaggagaacggcgacgaggccggcgagggcagagaggccaaggactgcgaccccggcagccccagaagatgcgacatcatcatcatcagcggcagaaaggagaagtgcgaggccgccaaggaggccctggaggccctggtgcccgtgaccatcgaggtggaggtgcccttcgacctgcacagatacgtgatcggccagaagggcagcggcatcagaaagatgatggacgagttcgaggtgaacatccacgtgcccgcccccgagctgcagagcgacatcatcgccatcaccggcctggccgccaacctggacagagccaaggccggcctgctggagagagtgaaggagctgcaggccgagcaggaggacagagccctgagaagcttcaagctgagcgtgaccgtggaccccaagtaccaccccaagatcatcggcagaaagggcgccgtgatcacccagatcagactggagcacgacgtgaacatccagttccccgacaaggacgacggcaaccagccccaggaccagatcaccatcaccggctacgagaagaacaccgaggccgccagagacgccatcctgagaatcgtgggcgagctggagcagatggtgagcgaggacgtgcccctggaccacagagtgcacgccagaatcatcggcgccagaggcaaggccatcagaaagatcatggacgagttcaaggtggacatcagattcccccagagcggcgcccccgaccccaactgcgtgaccgtgaccggcctgcccgagaacgtggaggaggccatcgaccacatcctgaacctggaggaggagtacctggccgacgtggtggacagcgaggccctgcaggtgtacatgaagccccccgcccacgaggaggccaaggcccccagcagaggcttcgtggtgagagacgccccctggaccgccagcagcagcgagaaggcccccgacatgagcagcagcgaggagttccccagcttcggcgcccaggtggcccccaagaccctgccctggggccccaagagatag

SEQ ID NO: 86836 - DNA, 666 bp, Artificial Sequence
  derived and/or modified sequence
atgagcagcgtggccgtgctgacccaggagagcttcgccgagcacagaagcggcctggtgccccagcagatcaaggtggccaccctgaacagcgaggaggagagcgacccccccacctacaaggacgccttcccccccctgcccgagaaggccgcctgcctggagagcgcccaggagcccagcggcgcctggggcaacaagatcagacccatcaaggccagcgtgatcacccaggtgttccacgtgcccctggaggagagaaagtacaaggacatgaaccagttcggcgagggcgagcaggccaagatctgcctggagatcatgcagagaaccggcgcccacctggagctgagcctggccaaggaccagggcctgagcatcatggtgagcggcaagctggacgccgtgatgaaggccagaaaggacatcgtggccagactgcagacccaggccagcgccaccgtggccatccccaaggagcaccacagattcgtgatcggcaagaacggcgagaagctgcaggacctggagctgaagaccgccaccaagatccagatccccagacccgacgaccccagcaaccagatcaagatcaccggcaccaaggagggcatcgagaaggccagacacgaggtgctgctgatcagcgccgagcaggacaagtag

SEQ ID NO: 86837 - DNA, 426 bp, Artificial Sequence
  derived and/or modified sequence
atgagcagcgtggccgtgctgacccaggagagcttcgccgagcacagaagcggcctggtgccccagcagatcaaggtggccaccctgaacagcgaggaggagagcgacccccccacctacaaggacgccttcccccccctgcccgagaaggccgcctgcctggagagcgcccaggagcccagcggcgcctggggcaacaagatcagacccatcaaggccagcgtgatcacccaggtgttccacgtgcccctggaggagagaaagtacaaggacatgaaccagttcggcgagggcgagcaggccaagatctgcctggagatcatgcagagaaccggcgcccacctggagctgagcctggccaaggaccagggcctgagcatcatggtgagcggcaagctggacgccgtgatgaaggccagaaagtag

SEQ ID NO: 86838 - DNA, 381 bp, Artificial Sequence
  derived and/or modified sequence
atgagcagcgtggccgtgctgacccaggagagcttcgccgagcacagaagcggcctggtgccccagcagatcaaggtggccaccctgaacagcgaggaggagagcgacccccccacctacaaggacgccttcccccccctgcccgagaaggccgcctgcctggagagcgcccaggagcccagcggcgcctggggcaacaagatcagacccatcaaggccagcgtgatcacccaggtgttccacgtgcccctggaggagagaaagtacaaggacatgaaccagttcggcgagggcgagcaggccaagatctgcctggagatcatgcagagaaccggcgcccacctggagctgagcctggccaaggaccagggcctgagctag

SEQ ID NO: 86839 - DNA, 444 bp, Artificial Sequence
  derived and/or modified sequence
atgagcagcgtggccgtgctgacccaggagagcttcgccgagcacagaagcggcctggtgccccagcagatcaaggtggccaccctgaacagcgaggaggagagcgacccccccacctacaaggacgccttcccccccctgcccgagaaggccgcctgcctggagagcgcccaggagcccagcggcgcctggggcaacaagatcagacccatcaaggccagcgtgatcacccaggtgttccacgtgcccctggaggagagaaagtacaaggacatgaaccagttcggcgagggcgagcaggccaagatctgcctggagatcatgcagagaaccggcgcccacctggagctgagcctggccaaggaccagggcctgagcatcatggtgagcggcaagctggacgccgtgatgaaggccagaaaggacatcgtggccagactgtag

SEQ ID NO: 86840 - DNA, 495 bp, Artificial Sequence
  derived and/or modified sequence
atgagcagcgtggccgtgctgacccaggagagcttcgccgagcacagaagcggcctggtgccccagcagatcaaggtggccaccctgaacagcgaggaggagagcgacccccccacctacaaggacgccttcccccccctgcccgagaaggccgcctgcctggagagcgcccaggagcccagcggcgcctggggcaacaagatcagacccatcaaggccagcgtgatcacccaggtgttccacgtgcccctggaggagagaaagtacaaggacatgaaccagttcggcgagggcgagcaggccaagatctgcctggagatcatgcagagaaccggcgcccacctggagctgagcctggccaaggaccagggcctgagcatcatggtgagcggcaagctggacgccgtgatgaaggccagaaaggacatcgtggccagactgcagacccaggccagcgccaccgtggccatccccaaggagcaccacagattctag

SEQ ID NO: 86841 - protein, 61 aa, Artificial Sequence
  derived and/or modified sequence
MFTMKKSLLLLFFLGAISLSLCEQERDADEEETEGGAKVETVKRASVPPGFTPFRVAPEIV

SEQ ID NO: 86842 - protein, 382 aa, Artificial Sequence
  derived and/or modified sequence
MDGETAEEQGGPVPPPVAPGGPGLGGAPGGRREPKKYAVTDDYQLSKQVLGLGVNGKVLECFHRRTGQKCALKLLYDSPKARQEVDHHWQASGGPHIVCILDVYENMHHGKRCLLIIMECMEGGELFSRIQERGDQAFTEREAAEIMRDIGTAIQFLHSHNIAHRDVKPENLLYTSKEKDAVLKLTDFGFAKETTQNALQTPCYTPYYVAPEVLGPEKYDKSCDMWSLGVIMYILLCGFPPFYSNTGQAISPGMKRRIRLGQYGFPNPEWSEVSEDAKQLIRLLLKTDPTERLTITQFMNHPWINQSMVVPQTPLHTARVLQEDKDHWDEVKEEMTSALATMRVDYDQVKIKDLKTSNNRLLNKRRKKQAGSSSASQGCNNQ

SEQ ID NO: 86843 - protein, 332 aa, Artificial Sequence
  derived and/or modified sequence
MDGETAEEQGGPVPPPVAPGGPGLGGAPGGRREPKKYAVTDDYQLSKQVLGLGVNGKVLECFHRRTGQKCALKLLYDSPKARQEVDHHWQASGGPHIVCILDVYENMHHGKRCLLIIMECMEGGELFSRIQERGDQAFTEREAAEIMRDIGTAIQFLHSHNIAHRDVKPENLLYTSKEKDAVLKLTDFGFAKETTQNALQTPCYTPYYVAPEVLGPEKYDKSCDMWSLGVIMYILLCGFPPFYSNTGQAISPGMKRRIRLGQYGFPNPEWSEVSEDAKQLIRLLLKTDPTERLTITQFMNHPWINQSMVVPQTPLHTARVLQEDKDHWDEVK

SEQ ID NO: 86844 - protein, 119 aa, Artificial Sequence
  derived and/or modified sequence
MDGETAEEQGGPVPPPVAPGGPGLGGAPGGRREPKKYAVTDDYQLSKQVLGLGVNGKVLECFHRRTGQKCALKLLYDSPKARQEVDHHWQASGGPHIVCILDVYENMHHGKRCLLIIME

SEQ ID NO: 86845 - DNA, 1149 bp, Artificial Sequence
  derived and/or modified sequence
atggacggcgagaccgccgaggagcagggcggccccgtgcccccccccgtggcccccggcggccccggcctgggcggcgcccccggcggcagaagagagcccaagaagtacgccgtgaccgacgactaccagctgagcaagcaggtgctgggcctgggcgtgaacggcaaggtgctggagtgcttccacagaagaaccggccagaagtgcgccctgaagctgctgtacgacagccccaaggccagacaggaggtggaccaccactggcaggccagcggcggcccccacatcgtgtgcatcctggacgtgtacgagaacatgcaccacggcaagagatgcctgctgatcatcatggagtgcatggagggcggcgagctgttcagcagaatccaggagagaggcgaccaggccttcaccgagagagaggccgccgagatcatgagagacatcggcaccgccatccagttcctgcacagccacaacatcgcccacagagacgtgaagcccgagaacctgctgtacaccagcaaggagaaggacgccgtgctgaagctgaccgacttcggcttcgccaaggagaccacccagaacgccctgcagaccccctgctacaccccctactacgtggcccccgaggtgctgggccccgagaagtacgacaagagctgcgacatgtggagcctgggcgtgatcatgtacatcctgctgtgcggcttcccccccttctacagcaacaccggccaggccatcagccccggcatgaagagaagaatcagactgggccagtacggcttccccaaccccgagtggagcgaggtgagcgaggacgccaagcagctgatcagactgctgctgaagaccgaccccaccgagagactgaccatcacccagttcatgaaccacccctggatcaaccagagcatggtggtgccccagacccccctgcacaccgccagagtgctgcaggaggacaaggaccactgggacgaggtgaaggaggagatgaccagcgccctggccaccatgagagtggactacgaccaggtgaagatcaaggacctgaagaccagcaacaacagactgctgaacaagagaagaaagaagcaggccggcagcagcagcgccagccagggctgcaacaaccagtag

SEQ ID NO: 86846 - DNA, 999 bp, Artificial Sequence
  derived and/or modified sequence
atggacggcgagaccgccgaggagcagggcggccccgtgcccccccccgtggcccccggcggccccggcctgggcggcgcccccggcggcagaagagagcccaagaagtacgccgtgaccgacgactaccagctgagcaagcaggtgctgggcctgggcgtgaacggcaaggtgctggagtgcttccacagaagaaccggccagaagtgcgccctgaagctgctgtacgacagccccaaggccagacaggaggtggaccaccactggcaggccagcggcggcccccacatcgtgtgcatcctggacgtgtacgagaacatgcaccacggcaagagatgcctgctgatcatcatggagtgcatggagggcggcgagctgttcagcagaatccaggagagaggcgaccaggccttcaccgagagagaggccgccgagatcatgagagacatcggcaccgccatccagttcctgcacagccacaacatcgcccacagagacgtgaagcccgagaacctgctgtacaccagcaaggagaaggacgccgtgctgaagctgaccgacttcggcttcgccaaggagaccacccagaacgccctgcagaccccctgctacaccccctactacgtggcccccgaggtgctgggccccgagaagtacgacaagagctgcgacatgtggagcctgggcgtgatcatgtacatcctgctgtgcggcttcccccccttctacagcaacaccggccaggccatcagccccggcatgaagagaagaatcagactgggccagtacggcttccccaaccccgagtggagcgaggtgagcgaggacgccaagcagctgatcagactgctgctgaagaccgaccccaccgagagactgaccatcacccagttcatgaaccacccctggatcaaccagagcatggtggtgccccagacccccctgcacaccgccagagtgctgcaggaggacaaggaccactgggacgaggtgaagtag

SEQ ID NO: 86847 - DNA, 360 bp, Artificial Sequence
  derived and/or modified sequence
atggacggcgagaccgccgaggagcagggcggccccgtgcccccccccgtggcccccggcggccccggcctgggcggcgcccccggcggcagaagagagcccaagaagtacgccgtgaccgacgactaccagctgagcaagcaggtgctgggcctgggcgtgaacggcaaggtgctggagtgcttccacagaagaaccggccagaagtgcgccctgaagctgctgtacgacagccccaaggccagacaggaggtggaccaccactggcaggccagcggcggcccccacatcgtgtgcatcctggacgtgtacgagaacatgcaccacggcaagagatgcctgctgatcatcatggagtag

SEQ ID NO: 86848 - DNA, 1149 bp, Artificial Sequence
  derived and/or modified sequence
atggatggagaaactgccgaagagcagggtggacctgtgcctccacccgtggcaccaggcggtccaggcctgggcggagcccctgggggcaggagagagcctaaaaaatacgccgtgaccgacgattaccaactaagcaagcaggttttgggcttgggagtgaatggaaaagtgcttgagtgctttcaccggcgaaccggtcagaagtgcgccctgaagcttctgtatgacagcccaaaggctcgtcaggaggtggatcatcattggcaggcatcaggggggccccacatagtctgcatcctcgacgtgtatgagaacatgcaccatggcaagaggtgcttgttgatcattatggaatgcatggaggggggggagctgttctcacggatccaagagcgaggcgaccaggctttcactgaaagggaagccgcggagatcatgagagacataggaactgctatacaatttctgcacagtcacaatatagcccaccgcgacgtgaaaccagagaacctcctttacacctctaaagaaaaggacgccgtcctgaaactgaccgacttcggatttgcgaaagaaaccacccagaacgcactacagacaccatgctacactccatactacgtagcacctgaggtgctgggccccgaaaaatatgataaatcatgcgacatgtggagcctgggcgtgatcatgtacatcctgctgtgcgggttccctcccttctattcgaacacaggtcaggcaattagccccggaatgaaaaggaggatccgtctgggccagtatggcttcccgaatcctgaatggagcgaggtctctgaggatgctaagcaactcattcgtctgctgctgaaaactgatccgacagagcgcttgaccatcacacaatttatgaatcatccttggatcaaccaatccatggtggtgccccagactccacttcatacagcacgggtgctacaagaggacaaggaccactgggacgaggtgaaagaggagatgacttctgctctcgccaccatgcgggtcgactacgaccaggtgaaaattaaggatctaaagacaagtaataatcgactccttaacaagcggcgcaaaaaacaagctgggtcttcaagtgcttcccagggttgcaacaaccagtag

SEQ ID NO: 86849 - DNA, 999 bp, Artificial Sequence
  derived and/or modified sequence
atggatggcgagactgccgaggagcagggggggcccgtgcccccacccgtggcgccaggaggtccaggcctgggtggggcgccaggcggaagaagggaaccgaaaaagtatgccgtgacagatgactatcaattatctaagcaggttcttggactgggcgttaatggcaaggtcctggaatgttttcacagaagaaccggacagaaatgtgccctgaagctactgtacgatagcccaaaggctcgccaagaagtcgatcatcactggcaagccagcggagggcctcacattgtgtgtattctcgatgtgtacgaaaatatgcaccatgggaagaggtgtctgcttatcatcatggaatgcatggaggggggagaactgttcagccgcatccaagaaagaggtgaccaagccttcacagaaagggaggccgcagagataatgagggacataggtacagcaattcagttcctgcatagccacaatattgcccatagggacgtgaaacccgaaaatctgctgtacactagtaaggagaaggacgctgtcctcaagctgacagatttcggcttcgccaaggagacgacgcagaatgccctgcaaacaccttgttataccccttattacgtggccccagaggtcttaggcccagagaaatatgataagtcgtgcgacatgtggtctttaggtgtgattatgtatattttattatgtgggtttccgcctttttactcaaatactggacaggccattagtcccggcatgaaaagaagaattagactgggccagtatggttttcctaatccagagtggtccgaggtgtctgaggacgccaaacagctcattaggctactgctcaagacagatccgaccgagcggctgactatcacacagttcatgaatcacccctggatcaatcaatcaatggtagtcccccagaccccactacacactgcgcgcgtcctccaggaggataaggatcattgggacgaagtcaaatag

SEQ ID NO: 86850 - DNA, 1149 bp, Artificial Sequence
  derived and/or modified sequence
atggacggggagacagccgaggagcaaggaggtcctgtgccgcccccagtcgcccccggcggaccagggctgggaggcgccccgggtgggcgacgcgaaccaaaaaagtacgcagtgacagacgattatcagttgagcaagcaggtcctcggtcttggagtcaacggcaaggtgctggaatgctttcatcgacgcaccggacagaaatgcgcactgaagcttctttatgatagcccaaaggccagacaggaagtcgaccaccactggcaggcctcaggtggtcctcatatcgtttgcatccttgatgtgtacgagaatatgcatcatggaaagagatgtctgctcataatcatggagtgcatggaagggggagagctgttctcccgtatacaggagcgaggagaccaggcatttactgagcgggaggcagcggagataatgcgcgatattggaacagctatacagtttcttcactcacataacatcgcccaccgggatgtgaaacccgagaacctgctttatacaagcaaggagaaagacgcggtcctgaagttgactgacttcgggtttgccaaagagaccactcagaacgcactgcagacaccttgctacacaccttactatgtggctcctgaagtcctgggccctgaaaaatacgataagagctgcgatatgtggtctctcggagtgatcatgtatatcttgctctgcggcttcccgcctttttattccaataccggacaggctatttcaccaggcatgaagaggcggatccgccttggccagtatgggtttccaaaccccgagtggtctgaggtttcagaggacgcgaaacaactgatccgtttgttattaaagacggacccaaccgaaagactcaccataacacaatttatgaaccatccttggatcaaccagtcaatggtcgtgccacagactcccctgcataccgcccgcgtgctacaggaggacaaggatcattgggatgaggttaaagaggagatgaccagcgcattggccaccatgcgcgtcgactatgatcaggtgaaaatcaaagatcttaaaacgagcaacaaccggctgctaaacaaaagacggaagaagcaggcagggtcaagctctgcctcgcagggatgcaacaatcaatag

SEQ ID NO: 86851 - DNA, 360 bp, Artificial Sequence
  derived and/or modified sequence
atggatggtgaaacagccgaagagcaaggaggacctgtccctccccctgttgccccaggaggcccaggcctcggcggtgcccctggaggacgaagagaacccaaaaagtacgctgttactgatgactaccagctgtccaagcaggtgttgggcctcggggtgaatggtaaggtgcttgagtgtttccatcgtcgcaccggacagaaatgcgctctgaagcttctctatgacagccccaaagcacggcaggaggtggaccatcactggcaggcctccggcgggccccatatcgtctgcatcctggacgtctacgagaacatgcaccacggaaaacgttgcctgctaattataatggagtag

SEQ ID NO: 86852 - DNA, 1149 bp, Artificial Sequence
  derived and/or modified sequence
atggatggagaaacagctgaggagcagggcggccctgtgcccccacctgtggcccctgggggccctggcctgggcggggcccctgggggcagaagagagcccaagaagtatgctgtgacagatgactaccagctgagcaagcaggtgctgggcctgggcgtgaatggcaaggtgctggagtgcttccacagaagaacaggccagaagtgtgccctgaagctgctgtatgacagccccaaggcccggcaggaggtggaccaccactggcaggccagcggcggcccccacatcgtgtgcatcctggatgtgtatgagaacatgcaccacggcaagcgctgcctgctgatcatcatggagtgcatggagggcggggagctgttcagccgcatccaggagcggggggaccaggccttcacagagcgggaggccgctgagatcatgagggacatcggcacagccatccagttcctgcacagccacaacatcgcccacagagatgtgaagccagagaacctgctgtacaccagcaaggagaaggatgctgtgctgaagctgacagactttggatttgccaaggagaccacccagaatgccctgcagaccccctgctacaccccctactacgtggcccctgaggtgctgggccctgagaagtatgacaagagctgtgacatgtggagcctgggcgtcatcatgtacatcctgctgtgtggcttcccccccttctacagcaacacaggccaggccatcagccctggcatgaagaggcgcatccggctgggccagtatggcttccccaaccctgagtggagcgaggtgtctgaagatgccaagcagctgatccggctgctgctgaagacagaccccacagagcggctgaccatcacccagttcatgaaccacccctggatcaaccagagcatggtggtgccccagacccccctgcacacagcccgggtgctgcaggaggacaaggaccactgggatgaggtgaaggaggagatgaccagcgccctggccaccatgagggtggactatgaccaggtgaagatcaaggacctgaagaccagcaacaaccggctgctgaacaagaggaggaagaagcaggccggcagcagcagcgccagccagggctgcaacaaccagtag

SEQ ID NO: 86853 - DNA, 999 bp, Artificial Sequence
  derived and/or modified sequence
atggatggagaaacagctgaggagcagggcggccctgtgcccccacctgtggcccctgggggccctggcctgggcggggcccctgggggcagaagagagcccaagaagtatgctgtgacagatgactaccagctgagcaagcaggtgctgggcctgggcgtgaatggcaaggtgctggagtgcttccacagaagaacaggccagaagtgtgccctgaagctgctgtatgacagccccaaggcccggcaggaggtggaccaccactggcaggccagcggcggcccccacatcgtgtgcatcctggatgtgtatgagaacatgcaccacggcaagcgctgcctgctgatcatcatggagtgcatggagggcggggagctgttcagccgcatccaggagcggggggaccaggccttcacagagcgggaggccgctgagatcatgagggacatcggcacagccatccagttcctgcacagccacaacatcgcccacagagatgtgaagccagagaacctgctgtacaccagcaaggagaaggatgctgtgctgaagctgacagactttggatttgccaaggagaccacccagaatgccctgcagaccccctgctacaccccctactacgtggcccctgaggtgctgggccctgagaagtatgacaagagctgtgacatgtggagcctgggcgtcatcatgtacatcctgctgtgtggcttcccccccttctacagcaacacaggccaggccatcagccctggcatgaagaggcgcatccggctgggccagtatggcttccccaaccctgagtggagcgaggtgtctgaagatgccaagcagctgatccggctgctgctgaagacagaccccacagagcggctgaccatcacccagttcatgaaccacccctggatcaaccagagcatggtggtgccccagacccccctgcacacagcccgggtgctgcaggaggacaaggaccactgggatgaggtgaagtag

SEQ ID NO: 86854 - DNA, 360 bp, Artificial Sequence
  derived and/or modified sequence
atggatggagaaacagctgaggagcagggcggccctgtgcccccacctgtggcccctgggggccctggcctgggcggggcccctgggggcagaagagagcccaagaagtatgctgtgacagatgactaccagctgagcaagcaggtgctgggcctgggcgtgaatggcaaggtgctggagtgcttccacagaagaacaggccagaagtgtgccctgaagctgctgtatgacagccccaaggcccggcaggaggtggaccaccactggcaggccagcggcggcccccacatcgtgtgcatcctggatgtgtatgagaacatgcaccacggcaagcgctgcctgctgatcatcatggagtag

SEQ ID NO: 86855 - DNA, 1149 bp, Artificial Sequence
  derived and/or modified sequence
atggacggcgagaccgccgaggagcagggcggccccgtgcccccccccgtggccccaggtggtcctggactaggaggggccccaggcggccggagagagccaaagaaatacgcggtcactgacgactatcagctgagtaagcaggtgctggggctcggcgtaaacggcaaggttctcgaatgtttccaccgaaggacagggcagaaatgtgccctgaagttactgtacgattctcccaaggctcgacaggaagtggatcatcactggcaggcttcgggtggacctcacatcgtgtgtattctagatgtgtatgaaaacatgcatcatgggaagcgctgtctgctgatcataatggagtgtatggaaggtggggagcttttctctcgcattcaggagcggggagatcaggccttcaccgagagggaggcggcagagatcatgcgcgatatcgggaccgctatccaattcctgcactcacacaacatcgcacatcgggatgtcaagcctgagaacctcctgtataccagcaaggagaaggacgcagtactgaaactaacggacttcgggtttgccaaggagactacccaaaacgccctgcagactccctgttataccccttattatgtcgcccccgaggttcttggacctgaaaaatacgataaaagctgcgatatgtggagcctgggtgtgatcatgtacattctactatgcggttttccaccgttctattccaataccgggcaggccatcagcccagggatgaaaaggcgcatccgcttggggcagtacggtttcccgaacccagagtggagtgaggtgagcgaagacgctaagcagctgattcgactcctgctgaaaacagacccaactgagcgtctgactattacccaattcatgaaccacccgtggataaaccagtccatggtagttccccagactccgctgcacaccgcccgcgtcctgcaggaggataaagatcattgggatgaagtcaaagaggagatgaccagtgctctggccaccatgcgcgttgactacgaccaggtcaaaataaaagacctcaagacatctaacaacaggctgctcaacaagcgcagaaagaaacaggcgggctcctcaagcgcctcacagggatgcaataaccagtag

SEQ ID NO: 86856 - DNA, 999 bp, Artificial Sequence
  derived and/or modified sequence
atggacggcgagaccgccgaggagcagggcggccccgtgccccccccagtggctcccggggggccaggtcttggcggcgcaccgggtggccgccgggagccaaagaagtacgctgtaaccgacgattaccagctgtccaagcaggtgctggggctcggagttaatggaaaagtgctagagtgcttccaccgccggactggtcaaaagtgcgccttgaagttgctgtacgactctccaaaagccagacaggaggttgaccaccactggcaggcctctggggggccacacatagtgtgtattctggatgtgtacgagaacatgcatcatggcaaacgctgcctgctgatcattatggagtgcatggagggaggcgagctgttcagcagaatacaggaacgaggcgatcaagcttttactgaaagagaggctgcggagattatgagggacatcggcaccgcaatccagttcttacactctcacaatatcgctcacagggatgtgaagcctgagaacctgctgtatacttctaaagagaaggacgctgtactgaagctgaccgactttgggttcgctaaagaaaccacacagaacgccctgcagaccccctgttataccccctactacgtcgcccccgaagtgcttgggccagagaagtatgataaaagctgcgatatgtggtcccttggtgtgattatgtatatcctcctgtgcgggtttcccccattctactctaacacgggccaagcaatcagccctggcatgaaaagaagaatccggctcgggcagtacgggttcccaaatccagaatggtccgaggtaagcgaggacgcaaaacagctcattagactactgctgaagactgatccaactgaacgcctgaccatcacacagttcatgaatcacccttggatcaaccaatctatggtagtgccacagactccgctgcatactgcccgagttctccaggaagacaaagatcattgggatgaagtaaagtag

SEQ ID NO: 86857 - DNA, 1149 bp, Artificial Sequence
  derived and/or modified sequence
atggacggcgagaccgccgaggagcagggcggccccgtgcccccccctgtggctccaggtgggccaggcctgggcggggctcccgggggtaggcgcgagccgaaaaagtacgccgttaccgacgactaccagttgagtaaacaagttcttggccttggagtcaacggaaaggtactggagtgctttcaccggaggacaggccagaaatgtgctttgaagctactgtacgactctcctaaagccagacaggaggtggaccaccactggcaagcgagcggcggcccccatattgtgtgcatcctggacgtatatgagaatatgcatcacgggaaaaggtgtctcttaatcattatggaatgcatggagggaggtgagctcttttctcgcatccaagagcgtggtgaccaggccttcactgagagggaagcagcagagatcatgagggacattggaaccgctattcagttcctccattctcataatatcgctcaccgtgacgtaaagcctgaaaacttactctacacctccaaagagaaggacgccgtcctgaaattaaccgatttcggattcgcaaaagaaacgacccagaacgcactccagactccatgctacactccatattacgtggcccccgaggtgttgggccctgaaaagtatgacaagtcctgcgatatgtggagcttaggagttatcatgtacatcctcctgtgcggattccctcccttctactctaacacaggccaggccatttctccaggtatgaagaggcggattcgtctgggccagtatgggttccccaaccccgagtggtccgaggtcagcgaagatgcaaaacaactgattcgactcctgcttaaaacagatccaactgagcggctgaccattacccagtttatgaatcacccatggataaaccagtccatggttgtgccacaaacaccactccacacggctcgcgtcctacaggaggataaagaccattgggacgaagtcaaagaggaaatgacgagcgccctcgccacaatgcgagttgactacgaccaggttaagataaaggatttgaagacaagcaataatagattgctgaataaaaggcgcaagaagcaggccggttctagttccgcttcacaaggatgtaacaatcagtag

SEQ ID NO: 86858 - DNA, 360 bp, Artificial Sequence
  derived and/or modified sequence
atggacggcgagaccgccgaggagcagggcggccccgtgccccccccagtagcaccagggggtcctggcctcgggggcgcccccggagggaggcgagagccaaaaaagtatgcagtcaccgacgactatcagctgtcaaagcaggtcttgggactaggagtgaacggcaaagtcctagagtgctttcataggcgaacagggcagaagtgcgccctaaaactcctgtatgacagcccaaaggccagacaagaagtcgatcaccactggcaagcgagcggcgggcctcacatcgtatgcatcctcgacgtgtatgagaatatgcatcatggaaaaagatgtttgttgatcatcatggaatag

SEQ ID NO: 86859 - DNA, 2500 bp, Artificial Sequence
  derived and/or modified sequence
ctgcggccgccagctcccgcgaccgcctctcctgcccctcgccggtacctcagcaaggtgccactagaagcgccaggctggggccgcctctgagcgccccgcgggggccatggatggtgaaacagcagaggagcaggggggccctgtgcccccgccagttgcacccggcggacccggcttgggcggtgctccgggggggcggcgggagcccaagaagtacgcagtgaccgacgactaccagttgtccaagcaggtgctgggcctgggtgtgaacggcaaagtgctggagtgcttccatcggcgcactggacagaagtgtgccctgaagctcctgtatgacagccccaaggcccggcaggaggtagaccatcactggcaggcttctggcggcccccatattgtctgcatcctggatgtgtatgagaacatgcaccatggcaagcgctgtctcctcatcatcatggaatgcatggaaggtggtgagttgttcagcaggattcaggagcgtggcgaccaggctttcactgagagagaagctgcagagataatgcgggatattggcactgccatccagtttctgcacagccataacattgcccaccgagatgtcaagcctgaaaacctactctacacatctaaggagaaagacgcagtgcttaagctcaccgattttggctttgctaaggagaccacccaaaatgccctgcagacaccctgctatactccctattatgtggcccctgaggtcctgggtccagagaagtatgacaagtcatgtgacatgtggtccctgggtgtcatcatgtacatcctcctttgtggcttcccacccttctactccaacacgggccaggccatctccccggggatgaagaggaggattcgcctgggccagtacggcttccccaatcctgagtggtcagaagtctctgaggatgccaagcagctgatccgcctcctgttgaagacagaccccacagagaggctgaccatcactcagttcatgaaccacccctggatcaaccaatcgatggtagtgccacagaccccactccacacggcccgagtgctgcaggaggacaaagaccactgggacgaagtcaaggaggagatgaccagtgccttggccactatgcgggtagactacgaccaggtgaagatcaaggacctgaagacctctaacaaccggctcctcaacaagaggagaaaaaagcaggcaggcagctcctctgcctcacagggctgcaacaaccagtagctcatggggccttggaggagcctggcctctcagcctgcataacagactgaaatgtgctcaggccctggccaggagggcccagggtcattcttttaacaaaaggattattttgttgtgttttaatttgtcactcggaacttcaggatggaggaccctgaccctaaacctccttcagatctctggcccaggctcaagccctagagatgggcagggcctaggggctgggagctgcctgctgccatagcagcacctttagctaggttggcccgagtgaggcctctgtgctgtcctgccctggtgcatggccttagctttctaggccactgggagttgtggctgggcttcccatcttccacagagacatctccctgtgggatgggcagatgggcctggccttgagaaaggcattggccattggttgccatggtgaccagggaccacgttgctgcctgtgaatgctgagtgagcgagtaagggaggaggggcgattgagggttcacctctgccttggggaggctgatttctcacacactggctggccctctcattctcactcctccttgggccctgaggctgctggatccggtctgcctgcctccctgtgcagtccagccctgccttgctgcagccccagcccagatggcactcagcgctctcccctgagggagtccctgggcctagccatcccctcactattcccgacccaaagggtgacttttcatctgaacttaaggtgggagatatttttaacttttttccactttggaaaatgtcactgtgacaaaagccagcatactttccctgcacccatctgctcaccagatctcaggcaggaaagcccctctctgttgaagtcaggggctatcttttggtatacttgtgtgaaagtggctggttgggagcagagctaagtggcttcccattaacctgaggtctctttctttactctgggtcagacctgaggttggggaaggcgactgagccatgctcagaatgtctggtcctggcttgggcctgagtagggcagagagggcctttcctggctgatcagagcttaccagccccaccccaccatggtagccttagggtgctgagtgcctgatactgcctgacaagtgcctgacacgcagcctagttccttcctggcccctctctcactggctgggaaaccctagaccatgtcagataggacaacactgctgggttttacatccagatagtaataaacaccatttcatcatt

SEQ ID NO: 86860 - DNA, 1160 bp, Artificial Sequence
  derived and/or modified sequence
acgtgggcgccggcagcgcgactctcggccctgggatttctgcggccgccagctcccgcgaccgcctctcctgcccctcgccggtacctcagcaaggtgcgttgccgccaggtgccactagaagcgccaggctggggccgcctctgagcgccccgcgggggccatggatggtgaaacagcagaggagcaggggggccctgtgcccccgccagttgcacccggcggacccggcttgggcggtgctccgggggggcggcgggagcccaagaagtacgcagtgaccgacgactaccagttgtccaagcaggtgctgggcctgggtgtgaacggcaaagtgctggagtgcttccatcggcgcactggacagaagtgtgccctgaagctcctgtatgacagccccaaggcccggcaggaggtagaccatcactggcaggcttctggcggcccccatattgtctgcatcctggatgtgtatgagaacatgcaccatggcaagcgctgtctcctcatcatcatggaatgcatggaaggtggtgagttgttcagcaggattcaggagcgtggcgaccaggctttcactgagagagaagctgcagagataatgcgggatattggcactgccatccagtttctgcacagccataacattgcccaccgagatgtcaagcctgaaaacctactctacacatctaaggagaaagacgcagtgcttaagctcaccgattttggctttgctaaggagaccacccaaaatgccctgcagacaccctgctatactccctattatgtggcccctgaggtcctgggtccagagaagtatgacaagtcatgtgacatgtggtccctgggtgtcatcatgtacatcctcctttgtggcttcccacccttctactccaacacgggccaggccatctccccggggatgaagaggaggattcgcctgggccagtacggcttccccaatcctgagtggtcagaagtctctgaggatgccaagcagctgatccgcctcctgttgaagacagaccccacagagaggctgaccatcactcagttcatgaaccacccctggatcaaccaatcgatggtagtgccacagaccccactccacacggcccgagtgctgcaggaggacaaagaccactgggacgaagtcaagg

SEQ ID NO: 86861 - DNA, 2988 bp, Artificial Sequence
  derived and/or modified sequence
gggctgagcggtggggcccgggcggggtgcgcgggccccgtcgccgggtctggggccctgagcagtgaaaggaaatactttgacagatttccaagaactttccaggaaaacggggcggggccccgcgagctgaccaatcgcgacgctgaaggtggagccgagcggtcggggagggccaatagcagcgcgtggacccggggctgaagctacccagaggggcagggagtacttgctgcatttgatcctctacaactggtgttgctcccgttatgcggacagaagacagccccagggaacaaatgctaggaaatggcagggtgagaaaactgaggcatggagaggttacaatataacttagatctcccagctggcaagtaatggtttaagccaggagcctacacacttcctcctacttcctctatgggtgctggtgatctgccgactcctagacatccagctttaaggtcctcagtgaagcttctctgcccccaggcctgtccatgtcagagcaccatgggtgtccctttgaaagtatctcctacaggtgccactagaagcgccaggctggggccgcctctgagcgccccgcgggggccatggatggtgaaacagcagaggagcaggggggccctgtgcccccgccagttgcacccggcggacccggcttgggcggtgctccgggggggcggcgggagcccaagaagtacgcagtgaccgacgactaccagttgtccaagcaggtgctgggcctgggtgtgaacggcaaagtgctggagtgcttccatcggcgcactggacagaagtgtgccctgaagctcctgtatgacagccccaaggcccggcaggaggtagaccatcactggcaggcttctggcggcccccatattgtctgcatcctggatgtgtatgagaacatgcaccatggcaagcgctgtctcctcatcatcatggaatgcatggaaggtggtgagttgttcagcaggattcaggagcgtggcgaccaggctttcactgagagagaagctgcagagataatgcgggatattggcactgccatccagtttctgcacagccataacattgcccaccgagatgtcaagcctgaaaacctactctacacatctaaggagaaagacgcagtgcttaagctcaccgattttggctttgctaaggagaccacccaaaatgccctgcagacaccctgctatactccctattatgtggcccctgaggtcctgggtccagagaagtatgacaagtcatgtgacatgtggtccctgggtgtcatcatgtacatcctcctttgtggcttcccacccttctactccaacacgggccaggccatctccccggggatgaagaggaggattcgcctgggccagtacggcttccccaatcctgagtggtcagaagtctctgaggatgccaagcagctgatccgcctcctgttgaagacagaccccacagagaggctgaccatcactcagttcatgaaccacccctggatcaaccaatcgatggtagtgccacagaccccactccacacggcccgagtgctgcaggaggacaaagaccactgggacgaagtcaaggaggagatgaccagtgccttggccactatgcgggtagactacgaccaggtgaagatcaaggacctgaagacctctaacaaccggctcctcaacaagaggagaaaaaagcaggcaggcagctcctctgcctcacagggctgcaacaaccagtagctcatggggccttggaggagcctggcctctcagcctgcataacagactgaaatgtgctcaggccctggccaggagggcccagggtcattcttttaacaaaaggattattttgttgtgttttaatttgtcactcggaacttcaggatggaggaccctgaccctaaacctccttcagatctctggcccaggctcaagccctagagatgggcagggcctaggggctgggagctgcctgctgccatagcagcacctttagctaggttggcccgagtgaggcctctgtgctgtcctgccctggtgcatggccttagctttctaggccactgggagttgtggctgggcttcccatcttccacagagacatctccctgtgggatgggcagatgggcctggccttgagaaaggcattggccattggttgccatggtgaccagggaccacgttgctgcctgtgaatgctgagtgagcgagtaagggaggaggggcgattgagggttcacctctgccttggggaggctgatttctcacacactggctggccctctcattctcactcctccttgggccctgaggctgctggatccggtctgcctgcctccctgtgcagtccagccctgccttgctgcagccccagcccagatggcactcagcgctctcccctgagggagtccctgggcctagccatcccctcactattcccgacccaaagggtgacttttcatctgaacttaaggtgggagatatttttaacttttttccactttggaaaatgtcactgtgacaaaagccagcatactttccctgcacccatctgctcaccagatctcaggcaggaaagcccctctctgttgaagtcaggggctatcttttggtatacttgtgtgaaagtggctggttgggagcagagctaagtggcttcccattaacctgaggtctctttctttactctgggtcagacctgaggttggggaaggcgactgagccatgctcagaatgtctggtcctggcttgggcctgagtagggcagagagggcctttcctggctgatcagagcttaccagccccaccccaccatggtagccttagggtgctgagtgcctgatactgcctgacaagtgcctgacacgcagcctagttccttcctggcccctctctcactggctgggaaaccctagaccatgtcagataggacaacactgctgggttttacatccagatagtaataaacaccatttcatcattt

SEQ ID NO: 86862 - DNA, 535 bp, Artificial Sequence
  derived and/or modified sequence
ctcaggccgttcgtcccgcactcccagcttgccccgggctcgcagcccagcccagttcagaggctccaaggctggggtgtgttggaaaagtctgggcgggactcactcttcccctttcccccaggtgccactagaagcgccaggctggggccgcctctgagcgccccgcgggggccatggatggtgaaacagcagaggagcaggggggccctgtgcccccgccagttgcacccggcggacccggcttgggcggtgctccgggggggcggcgggagcccaagaagtacgcagtgaccgacgactaccagttgtccaagcaggtgctgggcctgggtgtgaacggcaaagtgctggagtgcttccatcggcgcactggacagaagtgtgccctgaagctcctgtatgacagccccaaggcccggcaggaggtagaccatcactggcaggcttctggcggcccccatattgtctgcatcctggatgtgtatgagaacatgcaccatggcaagcgctgtctcctcatcatcatggaatg

SEQ ID NO: 86863 - DNA, 1149 bp, Artificial Sequence
  derived and/or modified sequence
atggacggtgaaactgcagaggagcaggggggacctgtcccgccacccgttgccccaggtggccctggacttggaggagctcctggcggaaggcgggaacccaagaagtacgctgttactgacgactaccagcttagtaaacaagtgctcggtctcggagttaatggaaaagtcctcgaatgcttccatcggaggactggccagaagtgcgctttaaaactactgtatgatagtcccaaagcacggcaggaggtcgatcaccactggcaggcttccggcggaccacacatcgtctgtatcctggacgtatacgaaaacatgcatcatggtaagcgctgcctattaatcataatggaatgcatggagggtggcgagctgttcagtcgaatccaagagcgaggcgaccaggctttcaccgaacgggaagctgccgaaatcatgcgggatatcggaaccgctatccaattcttacatagccataacatcgctcaccgggacgtgaagcctgagaacctgctgtacacttccaaagagaaggacgcggtgttgaagttgaccgatttcgggttcgcaaaggagaccacccagaacgcattgcaaacgccatgttatacgccctattacgtcgcgccagaagtgttaggtcccgagaaatatgataagtcttgtgacatgtggagtcttggagtgattatgtacattctcctgtgtggttttccaccattctatagtaataccggtcaggctatttctcccggtatgaaacggaggatccggctgggacagtacggctttcctaatcccgagtggtcagaagtgtccgaggacgccaagcagcttatacgcttgctcctgaagacagacccaaccgaaagactgaccatcacccaattcatgaaccacccatggatcaatcagagcatggtcgtcccacagactcccctgcatacagcccgtgtgcttcaagaagataaggatcactgggacgaggtgaaagaagaaatgactagtgccctggcaacgatgcgagtagactacgaccaagtgaagattaaagacctgaagacaagtaacaaccgtctgctgaataaacggcgtaagaagcaggcgggaagctcttctgcctcccagggatgcaataaccaatag

SEQ ID NO: 86864 - DNA, 999 bp, Artificial Sequence
  derived and/or modified sequence
atggacggggaaactgctgaggaacagggcggtccggtcccaccacccgtggcccctggcggtccagggttgggtggagctcctggcggtcggcgagaacccaagaaatatgccgttactgacgactatcaactttccaagcaggtgctggggcttggcgtgaacgggaaggtgcttgaatgttttcaccggaggaccgggcagaagtgtgctctgaagctgctttatgacagtcctaaagccaggcaggaagtggaccaccattggcaggcatcgggcggaccgcacatcgtgtgcattctggatgtgtacgaaaatatgcatcacggcaaacgatgcctcctgatcataatggaatgtatggagggcggtgaattgttcagtaggatccaggagagaggcgaccaggccttcacagaaagagaagcggctgaaattatgcgcgacattggaactgctatccagtttctgcatagtcacaatatcgcacaccgggacgtcaaaccagaaaatctgctctatacctccaaagagaaggacgcggtgctgaagcttactgattttgggtttgccaaggagaccacccagaacgccctgcagacgccatgctacacgccttattacgtcgcgccagaggttctcgggccagagaaatatgacaagagttgtgacatgtggtccctgggcgtcattatgtacattctgctgtgcggcttccctccgttttatagcaatactggacaggctatatcccccggaatgaaaagaaggatccggctgggtcagtatgggttccctaaccctgagtggagcgaggtttccgaggacgcaaaacaattgatccggttacttttgaaaacagaccccaccgagagactcacaatcactcagttcatgaatcatccttggattaatcaaagcatggtggttccgcagacaccacttcataccgcacgtgtgttgcaggaagacaaggatcactgggacgaagtgaagtag

SEQ ID NO: 86865 - DNA, 1149 bp, Artificial Sequence
  derived and/or modified sequence
atggacggcgagacggcggaggagcagggaggcccagtcccccctcccgtggctcctgggggaccagggctggggggtgcccctggtgggagacgggaacctaagaaatatgctgtcaccgacgactaccagctcagtaagcaagtcctgggcctgggcgttaacggcaaggtactagagtgttttcaccggagaacagggcagaagtgcgccctcaaacttctctacgattctccaaaggctcgacaggaagttgaccaccactggcaggcgagcggcggaccccatatcgtatgtatcctggatgtctacgaaaatatgcaccacggcaagcgctgtttgttgattataatggagtgcatggagggtggcgagctgttttccaggatccaggaaagaggggaccaagccttcactgagcgggaggccgcagagataatgagggacattgggaccgccattcagtttctgcactcccacaacattgcacatcgcgacgtgaagccggagaatctcctgtatacgtctaaagagaaggatgccgtgcttaaactgacagattttggatttgccaaagaaacaacacagaacgcattgcaaaccccttgctacaccccatattatgtagccccagaagtgttaggacctgagaagtatgacaagagttgtgacatgtggtcactcggtgtaataatgtatatcctcctgtgcggatttcccccattctactcgaatacagggcaggcgattagcccaggtatgaaacgccgaatacgcctgggccagtatgggttcccgaatcccgaatggtcagaagttagtgaggatgcaaagcagctgattaggctgctgctgaagacagatcctactgagcgtttgaccattacacagttcatgaatcacccttggattaaccaatccatggtggtgccacagacccctctgcatacagctcgcgtgctacaggaagacaaagaccattgggatgaagtgaaggaagaaatgacaagcgcgcttgccactatgcgggtggactatgaccaggtgaaaatcaaagatctcaagacctcaaacaacaggttgctaaataaacgacgaaagaagcaggctggatcttccagtgcatcccagggctgcaataaccagtag

SEQ ID NO: 86866 - DNA, 360 bp, Artificial Sequence
  derived and/or modified sequence
atggacggcgaaaccgcggaagagcaaggcggtcccgtgccccctcccgtggcccctgggggacccggtttaggaggagctcctggcggacgaagggaaccaaagaaatacgcagttacagacgactatcagttaagcaagcaggtactgggtctgggggtcaacggcaaggtcttagagtgctttcatagaagaaccggacagaagtgtgcactgaagctgctgtacgactcgccgaaggccagacaggaggtcgatcaccactggcaagcctccgggggtccccacatagtctgtatccttgacgtgtacgagaatatgcaccacggcaagcgttgtcttctcatcattatggagtag

SEQ ID NO: 86867 - protein, 329 aa, Artificial Sequence
  derived and/or modified sequence
MFCVTPPELETKMNITKGGLVLFSANSNSSCMELSKKIAEDVNTTIMELLIMVYACKTSCAKSIIGVIPYFPYSKQCKMRKRGSIVSKLLASMMCKAGLTHLITMDLHQKEIQGFFNIPVDNLRASPFLLQYIQEEIPDYRNAVIVAKSPASAKRAQSFAERLRLGIAVIHGEAQDAESDLVDGRHSPPMVRSVAAIHPSLEIPMLIPKEKPPITVVGDVGGRIAIIVDDIIDDVDSFLAAAETLKERGAYKIFVMATHGLLSSDAPRRIEESAIDEVVVTNTIPHEVQKLQCPKIKTVDISMILSEAIRRIHNGESMSYLFRNIGLDD

SEQ ID NO: 86868 - protein, 78 aa, Artificial Sequence
  derived and/or modified sequence
MFCVTPPELETKMNITKGGLVLFSANSNSSCMELSKKIAENKSTNSRVCEGKRCFHHPNCFEGREHHHHGAPDHGVCM

SEQ ID NO: 86869 - DNA, 990 bp, Artificial Sequence
  derived and/or modified sequence
atgttttgtgtgactcctccagaactcgagactaaaatgaatatcacgaaaggtggactggtgctctttagcgctaactctaatagcagctgcatggaactttctaagaaaatcgccgaagacgttaacacaaccatcatggagctgttaattatggtgtatgcctgcaaaactagttgcgcaaagagtatcataggggtcataccctattttccctacagcaaacaatgtaaaatgagaaagcgggggtctatcgttagcaagttgctcgcgagtatgatgtgtaaagctggcctcactcacttgattaccatggacctgcaccagaaggaaattcaggggttctttaatatccccgtcgataacctgcgcgccagcccatttctgctccagtatatacaggaagagattcccgactaccgaaacgcggtcatcgtggcgaagagtccggccagcgctaagcgagctcaatcatttgcagagcggctacgcctgggcatagcggtcatccatggcgaggcgcaggacgcggaatccgatctggtggacggaagacactctcctcctatggttaggtctgttgctgcgattcatcccagcctcgaaatccctatgctgatccctaaggagaaacctcctatcactgtcgtcggtgacgtcggaggtagaattgctataattgtcgatgacatcatagatgatgtcgatagctttttggccgctgcagaaactctgaaggagcgcggagcctacaagatctttgtgatggctacccacggattgttgtctagcgatgccccacgccgaattgaggagagcgccattgacgaggtagttgtgacaaacacaatcccccacgaagtacagaagctgcagtgcccaaaaattaaaactgttgatattagtatgatactgtctgaagctattagaaggatccataatggtgaatcaatgtcctatctgtttaggaacatcggcctggatgattag

SEQ ID NO: 86870 - DNA, 237 bp, Artificial Sequence
  derived and/or modified sequence
atgttctgcgtcacccccccagagctcgagacaaagatgaacataacaaagggggggttagtgctcttctcggccaattcgaactccagttgcatggagctgagcaagaaaatcgcggagaacaagtctaccaacagtagagtgtgtgaagggaagcgctgcttccatcaccccaattgtttcgagggccgggaacaccatcaccatggggcgccagatcatggcgtatgtatgtag

SEQ ID NO: 86871 - DNA, 990 bp, Artificial Sequence
  derived and/or modified sequence
atgttctgtgtgaccccacctgagctggagaccaagatgaacatcaccaagggcggcctggtgctcttcagcgccaacagcaacagcagctgcatggagctgagcaagaagattgctgaagatgtgaacaccaccatcatggagctgctgatcatggtgtatgcctgcaagaccagctgtgccaagagcatcattggagtcatcccctacttcccctacagcaagcagtgcaagatgaggaagaggggcagcatcgtgtccaagctgctggcctccatgatgtgcaaggccggcctgacccacctgatcaccatggacctgcaccagaaggagatccagggcttcttcaacatccctgtggacaacctgcgggccagccccttcctgctgcagtacatccaggaggagatcccagactacagaaatgctgtgattgtggccaagagccctgccagcgccaagagggcccagagctttgctgagcggctgcggctgggcattgctgtgattcatggagaggcccaggatgctgagagtgacctggtggatggccgccacagcccccccatggtgcgctctgtggccgccatccaccccagcctggagatccccatgctgatccccaaggagaagccacccatcaccgtggtgggagatgtgggcggccgcatcgccatcatcgtggatgacatcattgatgatgtggacagcttcctggccgctgctgagaccctgaaggagcggggggcctacaagatctttgtgatggccacccacggcctgctgagcagtgatgccccccggcgcatcgaggagagcgccattgatgaggtggtggtgaccaacaccatcccccatgaggtgcagaagctgcagtgccccaagatcaagacagtggacatctccatgatcctgtctgaggccatccgccgcatccacaacggggagagcatgagctacctgttcagaaatattggcctggatgactag

SEQ ID NO: 86872 - DNA, 237 bp, Artificial Sequence
  derived and/or modified sequence
atgttctgtgtgaccccacctgagctggagaccaagatgaacatcaccaagggcggcctggtgctcttcagcgccaacagcaacagcagctgcatggagctgagcaagaagattgctgagaacaagagcaccaacagccgggtgtgtgagggcaagcgctgcttccaccaccccaactgctttgagggccgggagcaccaccaccacggggccccagaccacggcgtgtgcatgtag

SEQ ID NO: 86873 - DNA, 990 bp, Artificial Sequence
  derived and/or modified sequence
atgttctgcgtgaccccccccgagctggagaccaagatgaacatcaccaaaggcggtctcgtgctgttttctgctaattctaatagttcttgcatggagctgtctaaaaaaatcgccgaagacgtcaatactaccatcatggagctgctgataatggtctacgcatgcaaaacatcctgtgcaaagagcattatcggtgtgattccatactttccgtacagcaaacagtgtaagatgagaaagagggggagcattgtgtccaagctgttggctagtatgatgtgtaaagcaggtcttacccacctcatcaccatggatttgcaccagaaagaaatccaggggttcttcaacatccctgtggataatctgcgggcgagtcctttccttctccagtacatccaagaggaaatacctgactatcgtaatgccgtgatcgtggccaagtctcccgcgagcgcaaagcgggctcagagtttcgccgagcggctgaggttggggattgctgtcattcacggagaggctcaagacgctgaatccgatctcgtcgacgggagacattctcccccaatggtgagatcagtggctgctatccacccatcactggaaatccccatgctgatccccaaggagaagccgccaatcacagtagttggggacgtcggaggccggatcgccatcatcgttgatgatatcatagacgacgtcgacagcttccttgccgccgcggaaactctgaaagaacgcggcgcttataagatatttgtgatggctacccatgggttgctgagctcagacgctcctaggagaatcgaggaatccgcgatcgatgaagtggtcgtgaccaatactatcccccatgaagtgcagaaactccaatgccccaagatcaaaaccgtggacatctccatgatcctctccgaggcgatccggagaattcacaacggggaatctatgagctacctctttagaaacatcggcctggatgattag

SEQ ID NO: 86874 - DNA, 237 bp, Artificial Sequence
  derived and/or modified sequence
atgttctgcgtgaccccccccgagctggagaccaagatgaacatcactaaaggtggtctagtcctgttcagcgctaactctaatagtagctgcatggagctgagcaagaagattgccgaaaacaaaagtactaatagcagggtgtgtgaaggaaagcgatgctttcaccatcccaattgctttgagggcagggagcaccatcaccacggagccccagatcatggtgtgtgcatgtag

SEQ ID NO: 86875 - DNA, 1491 bp, Artificial Sequence
  derived and/or modified sequence
gttgtgaccggagttagatgccagcgcagaagggacgtgagcccagccgaggtaccgctgaagaggaatcaattttggaggaattttgttgtcagagaataaaaggaggttgtccataattgactttaagcagcaatcagtaaaacattgagctcttcagctccgcctttcttgctctgaaaattggaaaaccaagaaggttttgatgttttgtgtgacgccacctgaattagaaaccaagatgaacataaccaaaggtggtctggtgttgttttcagcaaactcgaattcatcatgtatggagctatcaaagaaaattgcagaggacgtgaacaccaccatcatggagctcctgatcatggtgtatgcatgtaagacctcttgtgccaagagcatcattggcgtgataccctactttccttacagcaagcagtgcaagatgagaaaaagaggctccattgtctctaaattgctggcttccatgatgtgcaaagctggtctaactcatcttattactatggatttacaccagaaggaaattcagggcttcttcaatattcctgttgacaatttaagagcatctcccttcttattacagtatattcaagaagagatcccagattacaggaatgcagtaatcgtggccaagtctccagcctcggcgaagagggcacagtcttttgctgagcgcctgcgcctgggaattgcagtgattcatggagaggcgcaggatgccgagtcggacttggtggatggacggcattccccacccatggtcagaagtgtggctgccatccaccccagcctggagatccccatgctgattcctaaagaaaagcccccaatcacggttgtgggtgatgttggaggaaggattgccatcatcgtggatgacatcattgatgatgttgacagctttcttgctgcagcagagaccctgaaggaaagaggtgcatataagatctttgtgatggcaactcatggcttgttgtcttctgacgccccccggcggattgaagagtctgccattgatgaggtggtggtcaccaatacaattccacatgaagtccagaagctccagtgccccaagattaaaactgtggatatcagcatgatcctttcagaggcgatccgtcggatccacaatggggagtccatgtcctaccttttcagaaacataggcttagatgactgagttttcctttaggaaaactcccgagggccaaactggaaacataagagtgactgctcggtgggatggatttcacaggaaccgtcatgcttgttcctccctctcccctgtaacctcacttcttattgattcctaagaagatagaccaactttttatgtcggtttgggtgtttgtgagtttggggagcaatttttataaaagaaaaactttattctcctcttttgaaaaggtaagacctcgttttagttgtaactgtttaaaaaataacacttggaataagatttgtaagctcacaaag

SEQ ID NO: 86876 - DNA, 990 bp, Artificial Sequence
  derived and/or modified sequence
atgttttgtgtgacccctcctgagttagaaactaagatgaatattacaaaaggcggactggtactattttctgccaatagcaattcatcctgtatggagctcagcaaaaaaatcgctgaggacgtcaacacaacaatcatggagctgctcatcatggtatacgcgtgcaagacaagctgcgctaaatcaataataggtgtcatcccgtattttccctacagcaagcaatgcaagatgcgcaaacgaggctcgatcgtgagtaagctgctcgccagtatgatgtgtaaagccggattaacgcacttgatcaccatggatctacaccaaaaggagatccaaggttttttcaatatccccgtagacaacctgagagcatctccctttcttttgcagtatatccaggaagaaatcccagattatcgaaacgcagtgattgttgcgaaatcgccagcatctgcgaagcgagcccaatcgttcgccgagcgcctaagacttggaatagctgttatacatggcgaggctcaggatgccgagtctgacttggtggacgggaggcactctcccccaatggtgaggtccgtcgccgcaattcatccctcgcttgaaattccaatgctaataccaaaggagaaacccccaattactgttgtcggcgatgttggaggtcgtatcgcaattattgtggatgatattatcgacgatgtagattcttttctcgccgctgccgagacattaaaagaacggggtgcttataagatttttgtcatggcaactcatggactcctgagttctgacgcgccacgacgcatcgaagagtctgccatcgatgaggtggtggttaccaatacgatacctcatgaggtccaaaagttgcaatgtccaaagatcaaaaccgtggacatatcgatgatcctgtcagaggcaatcagacggatacacaacggggaaagtatgtcatacctttttcgaaatataggactggatgactag

SEQ ID NO: 86877 - DNA, 237 bp, Artificial Sequence
  derived and/or modified sequence
atgttttgtgtaacaccccctgaattagagaccaagatgaacattacaaaagggggattggtgctgttctccgcgaacagcaactcttcctgcatggaattaagcaagaagatcgcagagaacaagtcaaccaactcccgcgtgtgcgagggtaagcggtgcttccatcatcccaattgctttgagggcagggagcaccatcatcacggggcacccgatcacggggtctgcatgtag

SEQ ID NO: 86878 - DNA, 990 bp, Artificial Sequence
  derived and/or modified sequence
atgttctgcgtgaccccccccgagctggagaccaagatgaacatcaccaagggcggcctggtgctgttcagcgccaacagcaacagcagctgcatggagctgagcaagaagatcgccgaggacgtgaacaccaccatcatggagctgctgatcatggtgtacgcctgcaagaccagctgcgccaagagcatcatcggcgtgatcccctacttcccctacagcaagcagtgcaagatgagaaagagaggcagcatcgtgagcaagctgctggccagcatgatgtgcaaggccggcctgacccacctgatcaccatggacctgcaccagaaggagatccagggcttcttcaacatccccgtggacaacctgagagccagccccttcctgctgcagtacatccaggaggagatccccgactacagaaacgccgtgatcgtggccaagagccccgccagcgccaagagagcccagagcttcgccgagagactgagactgggcatcgccgtgatccacggcgaggcccaggacgccgagagcgacctggtggacggcagacacagcccccccatggtgagaagcgtggccgccatccaccccagcctggagatccccatgctgatccccaaggagaagccccccatcaccgtggtgggcgacgtgggcggcagaatcgccatcatcgtggacgacatcatcgacgacgtggacagcttcctggccgccgccgagaccctgaaggagagaggcgcctacaagatcttcgtgatggccacccacggcctgctgagcagcgacgcccccagaagaatcgaggagagcgccatcgacgaggtggtggtgaccaacaccatcccccacgaggtgcagaagctgcagtgccccaagatcaagaccgtggacatcagcatgatcctgagcgaggccatcagaagaatccacaacggcgagagcatgagctacctgttcagaaacatcggcctggacgactag

SEQ ID NO: 86879 - DNA, 237 bp, Artificial Sequence
  derived and/or modified sequence
atgttctgcgtgaccccccccgagctggagaccaagatgaacatcaccaagggcggcctggtgctgttcagcgccaacagcaacagcagctgcatggagctgagcaagaagatcgccgagaacaagagcaccaacagcagagtgtgcgagggcaagagatgcttccaccaccccaactgcttcgagggcagagagcaccaccaccacggcgcccccgaccacggcgtgtgcatgtag

SEQ ID NO: 86880 - protein, 320 aa, Artificial Sequence
  derived and/or modified sequence
MFCVTPPELETKMNITKGGLVLFSANSNSSCMELSKKIAERLGVEMGKVQVYQEPNRETRVQIQESVRGKDVFIIQTVSKDVNTTIMELLIMVYACKTSCAKSIIGVIPYFPYSKQCKMRKRGSIVSKLLASMMCKAGLTHLITMDLHQKEIQGFFNIPVDNLRASPFLLQYIQEEIPDYRNAVIVAKSPASAKRAQSFAERLRLGIAVIHGEAQDAESDLVDGRHSPPMVRSVAAIHPSLEIPMLIPKEKPPITVVGDVGGRIAIIVVVVTNTIPHEVQKLQCPKIKTVDISMILSEAIRRIHNGESMSYLFRNIGLDD

SEQ ID NO: 86881 - DNA, 807 bp, Artificial Sequence
  derived and/or modified sequence
atgttttgcgtgactccccccgagctggaaaccaagatgaacatcacaaagggcggccttgtgttattctctgcaaatagcaatagtagttgtatggaactgtcaaagaagatcgccgagcgtctcggcgttgaaatgggtaaggtgcaggtctaccaggaaccaaatagagaaacaagggttcagatccaggaaagcgttagagggaaggatgtgttcatcatccagacggttagcaaggacgtcaacactaccatcatggaacttcttattatggtgtacgcatgcaaaacctcttgtgcgaagtcaataataggagttatcccatacttcccctactctaagcagtgcaagatgcgaaagcgcgggagcatcgtctctaagctcctggctagcatgatgtgcaaggctggccttacacacctgataacaatggacctgcaccagaaggagattcaaggcttcttcaatattccagtggataatctgagagcttccccttttctccttcaatacatacaggaggagattcctgattaccgaaatgcagtgatcgtggcgaagagccccgcctcggccaaacgtgcccagtcgtttgccgaacgcctgagattggggatcgctgtaattcacggggaagctcaggatgcagaatcggacctcgtggatggaagacatagcccgccaatggtcaggtcagtggcagccatccacccttctctggaaatccctatgttgatcccgaaagaaaaaccccccataacagtggtaggcgacgttgggggtaggatcgctatcattgtctag

SEQ ID NO: 86882 - DNA, 807 bp, Artificial Sequence
  derived and/or modified sequence
atgttttgtgtgacaccccccgagttggagacaaaaatgaatatcactaaaggtggtttggtgctattttctgccaattcaaactcctcctgcatggagctttctaaaaagattgcagagcggctcggggttgagatgggaaaagtgcaggtgtaccaggaacccaatcgcgagaccagggttcaaatccaagaatcggtgcggggtaaggatgtgtttatcattcagactgtgtcaaaggacgtgaacaccactatcatggagctgctgatcatggtgtacgcatgcaagacatcatgcgcaaaaagcatcattggagtgataccttacttcccctattcgaagcagtgcaagatgagaaagcgggggagcattgtttctaagctgttagcctccatgatgtgtaaagctggtctgacacatctcatcacaatggacttacatcagaaggagatccagggcttctttaacattcccgtggataacctacgggcaagtcctttcctgctgcagtatatccaggaggagatccccgattacaggaacgcagttattgtggccaaaagccccgcttccgctaaaagggcccagtccttcgctgagcgtctacgcctcgggattgctgtaatccacggtgaggcccaagacgcagaaagcgacctcgtagacggtcgtcactctcccccaatggttaggtctgtggcagctattcacccatctctggaaattcctatgctgattcctaaagaaaagcccccgatcacagtggtgggtgatgttggaggaagaattgcgataatcgtttag

SEQ ID NO: 86883 - DNA, 807 bp, Artificial Sequence
  derived and/or modified sequence
atgttttgcgtgacaccacccgaactcgaaacaaagatgaatattaccaaaggcgggttagttttattctccgccaactcaaattcatcttgtatggagctgtcgaagaagattgccgagagattaggtgttgaaatgggaaaggtgcaggtttatcaggagcctaatcgggagactcgggtacagatacaggaaagcgttagagggaaggatgtgtttattatacagaccgtgagtaaagacgtgaatacgaccatcatggagttacttataatggtgtacgcctgcaagacatcgtgcgccaagtctattatcggagttattccctactttccctactcaaaacagtgtaaaatgaggaagcggggctccatagtttccaagctcctggctagcatgatgtgcaaggccggactgacacatctgatcactatggacctgcatcagaaggaaatccagggcttcttcaatattcccgtagataatctgcgagcgtctccattcctgctccagtacatacaggaagaaattcccgactacagaaatgcagtgatcgtggccaagagcccagccagcgcgaagagggcccagtcatttgctgaacgtctgcggctggggatcgccgtcattcacggcgaagcccaggatgccgagtctgaccttgtcgatggcagacactcccccccgatggtgcggtccgtggctgccattcacccctctctggagattcccatgctcattcccaaggagaagccgcctattacagtggtgggcgacgtgggaggtagaattgccatcatcgtttag

SEQ ID NO: 86884 - DNA, 963 bp, Artificial Sequence
  derived and/or modified sequence
atgttttgtgtgaccccacccgaactggaaaccaagatgaacatcactaagggcggtctggtgctgttctccgcgaattccaactcatcgtgcatggagttgtctaagaaaattgccgagagactcggggtagagatgggcaaagtgcaggtttatcaggaacctaaccgggagacacgcgttcaaatccaggagagcgtgcgcggcaaagacgtgttcatcatccagaccgtctctaaagacgtgaataccaccattatggaactacttatcatggtctacgcatgcaagacatcatgcgcgaaatctattataggagtcattccctactttccctatagtaaacagtgtaagatgcgcaaaaggggaagcatagtttccaaattactggctagtatgatgtgtaaggccggcctaacacaccttatcaccatggacctccaccagaaagagattcagggattcttcaatatccccgtagataacctcagggcgagtccttttctgctgcaatacatacaagaagagattccagactatagaaatgccgtcattgtggccaagagccctgcaagtgccaagagggcccaatcatttgccgagaggttacggctgggcatcgccgtgatccacggcgaagcccaggatgctgagtctgatctggttgacgggagacattcccctcccatggtgcgaagcgtggccgcaattcacccaagcctggaaattccgatgcttatcccaaaagagaagccaccaatcactgtcgtcggcgacgtaggagggcgtatagcaataattgttgtagtggttaccaataccatcccccacgaagttcagaagcttcagtgccccaaaatcaagaccgtggacatcagcatgattctgagtgaggctatccggcgtatccataacggagagtcaatgtcttacctctttcgcaacattggcctggacgattag

SEQ ID NO: 86885 - DNA, 807 bp, Artificial Sequence
  derived and/or modified sequence
atgttctgtgtgaccccacctgagctggagaccaagatgaacatcaccaagggcggcctggtgctcttcagcgccaacagcaacagcagctgcatggagctgagcaagaagattgctgagcggctgggcgtggagatgggcaaggtgcaggtgtaccaggagcccaaccgggagaccagggtgcagatccaggagagcgtgcggggcaaggatgtgttcatcatccagacagtgtccaaggatgtgaacaccaccatcatggagctgctgatcatggtgtatgcctgcaagaccagctgtgccaagagcatcattggagtcatcccctacttcccctacagcaagcagtgcaagatgaggaagaggggcagcatcgtgtccaagctgctggcctccatgatgtgcaaggccggcctgacccacctgatcaccatggacctgcaccagaaggagatccagggcttcttcaacatccctgtggacaacctgcgggccagccccttcctgctgcagtacatccaggaggagatcccagactacagaaatgctgtgattgtggccaagagccctgccagcgccaagagggcccagagctttgctgagcggctgcggctgggcattgctgtgattcatggagaggcccaggatgctgagagtgacctggtggatggccgccacagcccccccatggtgcgctctgtggccgccatccaccccagcctggagatccccatgctgatccccaaggagaagccacccatcaccgtggtgggagatgtgggcggccgcatcgccatcatcgtgtag

SEQ ID NO: 86886 - DNA, 963 bp, Artificial Sequence
  derived and/or modified sequence
atgttctgtgtgaccccacctgagctggagaccaagatgaacatcaccaagggcggcctggtgctcttcagcgccaacagcaacagcagctgcatggagctgagcaagaagattgctgagcggctgggcgtggagatgggcaaggtgcaggtgtaccaggagcccaaccgggagaccagggtgcagatccaggagagcgtgcggggcaaggatgtgttcatcatccagacagtgtccaaggatgtgaacaccaccatcatggagctgctgatcatggtgtatgcctgcaagaccagctgtgccaagagcatcattggagtcatcccctacttcccctacagcaagcagtgcaagatgaggaagaggggcagcatcgtgtccaagctgctggcctccatgatgtgcaaggccggcctgacccacctgatcaccatggacctgcaccagaaggagatccagggcttcttcaacatccctgtggacaacctgcgggccagccccttcctgctgcagtacatccaggaggagatcccagactacagaaatgctgtgattgtggccaagagccctgccagcgccaagagggcccagagctttgctgagcggctgcggctgggcattgctgtgattcatggagaggcccaggatgctgagagtgacctggtggatggccgccacagcccccccatggtgcgctctgtggccgccatccaccccagcctggagatccccatgctgatccccaaggagaagccacccatcaccgtggtgggagatgtgggcggccgcatcgccatcatcgtggtggtggtgaccaacaccatcccccatgaggtgcagaagctgcagtgccccaagatcaagacagtggacatctccatgatcctgtctgaggccatccgccgcatccacaatggagagagcatgagctacctgttcaggaacatcggcctggatgactag

SEQ ID NO: 86887 - DNA, 807 bp, Artificial Sequence
  derived and/or modified sequence
atgttctgcgtgaccccccccgagctggagaccaagatgaacatcacaaagggcggattagtgttgttctccgccaacagcaactcctcttgtatggaacttagcaaaaagatcgcagagcggctgggtgtcgagatgggcaaggtgcaggtttatcaggaacctaatcgggagacacgcgtgcaaattcaagaaagtgtgcgaggaaaagatgtattcattatccagaccgtgagcaaggacgtgaatactacaatcatggaactcctcattatggtgtatgcatgcaaaacttcttgcgccaagtcgattatcggtgtgataccctactttccatatagtaagcagtgcaaaatgcgcaaaaggggcagtatagtgtctaagctgctcgcctcaatgatgtgcaaggctggtctgacacatctgattactatggaccttcaccaaaaggagattcagggattctttaacattccagtggacaaccttcgggcctcaccattcctgctgcagtacatccaggaggaaattccggattacagaaatgccgtcattgtagctaagtcaccagctagcgccaaacgagcacaatcattcgccgaacgacttcgcctgggaattgccgtcatacacggtgaagcgcaagacgccgagtccgacctagtagacggcagacacagccctcctatggtgagatcagttgccgcaatccatcccagtctggaaattccaatgctcatacccaaagagaagcctccaattaccgtcgttggcgatgttggtggaagaatagcgattattgtgtag

SEQ ID NO: 86888 - DNA, 807 bp, Artificial Sequence
  derived and/or modified sequence
atgttctgcgtgaccccccccgagctggagaccaagatgaacatcacgaaagggggtttagtactatttagcgcaaatagcaatagtagctgcatggagctctcaaagaaaatagcagaaaggctgggagtggaaatgggaaaagtgcaggtgtaccaagagccgaacagagagacccgggtgcagatccaagagtcagtgaggggcaaggatgtgttcatcatacagacggttagtaaggatgtcaatacaaccatcatggaactgctaatcatggtgtatgcctgcaagacaagctgcgcaaagtctatcattggggttattccctatttcccctactcgaagcagtgtaagatgcgaaagcgcggctctattgtgtccaaactccttgcttccatgatgtgcaaggccgggcttacgcatctgattacgatggacctccaccagaaagaaatccaggggttctttaatatccccgtcgacaacctccgagcctcacccttcttgttacagtatattcaagaggaaatcccagattatcgaaatgccgtcatcgtagccaaatcaccagcatcggccaagagagctcagagcttcgctgagagactgaggctggggatcgcagtcatccatggagaagcgcaggatgccgagagcgatctggtggatggcaggcattcaccacccatggtcaggagtgttgcagctatccaccccagtctcgagatccccatgttgattcccaaggagaaaccccctattacagtggtcggcgatgtcggaggacgaattgctatcattgtgtag

SEQ ID NO: 86889 - DNA, 807 bp, Artificial Sequence
  derived and/or modified sequence
atgttctgcgtgaccccccccgagctggagaccaagatgaacatcaccaaaggaggactcgtgctgttttcagcgaactcgaactcgtcctgcatggagttgagcaaaaagattgcggaacgcctaggggtggagatgggcaaagtgcaggtgtatcaggaacctaatcgcgagaccagagtgcagatacaagagagcgtacgagggaaggacgtatttatcatccagactgtgagcaaagacgttaacaccaccatcatggaactgcttatcatggtctacgcctgcaaaactagctgcgcgaagtccatcatcggagtgatcccgtactttccgtactctaaacaatgtaagatgcggaagagagggtccatcgtgagcaaactccttgcctccatgatgtgtaaggctggcctcacccatctcatcacaatggatctacatcagaaagagatccaggggttttttaacatccccgtggataatctgagggcctctccctttctactgcagtatatacaggaagagataccggactatcgaaacgccgtaatagtcgccaaaagccccgcctcagccaagagagcacaatcctttgcggagaggctaagattgggaatagccgtgatccatggggaagcacaagacgccgagtctgatttggtggacggccgtcacagccctcccatggtcagatccgttgctgcgatccatccctcacttgagattccaatgctgatccctaaggagaagccccccattaccgttgtgggggacgtcggtggaagaatagccatcatcgtatag

SEQ ID NO: 86890 - DNA, 963 bp, Artificial Sequence
  derived and/or modified sequence
atgttctgcgtgaccccccccgagctggagaccaagatgaacatcaccaaaggtggattggtgctgtttagcgccaattctaatagctcatgtatggagcttagtaagaaaatcgccgaacgattaggagtggaaatgggaaaagtccaggtgtaccaagagcccaacagggaaaccagagtgcaaatacaagagtccgtgcgcgggaaggacgtatttattatccagaccgtctctaaagatgtgaacaccaccataatggagcttctgatcatggtttatgcatgcaagaccagctgcgccaaaagtattatcggtgtgattccatattttccttatagcaagcaatgtaagatgcgaaagcggggctccatagtcagtaaactcctagcctccatgatgtgcaaggccgggctgacccatttgatcaccatggatttgcatcagaaagaaattcaaggctttttcaacatcccagtagacaacctgcgtgctagcccttttcttctgcagtatattcaggaggaaatccctgattatcggaatgccgtgatcgtcgccaagagcccagcctcggccaagcgcgcccaaagcttcgcagagcggcttcgtctagggattgctgtcatacatggggaggcccaggatgcagaatccgacctggtggacgggcgtcattctcctcccatggttcggagtgttgctgctattcacccctccctagagatccctatgcttatacccaaggagaagccgcccatcacagtagtgggcgacgtggggggcagaattgcgatcattgtggtggtcgtgaccaatacgataccccatgaggttcagaagcttcagtgccccaaaatcaaaaccgtcgatatctcaatgatcctgtctgaagctattagaaggatccacaatggggaaagtatgagctacttgttcagaaatatcggactggatgactag

SEQ ID NO: 86891 - DNA, 968 bp, Artificial Sequence
  derived and/or modified sequence
cgcagtcaccgcggacgccaatcttgtgcatggagtcgccattttgctcctagagaggccgccaggagacccggcgctttcttccttctgcagctgaggctgcggcggggccggggctggggtcggggccaggctctgaaaattggaaaaccaagaaggttttgatgttttgtgtgacgccacctgaattagaaaccaagatgaacataaccaaaggtggtctggtgttgttttcagcaaactcgaattcatcatgtatggagctatcaaagaaaattgcagagcggctaggggtggagatgggcaaagtgcaggtttaccaggaacctaacagagaaacaagagtacaaattcaagagtctgtgaggggaaaagatgttttcatcatccaaactgtttcgaaggacgtgaacaccaccatcatggagctcctgatcatggtgtatgcatgtaagacctcttgtgccaagagcatcattggcgtgataccctactttccttacagcaagcagtgcaagatgagaaaaagaggctccattgtctctaaattgctggcttccatgatgtgcaaagctggtctaactcatcttattactatggatttacaccagaaggaaattcagggcttcttcaatattcctgttgacaatttaagagcatctcccttcttattacagtatattcaagaagagatcccagattacaggaatgcagtaatcgtggccaagtctccagcctcggcgaagagggcacagtcttttgctgagcgcctgcgcctgggaattgcagtgattcatggagaggcgcaggatgccgagtcggacttggtggatggacggcattccccacccatggtcagaagtgtggctgccatccaccccagcctggagatccccatgctgattcctaaagaaaagcccccaatcacggttgtgggtgatgttggaggaaggattgccatcatcgtg

SEQ ID NO: 86892 - DNA, 931 bp, Artificial Sequence
  derived and/or modified sequence
aagggacgtgagcccagccgaggtaccgctgaagaggaatcaattttggtatgcagataatcactgggctcatgggtcttgctctttacaaagaggctctgaaaattggaaaaccaagaaggttttgatgttttgtgtgacgccacctgaattagaaaccaagatgaacataaccaaaggtggtctggtgttgttttcagcaaactcgaattcatcatgtatggagctatcaaagaaaattgcagagcggctaggggtggagatgggcaaagtgcaggtttaccaggaacctaacagagaaacaagagtacaaattcaagagtctgtgaggggaaaagatgttttcatcatccaaactgtttcgaaggacgtgaacaccaccatcatggagctcctgatcatggtgtatgcatgtaagacctcttgtgccaagagcatcattggcgtgataccctactttccttacagcaagcagtgcaagatgagaaaaagaggctccattgtctctaaattgctggcttccatgatgtgcaaagctggtctaactcatcttattactatggatttacaccagaaggaaattcagggcttcttcaatattcctgttgacaatttaagagcatctcccttcttattacagtatattcaagaagagatcccagattacaggaatgcagtaatcgtggccaagtctccagcctcggcgaagagggcacagtcttttgctgagcgcctgcgcctgggaattgcagtgattcatggagaggcgcaggatgccgagtcggacttggtggatggacggcattccccacccatggtcagaagtgtggctgccatccaccccagcctggagatccccatgctgattcctaaagaaaagcccccaatcacggttgtgggtgatgttggaggaaggattgccatcatcgtg

SEQ ID NO: 86893 - DNA, 1087 bp, Artificial Sequence
  derived and/or modified sequence
cgcccctccccgcccaccggcctcgcagtcaccgcggacgccaatcttgtgcatggagtcgccattttgctcctagagaggccgccaggagacccggcgctttcttccttctgcagctgaggctgcggcggggccggggctggggtcggggccaggaggaattttgttgtcagagaataaaaggaggttgtccataattgactttaagcagcaatcagtaaaacattgagctcttcagctccgcctttcttgctctgaaaattggaaaaccaagaaggttttgatgttttgtgtgacgccacctgaattagaaaccaagatgaacataaccaaaggtggtctggtgttgttttcagcaaactcgaattcatcatgtatggagctatcaaagaaaattgcagagcggctaggggtggagatgggcaaagtgcaggtttaccaggaacctaacagagaaacaagagtacaaattcaagagtctgtgaggggaaaagatgttttcatcatccaaactgtttcgaaggacgtgaacaccaccatcatggagctcctgatcatggtgtatgcatgtaagacctcttgtgccaagagcatcattggcgtgataccctactttccttacagcaagcagtgcaagatgagaaaaagaggctccattgtctctaaattgctggcttccatgatgtgcaaagctggtctaactcatcttattactatggatttacaccagaaggaaattcagggcttcttcaatattcctgttgacaatttaagagcatctcccttcttattacagtatattcaagaagagatcccagattacaggaatgcagtaatcgtggccaagtctccagcctcggcgaagagggcacagtcttttgctgagcgcctgcgcctgggaattgcagtgattcatggagaggcgcaggatgccgagtcggacttggtggatggacggcattccccacccatggtcagaagtgtggctgccatccaccccagcctggagatccccatgctgattcctaaagaaaagcccccaatcacggttgtgggtgatgttggaggaaggattgccatcatcgtg

SEQ ID NO: 86894 - DNA, 1047 bp, Artificial Sequence
  derived and/or modified sequence
cagctccgcctttcttgctctgaaaattggaaaaccaagaaggttttgatgttttgtgtgacgccacctgaattagaaaccaagatgaacataaccaaaggtggtctggtgttgttttcagcaaactcgaattcatcatgtatggagctatcaaagaaaattgcagagcggctaggggtggagatgggcaaagtgcaggtttaccaggaacctaacagagaaacaagagtacaaattcaagagtctgtgaggggaaaagatgttttcatcatccaaactgtttcgaaggacgtgaacaccaccatcatggagctcctgatcatggtgtatgcatgtaagacctcttgtgccaagagcatcattggcgtgataccctactttccttacagcaagcagtgcaagatgagaaaaagaggctccattgtctctaaattgctggcttccatgatgtgcaaagctggtctaactcatcttattactatggatttacaccagaaggaaattcagggcttcttcaatattcctgttgacaatttaagagcatctcccttcttattacagtatattcaagaagagatcccagattacaggaatgcagtaatcgtggccaagtctccagcctcggcgaagagggcacagtcttttgctgagcgcctgcgcctgggaattgcagtgattcatggagaggcgcaggatgccgagtcggacttggtggatggacggcattccccacccatggtcagaagtgtggctgccatccaccccagcctggagatccccatgctgattcctaaagaaaagcccccaatcacggttgtgggtgatgttggaggaaggattgccatcatcgtggtggtggtcaccaatacaattccacatgaagtccagaagctccagtgccccaagattaaaactgtggatatcagcatgatcctttcagaggcgatccgtcggatccacaatggggagtccatgtcctaccttttcagaaacataggcttagatgactgagttttcctttaggaaaactcccgagggccaaactgg

SEQ ID NO: 86895 - DNA, 807 bp, Artificial Sequence
  derived and/or modified sequence
atgttttgcgttacccctcctgagttggaaaccaaaatgaatatcactaagggaggattggtgctttttagcgccaactctaactcctcatgtatggaactctcaaagaagattgccgagcgcctgggggttgagatgggcaaggtgcaggtgtatcaggagcctaatcgggagacccgcgtgcagatccaggagagcgtccggggaaaagacgtgttcataatccagacagtctccaaagatgttaacactactataatggaattattgatcatggtctatgcctgcaaaacttcctgtgccaaatctatcattggagtgattccctacttcccttacagtaagcaatgtaaaatgaggaagaggggatccatagttagcaaattactcgcctctatgatgtgtaaggcaggactcacacatctcattaccatggacctgcatcagaaggaaatccaaggctttttcaacataccggtggataacctgagagcctcaccgttcctccttcagtacattcaggaggaaattccggactacaggaatgccgtcatcgtggctaagtctccagctagcgccaagcgggctcagtcttttgctgagcggctgaggctcggaattgcagtcatccacggcgaagctcaggacgccgagagtgacctggtggatggacgccatagtccacctatggttagatcggtggctgccatccacccttcattggaaattccgatgttaatcccaaaggaaaagccaccaatcacagtggtaggcgacgtaggtgggcgaattgctatcatcgtttag

SEQ ID NO: 86896 - DNA, 807 bp, Artificial Sequence
  derived and/or modified sequence
atgttttgtgtaactcccccagagctggagaccaagatgaacatcactaaaggaggactggtccttttctcggcaaacagcaacagtagttgtatggaattgtctaaaaagattgctgaacgcctcggcgtggaaatgggaaaagtgcaggtttatcaggagcccaaccgggaaactagggtacaaatccaggaatccgtgcgcggaaaagacgtctttattatacagacggtgagcaaggatgtgaataccaccattatggagcttcttatcatggtgtatgcttgtaaaacatcatgtgccaaaagcatcatcggagtgataccctactttccctacagtaagcagtgcaaaatgcgaaaacgcggatccatcgttagcaaacttttggcctccatgatgtgcaaagcaggtctaacacatctcatcacgatggacctgcaccagaaagaaattcagggttttttcaacatccctgtagataatctgagggccagccctttcctgcttcagtatatacaggaggaaatccccgattacagaaatgcagtgatcgtggccaaaagtcctgccagcgcaaaaagagcccagtcattcgccgaacggctccgcctggggatcgccgtaattcacggcgaagctcaggatgccgaatcagatcttgtggatggacggcatagcccacctatggtgaggagcgttgccgctatacaccctagcttggaaatccccatgctcatccccaaagaaaagcccccaataacagtggtcggcgacgtgggcggtagaattgcgatcatcgtctag

SEQ ID NO: 86897 - DNA, 807 bp, Artificial Sequence
  derived and/or modified sequence
atgttttgcgtgacaccacccgaactggaaacgaagatgaacatcaccaaaggcggactggtactgttttccgccaactctaattcaagctgtatggaactgtctaagaagattgctgaacggttaggggtagagatgggcaaagtgcaggtgtatcaggagcctaatcgggagacgcgggttcaaatacaagagtctgttcgagggaaggatgtgtttatcattcagaccgtaagtaaagatgtcaatacaacaataatggagctcctcattatggtgtacgcatgcaagaccagttgcgctaagtccatcataggcgttatcccatattttccctactctaagcagtgcaaaatgcgcaagagggggagcatcgtgtcgaaactactggcttcgatgatgtgcaaggcgggtctgactcatctgattactatggatctccatcagaaagagatacagggcttcttcaacataccggtggacaatctgcgggctagcccctttctgctgcaatatattcaggaagaaatcccagattatcggaacgccgtcatagtggcaaagagcccagccagcgccaagcgggcacaaagttttgcagaaaggctacgccttggcatagccgtgattcacggcgaagcacaagacgctgagtctgatctcgtggacgggcgacattctccgccaatggtgcggtctgtcgccgcaatccacccaagtcttgaaatcccaatgctgatccctaaagagaaaccacccatcacagtcgtgggagatgtaggaggaagaatagccatcatagtgtag

SEQ ID NO: 86898 - DNA, 963 bp, Artificial Sequence
  derived and/or modified sequence
atgttctgtgtgactccacccgaattggagacaaagatgaacatcaccaaaggcggactggttctgttctccgccaactcgaactcctcctgtatggagttgtccaaaaaaatagcagagaggttaggagtagaaatgggcaaggtgcaggtgtaccaggaacctaaccgtgaaacccgcgtacaaattcaggaatctgtaagggggaaggacgtttttattattcagactgtttccaaagacgttaacactacaattatggagttacttatcatggtctatgcctgcaagacctcctgtgccaagtccattataggcgtcatcccgtacttcccttatagcaaacagtgcaagatgagaaaacggggtagcattgtatccaagctgttggcgagcatgatgtgcaaagcgggactgacccacctgattaccatggacctgcatcaaaaggagatccagggctttttcaatatacccgtggataaccttcgcgctagccctttcctgctgcagtacattcaggaagaaatcccagactaccgcaacgctgtgattgtagcaaaaagcccagcctctgccaagagggcccagtccttcgccgaacgcttgagactgggcatcgcagtgatacatggggaagcccaggatgcagaatctgatctggttgacggccgacactcgcctcccatggttcgaagcgttgcggcaatccacccaagccttgagatcccaatgctgatccccaaagagaagccccctatcaccgtagttggcgacgtggggggaagaatcgctatcatcgttgttgtagtgacgaatacaatcccacatgaggtgcaaaagctgcaatgtcccaaaatcaagactgttgatatttctatgatcctttccgaggctattcgacgcatccacaatggcgaaagcatgtcgtatttgtttcgaaatataggactcgacgattag

SEQ ID NO: 86899 - DNA, 807 bp, Artificial Sequence
  derived and/or modified sequence
atgttctgcgtgaccccccccgagctggagaccaagatgaacatcaccaagggcggcctggtgctgttcagcgccaacagcaacagcagctgcatggagctgagcaagaagatcgccgagagactgggcgtggagatgggcaaggtgcaggtgtaccaggagcccaacagagagaccagagtgcagatccaggagagcgtgagaggcaaggacgtgttcatcatccagaccgtgagcaaggacgtgaacaccaccatcatggagctgctgatcatggtgtacgcctgcaagaccagctgcgccaagagcatcatcggcgtgatcccctacttcccctacagcaagcagtgcaagatgagaaagagaggcagcatcgtgagcaagctgctggccagcatgatgtgcaaggccggcctgacccacctgatcaccatggacctgcaccagaaggagatccagggcttcttcaacatccccgtggacaacctgagagccagccccttcctgctgcagtacatccaggaggagatccccgactacagaaacgccgtgatcgtggccaagagccccgccagcgccaagagagcccagagcttcgccgagagactgagactgggcatcgccgtgatccacggcgaggcccaggacgccgagagcgacctggtggacggcagacacagcccccccatggtgagaagcgtggccgccatccaccccagcctggagatccccatgctgatccccaaggagaagccccccatcaccgtggtgggcgacgtgggcggcagaatcgccatcatcgtgtag

SEQ ID NO: 86900 - DNA, 963 bp, Artificial Sequence
  derived and/or modified sequence
atgttctgcgtgaccccccccgagctggagaccaagatgaacatcaccaagggcggcctggtgctgttcagcgccaacagcaacagcagctgcatggagctgagcaagaagatcgccgagagactgggcgtggagatgggcaaggtgcaggtgtaccaggagcccaacagagagaccagagtgcagatccaggagagcgtgagaggcaaggacgtgttcatcatccagaccgtgagcaaggacgtgaacaccaccatcatggagctgctgatcatggtgtacgcctgcaagaccagctgcgccaagagcatcatcggcgtgatcccctacttcccctacagcaagcagtgcaagatgagaaagagaggcagcatcgtgagcaagctgctggccagcatgatgtgcaaggccggcctgacccacctgatcaccatggacctgcaccagaaggagatccagggcttcttcaacatccccgtggacaacctgagagccagccccttcctgctgcagtacatccaggaggagatccccgactacagaaacgccgtgatcgtggccaagagccccgccagcgccaagagagcccagagcttcgccgagagactgagactgggcatcgccgtgatccacggcgaggcccaggacgccgagagcgacctggtggacggcagacacagcccccccatggtgagaagcgtggccgccatccaccccagcctggagatccccatgctgatccccaaggagaagccccccatcaccgtggtgggcgacgtgggcggcagaatcgccatcatcgtggtggtggtgaccaacaccatcccccacgaggtgcagaagctgcagtgccccaagatcaagaccgtggacatcagcatgatcctgagcgaggccatcagaagaatccacaacggcgagagcatgagctacctgttcagaaacatcggcctggacgactag

SEQ ID NO: 86901 - protein, 120 aa, Artificial Sequence
  derived and/or modified sequence
MAAQRLGKRVLSKLQSPSRARGPGGSPGGLQKRHARVTVKYDRRELQRRLDVEKWIDGRLEELYRGMGLLKSCGKPVEDFIQELLAKLQGLHRQPGLRQPSPSHDGSLSPLQDRARTAHP

SEQ ID NO: 86902 - DNA, 363 bp, Artificial Sequence
  derived and/or modified sequence
atggccgcccagagactgggcaagagagtgctgagcaagctgcagagccccagcagagccagaggccccggcggcagccccggcggcctgcagaagagacacgccagagtgaccgtgaagtacgacagaagagagctgcagagaagactggacgtggagaagtggatcgacggcagactggaggagctgtacagaggcatgggcctgctgaagagctgcggcaagcccgtggaggacttcatccaggagctgctggccaagctgcagggcctgcacagacagcccggcctgagacagcccagccccagccacgacggcagcctgagccccctgcaggacagagccagaaccgcccacccctag

SEQ ID NO: 86903 - DNA, 363 bp, Artificial Sequence
  derived and/or modified sequence
atggcagctcagcggctaggaaagagggttctgtcaaagttacaaagcccatcacgtgctcggggccctggcggctctccaggtgggcttcagaagaggcatgctcgggttacggtcaaatacgatcgacgagagcttcaaagacggctggacgtcgaaaagtggattgacgggaggctggaggaactctataggggaatgggtcttctgaaatcttgtgggaaacctgttgaagactttattcaggaattactggccaaactccaaggactgcacaggcagcctggtctgcgtcagccgtccccgagtcacgacggctccctgtctcccctgcaggacagagccagaacagcccacccttag

SEQ ID NO: 86904 - DNA, 363 bp, Artificial Sequence
  derived and/or modified sequence
atggccgcccagaggctgggcaagagggtgctgagcaagctgcagagccccagccgggcccggggccctgggggcagccctgggggcctgcagaagagacatgcccgggtgacagtgaagtatgacagaagagagctgcagaggcggctggatgtggagaagtggattgatggccgcctggaggagctgtaccggggcatgggcctgctgaagagctgtgggaagcctgtggaggacttcatccaggagctgctggccaagctgcagggcctgcaccggcagcccggcctgcggcagcccagccccagccatgatggcagcctgagccccctgcaggaccgggccaggacagcccacccctag

SEQ ID NO: 86905 - DNA, 363 bp, Artificial Sequence
  derived and/or modified sequence
atggccgcccagcggctgggcaagcgggtgctgagcaagctgcagagtccttctagagccaggggacctggtggaagccccggaggattgcagaagcgtcacgctcgcgtcaccgtcaagtacgacagaagagagctgcagcggcggctcgatgtggagaaatggattgacggacggctcgaggagctttatagaggaatgggactgttaaaatcctgcgggaagcccgtagaggacttcattcaggaacttcttgcaaaactgcaagggttacacaggcagccaggcctgcgtcagccatcccctagccatgacggttccctttcgcctctacaggaccgtgcaagaaccgcccatccatag

SEQ ID NO: 86906 - DNA, 363 bp, Artificial Sequence
  derived and/or modified sequence
atggccgcacaacgactcggaaagagagttttgagcaaactgcagtctccttcccgcgcaaggggtccaggtggatcccccggaggcctgcagaagaggcatgctagagtaacagttaagtatgacaggcgtgaattacagcgaagactcgatgtggaaaagtggatcgatggcaggctggaggagctctatcggggtatgggcttactgaaatcttgcgggaagccagtcgaagatttcatccaggagttgttagcaaaactgcaggggcttcaccggcaaccaggcctccggcaaccttcgccatcccacgacggctccctgagtcccctccaggacagggctcgcacagcacatccctag

SEQ ID NO: 86907 - DNA, 696 bp, Artificial Sequence
  derived and/or modified sequence
gcagggacccgcccgggactctgggtccccgcccatacctcaacttcgcacgactgcgtgcctcaagccgacgcagcggcctactctcgcactgcagacggggaaactgaggcctgaggcggccggggtggggcagacctcccggcgagcccgagcccccgcccccggctagccccgccctggcccgtaagaagcacccggggcgcgaggcgaaggcgcacagcgcggggccaggctgggtccagcagcgcgatggcagctcagcggctgggcaagcgcgtgctgagcaagctgcagtctccatcgcgggcccgcgggccagggggcagtcccggggggctgcagaagcggcacgcgcgcgtcaccgtcaagtatgaccggcgggagctgcagcggcggctggacgtggagaagtggatcgacgggcgcctggaggagctgtaccgcggcatgggactcctgaagtcatgtgggaaacctgtcgaggacttcatccaggagctgctggcaaagcttcaaggcctccacaggcagcccggcctccgccagccaagcccctcccacgacggcagcctcagccccctccaggaccgggcccggactgctcacccctgaccctcttgcactctccctgccccccggacgccgcccagcttgcttgtgtataagttgtatttaatggttctgtaacaataa

SEQ ID NO: 86908 - protein, 686 aa, Artificial Sequence
  derived and/or modified sequence
MGRIHQAMVTSLNEDNESVTVEWIENGDTKGKEIDLESIFSLNPDLVPDEEIEPSPETPPPPASSAKVNKIVKNRRTVASIKNDPPSRDNRVVGSARARPSQFPEQSSSAQQNGSVSDISPVQAAKKEFGPPSRRKSNCVKEVEKLQEKREKRRLQQQELREKRAQDVDATNPNYEIMCMIRDFRGSLDYRPLTTADPIDEHRICVCVRKRPLNKKETQMKDLDVITIPSKDVVMVHEPKQKVDLTRYLENQTFRFDYAFDDSAPNEMVYRFTARPLVETIFERGMATCFAYGQTGSGKTHTMGGDFSGKNQDCSKGIYALAARDVFLMLKKPNYKKLELQVYATFFEIYSGKVFDLLNRKTKLRVLEDGKQQVQVVGLQEREVKCVEDVLKLIDIGNSCRTSGQTSANAHSSRSHAVFQIILRRKGKLHGKFSLIDLAGNERGADTSSADRQTRLEGAEINKSLLALKECIRALGRNKPHTPFRASKLTQVLRDSFIGENSRTCMIATISPGMASCENTLNTLRYANRVKELTVDPTAAGDVRPIMHHPPNQIDDLETQWGVGSSPQRDDLKLLCEQNEEEVSPQLFTFHEAVSQMVEMEEQVVEDHRAVFQESIRWLEDEKALLEMTEEVDYDVDSYATQLEAILEQKIDILTELRDKVKSFRAALQEEEQASKQINPKRPRAL

SEQ ID NO: 86909 - DNA, 2061 bp, Artificial Sequence
  derived and/or modified sequence
atgggcagaatccaccaggccatggtgaccagcctgaacgaggacaacgagagcgtgaccgtggagtggatcgagaacggcgacaccaagggcaaggagatcgacctggagagcatcttcagcctgaaccccgacctggtgcccgacgaggagatcgagcccagccccgagaccccccccccccccgccagcagcgccaaggtgaacaagatcgtgaagaacagaagaaccgtggccagcatcaagaacgacccccccagcagagacaacagagtggtgggcagcgccagagccagacccagccagttccccgagcagagcagcagcgcccagcagaacggcagcgtgagcgacatcagccccgtgcaggccgccaagaaggagttcggcccccccagcagaagaaagagcaactgcgtgaaggaggtggagaagctgcaggagaagagagagaagagaagactgcagcagcaggagctgagagagaagagagcccaggacgtggacgccaccaaccccaactacgagatcatgtgcatgatcagagacttcagaggcagcctggactacagacccctgaccaccgccgaccccatcgacgagcacagaatctgcgtgtgcgtgagaaagagacccctgaacaagaaggagacccagatgaaggacctggacgtgatcaccatccccagcaaggacgtggtgatggtgcacgagcccaagcagaaggtggacctgaccagatacctggagaaccagaccttcagattcgactacgccttcgacgacagcgcccccaacgagatggtgtacagattcaccgccagacccctggtggagaccatcttcgagagaggcatggccacctgcttcgcctacggccagaccggcagcggcaagacccacaccatgggcggcgacttcagcggcaagaaccaggactgcagcaagggcatctacgccctggccgccagagacgtgttcctgatgctgaagaagcccaactacaagaagctggagctgcaggtgtacgccaccttcttcgagatctacagcggcaaggtgttcgacctgctgaacagaaagaccaagctgagagtgctggaggacggcaagcagcaggtgcaggtggtgggcctgcaggagagagaggtgaagtgcgtggaggacgtgctgaagctgatcgacatcggcaacagctgcagaaccagcggccagaccagcgccaacgcccacagcagcagaagccacgccgtgttccagatcatcctgagaagaaagggcaagctgcacggcaagttcagcctgatcgacctggccggcaacgagagaggcgccgacaccagcagcgccgacagacagaccagactggagggcgccgagatcaacaagagcctgctggccctgaaggagtgcatcagagccctgggcagaaacaagccccacacccccttcagagccagcaagctgacccaggtgctgagagacagcttcatcggcgagaacagcagaacctgcatgatcgccaccatcagccccggcatggccagctgcgagaacaccctgaacaccctgagatacgccaacagagtgaaggagctgaccgtggaccccaccgccgccggcgacgtgagacccatcatgcaccacccccccaaccagatcgacgacctggagacccagtggggcgtgggcagcagcccccagagagacgacctgaagctgctgtgcgagcagaacgaggaggaggtgagcccccagctgttcaccttccacgaggccgtgagccagatggtggagatggaggagcaggtggtggaggaccacagagccgtgttccaggagagcatcagatggctggaggacgagaaggccctgctggagatgaccgaggaggtggactacgacgtggacagctacgccacccagctggaggccatcctggagcagaagatcgacatcctgaccgagctgagagacaaggtgaagagcttcagagccgccctgcaggaggaggagcaggccagcaagcagatcaaccccaagagacccagagccctgtag

SEQ ID NO: 86910 - DNA, 243 bp, Artificial Sequence
  derived and/or modified sequence
atggtgaccagcctgaacgaggacaacgagagcgtgaccgtggagtggatcgagaacggcgacaccaagggcaaggagatcgacctggagagcatcttcagcctgaaccccgacctggtgcccgacgaggagatcgagcccagccccgagaccccccccccccccgccagcagcgccaaggtgaacaagatcgtgaagaacagaagaaccgtggccagcatcaagaacgacccccccagctag

SEQ ID NO: 86911 - DNA, 2061 bp, Artificial Sequence
  derived and/or modified sequence
atgggcaggattcatcaggcaatggtgaccagcctaaacgaagacaacgagagtgtaaccgtggagtggattgagaatggggacactaagggaaaggaaattgaccttgagtcgattttcagcttgaaccccgatcttgtcccggacgaggagatagaacctagccccgaaacaccccccccgccagcatcttcagctaaagtcaacaaaattgttaaaaaccggcgaaccgtggcctctatcaagaacgaccccccctctcgggataatagagtggtaggaagcgctcgagccaggccatcccagtttcctgaacaatctagcagtgcccaacagaatggtagcgtctccgacattagtccagtgcaagctgcgaagaaagaatttggcccccccagccgacgcaaaagtaattgcgtgaaagaggtcgagaaactccaagagaaacgggagaaacgccgattgcaacagcaagagctccgcgaaaagcgtgctcaggatgttgacgccacaaaccctaattacgaaatcatgtgcatgattagggatttccggggttcactggattacagacctctgactaccgccgaccccattgatgagcaccggatctgtgtctgcgtgaggaagcggccactaaataagaaagagacccagatgaaagacctggacgtcattactatcccttccaaagacgtggtgatggtccacgaacccaaacagaaagtggatctgacccggtatctggaaaaccagaccttcaggttcgactacgcatttgacgacagcgctccaaacgagatggtgtaccgatttactgcccgccctctggtcgagacaattttcgagagagggatggctacctgtttcgcctacggtcagacgggcagcggaaaaacccatactatgggtggtgatttcagcggaaagaaccaagattgtagcaaggggatctatgcccttgccgcacgggatgtctttttgatgctgaaaaaaccgaactataaaaaactggagctgcaggtttacgccaccttcttcgaaatttatagtgggaaggtgtttgacttactgaatcgtaagacaaaacttagggtgttggaggatggaaaacagcaggtccaagtcgtggggctccaggagcgggaggtgaagtgcgtagaagacgtactaaagttgattgatatcggaaacagttgccgaacgtctggacagacttcagcgaacgcacattcctcccggtcccacgccgtgtttcagattatccttaggaggaaaggaaagttgcacggcaagttcagcttgatcgacttggccggaaacgagaggggcgctgacacctcctccgccgacagacagaccagactggagggcgctgagattaataaatccctcctggcactcaaagaatgtatacgagccctgggacggaataagccacacaccccatttagggcttccaaactcactcaagtcctgagagactccttcatcggtgaaaatagtaggacttgcatgatcgccacaattagcccgggcatggcttcctgcgagaacacactgaataccctacgatatgccaaccgggtgaaggaactgaccgtggaccccaccgctgctggggacgtgcgccccatcatgcaccacccaccgaaccagatcgatgatttagagacgcagtggggagtaggatcatcaccacagagggacgacttgaagctgctctgtgagcaaaatgaagaagaggtctctccccaactctttacatttcacgaagcggtgagccagatggttgagatggaagagcaagttgttgaagaccacagggccgtttttcaggaaagtatcaggtggttggaagatgaaaaggcgctgctggagatgacggaggaggtcgactatgatgtagacagttatgcaacccagctagaagccatccttgaacagaagatagacatactcaccgaactacgtgacaaagtaaagagtttcagagcagccctgcaggaagaggagcaggcgagcaagcaaattaatcctaaaagaccaagagccctgtag

SEQ ID NO: 86912 - DNA, 243 bp, Artificial Sequence
  derived and/or modified sequence
atggtcaccagcctgaacgaggacaacgagtccgtgacagttgaatggattgagaatggtgacactaaggggaaagagattgatttggaatctattttttccctgaatcctgaccttgtacctgacgaggagattgagccatcacctgaaacacccccaccacctgccagctccgccaaggttaacaagatcgttaagaacagacgaaccgttgcttccatcaagaacgacccacctagttag

SEQ ID NO: 86913 - DNA, 2061 bp, Artificial Sequence
  derived and/or modified sequence
atgggccgcatccaccaggccatggtgaccagcctgaatgaagataatgaatctgtgacagtggagtggattgaaaatggagacaccaagggcaaggagattgacctggagagcatcttcagcctgaacccagacctggtgcctgatgaggagattgagcccagccctgagaccccacctcctccagccagcagcgccaaggtgaacaagatcgtgaagaacagaagaacagtggccagcatcaagaatgacccccccagccgggacaacagagtggtgggcagcgcccgggcccggcccagccagtttcctgagcagagcagcagcgcccagcagaatggatctgtgtctgacatcagccctgtgcaggccgccaagaaggagtttggaccacccagcaggaggaagagcaactgtgtgaaggaggtggagaagctgcaggagaagcgggagaagaggcggctgcagcagcaggagctgcgggagaagagggcccaggatgtggatgccaccaaccccaactatgagatcatgtgcatgatccgggacttccggggcagcctggactaccggcccctgaccacagctgaccccattgatgagcaccgcatctgtgtgtgtgtgaggaagaggcccctgaacaagaaggagacccagatgaaggacctggatgtgatcaccatccccagcaaggatgtggtgatggtgcatgagcccaagcagaaggtggacctgacccgctacctggagaaccagaccttccgctttgattatgcctttgatgattctgccccaaatgagatggtgtaccgcttcaccgcccggcccctggtggagaccatctttgagcggggcatggccacctgctttgcctacggccagacaggcagcggcaagacccacaccatgggcggggacttcagcggcaagaaccaggactgcagcaagggcatctatgccctggccgccagagatgtgttcctgatgctgaagaagcccaactacaagaagctggagctgcaggtgtatgccaccttctttgagatctacagcggcaaggtgtttgacctgctgaacaggaagaccaagctgcgggtgctggaggatggcaagcagcaggtgcaggtggtgggcctgcaggagcgggaggtgaagtgtgtggaggatgtgctgaagctgattgacatcggcaacagctgcaggaccagcggccagaccagcgccaatgcccacagcagccgcagccatgctgtgttccagatcatcctgcggaggaagggcaagctgcacggcaagttcagcctgattgacctggccggaaatgaaagaggagctgacaccagcagcgctgaccggcagacccggctggagggcgctgagatcaacaagagcctgctggccctgaaggagtgcatccgggccctgggcaggaacaagccccacacccccttccgggccagcaagctgacccaggtgctgcgggacagcttcatcggggagaacagcaggacctgcatgattgccaccatcagccctggcatggccagctgtgagaacaccctgaacaccctgcgctatgccaacagagtgaaggagctgactgtggaccccacagctgctggagatgtgcggcccatcatgcaccacccccccaaccagattgatgacctggagacccagtggggcgtgggcagcagcccccagagagatgacctgaagctgctgtgtgagcagaatgaggaggaggtgagcccccagctgttcaccttccatgaagctgtgtcccagatggtggagatggaggagcaggtggtggaggaccacagagctgtgttccaggagagcatccgctggctggaggatgagaaggccctgctggagatgacagaggaggtggactatgatgtggacagctatgccacccagctggaggccatcctggagcagaagattgacatcctgacagagctgcgggacaaggtgaagagcttccgggccgccctgcaggaggaggagcaggccagcaagcagatcaaccccaagaggccccgggccctgtag

SEQ ID NO: 86914 - DNA, 3360 bp, Artificial Sequence
  derived and/or modified sequence
gactacccggcgtgcgcgtcctcctgccggcctgcaggcccggggcctccgcctgcttccccacagctgctccttgcggccccgcttgcgttcacgctgtcgcccgggccggcgcggccgcgggcaaccgctccccctcccacacctaccccgccccctccccgccttttccgccctccggtccccctccctcggcccgctgctgctgctccagatgaggtgatggcaacggccaacttcggcaagatccagatcgggatttacgtggagatcaagcgcagcgatggtaaatacgagttcacagtataccagcaaaagtaggatttacatattattttgaagattctgggtgcacagcaacacctgtccctggtatacacccaagggagaggaaatcaccaccttgtgaagatatctgcactctcgcgttcattgcagcattattcacagtagccaagatagggaagcaacctaaatgtccatcgatgggccgaatacatcaagcaatggtaacatctttaaatgaagataatgaaagtgtaactgttgaatggatagaaaatggagatacaaaaggcaaagagattgacctggagagcatcttttcacttaaccctgaccttgttcctgatgaagaaattgaacccagtccagaaacacctccacctccagcatcctcagccaaagtaaacaaaattgtaaagaatcgacggactgtagcttctattaagaatgaccctccttcaagagataatagagtggttggttcagcacgtgcacggcccagtcaatttcctgaacagtcttcctctgcacaacagaatggtagtgtttcagatatatctccagttcaagctgcaaaaaaggaatttggacccccttcacgtagaaaatctaattgtgtgaaagaagtagaaaaactgcaagaaaaacgagagaaaaggagattgcaacagcaagaacttagagaaaaaagagcccaggacgttgatgctacaaacccaaattatgaaattatgtgtatgatcagagactttagaggaagtttggattatagaccattaacaacagcagatcctattgatgaacataggatatgtgtgtgtgtaagaaaacgaccactcaataaaaaagaaactcaaatgaaagatcttgatgtaatcacaattcctagtaaagatgttgtgatggtacatgaaccaaaacaaaaagtagatttaacaaggtacctagaaaaccaaacatttcgttttgattatgcctttgatgactcagctcctaatgaaatggtttacaggtttactgctagaccactagtggaaactatatttgaaaggggaatggctacatgctttgcttatgggcagactggaagtggaaaaactcatactatgggtggtgacttttcaggaaagaaccaagattgttctaaaggaatttatgcattagcagctcgagatgtctttttaatgctaaagaagccaaactataagaagctagaacttcaagtatatgcaaccttctttgaaatttatagtggaaaggtgtttgacttgctaaacaggaaaacaaaattaagagttctagaagatggaaaacagcaggttcaagtggtgggattacaggaacgggaggtcaaatgtgttgaagatgtactgaaactcattgacataggcaacagttgcagaacatccggtcaaacatctgcaaatgcacattcatctcggagccatgcagtgtttcagattattcttagaaggaaaggaaaactacatggcaaattttctctcattgatttggctggaaatgaaagaggagctgatacttccagtgcggacaggcaaactaggcttgaaggtgctgaaattaataaaagccttttagcactcaaggagtgcatcagagccttaggtagaaataaacctcatactcctttccgtgcaagtaaactcactcaggtgttaagagattctttcataggtgaaaactctcgtacctgcatgattgccacaatctctccaggaatggcatcctgtgaaaatactcttaatacattaagatatgcaaatagggtcaaagaattgactgtagatccaactgctgctggtgatgttcgtccaataatgcaccatccaccaaaccagattgatgacttagagacacagtggggtgtggggagttcccctcagagagatgatctaaaacttctttgtgaacaaaatgaagaagaagtctctccacagttgtttactttccacgaagctgtttcacaaatggtagaaatggaagaacaagttgtagaagatcacagggcagtgttccaggaatctattcggtggttagaagatgaaaaggccctcttagagatgactgaagaagtagattatgatgtcgattcatatgctacacaacttgaagctattcttgagcaaaaaatagacattttaactgaactgcgggataaagtgaaatctttccgtgcagctctacaagaggaggaacaagccagcaagcaaatcaacccgaagagaccccgtgccctttaaaccggcatttgctgctaaaggatacccagaaccctcactactgtaacatacaacggttcagctgtaagggccatttgaaagtttggaattttaagtgtctgtggaaaatgttttgtccttcacctgaattacatttcaattttgtgaaacactcttttgtctacaaaatgcttctagtccaggaggcacaaccaagaactgggattaatgaagcattttgtttcatttacacaaatagtgatttacttttggagatccttgtcagttttattttctatttgatgaagtaagactgtggactcaatccagagccagatagtagggggaagccacagcatttccttttaactcagttcaatttttgtagtgagactgagcagttttaaatcctttgcgtgcatgcatacctcatcagtgattgtacataccttgcccactcctagagacagctgtgctcaccttttcctgctttgtgccttgattaaggctactgaccctaaatttctgaagcacagccaagaaaaattacattccttgtcattgtaaattacctttgtgtgtacatttttactgtatttgagacattttttgtgtgtgactagttaattttgcaggatgtgccatatcattgaacggaactaaagtctgtgacagtggatatagctgctggaccattccatcttatatgtaaagaaatctggaattattattttaaaaccatataacatgtgattataatttttcttagcattttctttgtaaagaactacaatataaactagttggtgtataataaaaagtaatgaaattctga

SEQ ID NO: 86915 - DNA, 243 bp, Artificial Sequence
  derived and/or modified sequence
atggtgaccagcctgaatgaagataatgaatctgtgacagtggagtggattgaaaatggagacaccaagggcaaggagattgacctggagagcatcttcagcctgaacccagacctggtgcctgatgaggagattgagcccagccctgagaccccacctcctccagccagcagcgccaaggtgaacaagatcgtgaagaacagaagaacagtggccagcatcaagaatgacccccccagctag

SEQ ID NO: 86916 - DNA, 2061 bp, Artificial Sequence
  derived and/or modified sequence
atgggccggatccaccaggccatggtgaccagcctgaacgaggacaatgagtctgtaaccgtggaatggatagaaaatggcgacacgaagggcaaggaaatcgatcttgagtccatatttagcctaaatcctgacttagtgccagatgaggagattgaacccagccccgaaacacctccaccccccgccagctcagccaaggtaaataaaatcgttaagaaccgcagaaccgtagctagtatcaagaacgatccccccagccgtgataatagggtggttggtagcgctcgggcacggccctcacagttcccagagcagtcttccagcgcccagcaaaacggctccgtgtcagatataagccctgtgcaggctgcgaaaaaggagttcggccctccaagtcgtagaaaatcgaactgtgtgaaggaggtcgagaaactgcaggagaagagggaaaaacgcaggctacaacagcaagaactgcgcgagaaacgcgcacaggatgtggacgccacaaacccaaattatgaaatcatgtgcatgatcagagactttaggggatctctcgactaccgcccgctgactactgctgaccccattgatgagcatcgaatatgtgtttgcgtaaggaagcggcctctgaacaaaaaagaaacccagatgaaggacctcgatgtgataaccatcccatcaaaggacgtggtcatggttcatgagcctaagcaaaaggtggatttgacacgctacctagagaaccaaacttttaggttcgattacgcctttgacgatagtgcccctaacgagatggtgtaccgctttactgcgcggccacttgtggaaacaatcttcgagcgggggatggccacatgttttgcctatggacagaccggctcgggcaagacacatactatgggcggcgatttttcaggaaaaaatcaagactgttcaaaaggcatatacgctctggccgcccgcgacgtctttctgatgttgaagaagcctaattacaagaagttagagttgcaggtctatgcgacatttttcgaaatatatagcggaaaagtgttcgacctcctgaatcgtaaaacgaagctcagggtgctcgaagatggaaagcaacaggtacaggtggtggggctgcaagagcgcgaggtgaagtgtgtggaggacgtgcttaagctgatcgacatcgggaactcctgtaggacctcaggccagaccagcgcaaatgcccatagttcacgtagccacgcagtcttccaaatcatcttacgcaggaaaggaaagctgcacggtaagttctcccttatcgatctggcaggcaatgaaaggggcgcggacaccagtagcgcagatagacaaactcggctggaaggagccgagattaacaagagtctgctggccttgaaagaatgtatcagggccctgggtcgcaataaacctcacacaccttttagggccagtaagttaacccaggtgcttcgcgactcttttatcggagaaaactctaggacatgcatgattgccaccatttccccagggatggcttcatgcgaaaataccctaaatacgcttcgctacgctaatagggtgaaggaactcacggtggatcccacagccgccggtgatgttagacccattatgcatcacccccccaatcaaattgatgacctggaaacccagtggggcgtcggatcttcgccccagagggacgacttgaagctcttatgcgaacaaaacgaggaagaggtgagtccccagctgttcacctttcacgaggctgtgagtcagatggtggagatggaagaacaagtagtagaggaccacagagctgtttttcaggaaagcatcagatggctggaagacgagaaggcacttttagaaatgactgaggaggtggactatgacgtcgatagctatgctacacagctcgaggccatcctggaacaaaaaatagatatccttacagaactgcgcgacaaagtgaagtctttccgtgccgccctccaggaggaggagcaggccagtaagcaaattaatcctaaacgcccaagggccctttag

SEQ ID NO: 86917 - DNA, 243 bp, Artificial Sequence
  derived and/or modified sequence
atggtgaccagcctgaacgaggacaacgagagcgtgaccgtggagtggattgaaaacggagacactaaggggaaggagatcgatttggagagtatctttagcctgaacccggacctcgtacctgacgaggagattgaacccagccctgaaaccccgccaccgcctgcaagcagtgcaaaggtgaataagatcgtcaaaaaccgcaggactgtagcctccattaagaacgacccaccatcatag

SEQ ID NO: 86918 - DNA, 2061 bp, Artificial Sequence
  derived and/or modified sequence
atgggaagaattcaccaggccatggtgaccagccttaacgaagataatgagagcgtgaccgtagaatggattgagaacggggataccaaaggaaaagaaattgaccttgagagtatttttagcttgaacccggacttggtgccagacgaagaaatcgagccctctcctgagacgcccccacccccagccagttctgccaaggtcaataaaatcgtaaagaaccggaggaccgttgcctctattaaaaacgacccaccatcgagagacaacagagtcgtcgggtctgctcgtgcacgacccagccagtttccagagcagagctccagcgcccaacaaaatggaagcgtctccgacatcagccctgttcaggccgcaaagaaagagtttgggcctccatcccgcagaaagtccaactgtgtgaaggaggtggagaaactgcaggagaagcgcgaaaagagaaggctgcagcagcaggagttgcgggagaaacgcgctcaggatgtagacgctaccaaccccaactatgaaatcatgtgcatgatccgtgattttcgaggctcgttagattaccgacctctgactactgccgatcctattgatgaacataggatctgtgtgtgtgtacgaaagcgcccactgaataaaaaggagacacaaatgaaagacctggatgtcattaccatcccctcgaaggatgttgttatggtgcacgaacctaaacagaaggttgacctgacccgatacctggaaaatcagactttccgctttgactatgccttcgatgattctgctcctaacgaaatggtgtataggtttaccgctcggcctctggtcgaaaccattttcgaaaggggtatggcaacctgcttcgcgtacggccagaccggaagtggcaagacccacacgatgggcggagatttctctggcaaaaatcaggactgctcaaaagggatctatgcactagccgcaagagacgtttttctcatgttaaaaaagcctaactataaaaagctggagctgcaagtgtatgctacgttttttgagatatacagcgggaaggtgtttgatcttctgaaccgtaaaaccaagttgcgagtgttagaggacggcaagcaacaagttcaggtggtcgggcttcaggaacgggaggttaaatgcgtggaggatgtgctcaagctaattgacattgggaactcctgcagaaccagcggacaaacatccgctaatgcacattcctcccgctctcatgccgtgtttcagatcatccttagacgcaaaggtaaacttcacggtaaattttctctgatcgatctggctggcaacgaaagaggtgctgacacttcttctgctgacagacagacccgcctcgagggagctgagattaacaaaagcttgcttgctctcaaagagtgtataagggccctaggcagaaataagcctcatactccctttcgcgctagcaaactaacccaagtgcttcgggactcctttattggcgaaaactctaggacgtgtatgatcgcgacaatttctcccggtatggcctcttgcgaaaacactctcaatacattaagatatgcaaacagagtgaaagagctcaccgtggatccaacggcggcaggagatgttagacctattatgcaccatcccccaaaccagattgacgatttggagacgcaatggggcgtcggtagttctcctcagcgggacgatctcaaactcctttgcgagcagaacgaagaggaggtgagcccccagctctttacattccacgaagcagtgtcccagatggtagagatggaagagcaggtggtggaggaccaccgggcagtgttccaagagtcaatccgctggctggaagatgaaaaagcactgctcgagatgaccgaagaagttgactatgatgttgacagttatgctacccagctggaggccatcctcgaacagaaaatcgatatcttgacagaactaagggacaaggtgaagtcattccgcgcagcgttgcaggaggaggagcaggctagcaaacagataaatccaaagagacccagagccctgtag

SEQ ID NO: 86919 - DNA, 243 bp, Artificial Sequence
  derived and/or modified sequence
atggtcacctctcttaatgaagacaacgagagtgtgactgtagagtggatcgagaatggcgacactaaaggaaaggagatcgacctcgaatccatcttctcgttgaatcctgatctggtgcccgatgaagagatagaaccaagccctgaaacgcctccgccaccagcttcttctgctaaagtcaacaaaatcgtgaaaaataggaggacagtggccagcatcaagaacgacccaccatcttag

SEQ ID NO: 86920 - DNA, 549 bp, Artificial Sequence
  derived and/or modified sequence
gcattttaccggcttggcctctgacggggatggggatgggggtgggggagcgggaagaccagcgatttcacatttagagaaccgactgctggtcggaggccgagatggggggaaagagccagttccgtcgccttaaactgccgtctggttgtcaggcctccccggtttcgtcgtcgaccatgctgctttcttttttgccacttcttgggagaaaaatgtggagaatatcgcgctgagccatgaataagggtgggggagcaatgggaagaaatattcgatgggcttctccaaggccgaatacatcaagcaatggtaacatctttaaatgaagataatgaaagtgtaactgttgaatggatagaaaatggagatacaaaaggcaaagagattgacctggagagcatcttttcacttaaccctgaccttgttcctgatgaagaaattgaacccagtccagaaacacctccacctccagcatcctcagccaaagtaaacaaaattgtaaagaatcgacggactgtagcttctattaagaatgaccctccttca

SEQ ID NO: 86921 - protein, 660 aa, Artificial Sequence
  derived and/or modified sequence
MVTSLNEDNESVTVEWIENGDTKGKEIDLESIFSLNPDLVPDEEIEPSPETPPPPASSAKVNKIVKNRRTVASIKNDPPSRDNRVVGSARARPSQFPEQSSSAQQNARRKSNCVKEVEKLQEKREKRRLQQQELREKRAQDVDATNPNYEIMCMIRDFRGSLDYRPLTTADPIDEHRICVCVRKRPLNKKETQMKDLDVITIPSKDVVMVHEPKQKVDLTRYLENQTFRFDYAFDDSAPNEMVYRFTARPLVETIFERGMATCFAYGQTGSGKTHTMGGDFSGKNQDCSKGIYALAARDVFLMLKKPNYKKLELQVYATFFEIYSGKVFDLLNRKTKLRVLEDGKQQVQVVGLQEREVKCVEDVLKLIDIGNSCRTSGQTSANAHSSRSHAVFQIILRRKGKLHGKFSLIDLAGNERGADTSSADRQTRLEGAEINKSLLALKECIRALGRNKPHTPFRASKLTQVLRDSFIGENSRTCMIATISPGMASCENTLNTLRYANRVKELTVDPTAAGDVRPIMHHPPNQIDDLETQWGVGSSPQRDDLKLLCEQNEEEVSPQLFTFHEAVSQMVEMEEQVVEDHRAVFQESIRWLEDEKALLEMTEEVDYDVDSYATQLEAILEQKIDILTELRDKVKSFRAALQEEEQASKQINPKRPRAL

SEQ ID NO: 86922 - protein, 80 aa, Artificial Sequence
  derived and/or modified sequence
MVTSLNEDNESVTVEWIENGDTKGKEIDLESIFSLNPDLVPDEEIEPSPETPPPPASSAKVNKIVKNRRTVASIKNDPPS

SEQ ID NO: 86923 - DNA, 1983 bp, Artificial Sequence
  derived and/or modified sequence
atggtgaccagcctgaacgaggacaacgagagcgtgaccgtggagtggatcgagaacggcgacaccaagggcaaggagatcgacctggagagcatcttcagcctgaaccccgacctggtgcccgacgaggagatcgagcccagccccgagaccccccccccccccgccagcagcgccaaggtgaacaagatcgtgaagaacagaagaaccgtggccagcatcaagaacgacccccccagcagagacaacagagtggtgggcagcgccagagccagacccagccagttccccgagcagagcagcagcgcccagcagaacgccagaagaaagagcaactgcgtgaaggaggtggagaagctgcaggagaagagagagaagagaagactgcagcagcaggagctgagagagaagagagcccaggacgtggacgccaccaaccccaactacgagatcatgtgcatgatcagagacttcagaggcagcctggactacagacccctgaccaccgccgaccccatcgacgagcacagaatctgcgtgtgcgtgagaaagagacccctgaacaagaaggagacccagatgaaggacctggacgtgatcaccatccccagcaaggacgtggtgatggtgcacgagcccaagcagaaggtggacctgaccagatacctggagaaccagaccttcagattcgactacgccttcgacgacagcgcccccaacgagatggtgtacagattcaccgccagacccctggtggagaccatcttcgagagaggcatggccacctgcttcgcctacggccagaccggcagcggcaagacccacaccatgggcggcgacttcagcggcaagaaccaggactgcagcaagggcatctacgccctggccgccagagacgtgttcctgatgctgaagaagcccaactacaagaagctggagctgcaggtgtacgccaccttcttcgagatctacagcggcaaggtgttcgacctgctgaacagaaagaccaagctgagagtgctggaggacggcaagcagcaggtgcaggtggtgggcctgcaggagagagaggtgaagtgcgtggaggacgtgctgaagctgatcgacatcggcaacagctgcagaaccagcggccagaccagcgccaacgcccacagcagcagaagccacgccgtgttccagatcatcctgagaagaaagggcaagctgcacggcaagttcagcctgatcgacctggccggcaacgagagaggcgccgacaccagcagcgccgacagacagaccagactggagggcgccgagatcaacaagagcctgctggccctgaaggagtgcatcagagccctgggcagaaacaagccccacacccccttcagagccagcaagctgacccaggtgctgagagacagcttcatcggcgagaacagcagaacctgcatgatcgccaccatcagccccggcatggccagctgcgagaacaccctgaacaccctgagatacgccaacagagtgaaggagctgaccgtggaccccaccgccgccggcgacgtgagacccatcatgcaccacccccccaaccagatcgacgacctggagacccagtggggcgtgggcagcagcccccagagagacgacctgaagctgctgtgcgagcagaacgaggaggaggtgagcccccagctgttcaccttccacgaggccgtgagccagatggtggagatggaggagcaggtggtggaggaccacagagccgtgttccaggagagcatcagatggctggaggacgagaaggccctgctggagatgaccgaggaggtggactacgacgtggacagctacgccacccagctggaggccatcctggagcagaagatcgacatcctgaccgagctgagagacaaggtgaagagcttcagagccgccctgcaggaggaggagcaggccagcaagcagatcaaccccaagagacccagagccctgtag

SEQ ID NO: 86924 - DNA, 1983 bp, Artificial Sequence
  derived and/or modified sequence
atggtgacttccttgaatgaagacaacgagtcagtcacagtggaatggatcgaaaacggtgacactaaaggtaaagaaattgacttagagagtattttttccctcaaccctgatctggtccctgacgaagagattgagccatcaccagaaacccctcctccgccagcgagctcagctaaagtgaacaagatagtcaagaaccggcgaacagtcgcctccattaaaaatgatccaccaagtcgtgacaacagagtggtgggcagtgccagagcgcgccccagccagtttccagaacaaagcagcagcgcccagcagaatgcccgccgaaagtctaattgtgtaaaggaggtggaaaaactacaggagaagcgggaaaagaggagactccagcagcaagagctcagggagaagcgtgcccaggacgtagatgctactaaccccaactacgagatcatgtgtatgattcgggatttccgtgggtccctagattaccggccactaaccactgctgaccccatagatgagcatcggatttgcgtgtgcgtgcgtaagcgccctctgaacaaaaaggagacccagatgaaggatctggatgttatcaccatcccttctaaggacgttgtaatggtacatgagcccaagcagaaggtggatctgactcggtatctggaaaaccagacctttcgctttgactatgcattcgatgattctgcccccaatgagatggtctaccggttcaccgctaggcccctcgtggagaccatctttgagagaggcatggctacatgctttgcctatggacagaccggatctggcaaaacacacacaatgggcggcgacttctccggcaaaaaccaggactgttctaaaggcatttacgccctagctgccagggacgtattcctcatgctgaaaaaacccaactataagaagctggaactccaagtctacgccaccttctttgaaatttactcgggaaaggtgttcgatttgcttaacagaaagacgaagctgagagtgttagaggacggcaaacagcaggtccaggtcgtgggactgcaggaaagggaggtcaagtgtgtggaagacgtgttaaaattgatcgatatcgggaactcctgccgcactagcgggcagacaagcgctaatgcgcatagctcccgctcacacgcagtcttccagatcattctacggcggaagggtaaactgcatgggaaattcagtctgattgatttggcaggcaacgagcgcggagcagatacatctagcgccgataggcaaactagactggagggcgccgagatcaataaatccctcctggcgctgaaagagtgtatcagggcgttagggcgcaataaaccacatacgccgtttcgggcttctaaattaactcaagtcctgcgggactcgtttattggagagaacagccgcacctgtatgatcgcaactatcagcccaggcatggcgtcctgtgaaaatacccttaacacactcaggtacgcaaatcgggtgaaagagcttacagtggaccccaccgctgcaggagatgtgaggccaatcatgcaccatcctcccaatcagatagacgacctcgagactcagtggggggtcggatcaagccctcaaagggacgaccttaagctgctctgcgaacaaaatgaggaagaagtgtctccccagctgtttacatttcacgaggcagtcagtcaaatggtcgagatggaagagcaggtggttgaggaccaccgcgccgtattccaggagagcatcaggtggctggaggatgagaaagctctccttgaaatgaccgaggaagtagactacgacgtcgactcgtacgcaactcagctcgaggctatccttgagcagaagatagacatcctgaccgagttgagagataaggtgaaatcattccgagctgcactccaagaagaggaacaggcaagcaaacagattaatccaaaaaggcccagagcactatag

SEQ ID NO: 86925 - DNA, 1983 bp, Artificial Sequence
  derived and/or modified sequence
atggtgaccagcctgaatgaagataatgaatctgtgacagtggagtggattgaaaatggagacaccaagggcaaggagattgacctggagagcatcttcagcctgaacccagacctggtgcctgatgaggagattgagcccagccctgagaccccacctcctccagccagcagcgccaaggtgaacaagatcgtgaagaacagaagaacagtggccagcatcaagaatgacccccccagccgggacaacagagtggtgggcagcgcccgggcccggcccagccagtttcctgagcagagcagcagcgcccagcagaatgcccggaggaagagcaactgtgtgaaggaggtggagaagctgcaggagaagcgggagaagaggcggctgcagcagcaggagctgcgggagaagagggcccaggatgtggatgccaccaaccccaactatgagatcatgtgcatgatccgggacttccggggcagcctggactaccggcccctgaccacagctgaccccattgatgagcaccgcatctgtgtgtgtgtgaggaagaggcccctgaacaagaaggagacccagatgaaggacctggatgtgatcaccatccccagcaaggatgtggtgatggtgcatgagcccaagcagaaggtggacctgacccgctacctggagaaccagaccttccgctttgattatgcctttgatgattctgccccaaatgagatggtgtaccgcttcaccgcccggcccctggtggagaccatctttgagcggggcatggccacctgctttgcctacggccagacaggcagcggcaagacccacaccatgggcggggacttcagcggcaagaaccaggactgcagcaagggcatctatgccctggccgccagagatgtgttcctgatgctgaagaagcccaactacaagaagctggagctgcaggtgtatgccaccttctttgagatctacagcggcaaggtgtttgacctgctgaacaggaagaccaagctgcgggtgctggaggatggcaagcagcaggtgcaggtggtgggcctgcaggagcgggaggtgaagtgtgtggaggatgtgctgaagctgattgacatcggcaacagctgcaggaccagcggccagaccagcgccaatgcccacagcagccgcagccatgctgtgttccagatcatcctgcggaggaagggcaagctgcacggcaagttcagcctgattgacctggccggaaatgaaagaggagctgacaccagcagcgctgaccggcagacccggctggagggcgctgagatcaacaagagcctgctggccctgaaggagtgcatccgggccctgggcaggaacaagccccacacccccttccgggccagcaagctgacccaggtgctgcgggacagcttcatcggggagaacagcaggacctgcatgattgccaccatcagccctggcatggccagctgtgagaacaccctgaacaccctgcgctatgccaacagagtgaaggagctgactgtggaccccacagctgctggagatgtgcggcccatcatgcaccacccccccaaccagattgatgacctggagacccagtggggcgtgggcagcagcccccagagagatgacctgaagctgctgtgtgagcagaatgaggaggaggtgagcccccagctgttcaccttccatgaagctgtgtcccagatggtggagatggaggagcaggtggtggaggaccacagagctgtgttccaggagagcatccgctggctggaggatgagaaggccctgctggagatgacagaggaggtggactatgatgtggacagctatgccacccagctggaggccatcctggagcagaagattgacatcctgacagagctgcgggacaaggtgaagagcttccgggccgccctgcaggaggaggagcaggccagcaagcagatcaaccccaagaggccccgggccctgtag

SEQ ID NO: 86926 - DNA, 1983 bp, Artificial Sequence
  derived and/or modified sequence
atggtgaccagcctgaacgaggacaacgagagcgtgaccgtggagtggatcgagaacggggatacgaaagggaaggaaattgacctggaatccattttttctctgaaccccgatcttgtacccgacgaggagattgagcccagtcctgagacgcctccccccccggcaagctccgccaaggttaacaagatcgtgaagaaccgaaggacagtagcaagtataaagaacgacccaccgagccgggataatcgggtggttggaagcgctcgggctcggcccagccagttccccgagcagagcagcagtgcccaacagaacgccaggagaaagtcaaattgtgtaaaagaggtggaaaagctgcaagaaaaacgcgagaagcgtcggcttcagcagcaggaactgcgggaaaagagggcacaggatgtagatgccactaatcccaattatgagattatgtgcatgatcagagactttcgagggagtctggactacagaccccttacaaccgctgaccccattgacgagcacaggatatgtgtttgcgtcaggaaacgtcccctgaacaaaaaggaaacacagatgaaggaccttgatgtcatcacaattcctagtaaggacgtggtgatggtccatgagcctaaacaaaaggttgatttgactaggtacctggagaaccaaacctttagattcgactatgccttcgacgatagtgctcccaatgagatggtataccggttcacggcaagaccactggtggagaccatatttgagagaggtatggctacctgcttcgcttacggccagactggaagcggaaagacgcacactatgggtggcgacttttctggaaaaaatcaagactgttctaaaggcatctacgcactggccgcacgagatgtgttcttaatgttaaagaagcctaactacaaaaagttggagctccaagtgtatgccactttctttgagatctactccgggaaggtgtttgatttactgaaccggaagaccaagctgagggtactcgaagacggcaaacaacaagtgcaggtggtgggcctgcaggagagagaagtgaaatgtgtggaagacgtgctcaaactgattgacattggcaactcctgcagaactagtggtcagacctcagccaatgctcactctagccggagtcacgcagtgttccagatcatcctgcgccgaaaggggaaactccacggcaagttcagtctgatcgacctggcaggcaatgaacggggggcagatacatctagtgctgaccggcagaccaggctggagggggctgaaattaacaagtcacttttggctcttaaggagtgtattcgtgctttgggtagaaacaagccccacacccctttcagagccagtaagctcacgcaagtcctaagagattcctttataggagaaaattctagaacatgcatgatcgcaactatctcgcctggcatggcctcttgtgagaatacactcaacacactccggtacgcaaaccgcgtaaaggaactcacagtggatcccactgccgccggcgatgtccggccaattatgcaccacccacctaaccagatcgacgatctcgagacacaatggggcgtggggagttctccgcagcgcgacgacctgaaactgctctgcgaacaaaatgaagaggaggtgagtccacagttattcacatttcatgaggccgttagccagatggtcgaaatggaggagcaggtcgtggaggaccatcgggccgtatttcaggagagcattcgctggctggaggacgaaaaagctctgctggaaatgactgaggaggtcgactacgacgtggacagttatgctactcagctggaagccatcctggagcagaaaattgacatcctgaccgaactcagggacaaagtcaagtcttttcgagcagctctgcaggaagaggagcaggcctcaaaacaaattaaccctaagcgcccccgggctctctag

SEQ ID NO: 86927 - DNA, 1983 bp, Artificial Sequence
  derived and/or modified sequence
atggtgacaagcctgaacgaagataatgagagtgtgactgtcgaatggatagaaaacggggacacaaaggggaaggagatagacctggaatcaattttctcgttgaaccccgacttagtacccgacgaagagattgaaccttcaccggagaccccaccaccgccagcatccagcgctaaggtgaacaaaattgtgaaaaaccgcaggacggtagcctccattaagaacgacccaccctcaagggataatcgggttgtgggatcagccagggccaggcccagccagttcccagagcaaagcagctcagcccagcaaaatgctcggaggaaaagtaactgcgtgaaagaggtagagaaactccaggaaaagagagagaaaagaagactccagcagcaggaactgcgagagaagcgagcacaagacgttgatgccacaaatccaaattacgaaatcatgtgcatgatccgggatttccgagggtcactcgattaccggcctctcactaccgcggacccaatcgacgaacataggatttgcgtttgtgtcaggaaacgccctcttaacaagaaggagactcaaatgaaggatctggacgtgatcacaattcctagtaaggacgtggtgatggtccatgagcccaaacaaaaggtggatctgaccaggtatctcgaaaatcaaacatttcgattcgattatgctttcgatgattctgctccaaacgagatggtgtaccgtttcacggctcgccctctagttgaaactatatttgagaggggcatggccacatgctttgcttatggtcagacgggttcagggaagacccacacaatgggcggtgatttctccggaaagaatcaagattgctccaaagggatttacgccctcgcagctagggatgtatttctgatgctgaaaaagcccaattacaagaagcttgaactacaggtgtatgccacattctttgagatttattcaggcaaagtcttcgacctgttaaacaggaaaaccaaattgcgcgttctggaagacggcaaacagcaggtccaggtggtgggtcttcaggaaagggaagtgaagtgcgtggaggacgtgctgaagctcattgacatcggtaattcgtgtcggacttctgggcaaacgagtgccaatgctcattcaagtaggtcccacgcggtgtttcagatcattctgaggaggaaaggcaagctgcacggaaagttcagcctgattgatctcgccggtaacgagcgtggggctgataccagctctgcggatagacagacgcggctggaaggagccgaaatcaacaagtccctgctggctcttaaggaatgtatcagagctctgggcaggaacaagccccacactccttttcgggcttcaaagctgacgcaggttttgcgcgatagctttattggtgagaacagccgcacctgcatgatagcgacaatttcaccagggatggctagttgtgaaaataccctgaatactctaaggtacgccaacagagtgaaggagctgaccgtcgatccaaccgccgctggcgatgtacgccctattatgcaccatcctcccaatcaaatagacgacctcgaaacacagtggggggtggggtcctcccctcagcgagacgatctgaaactgctctgtgaacaaaatgaagaagaggtgagtccgcaactttttactttccatgaggctgtctcacagatggtggagatggaggaacaggtggtggaggatcaccgcgctgtgttccaggagagcattcgatggttggaggacgagaaagctttgttagaaatgacggaggaagttgactacgatgtcgactcttatgccacgcagctcgaagccatcttggagcagaaaattgacatccttactgagctgagagacaaagtgaagtccttcagggccgcactgcaggaagaggagcaagcatcaaagcagatcaatcccaagcgaccccgagccctgtag

SEQ ID NO: 86928 - DNA, 2219 bp, Artificial Sequence
  derived and/or modified sequence
agggcttaatagttttccaagtgcttcaagacatgttagctaattggatcttcacaggaactctatgaggccgaatacatcaagcaatggtaacatctttaaatgaagataatgaaagtgtaactgttgaatggatagaaaatggagatacaaaaggcaaagagattgacctggagagcatcttttcacttaaccctgaccttgttcctgatgaagaaattgaacccagtccagaaacacctccacctccagcatcctcagccaaagtaaacaaaattgtaaagaatcgacggactgtagcttctattaagaatgaccctccttcaagagataatagagtggttggttcagcacgtgcacggcccagtcaatttcctgaacagtcttcctctgcacaacagaatgcacgtagaaaatctaattgtgtgaaagaagtagaaaaactgcaagaaaaacgagagaaaaggagattgcaacagcaagaacttagagaaaaaagagcccaggacgttgatgctacaaacccaaattatgaaattatgtgtatgatcagagactttagaggaagtttggattatagaccattaacaacagcagatcctattgatgaacataggatatgtgtgtgtgtaagaaaacgaccactcaataaaaaagaaactcaaatgaaagatcttgatgtaatcacaattcctagtaaagatgttgtgatggtacatgaaccaaaacaaaaagtagatttaacaaggtacctagaaaaccaaacatttcgttttgattatgcctttgatgactcagctcctaatgaaatggtttacaggtttactgctagaccactagtggaaactatatttgaaaggggaatggctacatgctttgcttatgggcagactggaagtggaaaaactcatactatgggtggtgacttttcaggaaagaaccaagattgttctaaaggaatttatgcattagcagctcgagatgtctttttaatgctaaagaagccaaactataagaagctagaacttcaagtatatgcaaccttctttgaaatttatagtggaaaggtgtttgacttgctaaacaggaaaacaaaattaagagttctagaagatggaaaacagcaggttcaagtggtgggattacaggaacgggaggtcaaatgtgttgaagatgtactgaaactcattgacataggcaacagttgcagaacatccggtcaaacatctgcaaatgcacattcatctcggagccatgcagtgtttcagattattcttagaaggaaaggaaaactacatggcaaattttctctcattgatttggctggaaatgaaagaggagctgatacttccagtgcggacaggcaaactaggcttgaaggtgctgaaattaataaaagccttttagcactcaaggagtgcatcagagccttaggtagaaataaacctcatactcctttccgtgcaagtaaactcactcaggtgttaagagattctttcataggtgaaaactctcgtacctgcatgattgccacaatctctccaggaatggcatcctgtgaaaatactcttaatacattaagatatgcaaatagggtcaaagaattgactgtagatccaactgctgctggtgatgttcgtccaataatgcaccatccaccaaaccagattgatgacttagagacacagtggggtgtggggagttcccctcagagagatgatctaaaacttctttgtgaacaaaatgaagaagaagtctctccacagttgtttactttccacgaagctgtttcacaaatggtagaaatggaagaacaagttgtagaagatcacagggcagtgttccaggaatctattcggtggttagaagatgaaaaggccctcttagagatgactgaagaagtagattatgatgtcgattcatatgctacacaacttgaagctattcttgagcaaaaaatagacattttaactgaactgcgggataaagtgaaatctttccgtgcagctctacaagaggaggaacaagccagcaagcaaatcaacccgaagagaccccgtgccctttaaaccggcatttgctgctaaaggatacccagaaccctcactactgtaacatacaacggttcagctgtaagggccatttgaaagtttggaattttaagtgtctgtggaaaatgttttgtccttcacctgaattacatttcaattttgtgaaac

SEQ ID NO: 86929 - protein, 871 aa, Artificial Sequence
  derived and/or modified sequence
MATGLGEPVYGLSEDEGESRILRVKVVSGIDLAKKDIFGASDPYVKLSLYVADENRELALVQTKTIKKTLNPKWNEEFYFRVNPSNHRLLFEVFDENRLTRDDFLGQVDVPLSHLPTEDPTMERPYTFKDFLLRPRSHKSRVKGFLRLKMAYMPKNGGQDEENSDQRDDMEHGWEVVDSNDSASQHQEELPPPPLPPGWEEKVDNLGRTYYVNHNNRTTQWHRPSLMDVSSESDNNIRQINQEAAHRRFRSRRHISEDLEPEPSEGGDVPEPWETISEEVNIAGDSLGLALPPPPASPGSRTSPQELSEELSRRLQITPDSNGEQFSSLIQREPSSRLRSCSVTDAVAEQGHLPPGAKDSPVRRAVKDTLSNPQSPQPSPYNSPKPQHKVTQSFLPPGWEMRIAPNGRPFFIDHNTKTTTWEDPRLKFPVHMRSKTSLNPNDLGPLPPGWEERIHLDGRTFYIDHNSKITQWEDPRLQNPAITGPAVPYSREFKQKYDYFRKKLKKPADIPNRFEMKLHRNNIFEESYRRIMSVKRPDVLKARLWIEFESEKGLDYGGVAREWFFLLSKEMFNPYYGLFEYSATDNYTLQINPNSGLCNEDHLSYFTFIGRVAGLAVFHGKLLDGFFIRPFYKMMLGKQITLNDMESVDSEYYNSLKWILENDPTELDLMFCIDEENFGQTYQVDLKPNGSEIMVTNENKREYIDLVIQWRFVNRVQKQMNAFLEGFTELLPIDLIKIFDENELELLMCGLGDVDVNDWRQHSIYKNGYCPNHPVIQWFWKAVLLMDAEKRIRLLQFVTGTSRVPMNGFAELYGSNGPQLFTIEQWGSPEKLPRAHTCFNRLDLPPYETFEDLREKLLMAVENAQGFEGVD

SEQ ID NO: 86930 - protein, 911 aa, Artificial Sequence
  derived and/or modified sequence
MATGLGEPVYGLSEDEGESRILRVKVVSGIDLAKKDIFGASDPYVKLSLYVADENRELALVQTKTIKKTLNPKWNEEFYFRVNPSNHRLLFEVFDENRLTRDDFLGQVDVPLSHLPTEDPTMERPYTFKDFLLRPRSHKSRVKGFLRLKMAYMPKNGGQDEENSDQRDDMEHGWEVVDSNDSASQHQEELPPPPLPPGWEEKVDNLGRTYYVNHNNRTTQWHRPSLMDVSSESDNNIRQINQEAAHRRFRSRRHISEDLEPEPSEGGDVPEPWETISEEVNIAGDSLGLALPPPPASPGSRTSPQELSEELSRRLQITPDSNGEQFSSLIQREPSSRLRSCSVTDAVAEQGHLPPLAEDGASGSATNSNNHLIEPQIRRPRSLSSPTVTLSAPLEGAKDSPVRRAVKDTLSNPQSPQPSPYNSPKPQHKVTQSFLPPGWEMRIAPNGRPFFIDHNTKTTTWEDPRLKFPVHMRSKTSLNPNDLGPLPPGWEERIHLDGRTFYIDHNSKITQWEDPRLQNPAITGPAVPYSREFKQKYDYFRKKLKKPADIPNRFEMKLHRNNIFEESYRRIMSVKRPDVLKARLWIEFESEKGLDYGGVAREWFFLLSKEMFNPYYGLFEYSATDNYTLQINPNSGLCNEDHLSYFTFIGRVAGLAVFHGKLLDGFFIRPFYKMMLGKQITLNDMESVDSEYYNSLKWILENDPTELDLMFCIDEENFGQTYQVDLKPNGSEIMVTNENKREYIDLVIQWRFVNRVQKQMNAFLEGFTELLPIDLIKIFDENELELLMCGLGDVDVNDWRQHSIYKNGYCPNHPVIQWFWKAVLLMDAEKRIRLLQFVTGTSRVPMNGFAELYGSNGPQLFTIEQWGSPEKLPRAHTCFNRLDLPPYETFEDLREKLLMAVENAQGFEGVD

SEQ ID NO: 86931 - DNA, 2616 bp, Artificial Sequence
  derived and/or modified sequence
atggccactggcctgggcgagcccgtttatggcctctctgaagatgagggggagtcgaggatcctgagagtcaaagttgtttccggaatagatctggcaaagaaagatattttcggcgcctccgacccgtacgtgaaactatctctttatgttgccgacgagaacagggagctggctcttgtgcagaccaagaccattaagaaaactctaaatccaaaatggaatgaggaattctactttcgtgttaatccctctaaccatcgactgctcttcgaggtgttcgatgagaatcgcctgaccagagatgactttctcggccaggtcgacgttccactgtcacatctgcctacagaagatcctaccatggagcgaccttatacgtttaaggattttctgctgcggcctaggtctcacaaaagccgggttaagggatttctcagacttaaaatggcttatatgcctaagaacggcggccaggatgaggagaacagcgaccagagagacgacatggaacatggatgggaagttgtggattcaaatgatagcgcctctcagcaccaggaggagttgcccccaccccccctgcccccaggctgggaggagaaggttgacaacttgggaagaacctactacgtgaaccacaataatagaacaacgcagtggcacaggccaagtctcatggacgtgtccagtgagtctgacaacaacattagacagattaaccaggaggcggcgcatcgacggttcaggtccaggcggcacatcagcgaagaccttgagccagaaccaagtgaaggtggagacgtccctgagccctgggagaccatcagcgaagaggtcaatattgccggcgattcgctgggattggctcttccacctccaccagcgtctcccggtagtcgcacctctcctcaggaactgtcagaggagctatccaggagacttcagataactcccgatagcaacggtgagcaattttcctcccttatccagagggagccttcttcccgattgcgcagctgttctgtgactgatgcagttgccgaacaggggcatctccccccgggtgctaaggacagtccagtgcgacgggccgtgaaggatactctgtctaacccacagagccctcaaccctccccttacaattcccccaaacctcaacataaggtaactcagtcctttctgccaccagggtgggaaatgagaatcgctcccaacgggaggccctttttcatcgatcacaatacaaagacgactacgtgggaggatcctagactcaagttcccagtgcacatgcggagcaaaaccagtttaaatcccaatgatctcgggccattgccaccaggatgggaagagcgtatacacttggatggtcgcacgttctacattgaccacaatagcaagatcacccaatgggaggacccacggcttcagaatccagctattacaggccccgccgtgccatattcccgcgagtttaaacagaagtatgattattttagaaagaaactgaagaaacctgcagatatccctaatcgattcgagatgaagctccacagaaataacatctttgaggagagctacagacgtattatgtccgtcaagagacccgatgtgctgaaagcaaggttatggatcgagtttgaaagtgagaaaggccttgactacgggggcgtcgctcgggaatggttcttcctgctaagtaaagagatgtttaatccatattacgggcttttcgagtattctgctaccgacaactatactcttcaaataaatccaaatagcggcctatgcaacgaggatcacctgtcgtactttacatttatcggtcgggtggcaggcttagctgtgttccacggtaagcttttagatggctttttcattagacccttctacaaaatgatgctcgggaagcagatcaccctcaatgatatggagagtgttgactctgagtattataattccctaaaatggattctggaaaatgacccaaccgaactggatttgatgttctgcatagatgaagagaactttggacaaacctaccaggttgacttgaagcccaacgggagtgaaataatggtcaccaacgaaaacaaaagggagtacatcgacctcgtgatacaatggaggttcgtaaatcgtgtacaaaagcagatgaacgccttcctggaagggttcactgagctcttacccatcgatctcataaagattttcgatgagaacgaactcgaattactgatgtgcggactcggggatgtcgacgttaatgactggaggcagcactcgatctataaaaatggctactgccccaatcacccagtgattcagtggttctggaaggcagtactcctgatggacgcggagaagagaatccggttattgcagttcgtgaccggcacctcccgtgtccccatgaacggctttgccgagctgtacggtagcaatggccctcagctctttaccatcgagcaatggggttccccagaaaagctcccaagggcccatacttgtttcaaccgtcttgatctcccaccttacgagacgtttgaggatcttcgtgagaagctgctaatggcggtggagaacgcacaaggttttgagggcgtggattag

SEQ ID NO: 86932 - DNA, 2736 bp, Artificial Sequence
  derived and/or modified sequence
atggccaccggtctgggagagcccgtctatggcctgtctgaagacgaaggcgaatctaggatattgagagtcaaagtggtgtctgggattgatttggctaagaaggatatattcggcgcctcggacccctacgtcaagctcagcctttatgtagctgacgagaatcgggagctggccctggtgcaaaccaaaaccataaagaagacactgaatcccaagtggaacgaggaattttactttagagttaatccctctaaccataggctcttgttcgaagtgtttgacgaaaaccgcttgacccgggatgactttctgggacaggtggacgttcctcttagtcatttgccgacggaagaccccaccatggaacgaccctacacctttaaggattttctccttcgccctcgcagtcacaagagtcgggttaagggttttctgcgactgaagatggcttacatgcctaagaatggcggacaggatgaagagaacagcgatcagcgagatgatatggagcatggatgggaagtggtggattccaacgacagcgcgtcgcaacatcaggaggagttgcctcctcccccacttccaccaggttgggaagagaaggtggacaacctggggagaacttactatgtgaatcataacaaccgaaccacccaatggcaccgcccgagtctcatggacgtttcatccgagagtgacaataatatcaggcagattaaccaggaggctgcccaccgaagatttaggtcccgtcgccatatttccgaagacctcgaacccgaaccatctgaggggggtgatgtccctgaaccatgggaaacaatctcagaagaggtgaatatcgccggcgattccctcggtctggcactacctccccccccagcgtcccccggcagcagaactagtcctcaggagctgagtgaggagctatcccgccggctccagataactcccgattctaacggggaacagttttcctccctcatccaacgcgagccttcctctcgcttgcgctcttgcagcgtcacagatgcagtggctgagcaggggcaccttcctccactggccgaggacggcgcttcaggatcagccacaaatagcaacaaccatcttatcgagccacagattagacggcctcggagcctttcttcgcccaccgttaccttatccgcacccttggagggcgcaaaggattctccagtgcgacgggcggtgaaggacactctctctaatcctcaatctccccagcctagtccttacaactcccctaaaccccagcataaagtgactcaatctttccttcccccaggctgggagatgcgaatcgccccaaatggccgccccttctttattgaccacaatactaagacaaccacatgggaagatcccagactcaagttccccgttcacatgaggtcaaagacttccctgaaccccaatgatctgggacccttgcctcccggttgggaggaaagaattcatctggatggccgaactttttacattgatcacaactctaagatcacacaatgggaggaccccagactacagaaccccgctataacaggccccgccgttccttatagtagagagttcaagcagaaatacgattactttcggaaaaaactgaagaagccggcagatatccctaatcgcttcgaaatgaagcttcatcgcaataacatcttcgaagaatcatataggagaattatgagtgtcaaacgtcccgacgtccttaaggctaggctttggatcgagttcgagagcgagaaagggttggattacggcggagtcgccagagagtggttttttcttctgagcaaggagatgttcaacccctattacggcctgttcgaatatagcgcaactgataactataccctgcagatcaatccgaactctggactgtgcaatgaggatcacctttcgtactttacctttattggacgtgttgcggggctggctgttttccacggcaaactactggatggctttttcattcgtcccttttataagatgatgcttgggaaacagattacattgaacgatatggagtcagtggactccgagtactacaattccctaaagtggatccttgaaaatgacccaacagagctcgaccttatgttctgtatagatgaagagaactttggccaaacctaccaagtggacctaaaacctaacgggagcgaaatcatggtcaccaacgaaaataagagagagtacattgatcttgtcatccagtggaggtttgtaaacagagtgcagaagcaaatgaacgctttcctggagggattcacagaactgctccctatcgacctgattaagattttcgatgagaacgagttagaactgttaatgtgtgggctgggcgatgtcgacgttaatgattggcgccagcactccatttacaaaaatggctactgtcctaatcacccagtgattcaatggttctggaaggcagtgctgcttatggatgccgaaaaacgtatcaggttgctgcagtttgttaccggaacttctcgtgtcccgatgaatggtttcgcagaattgtatggcagcaatggaccccagctgttcactatcgagcaatggggcagccctgaaaaactcccgcgcgctcatacctgcttcaacagactcgatctaccgccctatgaaaccttcgaagatctacgcgaaaagctccttatggcagtagaaaacgcccagggattcgagggggtggattag

SEQ ID NO: 86933 - DNA, 2616 bp, Artificial Sequence
  derived and/or modified sequence
atggccaccggcctgggggagcctgtgtatggcctgtctgaagatgaaggagagagccgcatcctgcgggtgaaggtggtgtctggcatcgacctggccaagaaggacatctttggagccagtgacccctacgtgaagctgagcctgtatgtggctgatgagaaccgggagctggccctggtgcagaccaagaccatcaagaagaccctgaaccccaagtggaatgaggagttctacttccgggtgaaccccagcaaccaccggctgctgtttgaggtgtttgatgagaaccggctgaccagagatgacttcctgggccaggtggatgtgcccctgagccacctgcccacagaggaccccaccatggagcggccctacaccttcaaggacttcctgctgcggcccaggagccacaagagccgggtgaagggcttcctgcggctgaagatggcctacatgcccaagaatggaggccaggatgaggagaacagcgaccagagagatgacatggagcacggctgggaggtggtggacagcaatgacagcgccagccagcaccaggaggagctgcccccaccacccctgcccccaggctgggaggagaaggtggacaacctgggccgcacctactacgtgaaccacaacaacagaaccacccagtggcaccggcccagcctgatggatgtgtcctctgagagtgacaacaacatccggcagatcaaccaggaggccgcccaccggcgcttccgcagccgccgccacatcagcgaggacctggagcctgagcccagcgagggcggagatgtgcctgagccctgggagaccatcagcgaggaggtgaacattgctggggacagcctgggcctggccctgcccccacctccagccagccctggcagcaggaccagcccccaggagctgtctgaggagctgagccggcggctgcagatcaccccagacagcaatggagagcagttcagcagcctcatccagcgggagcccagcagccggctgcggagctgcagcgtgacagatgctgtggccgagcagggccacctgcccccaggggccaaggacagccctgtgagaagagctgtgaaggacaccctgagcaacccccagagcccccagcccagcccctacaacagccccaagccccagcacaaggtgacccagagcttcctgcccccaggctgggagatgagaattgcccccaacggccggcccttcttcatcgaccacaacaccaagaccaccacctgggaggacccccggctgaagtttcctgtgcacatgaggagcaagaccagcctgaaccccaatgacctgggccccctgcccccaggctgggaggagcgcatccacctggatggccgcaccttctacatcgaccacaacagcaagatcacccagtgggaggacccccggctgcagaacccagccatcactggacctgctgtgccctacagccgggagttcaagcagaagtatgactacttcaggaagaagctgaagaagccagctgacatccccaacagatttgagatgaagctgcacaggaacaacatctttgaggagagctaccgccgcatcatgtctgtgaagaggccagatgtgctgaaggcccggctgtggattgaatttgagagcgagaagggcctggactatggaggagtggcccgggagtggttcttcctgctgagcaaggagatgttcaacccctactacggcctgtttgagtacagcgccacagacaactacaccctgcagatcaaccccaacagcggcctgtgcaatgaagaccacctgagctacttcaccttcatcggccgggtggccggcctggccgtgttccacggcaagctgctggatggcttcttcatccggcccttctacaagatgatgctgggcaagcagatcaccctgaatgacatggagagcgtggacagcgagtactacaacagcctgaagtggatcctggagaatgaccccacagagctggacctgatgttctgcattgatgaggagaactttggccagacctaccaggtggacctgaagcccaatggaagtgagatcatggtgaccaatgaaaacaagcgggagtacatcgacctggtgatccagtggaggtttgtgaacagagtgcagaagcagatgaatgccttcctggagggcttcacagagctgctgcccatcgacctgatcaagatctttgatgaaaatgagctggagctgctgatgtgtggcctgggagatgtggatgtgaatgactggaggcagcacagcatctacaagaatggctactgccccaaccaccctgtgatccagtggttctggaaggctgtgctgctgatggatgctgagaagaggatccggctgctgcagtttgtgacaggcaccagccgggtgcccatgaatggatttgctgagctgtatggcagcaatggcccccagctgttcaccatcgagcagtggggcagccctgagaagctgccccgggcccacacctgcttcaaccggctggacctgcccccctatgagacctttgaggacctgcgggagaagctgctgatggctgtggagaatgcccagggctttgaaggagtggactag

SEQ ID NO: 86934 - DNA, 2736 bp, Artificial Sequence
  derived and/or modified sequence
atggccaccggcctgggggagcctgtgtatggcctgtctgaagatgaaggagagagccgcatcctgcgggtgaaggtggtgtctggcatcgacctggccaagaaggacatctttggagccagtgacccctacgtgaagctgagcctgtatgtggctgatgagaaccgggagctggccctggtgcagaccaagaccatcaagaagaccctgaaccccaagtggaatgaggagttctacttccgggtgaaccccagcaaccaccggctgctgtttgaggtgtttgatgagaaccggctgaccagagatgacttcctgggccaggtggatgtgcccctgagccacctgcccacagaggaccccaccatggagcggccctacaccttcaaggacttcctgctgcggcccaggagccacaagagccgggtgaagggcttcctgcggctgaagatggcctacatgcccaagaatggaggccaggatgaggagaacagcgaccagagagatgacatggagcacggctgggaggtggtggacagcaatgacagcgccagccagcaccaggaggagctgcccccaccacccctgcccccaggctgggaggagaaggtggacaacctgggccgcacctactacgtgaaccacaacaacagaaccacccagtggcaccggcccagcctgatggatgtgtcctctgagagtgacaacaacatccggcagatcaaccaggaggccgcccaccggcgcttccgcagccgccgccacatcagcgaggacctggagcctgagcccagcgagggcggagatgtgcctgagccctgggagaccatcagcgaggaggtgaacattgctggggacagcctgggcctggccctgcccccacctccagccagccctggcagcaggaccagcccccaggagctgtctgaggagctgagccggcggctgcagatcaccccagacagcaatggagagcagttcagcagcctcatccagcgggagcccagcagccggctgcggagctgcagcgtgacagatgctgtggccgagcagggccacctgccccccctggccgaggatggagccagcggcagcgccaccaacagcaacaaccacctgattgagccccagatccggcggcccaggagcctgagcagccccaccgtgaccctgagcgcccccctggagggcgccaaggacagccctgtgagaagagctgtgaaggacaccctgagcaacccccagagcccccagcccagcccctacaacagccccaagccccagcacaaggtgacccagagcttcctgcccccaggctgggagatgagaattgcccccaacggccggcccttcttcatcgaccacaacaccaagaccaccacctgggaggacccccggctgaagtttcctgtgcacatgaggagcaagaccagcctgaaccccaatgacctgggccccctgcccccaggctgggaggagcgcatccacctggatggccgcaccttctacatcgaccacaacagcaagatcacccagtgggaggacccccggctgcagaacccagccatcactggacctgctgtgccctacagccgggagttcaagcagaagtatgactacttcaggaagaagctgaagaagccagctgacatccccaacagatttgagatgaagctgcacaggaacaacatctttgaggagagctaccgccgcatcatgtctgtgaagaggccagatgtgctgaaggcccggctgtggattgaatttgagagcgagaagggcctggactatggaggagtggcccgggagtggttcttcctgctgagcaaggagatgttcaacccctactacggcctgtttgagtacagcgccacagacaactacaccctgcagatcaaccccaacagcggcctgtgcaatgaagaccacctgagctacttcaccttcatcggccgggtggccggcctggccgtgttccacggcaagctgctggatggcttcttcatccggcccttctacaagatgatgctgggcaagcagatcaccctgaatgacatggagagcgtggacagcgagtactacaacagcctgaagtggatcctggagaatgaccccacagagctggacctgatgttctgcattgatgaggagaactttggccagacctaccaggtggacctgaagcccaatggaagtgagatcatggtgaccaatgaaaacaagcgggagtacatcgacctggtgatccagtggaggtttgtgaacagagtgcagaagcagatgaatgccttcctggagggcttcacagagctgctgcccatcgacctgatcaagatctttgatgaaaatgagctggagctgctgatgtgtggcctgggagatgtggatgtgaatgactggaggcagcacagcatctacaagaatggctactgccccaaccaccctgtgatccagtggttctggaaggctgtgctgctgatggatgctgagaagaggatccggctgctgcagtttgtgacaggcaccagccgggtgcccatgaatggatttgctgagctgtatggcagcaatggcccccagctgttcaccatcgagcagtggggcagccctgagaagctgccccgggcccacacctgcttcaaccggctggacctgcccccctatgagacctttgaggacctgcgggagaagctgctgatggctgtggagaatgcccagggctttgaaggagtggactag

SEQ ID NO: 86935 - DNA, 2616 bp, Artificial Sequence
  derived and/or modified sequence
atggccaccggcctgggcgagcccgtgtacggcctgagcgaggacgaaggtgagtctaggattctcagggtaaaggtggtctctggtatagatctcgccaagaaagatatcttcggcgccagcgacccctacgtgaaattgtctttatacgtggcagacgagaaccgcgagttagctctcgtccagaccaaaacaattaaaaaaaccctgaacccaaagtggaacgaagagttttatttccgagtcaacccgtccaatcacagactactttttgaagtgtttgatgagaataggctaacccgggatgattttttgggtcaggtggatgtgcctttgtcacacctgcccaccgaggatcccactatggaaaggccatatacattcaaagattttttgctccgaccacggagccataagagccgcgtgaaaggatttttacgattgaaaatggcgtacatgcccaagaacggcggccaggatgaggaaaacagcgaccagagggacgacatggaacacgggtgggaagttgtcgactcaaatgatagcgcgtcacaacatcaggaagagcttccaccacccccactgccccctggctgggaggagaaggtcgataatctggggcgaacctattatgtgaaccacaataatcgcaccacccagtggcaccgcccctccctgatggacgtgtcatccgagagtgacaataatattcgccagattaaccaggaggcagctcaccgacgattccgatcacgccgacacattagcgaggatctggagccggagccctcggagggcggcgacgtgcctgagccatgggaaacgatttcagaagaggtcaatatcgcgggtgatagcctgggccttgctctgccacctcctcccgcttcccccggatccaggacctccccccaggagttgtccgaagagctgagccgcaggctccagattacaccagatagtaacggcgagcaattcagctcactaatccagcgagaaccaagctccaggctcagatcatgcagcgtgactgacgccgtggccgagcagggccacctgccgcccggcgctaaggattccccagtccgtagggccgtgaaagataccctgtccaatccccagagtcctcagccatcaccttataatagtcctaaacctcagcataaagtgacacaatcatttttgccacccggatgggagatgaggatcgcaccaaacggccgaccttttttcatagatcacaacacaaagacaaccacatgggaggaccctaggctcaaatttcctgtgcacatgaggagtaaaacaagtttgaatccaaacgacttgggccccctgccacctggctgggaggaacgaattcacctcgatggaagaaccttctatattgaccacaactcaaaaatcacccagtgggaagacccacgactgcagaacccagccattaccgggcccgctgtgccttattcccgcgaattcaagcagaagtacgattacttccggaaaaaacttaaaaaaccagcagacatccctaatcgtttcgaaatgaagctccataggaacaatatctttgaagagtcgtaccgtcggatcatgagcgtgaagcgtcccgacgtgctgaaagcccggctgtggattgaattcgagtccgagaaagggttggattacggcggcgttgcacgcgagtggttttttctcctttcaaaggagatgtttaacccctactacggtctttttgagtatagtgcgacagataactataccctgcagataaacccaaactccggtctgtgcaacgaggaccatctgtcctatttcacgttcatcggacgcgtggctggcctcgcagtcttccatggaaagctgctggatggatttttcatccgccctttctacaagatgatgttaggaaagcaaatcactctgaatgacatggagtcagttgactccgagtactacaactcactgaagtggatccttgaaaacgaccctacagaactcgacctgatgttctgcattgatgaagaaaacttcggtcagacctatcaggtggacctcaagcccaatggctccgagataatggtcaccaatgaaaataagcgggagtacattgacctcgtgatccagtggaggttcgtgaatcgcgtccagaagcagatgaacgccttcttggagggattcaccgagctcttgccaatcgacctcattaagattttcgatgaaaacgagctcgaactgctcatgtgcggtcttggggatgtagatgtaaacgactggcgccagcactccatctataagaatggatactgccccaatcatcctgttattcaatggttttggaaggccgttctcttgatggatgcagaaaagcgcatcaggctcctccagtttgttacgggtacaagtagggtgcccatgaatggcttcgcggagctttacggttccaatggcccgcaattatttactattgagcaatggggcagccctgaaaagctgccccgggcccacacctgcttcaaccgcttggatctgcccccctatgagaccttcgaagacttgcgggagaagctgctgatggccgtggagaacgcccagggctttgagggggtggattag

SEQ ID NO: 86936 - DNA, 2736 bp, Artificial Sequence
  derived and/or modified sequence
atggccaccggcctgggcgagcccgtgtacggcctgagcgaggacgagggtgagtctagaattctgagagttaaggtcgtttcaggtattgatctggcaaaaaaggacatctttggggcctcagatccctatgtgaagctgtctctgtacgtggccgatgaaaaccgagaactggctctggtgcagaccaagactatcaagaagacactgaatcctaaatggaatgaggaattttattttcgcgtgaatccaagcaaccatcgtctgcttttcgaggtattcgacgaaaaccggttgacgagagatgatttcttgggccaggtggacgtgcctctttctcatctgccgaccgaagaccccaccatggagaggccttacacttttaaggacttcctcctgagacctcggtcccataaatcccgggtcaagggctttcttcggttgaaaatggcatacatgccaaagaacggtgggcaggacgaagaaaactccgatcagcgtgatgatatggagcatggttgggaggtggttgactctaatgactccgcatcccagcatcaggaagagctgccgcctccaccactgcccccggggtgggaggagaaagttgataatctgggacggacatattatgtcaatcataacaatcgcaccacacagtggcaccggccgagcctgatggatgtgtcctccgaaagcgacaacaatatacgacagatcaaccaggaagccgcccatcggcggttcaggagtagacggcacatctctgaagacctggagccagaaccctccgagggaggggatgtacccgaaccctgggagactatctctgaagaagtgaacatcgcgggagacagcttgggactcgctttgcccccccctcccgccagccccggcagcagaacatcaccccaggagctgtcagaagaactcagccgtcgactgcaaattactccagacagcaacggggagcagttctctagtctgatccagcgggaaccatccagtcgattgagaagctgttccgtcactgatgcagttgccgaacagggacatctgcctcctcttgccgaggacggggcttccggaagcgcaaccaacagcaacaatcacctcatcgaaccccagattaggagaccgagatcactctcttctccgacggttacactgtccgcacccctagagggagccaaggacagtcccgtccggagggccgttaaggacactctgtccaatccgcaatcgccccagccctctccgtacaatagccctaagccccagcataaagtaacgcagtcatttttgccccctggctgggagatgagaatagccccgaacgggcgccccttttttatcgaccataacaccaagacaacaacatgggaagaccctcgattaaagtttccagtgcacatgcgttcgaagacatctctgaatcccaatgacctaggacccctccctcctgggtgggaggaacgaatccacctggacggacgcacgttctatatcgaccacaactctaagattactcagtgggaagatccgagattgcagaatcctgccataacgggccctgctgtgccctattccagagaatttaagcagaaatatgattatttccgcaagaagctcaaaaaacctgcggacatcccaaaccggtttgagatgaaactgcatcgtaacaatatcttcgaggagtcttacaggcgcatcatgtcagtcaagcgacccgatgttttgaaggcacggctgtggattgagtttgagtctgaaaagggtctggattatggaggtgttgcccgggaatggttttttctactgtccaaagagatgttcaacccatactatggcctgttcgaatacagcgctacagataattacaccttgcagattaaccccaactcaggcctctgcaacgaagaccaccttagctatttcacttttataggcagagtggcaggcctggccgtgttccacggtaaactccttgacggctttttcattagacccttttataaaatgatgctcgggaagcaaattactttaaacgacatggaaagcgtggacagcgagtactataacagcctgaagtggattctcgaaaacgacccgaccgagctggacctaatgttctgcattgacgaagagaatttcggccagacgtaccaagttgacttaaagccgaacggctctgaaatcatggtaaccaatgaaaacaaaagagagtacatcgatctcgtgatccagtggaggttcgtgaacagggtccagaagcagatgaacgcattcttggaaggtttcaccgaactccttccgatcgatctcataaagatctttgacgaaaatgagttggagctcctgatgtgtggattaggggatgtggacgtcaacgactggcggcagcattcaatctataagaacggatactgtccaaatcaccctgtgatccagtggttttggaaggctgtgcttctgatggatgctgagaaacggattagactcctgcaattcgttaccgggacgtctagagtccccatgaatgggttcgccgagctgtacggctcaaatggcccccagttgttcaccatcgaacagtggggttcacccgaaaagttgcctcgcgcacacacttgctttaacagactagacctccccccgtatgagacatttgaagacttacgggagaaactgctcatggccgtcgagaacgctcagggtttcgagggagtggattag

SEQ ID NO: 86937 - DNA, 8161 bp, Artificial Sequence
  derived and/or modified sequence
gagaggcgccggggctgccgcccggtgctcggcgcgctctcgggagccgcccgcccgctggtcccgcagccttccgggaggaagcggtgccggcagcgtccagggcgcgctctcgggcaccctcacctgccggcgcccggccgcttacccggcagggcgtgcgcagggtagggtgcgggaccggggggacctggaggcagaggggagaaccggccgtccgcgccgcagcacagccgctgggagcgcctcagaccccgcgcggggcgccggctccatggcgaccgggctcggggagccggtctatggactttccgaagacgagggagagtcccgtattctcagagtaaaagttgtttctggaattgatctcgccaaaaaggacatctttggagccagtgatccgtatgtgaaactttcattgtacgtagcggatgagaatagagaacttgctttggtccagacaaaaacaattaaaaagacactgaacccaaaatggaatgaagaattttatttcagggtaaacccatctaatcacagactcctatttgaagtatttgacgaaaatagactgacacgagacgacttcctgggccaggtggacgtgccccttagtcaccttccgacagaagatccaaccatggagcgaccctatacatttaaggactttctcctcagaccaagaagtcataagtctcgagttaagggatttttgcgattgaaaatggcctatatgccaaaaaatggaggtcaagatgaagaaaacagtgaccagagggatgacatggagcatggatgggaagttgttgactcaaatgactcggcttctcagcaccaagaggaacttcctcctcctcctctgcctcccgggtgggaagaaaaagtggacaatttaggccgaacttactatgtcaaccacaacaaccggaccactcagtggcacagaccaagcctgatggacgtgtcctcggagtcggacaataacatcagacagatcaaccaggaggcagcacaccggcgcttccgctcccgcaggcacatcagcgaagacttggagcccgagccctcggagggcggggatgtccccgagccttgggagaccatttcagaggaagtgaatatcgctggagactctctcggtctggctctgcccccaccaccggcctccccaggatctcggaccagccctcaggagctgtcagaggaactaagcagaaggcttcagatcactccagactccaatggggaacagttcagctctttgattcaaagagaaccctcctcaaggttgaggtcatgcagtgtcaccgacgcagttgcagaacagggccatctaccaccgggtgccaaggactcacccgtacgtcgggctgtgaaagacaccctttccaacccacagtccccacagccatcaccttacaactcccccaaaccacaacacaaagtcacacagagcttcttgccacccggctgggaaatgaggatagcgccaaacggccggcccttcttcattgatcataacacaaagactacaacctgggaagatccacgtttgaaatttccagtacatatgcggtcaaagacatctttaaaccccaatgaccttggcccccttcctcctggctgggaagaaagaattcacttggatggccgaacgttttatattgatcataatagcaaaattactcagtgggaagacccaagactgcagaacccagctattactggtccggctgtcccttactccagagaatttaagcagaaatatgactacttcaggaagaaattaaagaaacctgctgatatccccaataggtttgaaatgaaacttcacagaaataacatatttgaagagtcctatcggagaattatgtccgtgaaaagaccagatgtcctaaaagctagactgtggattgagtttgaatcagagaaaggtcttgactatgggggtgtggccagagaatggttcttcttactgtccaaagagatgttcaacccctactacggcctctttgagtactctgccacggacaactacacccttcagatcaaccctaattcaggcctctgtaatgaggatcatttgtcctacttcacttttattggaagagttgctggtctggccgtatttcatgggaagctcttagatggtttcttcattagaccattttacaagatgatgttgggaaagcagataaccctgaatgacatggaatctgtggatagtgaatattacaactctttgaaatggatcctggagaatgaccctactgagctggacctcatgttctgcatagacgaagaaaactttggacagacatatcaagtggatttgaagcccaatgggtcagaaataatggtcacaaatgaaaacaaaagggaatatatcgacttagtcatccagtggagatttgtgaacagggtccagaagcagatgaacgccttcttggagggattcacagaactacttcctattgatttgattaaaatttttgatgaaaatgagctggagttgctcatgtgcggcctcggtgatgtggatgtgaatgactggagacagcattctatttacaagaacggctactgcccaaaccaccccgtcattcagtggttctggaaggctgtgctactcatggacgccgaaaagcgtatccggttactgcagtttgtcacagggacatcgcgagtacctatgaatggatttgccgaactttatggttccaatggtcctcagctgtttacaatagagcaatggggcagtcctgagaaactgcccagagctcacacatgctttaatcgccttgacttacctccatatgaaacctttgaagatttacgagagaaacttctcatggccgtggaaaatgctcaaggatttgaaggggtggattaagcaccctgtgcctcgggggtggttgttcttcaagcaagttctgcttgcacttttgcatttgcctaacagacttttgcagaggcgatggcagagagcagctgcaggcatggtccctggagccgagccttcaccacgcactcgtccaagttcggatgcgggaacctggtcccagcttgagttcctgcctttcccaccacaaattatcaactggttgatgtgtacactaattacatttcaggaggacttaatgctatttatgttgtgcctctgcaggcaaagcccttaataaatattttacatcctttctaatgacaatgaatggaattaatcactcaacaggtatagtattacgactcatgtttactttttaaaatgatttagaccgattttcagattttatttcgttatgattaaagatgtctcatgtacttggaaaagtgagcattttttttttttttgtatttcactttcataccaggcttaatgtcaatgacatttttatttttgaagtactctgacacctccaccctctactttattagaattggaaggcaaatttttgtccaaaaacctacagacaagtactttgagagaatttccaatataatattagacataatgataattttttccatactcagaatgaaaaactggatattacgtttttgttttggggtttttttgtacaaatttagctaatagctacaggctgagagaattgtaacatagcatgacaaattttgtgttgacttgaaaggaatcacaccattattccttagaagtaattacatgtgttctaacacatttgagacagggttggactcccatttctcatccgagaaattacttaacccttcctggcgctgtacagtcatcttttattctatttcctctttgctgtttgtagtagagacattttgaatgaaacttggcactgcttgattcaaaactgtggaaaccagatctgtttagtctcctgtttgtatgcgtttgctaatggtagctaaataaccagtttttgttgtaaatgcaccaattctgaaggcactttatgtactacatggaggtcatatctggttttgtttttatttttttatcatgaacattaaatgtgatgatgatttcttttccctgcacacatctttccggtgcaatatctatcaattgtgaatctggctgctggtgtataaaaacctggatgtaaagctgagcctacagacctgtcctcaccaactgttttgtgatttctactcaactacaaagatttatttaatgtactcttaatctaactgagttttgttaccaatgacctgttgcatgcttcaataccgtgtactgcctgagttgtgcctcttgtgtgctagattaaaagtgagacagagacttgacttgatcctctgagctcaagctattgagctggtagtggcagaggactgagggtacctgcacagtttgattcttttccacgtgtaagtctccattgcagaattgtcgtgctttgagaaaacacctgaggcagtgtgggagttgaacgaccctgctgtcctttttaacctgtgttgtcctagaccctgtcggggcagtcaggggacactagagatttgatctcatgcgagtcatcaataggacaaaaaagttgtggtttggggaggtctgtttgttacataaaaaggacctttcggtgtaagaaattgccgtttttaccctgccctggctggcatgtgagaagccatggaaggttgtggttgtaaatgagttgtctaaaggggtgcagaggcctgaggtttctaaaagaaggtagatttctacagagctgagtgttggttcctttttcttattggttgaaaattacctggtagtgatcagaaaacttagatgctatgtaactaaaaaaaaaaaaaaaaaaaaaaaaaaaaaaaaaaaaattcccgctcatgagttttgactattggtgagatgttttccgctacagttaacatgacaaatgtctcagtggcaaaaatcccctttttgtaagcccccatagtctagaggcagttttctttttaagaatcatgccagagcctgagtcgagcagtatgctttcttggtttttgagagtaattgtgtaattgtagagggagaaatccaattctaacctaagaactgggattcttctgtcatcttgtaaaccgtatattgaaaaaaacagaatgtcactaaatgcatattaagtcaagtattggaaagtataaaagaaaaatcattctgacaatttctaagccagaagcaaacaagaattactgaaatctaccccatgaatacttggaaggcagtaattgtgagtgacacctcagttcatcaaccccttaataatatcagcttaattttaatgacaactaaatatgctgaagtgaggatttagtattttttaaaaaagcaaaacaaggttcagtagtcctcagcaattctccaagtttctctctttgcctaaaatggtcatagatcttgatttctctgaatcgtgatgaccacacccagtcatcttcacagcataattgcaggtggcagtaaagagagtgtgctgggtaaggagcagttgctgggtcattccttgggccccgacctgcccggggagtagccctgggggagagagggcagtgttgcctatcccagaggtcccagcagtcacactgctctgcaggccgggctctctttatagccagagaaatcaccttaatgcagtctctttagttgtctgctgaagctgtagttattatgggccacttacatgaggctgagaagtacgtgccggagctcacacactgcctgttgcggttctcttaacatcagttatcacagctgcctgtgggtcccgggtatttccattcctgccccttgttggcccgaggaaggatgtggaaagagcacctggtgggatgaaggtccaacagcctgtgcctctccactgctggccctggagccggcagcagtgaggcattcattgtctgtgttgcggtgtattcccagcttcagtgctcttttcctttttgcctgaaatgtttatgcttctctgcagccagtcctctaacaaatctcaagaacaaaggtaagacacttggtttttgtttccaggacccttcagaaggtgacatcagatattccctaaattcagacaatgagggatacagagcgacttggcatgtattatttctcccatgtaaggacaaagggacagattattattgttatttctgagacagagtcttgctctgtagctcaggctggagtgcagtggctcaatctcagctcaccacaacctctgcctcctggcttcaagcgattcttctgcctcagcctccccgaatagttgggattacaggcacccaccaccacgcctggctaatttttgtatttttagtagagatggtttcaccatgctggccaggctggtcttgaactcctgacctcaggtgatcctcccgcctcagccttccaaagtgctgggattacaagcatgagccaccgcacccggcctcacagtgacagattctgagaaacagcatgcaaaacatttgaaccattttctacatctcccattgttgcatagagagtgtgcaccgctgctatcttgccagatccacactggtcctcccgaaagccaggttcatacacagcaactttttaattattctaacagttacccattaacagtcgactcctgtatttctgagagtcttgtactcacctctgaaatttaaaaacgtataaagagagcctgggttaatcagttctgcagcccctacgtgacactgtgctagttctccttcttctgtctcctccttaccctggccctgcacccctgtacttaagagggagaggtgggaggtgctgtctggtatcatttgctgcctcgccagtagagggtgccgctgtgcagggtaactgcccgcctgctcccttcctgacctcccctgaccccgaagatcactacctctgtcattcaggcattggggtacatcctgataagtcgtgtcagaactgccaatttcaggactgagatgtgtttttaaaaaacaaatccttataaactccactttgtactttagattttaaaactggggaaaaatgtgatattctttggaccacttttttaatttatataagccttaatgaacagtgtctatacatttgcatacacacacccccaccccagagtgttctcagtatgtcagagaaagtgccacagcattaggacgggagcttggagaacgttttctagaaaagggttagcttcctgttggcatgaaattttccaagcaaacctcattaaacatctgttgtttgttaaagatgttccactgaaagcaacgcatgtttcaaaggcacgtctttccgttcgttggttttctgtgtgtaaggagtagcattgctgttggcgcctaacctcgcgtgcactgcattctcaaccccgtaccagtgcatcatcagaagccttcctcgtgaccataactctgtgtctgcagatatgtgttcccgtgtaagccagttttccccttttactcagactgatttcacctagattgtcacggtttccttcatgttaactttgcgtgactttgttcttcctttactactctgtatgtaatatatatacatatatacgtacatatgctgtccaaatatatttgtatatatttgtatagcatttttacacctttattgagtaatctggtttcgaaaggaggtgagagtttagtcccttctgcagttttctccaagctgtgtcctgtgaatttcaacccttggagcctaagaaaaccctaggaagatgatgttaatttgctgtcatttcctaattcaggatctatcatcaaatgaaacatgaaaaaaacagtgacttttaaggtgaaaagagtttcaagcattccaaataaattatcaatgtttcataactttttattataaacccacctcctaataggaagccaagtactatttgatacagtggtaaaaaccaaactaccttgaatttttttaaggcaacttatgaataatgctcattttcacagtcagaatagctttaaaatatggttgaatttgatacacacaggaagttttcttgaagaacaatcctttcgcttttcttttttcttgagagatctaaagagaaactgtagattgttttcctgacagcaaaagactaatgtgacaaaatgaagtcattgtaaagaagcgatgcaacttgtcaaatatttaataaagaattatggaagctggaacattttctac

SEQ ID NO: 86938 - DNA, 8281 bp, Artificial Sequence
  derived and/or modified sequence
gagaggcgccggggctgccgcccggtgctcggcgcgctctcgggagccgcccgcccgctggtcccgcagccttccgggaggaagcggtgccggcagcgtccagggcgcgctctcgggcaccctcacctgccggcgcccggccgcttacccggcagggcgtgcgcagggtagggtgcgggaccggggggacctggaggcagaggggagaaccggccgtccgcgccgcagcacagccgctgggagcgcctcagaccccgcgcggggcgccggctccatggcgaccgggctcggggagccggtctatggactttccgaagacgagggagagtcccgtattctcagagtaaaagttgtttctggaattgatctcgccaaaaaggacatctttggagccagtgatccgtatgtgaaactttcattgtacgtagcggatgagaatagagaacttgctttggtccagacaaaaacaattaaaaagacactgaacccaaaatggaatgaagaattttatttcagggtaaacccatctaatcacagactcctatttgaagtatttgacgaaaatagactgacacgagacgacttcctgggccaggtggacgtgccccttagtcaccttccgacagaagatccaaccatggagcgaccctatacatttaaggactttctcctcagaccaagaagtcataagtctcgagttaagggatttttgcgattgaaaatggcctatatgccaaaaaatggaggtcaagatgaagaaaacagtgaccagagggatgacatggagcatggatgggaagttgttgactcaaatgactcggcttctcagcaccaagaggaacttcctcctcctcctctgcctcccgggtgggaagaaaaagtggacaatttaggccgaacttactatgtcaaccacaacaaccggaccactcagtggcacagaccaagcctgatggacgtgtcctcggagtcggacaataacatcagacagatcaaccaggaggcagcacaccggcgcttccgctcccgcaggcacatcagcgaagacttggagcccgagccctcggagggcggggatgtccccgagccttgggagaccatttcagaggaagtgaatatcgctggagactctctcggtctggctctgcccccaccaccggcctccccaggatctcggaccagccctcaggagctgtcagaggaactaagcagaaggcttcagatcactccagactccaatggggaacagttcagctctttgattcaaagagaaccctcctcaaggttgaggtcatgcagtgtcaccgacgcagttgcagaacagggccatctaccaccgcttgcagaagatggtgcgtccggatcagccacaaacagtaacaaccatctaatcgagcctcagatccgccggcctcgtagcctcagctcgccaacagtaactttatctgccccgctggagggtgccaaggactcacccgtacgtcgggctgtgaaagacaccctttccaacccacagtccccacagccatcaccttacaactcccccaaaccacaacacaaagtcacacagagcttcttgccacccggctgggaaatgaggatagcgccaaacggccggcccttcttcattgatcataacacaaagactacaacctgggaagatccacgtttgaaatttccagtacatatgcggtcaaagacatctttaaaccccaatgaccttggcccccttcctcctggctgggaagaaagaattcacttggatggccgaacgttttatattgatcataatagcaaaattactcagtgggaagacccaagactgcagaacccagctattactggtccggctgtcccttactccagagaatttaagcagaaatatgactacttcaggaagaaattaaagaaacctgctgatatccccaataggtttgaaatgaaacttcacagaaataacatatttgaagagtcctatcggagaattatgtccgtgaaaagaccagatgtcctaaaagctagactgtggattgagtttgaatcagagaaaggtcttgactatgggggtgtggccagagaatggttcttcttactgtccaaagagatgttcaacccctactacggcctctttgagtactctgccacggacaactacacccttcagatcaaccctaattcaggcctctgtaatgaggatcatttgtcctacttcacttttattggaagagttgctggtctggccgtatttcatgggaagctcttagatggtttcttcattagaccattttacaagatgatgttgggaaagcagataaccctgaatgacatggaatctgtggatagtgaatattacaactctttgaaatggatcctggagaatgaccctactgagctggacctcatgttctgcatagacgaagaaaactttggacagacatatcaagtggatttgaagcccaatgggtcagaaataatggtcacaaatgaaaacaaaagggaatatatcgacttagtcatccagtggagatttgtgaacagggtccagaagcagatgaacgccttcttggagggattcacagaactacttcctattgatttgattaaaatttttgatgaaaatgagctggagttgctcatgtgcggcctcggtgatgtggatgtgaatgactggagacagcattctatttacaagaacggctactgcccaaaccaccccgtcattcagtggttctggaaggctgtgctactcatggacgccgaaaagcgtatccggttactgcagtttgtcacagggacatcgcgagtacctatgaatggatttgccgaactttatggttccaatggtcctcagctgtttacaatagagcaatggggcagtcctgagaaactgcccagagctcacacatgctttaatcgccttgacttacctccatatgaaacctttgaagatttacgagagaaacttctcatggccgtggaaaatgctcaaggatttgaaggggtggattaagcaccctgtgcctcgggggtggttgttcttcaagcaagttctgcttgcacttttgcatttgcctaacagacttttgcagaggcgatggcagagagcagctgcaggcatggtccctggagccgagccttcaccacgcactcgtccaagttcggatgcgggaacctggtcccagcttgagttcctgcctttcccaccacaaattatcaactggttgatgtgtacactaattacatttcaggaggacttaatgctatttatgttgtgcctctgcaggcaaagcccttaataaatattttacatcctttctaatgacaatgaatggaattaatcactcaacaggtatagtattacgactcatgtttactttttaaaatgatttagaccgattttcagattttatttcgttatgattaaagatgtctcatgtacttggaaaagtgagcattttttttttttttgtatttcactttcataccaggcttaatgtcaatgacatttttatttttgaagtactctgacacctccaccctctactttattagaattggaaggcaaatttttgtccaaaaacctacagacaagtactttgagagaatttccaatataatattagacataatgataattttttccatactcagaatgaaaaactggatattacgtttttgttttggggtttttttgtacaaatttagctaatagctacaggctgagagaattgtaacatagcatgacaaattttgtgttgacttgaaaggaatcacaccattattccttagaagtaattacatgtgttctaacacatttgagacagggttggactcccatttctcatccgagaaattacttaacccttcctggcgctgtacagtcatcttttattctatttcctctttgctgtttgtagtagagacattttgaatgaaacttggcactgcttgattcaaaactgtggaaaccagatctgtttagtctcctgtttgtatgcgtttgctaatggtagctaaataaccagtttttgttgtaaatgcaccaattctgaaggcactttatgtactacatggaggtcatatctggttttgtttttatttttttatcatgaacattaaatgtgatgatgatttcttttccctgcacacatctttccggtgcaatatctatcaattgtgaatctggctgctggtgtataaaaacctggatgtaaagctgagcctacagacctgtcctcaccaactgttttgtgatttctactcaactacaaagatttatttaatgtactcttaatctaactgagttttgttaccaatgacctgttgcatgcttcaataccgtgtactgcctgagttgtgcctcttgtgtgctagattaaaagtgagacagagacttgacttgatcctctgagctcaagctattgagctggtagtggcagaggactgagggtacctgcacagtttgattcttttccacgtgtaagtctccattgcagaattgtcgtgctttgagaaaacacctgaggcagtgtgggagttgaacgaccctgctgtcctttttaacctgtgttgtcctagaccctgtcggggcagtcaggggacactagagatttgatctcatgcgagtcatcaataggacaaaaaagttgtggtttggggaggtctgtttgttacataaaaaggacctttcggtgtaagaaattgccgtttttaccctgccctggctggcatgtgagaagccatggaaggttgtggttgtaaatgagttgtctaaaggggtgcagaggcctgaggtttctaaaagaaggtagatttctacagagctgagtgttggttcctttttcttattggttgaaaattacctggtagtgatcagaaaacttagatgctatgtaactaaaaaaaaaaaaaaaaaaaaaaaaaaaaaaaaaaaaattcccgctcatgagttttgactattggtgagatgttttccgctacagttaacatgacaaatgtctcagtggcaaaaatcccctttttgtaagcccccatagtctagaggcagttttctttttaagaatcatgccagagcctgagtcgagcagtatgctttcttggtttttgagagtaattgtgtaattgtagagggagaaatccaattctaacctaagaactgggattcttctgtcatcttgtaaaccgtatattgaaaaaaacagaatgtcactaaatgcatattaagtcaagtattggaaagtataaaagaaaaatcattctgacaatttctaagccagaagcaaacaagaattactgaaatctaccccatgaatacttggaaggcagtaattgtgagtgacacctcagttcatcaaccccttaataatatcagcttaattttaatgacaactaaatatgctgaagtgaggatttagtattttttaaaaaagcaaaacaaggttcagtagtcctcagcaattctccaagtttctctctttgcctaaaatggtcatagatcttgatttctctgaatcgtgatgaccacacccagtcatcttcacagcataattgcaggtggcagtaaagagagtgtgctgggtaaggagcagttgctgggtcattccttgggccccgacctgcccggggagtagccctgggggagagagggcagtgttgcctatcccagaggtcccagcagtcacactgctctgcaggccgggctctctttatagccagagaaatcaccttaatgcagtctctttagttgtctgctgaagctgtagttattatgggccacttacatgaggctgagaagtacgtgccggagctcacacactgcctgttgcggttctcttaacatcagttatcacagctgcctgtgggtcccgggtatttccattcctgccccttgttggcccgaggaaggatgtggaaagagcacctggtgggatgaaggtccaacagcctgtgcctctccactgctggccctggagccggcagcagtgaggcattcattgtctgtgttgcggtgtattcccagcttcagtgctcttttcctttttgcctgaaatgtttatgcttctctgcagccagtcctctaacaaatctcaagaacaaaggtaagacacttggtttttgtttccaggacccttcagaaggtgacatcagatattccctaaattcagacaatgagggatacagagcgacttggcatgtattatttctcccatgtaaggacaaagggacagattattattgttatttctgagacagagtcttgctctgtagctcaggctggagtgcagtggctcaatctcagctcaccacaacctctgcctcctggcttcaagcgattcttctgcctcagcctccccgaatagttgggattacaggcacccaccaccacgcctggctaatttttgtatttttagtagagatggtttcaccatgctggccaggctggtcttgaactcctgacctcaggtgatcctcccgcctcagccttccaaagtgctgggattacaagcatgagccaccgcacccggcctcacagtgacagattctgagaaacagcatgcaaaacatttgaaccattttctacatctcccattgttgcatagagagtgtgcaccgctgctatcttgccagatccacactggtcctcccgaaagccaggttcatacacagcaactttttaattattctaacagttacccattaacagtcgactcctgtatttctgagagtcttgtactcacctctgaaatttaaaaacgtataaagagagcctgggttaatcagttctgcagcccctacgtgacactgtgctagttctccttcttctgtctcctccttaccctggccctgcacccctgtacttaagagggagaggtgggaggtgctgtctggtatcatttgctgcctcgccagtagagggtgccgctgtgcagggtaactgcccgcctgctcccttcctgacctcccctgaccccgaagatcactacctctgtcattcaggcattggggtacatcctgataagtcgtgtcagaactgccaatttcaggactgagatgtgtttttaaaaaacaaatccttataaactccactttgtactttagattttaaaactggggaaaaatgtgatattctttggaccacttttttaatttatataagccttaatgaacagtgtctatacatttgcatacacacacccccaccccagagtgttctcagtatgtcagagaaagtgccacagcattaggacgggagcttggagaacgttttctagaaaagggttagcttcctgttggcatgaaattttccaagcaaacctcattaaacatctgttgtttgttaaagatgttccactgaaagcaacgcatgtttcaaaggcacgtctttccgttcgttggttttctgtgtgtaaggagtagcattgctgttggcgcctaacctcgcgtgcactgcattctcaaccccgtaccagtgcatcatcagaagccttcctcgtgaccataactctgtgtctgcagatatgtgttcccgtgtaagccagttttccccttttactcagactgatttcacctagattgtcacggtttccttcatgttaactttgcgtgactttgttcttcctttactactctgtatgtaatatatatacatatatacgtacatatgctgtccaaatatatttgtatatatttgtatagcatttttacacctttattgagtaatctggtttcgaaaggaggtgagagtttagtcccttctgcagttttctccaagctgtgtcctgtgaatttcaacccttggagcctaagaaaaccctaggaagatgatgttaatttgctgtcatttcctaattcaggatctatcatcaaatgaaacatgaaaaaaacagtgacttttaaggtgaaaagagtttcaagcattccaaataaattatcaatgtttcataactttttattataaacccacctcctaataggaagccaagtactatttgatacagtggtaaaaaccaaactaccttgaatttttttaaggcaacttatgaataatgctcattttcacagtcagaatagctttaaaatatggttgaatttgatacacacaggaagttttcttgaagaacaatcctttcgcttttcttttttcttgagagatctaaagagaaactgtagattgttttcctgacagcaaaagactaatgtgacaaaatgaagtcattgtaaagaagcgatgcaacttgtcaaatatttaataaagaattatggaagctggaacattttctac

SEQ ID NO: 86939 - DNA, 2616 bp, Artificial Sequence
  derived and/or modified sequence
atggccactggcctgggcgagccagtttatggtctatcagaagacgagggagaaagcagaattctgcgagttaaagtagtgagcgggattgacttggccaagaaagatattttcggagccagcgatccttacgtcaaattgagtctctacgtcgctgacgaaaaccgcgagctggctctggtgcagactaagaccatcaaaaagaccctgaaccctaagtggaacgaggaattctactttcgcgtcaaccctagcaaccaccggctcttgtttgaagtgtttgacgagaacaggctcacaagagatgacttcctaggccaggtggacgttcctctcagccatctgccgaccgaagatcccacaatggagcgaccttacacattcaaagactttctcctgaggcctagaagtcataagtctcgcgttaagggttttctgaggctcaaaatggcttacatgccaaagaatgggggacaggacgaggagaactcagaccaacgcgacgatatggagcacggatgggaggtcgttgactccaatgatagtgcctcacagcaccaggaggagctgcccccacctcctctgccaccgggttgggaagaaaaagtggacaacttggggcgtacgtactacgtgaaccataataacagaacaacgcagtggcataggcctagcctcatggatgtaagttctgaaagcgataacaatatccgtcaaattaatcaggaggccgctcataggcgctttcgttcccgcagacatatcagcgaggatcttgagccagagcccagtgagggaggagatgtcccagagccctgggagacaataagcgaggaagtgaatattgcaggagattctctcggtctggcacttcctcctccccctgcttctccaggatcccgcacatctccccaggagcttagtgaggagctctcgaggcgcctccagataactcctgactctaacggtgagcaattctcttccctaattcaaagggaaccgagcagccgtctgaggagttgtagtgtgacagacgctgtagcggagcaggggcacctgccaccaggcgctaaggattctcccgttaggcgagccgtgaaggacacactttccaatcctcagtccccacagccttcaccttacaactcacctaagcctcagcataaagtgacacagtcctttctgcctcctggatgggagatgaggatagcacctaatggccgacctttctttatagatcacaacaccaaaacaactacgtgggaagacccacggctgaagtttcccgtgcacatgcgatccaagacgtccctgaaccctaacgacttgggcccattgccacctggttgggaagagaggattcatctggatggtcgaactttttatatcgatcataactcaaaaatcacacagtgggaagaccctcggctacagaacccagccatcaccgggccagctgttccatattctagggagttcaagcaaaaatacgactattttagaaaaaaactgaaaaagcccgctgacattcccaacaggttcgaaatgaagcttcataggaataacatctttgaagagagctaccggaggataatgtcggttaagagaccagacgtactcaaggccaggctctggatcgagttcgaaagcgaaaaaggcctggattacgggggagtcgctagagaatggttctttctgctgtccaaggagatgtttaacccctactatgggctgttcgagtacagcgcaactgataactacaccttgcaaataaacccaaacagcggcctgtgtaatgaagatcatctttcctattttacgttcatcggtcgagtggcaggtctggcagtcttccatggcaagctgcttgacgggttttttatcagacccttttataagatgatgctgggaaaacaaattaccttaaatgatatggaaagtgtagactcagagtactataattccctgaagtggatcttggaaaacgatcctaccgagcttgacttgatgttctgtatcgatgaagagaacttcggccagacatatcaggtggacttgaagcctaacgggtcggagataatggtcaccaatgagaacaagcgggagtatatagacctggtgatccagtggagattcgtcaaccgggttcagaagcagatgaatgcattcctggagggattcaccgagctgctgcctatcgacctgattaaaatattcgatgagaatgagctggaactgctgatgtgcggactcggggacgtggacgtcaacgactggcgtcaacatagcatatacaagaatggatactgcccaaatcatccggttatacagtggttttggaaggcagtgttgctgatggatgctgaaaagcgaattagattgctacaatttgtgacaggcacctctcgcgtgcccatgaacgggttcgctgagttgtatgggagcaacgggcctcaactgttcactattgagcagtggggatcgcctgaaaagctacctcgagcacacacatgtttcaacaggctagatttgcccccatacgagacgtttgaggatttacgcgaaaagcttctgatggcagtggagaatgctcagggttttgagggtgttgactag

SEQ ID NO: 86940 - DNA, 2736 bp, Artificial Sequence
  derived and/or modified sequence
atggccactggcctcggtgaaccagtgtacggtttatcagaagacgaaggtgaatctagaatcctccgtgtgaaagtagtgtccgggatcgacctggccaagaaggacatcttcggcgcttccgacccctacgtcaagctgagcctctacgtcgcagacgagaaccgggaattagcgctcgtgcagaccaagacaattaagaaaactctaaatcccaagtggaatgaggagttctatttcagggtgaatccatccaaccacaggctactgttcgaggttttcgacgaaaatcgattgacaagggatgatttcttgggacaagttgatgtcccgctctcgcatctgcccaccgaagatcccacaatggagcgcccttacactttcaaagatttcctgctgcgcccaaggagtcataaatctcgtgttaaaggttttctccgactgaaaatggcctacatgcccaagaacggcggtcaggacgaagagaattcagaccagagagacgacatggagcacggctgggaagtcgtagattctaatgactctgccagtcaacaccaggaggaactgcctccccctcctctgccgcctggttgggaggaaaaggtcgataacctggggagaacatattatgtcaaccataacaaccgcaccacgcagtggcaccgtccatcccttatggatgtcagttccgagagtgataacaatatccgtcagattaaccaggaagctgcgcatcgtcggtttcgatcaagaagacatatcagtgaagatctggagccagagccctcggagggcggtgacgtacctgagccctgggaaactatcagcgaagaggtgaatattgctggtgatagcctaggcctggcactgccccctcctcccgcaagccccggatcccgcacgtctcctcaggagctgagcgaggaactctccagacgcctgcaaatcaccccagattccaacggcgagcaattctctagccttatacaaagggaacccagcagtagactgagaagttgttcggttaccgacgcagtggctgagcagggacatctgcccccacttgccgaggacggagcctcaggctctgcgaccaacagtaacaaccacctcatcgaaccccagatccgcagacctcggagtttgtcaagtcccacagtgaccttatcagcgccactagaaggggcaaaggattcaccagttcgccgtgccgtcaaggacacactctctaacccacagagtccacaaccgtcaccctacaattcccccaaaccacagcacaaggtcacccaatccttcctgccacccggatgggagatgaggattgcgcctaatggtcggccatttttcatcgatcacaataccaagactaccacctgggaggaccccagactaaagtttcctgtgcacatgcgctcgaagacgtcattaaatcctaacgaccttggaccactccctccgggatgggaggagcgcattcatctcgatggacgcacgttctacattgaccataattccaaaattacccagtgggaggacccacggctgcagaaccccgcaattaccggccctgcagtgccatactcccgggaattcaaacagaaatatgactacttcagaaagaaactcaagaaacccgcagacattccaaaccggtttgagatgaaactgcatcgaaataacatttttgaggaaagttaccggaggatcatgtccgttaaacgaccggatgtgctgaaggcccgattgtggatagaatttgaatccgaaaaaggactggactacggcggtgttgcacgtgagtggttctttcttctgtcaaaggagatgtttaatccctactacggactttttgagtactctgccactgacaattataccctgcagattaacccaaacagtgggctttgtaacgaggatcatctgagctacttcacgtttattggccgtgtggctggattggcagtgtttcacgggaagctgcttgacggcttctttatcaggccattctataagatgatgttgggcaagcagattaccctgaacgatatggagtcagtggactccgagtactacaactcacttaagtggatacttgagaacgatccaacagagctcgaccttatgttctgcattgatgaagagaacttcggacagacctaccaggttgatctaaagccgaatggaagtgagatcatggtgacgaatgaaaacaagagggagtatattgacttggtgatccagtggagattcgtgaaccgggttcagaaacagatgaacgccttccttgagggctttacagagctcttgccaatagatcttatcaaaatttttgatgagaacgaattggaacttcttatgtgcgggttgggagacgtggacgtgaatgactggagacagcacagtatctataagaacggttactgcccaaatcaccccgtgattcagtggttttggaaggctgtgctgctgatggatgcagagaagaggatccggctgcttcagttcgtgacaggaacctcgcgagtccctatgaacggctttgccgaactgtatggctccaatgggcctcagctgtttaccattgagcagtggggtagccccgagaagttgcccagagcccatacgtgttttaatcgtctggacctgccaccttatgagaccttcgaagatctgcgagagaaattgctgatggctgtggaaaatgcccagggtttcgagggcgtggattag

SEQ ID NO: 86941 - DNA, 2616 bp, Artificial Sequence
  derived and/or modified sequence
atggccaccggcctgggcgagcccgtgtacggcctgagcgaggacgagggcgagagcagaatcctgagagtgaaggtggtgagcggcatcgacctggccaagaaggacatcttcggcgccagcgacccctacgtgaagctgagcctgtacgtggccgacgagaacagagagctggccctggtgcagaccaagaccatcaagaagaccctgaaccccaagtggaacgaggagttctacttcagagtgaaccccagcaaccacagactgctgttcgaggtgttcgacgagaacagactgaccagagacgacttcctgggccaggtggacgtgcccctgagccacctgcccaccgaggaccccaccatggagagaccctacaccttcaaggacttcctgctgagacccagaagccacaagagcagagtgaagggcttcctgagactgaagatggcctacatgcccaagaacggcggccaggacgaggagaacagcgaccagagagacgacatggagcacggctgggaggtggtggacagcaacgacagcgccagccagcaccaggaggagctgccccccccccccctgccccccggctgggaggagaaggtggacaacctgggcagaacctactacgtgaaccacaacaacagaaccacccagtggcacagacccagcctgatggacgtgagcagcgagagcgacaacaacatcagacagatcaaccaggaggccgcccacagaagattcagaagcagaagacacatcagcgaggacctggagcccgagcccagcgagggcggcgacgtgcccgagccctgggagaccatcagcgaggaggtgaacatcgccggcgacagcctgggcctggccctgccccccccccccgccagccccggcagcagaaccagcccccaggagctgagcgaggagctgagcagaagactgcagatcacccccgacagcaacggcgagcagttcagcagcctgatccagagagagcccagcagcagactgagaagctgcagcgtgaccgacgccgtggccgagcagggccacctgccccccggcgccaaggacagccccgtgagaagagccgtgaaggacaccctgagcaacccccagagcccccagcccagcccctacaacagccccaagccccagcacaaggtgacccagagcttcctgccccccggctgggagatgagaatcgcccccaacggcagacccttcttcatcgaccacaacaccaagaccaccacctgggaggaccccagactgaagttccccgtgcacatgagaagcaagaccagcctgaaccccaacgacctgggccccctgccccccggctgggaggagagaatccacctggacggcagaaccttctacatcgaccacaacagcaagatcacccagtgggaggaccccagactgcagaaccccgccatcaccggccccgccgtgccctacagcagagagttcaagcagaagtacgactacttcagaaagaagctgaagaagcccgccgacatccccaacagattcgagatgaagctgcacagaaacaacatcttcgaggagagctacagaagaatcatgagcgtgaagagacccgacgtgctgaaggccagactgtggatcgagttcgagagcgagaagggcctggactacggcggcgtggccagagagtggttcttcctgctgagcaaggagatgttcaacccctactacggcctgttcgagtacagcgccaccgacaactacaccctgcagatcaaccccaacagcggcctgtgcaacgaggaccacctgagctacttcaccttcatcggcagagtggccggcctggccgtgttccacggcaagctgctggacggcttcttcatcagacccttctacaagatgatgctgggcaagcagatcaccctgaacgacatggagagcgtggacagcgagtactacaacagcctgaagtggatcctggagaacgaccccaccgagctggacctgatgttctgcatcgacgaggagaacttcggccagacctaccaggtggacctgaagcccaacggcagcgagatcatggtgaccaacgagaacaagagagagtacatcgacctggtgatccagtggagattcgtgaacagagtgcagaagcagatgaacgccttcctggagggcttcaccgagctgctgcccatcgacctgatcaagatcttcgacgagaacgagctggagctgctgatgtgcggcctgggcgacgtggacgtgaacgactggagacagcacagcatctacaagaacggctactgccccaaccaccccgtgatccagtggttctggaaggccgtgctgctgatggacgccgagaagagaatcagactgctgcagttcgtgaccggcaccagcagagtgcccatgaacggcttcgccgagctgtacggcagcaacggcccccagctgttcaccatcgagcagtggggcagccccgagaagctgcccagagcccacacctgcttcaacagactggacctgcccccctacgagaccttcgaggacctgagagagaagctgctgatggccgtggagaacgcccagggcttcgagggcgtggactag

SEQ ID NO: 86942 - DNA, 2736 bp, Artificial Sequence
  derived and/or modified sequence
atggccaccggcctgggcgagcccgtgtacggcctgagcgaggacgagggcgagagcagaatcctgagagtgaaggtggtgagcggcatcgacctggccaagaaggacatcttcggcgccagcgacccctacgtgaagctgagcctgtacgtggccgacgagaacagagagctggccctggtgcagaccaagaccatcaagaagaccctgaaccccaagtggaacgaggagttctacttcagagtgaaccccagcaaccacagactgctgttcgaggtgttcgacgagaacagactgaccagagacgacttcctgggccaggtggacgtgcccctgagccacctgcccaccgaggaccccaccatggagagaccctacaccttcaaggacttcctgctgagacccagaagccacaagagcagagtgaagggcttcctgagactgaagatggcctacatgcccaagaacggcggccaggacgaggagaacagcgaccagagagacgacatggagcacggctgggaggtggtggacagcaacgacagcgccagccagcaccaggaggagctgccccccccccccctgccccccggctgggaggagaaggtggacaacctgggcagaacctactacgtgaaccacaacaacagaaccacccagtggcacagacccagcctgatggacgtgagcagcgagagcgacaacaacatcagacagatcaaccaggaggccgcccacagaagattcagaagcagaagacacatcagcgaggacctggagcccgagcccagcgagggcggcgacgtgcccgagccctgggagaccatcagcgaggaggtgaacatcgccggcgacagcctgggcctggccctgccccccccccccgccagccccggcagcagaaccagcccccaggagctgagcgaggagctgagcagaagactgcagatcacccccgacagcaacggcgagcagttcagcagcctgatccagagagagcccagcagcagactgagaagctgcagcgtgaccgacgccgtggccgagcagggccacctgccccccctggccgaggacggcgccagcggcagcgccaccaacagcaacaaccacctgatcgagccccagatcagaagacccagaagcctgagcagccccaccgtgaccctgagcgcccccctggagggcgccaaggacagccccgtgagaagagccgtgaaggacaccctgagcaacccccagagcccccagcccagcccctacaacagccccaagccccagcacaaggtgacccagagcttcctgccccccggctgggagatgagaatcgcccccaacggcagacccttcttcatcgaccacaacaccaagaccaccacctgggaggaccccagactgaagttccccgtgcacatgagaagcaagaccagcctgaaccccaacgacctgggccccctgccccccggctgggaggagagaatccacctggacggcagaaccttctacatcgaccacaacagcaagatcacccagtgggaggaccccagactgcagaaccccgccatcaccggccccgccgtgccctacagcagagagttcaagcagaagtacgactacttcagaaagaagctgaagaagcccgccgacatccccaacagattcgagatgaagctgcacagaaacaacatcttcgaggagagctacagaagaatcatgagcgtgaagagacccgacgtgctgaaggccagactgtggatcgagttcgagagcgagaagggcctggactacggcggcgtggccagagagtggttcttcctgctgagcaaggagatgttcaacccctactacggcctgttcgagtacagcgccaccgacaactacaccctgcagatcaaccccaacagcggcctgtgcaacgaggaccacctgagctacttcaccttcatcggcagagtggccggcctggccgtgttccacggcaagctgctggacggcttcttcatcagacccttctacaagatgatgctgggcaagcagatcaccctgaacgacatggagagcgtggacagcgagtactacaacagcctgaagtggatcctggagaacgaccccaccgagctggacctgatgttctgcatcgacgaggagaacttcggccagacctaccaggtggacctgaagcccaacggcagcgagatcatggtgaccaacgagaacaagagagagtacatcgacctggtgatccagtggagattcgtgaacagagtgcagaagcagatgaacgccttcctggagggcttcaccgagctgctgcccatcgacctgatcaagatcttcgacgagaacgagctggagctgctgatgtgcggcctgggcgacgtggacgtgaacgactggagacagcacagcatctacaagaacggctactgccccaaccaccccgtgatccagtggttctggaaggccgtgctgctgatggacgccgagaagagaatcagactgctgcagttcgtgaccggcaccagcagagtgcccatgaacggcttcgccgagctgtacggcagcaacggcccccagctgttcaccatcgagcagtggggcagccccgagaagctgcccagagcccacacctgcttcaacagactggacctgcccccctacgagaccttcgaggacctgagagagaagctgctgatggccgtggagaacgcccagggcttcgagggcgtggactag

SEQ ID NO: 86943 - protein, 269 aa, Artificial Sequence
  derived and/or modified sequence
MSWKKALRIPGDLRVATVTLMLAMLSSLLAEGRDSPEDFVFQFKGMCYFTNGTERVRLVTRYIYNREEYARFDSDVGVYRAVTPQGRPDAEYWNSQKEVLEGTRAELDTVCRHNYEVAFRGILQRRVEPTVTISPSRTEALNHHNLLVCSVTDFYPGQIKVRWFRNDQEETAGVVSTPLIRNGDWTFQILVMLEMTPQRGDVYTCHVEHPSLQSPITVEWRAQSESAQSKMLSGVGGFVLGLIFLGLGLIIRQRSQKGPQGPPPAGLLH

SEQ ID NO: 86944 - protein, 269 aa, Artificial Sequence
  derived and/or modified sequence
MSWKKALRIPGGLRVATVTLMLAMLSTPVAEGRDSPEDFVYQFKGMCYFTNGTERVRLVTRYIYNREEYARFDSDVGVYRAVTPLGPPDAEYWNSQKEVLERTRAELDTVCRHNYQLELRTTLQRRVEPTVTISPSRTEALNHHNLLVCSVTDFYPAQIKVRWFRNDQEETTGVVSTPLIRNGDWTFQILVMLEMTPQRGDVYTCHVEHPSLQNPIIVEWRAQSESAQSKMLSGIGGFVLGLIFLGLGLIIHHRSQKGPQGPPPAGLLH

SEQ ID NO: 86945 - DNA, 810 bp, Artificial Sequence
  derived and/or modified sequence
atgtcctggaaaaaagctttgcgcatcccgggtgacctcagagtggctacggtaaccctcatgctggctatgttgtcgtctttgctggccgagggacgcgacagccccgaggacttcgtgttccaatttaaaggaatgtgctacttcaccaatggcacagagagggtccgcctggtgaccagatatatctacaacagggaggaatatgcccggtttgactccgacgtgggggtctatcgcgccgtgactccacagggcagacctgacgccgagtattggaactctcagaaggaggtgctcgagggcacccgcgcggaattggatacagtgtgccgccataactatgaggtcgcctttcgcgggatactccaaaggagagtggaacctacggtgacgatttcacccagtagaacagaagccctgaaccaccacaatctcctggtgtgctcagtgacagacttttatcccggtcagataaaagtgcgttggtttcgcaacgaccaggaagagaccgctggggtggtcagcaccccactgatccggaatggtgattggaccttccagatactagtaatgctcgagatgacaccccagcgaggcgatgtgtatacctgccacgtcgaacatcccagcctgcaatcacccatcaccgttgagtggagagctcagtctgaaagtgctcagtccaaaatgctgtctggagtggggggcttcgtactaggactgatctttctggggttggggctcatcatcagacaaagatctcaaaagggtccccaagggcccccacccgctggcctactacattag

SEQ ID NO: 86946 - DNA, 810 bp, Artificial Sequence
  derived and/or modified sequence
atgagttggaagaaggctctcagaatccctggcggtcttcgggcggcaacagtgactttgatgctggcgatgctttccacacccgtcgccgaaggtcgggactcccctgaagatttcgtttatcagtttaaggcaatgtgctattttacgaatgggacagagagagtacgctatgtcacacggtacatttataatcgcgaggagtacgcaaggttcgattctgatgtggaggtctatcgggccgtcacacctttagggcctccagatgccgaatattggaattcacagaaggaagtgctggaacgaacaagagcggagctcgacaccgtctgtcgacacaactaccaacttgaactgcgcacgaccctgcagcggcgcgtggaacctacagtgacaatttcaccctctcgcactgaggcccttaatcatcacaacctcttggtgtgcagcgtgaccgatttttatccggctcagattaaagttaggtggttcagaaatgatcaggaggagactaccggcgtggtttctacccctctgattagaaatggagactggacattccagatcctggtcatgcttgaaatgactcctcagcacggagatgtgtacacctgtcacgtggaacacccctctctccagaaccctatcactgttgagtggagagctcagtcagaaagcgctcaaagcaagatgctcagcggaatcggtgggtttgttctgggcctgatctttttagggctgggcctcatcattcaccaccggtcacagaagggacctcaaggtccccctccggctggactactccattag

SEQ ID NO: 86947 - DNA, 810 bp, Artificial Sequence
  derived and/or modified sequence
atgagttggaagaaggcattacgcatccccggaggtctgcgggtggccactgtcacgctgatgttggccatgctctccacaccagtagcggagggacgagatagccctgaggatttcgtgtaccaattcaagggaatgtgttacttcacgaatggtacagagagagtccggctcgttactcgttacatctacaatcgcgaggagtacgcgcgttttgactcggacgttggggtttacagggccgtcacacccctgggacccccagatgctgaatactggaactcgcagaaggaagttctagagcgtactagagctgaactcgacaccgtctgtaggcacaactaccagctagaactgcgaacaacactgcagcgacgggtggaaccgacagtgaccatctccccgtcacgcaccgaagcactgaatcatcacaacctgctggtctgtagtgttacagacttctatcccgcccaaatcaaagtgagatggtttcggaacgatcaggaggagactacaggtgtcgtaagtacaccactcatcagaaacggtgattggaccttccaaattctggttatgctggagatgactccccagagaggagacgtgtacacttgccacgttgagcacccttcactgcagaatcccatcatagtcgagtggagggctcaatccgaatccgcccagtcaaagatgctatccgggattggcgggtttgtcctgggtctgatttttctgggactggggcttattattcaccatcgaagtcagaaaggaccacaaggacctccccccgcaggactgttgcattag

SEQ ID NO: 86948 - DNA, 744 bp, Artificial Sequence
  derived and/or modified sequence
atgctatctacccccgtggctgaaggtcgtgatagccctgaagacttcgtctaccagttcaagggcatgtgctactttaccaacggtaccgagagagtaaggggcgtgactcgttatatttataaccgcgaggagtatgcaagatttgactcagatgtgggcgtgtatagggctgtaacccccttaggtcctccagccgccgaatattggaacagtcaaaaggaagttctcgagcgtacccgagctgagctggatacggtttgtcgacataattaccagctggagttacgtaccacgctccagaggagggtggaaccaacagtcaccatttcaccttctaggacagaggccctgaatcaccacaacttactcgtctgtagcgttaccgatttctaccctgctcagatcaaagtgcgttggttccgaaacgaccaggaggagactactggtgtcgtaagtacccccttaatccggaacggggattggacgttccaaattcttgtcatgttggaaatgacaccccagaggggtgatgtttacacgtgtcatgtcgaacatccctcactgcagaaccccattattgtcgagtggagggctcagtctgaatccgcacagtccaagatgctctccggcattgggggattcgtgctgggcctgatcttccttggtctggggctgatcattcatcacagaagtcagaaggccctacctcagggaccaccgccagctggtgacattagctag

SEQ ID NO: 86949 - DNA, 810 bp, Artificial Sequence
  derived and/or modified sequence
atgtcttggaaaaaagccctccgcatccccggcggcctgagggttgccaccgtcacattgatgctggctatgctgtccactcccgtggctgaagggagggactctccagaggattttgtataccagttcaagggcatgtgctactttacgaacggaaccgagcgggttaggggcgtgacaaggtatatctacaatagagaggaatacgctagatttgactccgatgtgggtgtgtaccgagcagttactccgctaggccctccggccgccgaatactggaatagccagaaggaagtgttggaacggactcgcgctgagctcgacactgtgtgtaggcataactaccaactggaactaagaactacacttcaaagacgggtctaccccgaagtcaccgtgtacccggctaagacacagccattgcagcaccataatttactcgtctgcagtgttaatggcttttacccaggcagcatcgaagtcaggtggttccgtaatgggcaagaagaaaagaccggcgtagtcagcaccgggcttatccaaaacggagactggactttccagactctggtcatgcttgaaacggtgcctagaagcggggaggtttacacgtgccaagtggagcatccatccctcacttcccccctcactgtggagtggcgagctagaagtgaaagtgctcaatcaaaaatgcttagcggggtcgggggatttgtgctgggcctgctgttcctgggcgctggactgttcatttatttcaggaaccagaagggccattcaggtttgcagcccacaggcttcctgagctag

SEQ ID NO: 86950 - DNA, 810 bp, Artificial Sequence
  derived and/or modified sequence
atgtcctggaagaaggccctgcgcatccctggggacctgcgggtggccaccgtgaccctgatgctggccatgctgagcagcctgctggccgagggccgggacagcccagaagattttgtgttccagttcaagggcatgtgctacttcaccaatggaacagagcgggtgcggctggtgacccgctacatctacaaccgggaggagtatgccaggtttgacagtgatgtgggcgtgtacagagctgtgaccccccagggccgcccagatgctgagtactggaacagccagaaggaggtgctggagggcaccagggctgagctggacacagtgtgccgccacaactatgaggtggccttccggggcatcctgcagaggagagtggagcccaccgtgaccatcagccccagcaggacagaggccctgaaccaccacaacctgctggtgtgcagcgtgacagacttctacccaggccagatcaaggtgcgctggttcagaaatgaccaggaggagacagctggggtggtgtccacccccctcatcagaaatggagactggaccttccagatcctggtgatgctggagatgaccccccagagaggagatgtgtacacctgccacgtggagcaccccagcctgcagagccccatcaccgtggagtggagggcccagagcgagagcgcccagagcaagatgctgtctggagtgggcggctttgtgctgggcctcatcttcctgggcctgggcctcatcatccggcagaggagccagaagggcccccagggccccccacctgctggcctgctgcactag

SEQ ID NO: 86951 - DNA, 810 bp, Artificial Sequence
  derived and/or modified sequence
atgtcctggaagaaggccctgcgcatccctgggggcctgcgggccgccaccgtgaccctgatgctggccatgctgagcacccctgtggccgagggccgggacagcccagaagattttgtgtaccagttcaaggccatgtgctacttcaccaatggaacagagcgggtgcgctacgtgacccgctacatctacaaccgggaggagtatgccaggtttgacagtgatgtggaggtgtacagagctgtgacccccctgggccccccagatgctgagtactggaacagccagaaggaggtgctggagaggaccagggctgagctggacacagtgtgccgccacaactaccagctggagctgcggaccaccctgcagaggagagtggagcccaccgtgaccatcagccccagcaggacagaggccctgaaccaccacaacctgctggtgtgcagcgtgacagacttctacccagcccagatcaaggtgcgctggttcagaaatgaccaggaggagaccaccggggtggtgtccacccccctcatcagaaatggagactggaccttccagatcctggtgatgctggagatgaccccccagcacggagatgtgtacacctgccacgtggagcaccccagcctgcagaaccccatcaccgtggagtggagggcccagagcgagagcgcccagagcaagatgctgtctggaattggaggctttgtgctgggcctcatcttcctgggcctgggcctcatcatccaccacaggagccagaagggcccccagggccccccacctgctggcctgctgcactag

SEQ ID NO: 86952 - DNA, 810 bp, Artificial Sequence
  derived and/or modified sequence
atgtcctggaagaaggccctgcgcatccctgggggcctgcgggtggccaccgtgaccctgatgctggccatgctgagcacccctgtggccgagggccgggacagcccagaagattttgtgtaccagttcaagggcatgtgctacttcaccaatggaacagagcgggtgcggctggtgacccgctacatctacaaccgggaggagtatgccaggtttgacagtgatgtgggcgtgtacagagctgtgacccccctgggccccccagatgctgagtactggaacagccagaaggaggtgctggagaggaccagggctgagctggacacagtgtgccgccacaactaccagctggagctgcggaccaccctgcagaggagagtggagcccaccgtgaccatcagccccagcaggacagaggccctgaaccaccacaacctgctggtgtgcagcgtgacagacttctacccagcccagatcaaggtgcgctggttcagaaatgaccaggaggagaccaccggggtggtgtccacccccctcatcagaaatggagactggaccttccagatcctggtgatgctggagatgaccccccagagaggagatgtgtacacctgccacgtggagcaccccagcctgcagaaccccatcatcgtggagtggagggcccagagcgagagcgcccagagcaagatgctgtctggaattggaggctttgtgctgggcctcatcttcctgggcctgggcctcatcatccaccacaggagccagaagggcccccagggccccccacctgctggcctgctgcactag

SEQ ID NO: 86953 - DNA, 744 bp, Artificial Sequence
  derived and/or modified sequence
atgctgagcacccctgtggccgagggccgggacagccctgaggactttgtgtaccagttcaagggcatgtgctacttcaccaacggcacagagcgggtgcggggcgtgacccgctacatctacaaccgggaggagtatgccaggtttgacagtgatgtgggcgtgtacagagctgtgacccccctgggccccccagctgctgagtactggaacagccagaaggaggtgctggagaggaccagggctgagctggacacagtgtgccgccacaactaccagctggagctgcggaccaccctgcagaggagagtggagcccaccgtgaccatcagccccagcaggacagaggccctgaaccaccacaacctgctggtgtgcagcgtgacagacttctacccagcccagatcaaggtgcgctggttcagaaatgaccaggaggagaccactggagtggtgtccacccccctcatcagaaatggagactggaccttccagatcctggtgatgctggagatgaccccccagagaggagatgtgtacacctgccacgtggagcaccccagcctgcagaaccccatcatcgtggagtggagggcccagagcgagagcgcccagagcaagatgctgagcggcatcggcggctttgtgctgggcctcatcttcctgggcctgggcctcatcatccaccacaggagccagaaggccctgccccagggccccccacctgctggggacatctcctag

SEQ ID NO: 86954 - DNA, 810 bp, Artificial Sequence
  derived and/or modified sequence
atgtcctggaagaaggccctgcgcatccctgggggcctgcgggtggccaccgtgaccctgatgctggccatgctgagcacccctgtggccgagggccgggacagcccagaagattttgtgtaccagttcaagggcatgtgctacttcaccaatggaacagagcgggtgcggggcgtgacccgctacatctacaaccgggaggagtatgccaggtttgacagtgatgtgggcgtgtacagagctgtgacccccctgggccccccagctgctgagtactggaacagccagaaggaggtgctggagaggaccagggctgagctggacacagtgtgccgccacaactaccagctggagctgcggaccaccctgcagaggagagtgtacccagaggtgacagtgtacccagccaagacccagcccctgcagcaccacaacctgctggtgtgcagcgtgaatggcttctacccaggcagcattgaggtgcgctggttcagaaatggccaggaggagaagacaggagtggtgtccacaggcctcatccagaatggagactggaccttccagaccctggtgatgctggagaccgtgcccaggtctggagaggtgtacacctgccaggtggagcaccccagcctgaccagccccctgactgtggagtggagggcccggtctgagagcgcccagagcaagatgctgtctggagtgggcggctttgtgctgggcctgctcttcctgggcgccggcctcttcatctacttcaggaaccagaagggccacagcggcctgcagcccaccggcttcctgtcctag

SEQ ID NO: 86955 - DNA, 864 bp, Artificial Sequence
  derived and/or modified sequence
atccatcaggtccaagctgtgttgactaccactacttttcccttcgtctcaattatgtcttggaagaaggctttgcggatccctggaggccttcgggtagcaactgtgaccttgatgctggcgatgctgagcaccccggtggctgagggcagagactctcccgaggatttcgtgtaccagtttaagggcatgtgctacttcaccaacgggaccgagcgcgtgcggggtgtgaccagatacatctataaccgagaggagtacgcgcgcttcgacagcgacgtgggggtgtatcgggcggtgacgccgctggggccgcctgccgccgagtactggaacagccagaaggaagtcctggagaggacccgggcggagttggacacggtgtgcagacacaactaccagttggagctccgcacgaccttgcagcggcgagtggagcccacagtgaccatctccccatccaggacagaggccctcaaccaccacaacctgctggtctgctcagtgacagatttctatccagcccagatcaaagtccggtggtttcggaatgaccaggaggagacaactggcgttgtgtccaccccccttattaggaacggtgactggaccttccagatcctggtgatgctggaaatgactccccagcgtggagacgtctacacctgccacgtggagcaccccagcctccagaaccccatcatcgtggagtggcgggctcagtctgaatctgcccagagcaagatgctgagtggcattggaggcttcgtgctggggctgatcttcctcgggctgggccttattatccatcacaggagtcagaaagccctacctcaagggcctccaccagcaggtgatatttca

SEQ ID NO: 86956 - DNA, 1120 bp, Artificial Sequence
  derived and/or modified sequence
atgtcttggaagaaggctttgcggatccctggaggccttcgggtagcaactgtgaccttgatgctggcgatgctgagcaccccggtggctgagggcagagactctcccgaggatttcgtgtaccagtttaagggcatgtgctacttcaccaacgggaccgagcgcgtgcggggtgtgaccagatacatctataaccgagaggagtacgcgcgcttcgacagcgacgtgggggtgtatcgggcggtgacgccgctggggccgcctgccgccgagtactggaacagccagaaggaagtcctggagaggacccgggcggagttggacacggtgtgcagacacaactaccagttggagctccgcacgaccttgcagcggcgagtctatcctgaggtgactgtgtatcctgcaaagacccagcccctgcagcaccacaacctcctggtctgctctgtgaatggtttctatccaggcagcattgaagtcaggtggttccggaacggccaggaagagaagactggggtggtgtccacaggcctgatccagaatggagactggaccttccagaccctggtgatgctggaaacagttcctcggagtggagaggtttacacctgccaagtggagcacccaagcctgacgagccctctcacagtggaatggagagcacggtctgaatctgcacagagcaagatgctgagtggagtcgggggcttcgtgctgggcctgctcttccttggggccgggctgttcatctacttcaggaatcagaaaggacactctggacttcagccaacaggattcctgagctgaagtgaagatgaccacattcaaggaagaaccttctgccccagctttgcaggatgaaacacttccccgcttggctctcattcttccacaagagagacctttctccggacctggttgctactggttcagcagctctgcagaaaatgtcctcccttgtggctgcctcagctcgtacctttggcctgaagtcccagcattaatggcagcccctcatcttccaagttttgtgctcccctttacctaatgcttcctgcctcccatgcatctgtactcctgctgtgccacaaacacattacattattaaatgtttctc

SEQ ID NO: 86957 - DNA, 810 bp, Artificial Sequence
  derived and/or modified sequence
atgagctggaagaaggccctgcggatccccggcgacctgcgggtggcgactgttactctgatgctcgccatgttgtcatctttgcttgccgagggccgggatagccctgaggattttgtttttcaatttaaaggaatgtgctacttcacaaacggcactgagcgcgttaggctggtgacacgatatatctacaacagagaggagtacgcgcgtttcgactccgacgtgggagtttaccgggccgtgaccccacagggaaggcccgacgccgagtactggaacagccagaaggaggtgcttgaggggaccagagccgagctcgacaccgtgtgtcggcacaattatgaagtggcgtttagaggcattttacaaagacgagtcgagcctaccgttaccattagtcctagccgaacagaggctttgaaccaccacaacttgctggtgtgctctgtcaccgatttctaccctgggcagataaaggtacgatggtttagaaacgaccaggaggagaccgcgggggtggtgagtacacctttgatacggaacggtgactggacgttccaaattctggtgatgctggagatgacaccacagaggggcgatgtgtacacctgtcacgttgaacatccatctctccaatctccaatcaccgtggagtggagggcacaatctgagtcagctcaatccaagatgttaagcggcgtgggcgggtttgtcctgggactgatctttctgggcttaggattgatcataagacagcgctcgcagaaaggccctcagggcccaccgccggcgggactgctgcactag

SEQ ID NO: 86958 - DNA, 810 bp, Artificial Sequence
  derived and/or modified sequence
atgagctggaagaaggccctgcggatccccggcggcctgcgggccgcaaccgtgactctcatgctcgcaatgcttagtacccctgttgccgagggccgagattctcctgaagattttgtttatcaattcaaagccatgtgttattttactaatggaaccgagagagtgagatatgtgactcgctacatctataacagggaggaatacgctcgttttgatagcgacgtagaagtttaccgtgccgtcacaccactcggtcctccagatgcagagtactggaattcccagaaggaggtcctggagcgtacccgcgccgaacttgacaccgtgtgtaggcacaactatcagctcgagttaagaactaccctccagcggcgggtggaacctacagtgaccatttccccatctagaaccgaggcgctgaatcaccacaaccttctggtgtgctctgtaaccgatttttaccctgcccaaatcaaggtacgctggttccgcaacgaccaggaggagaccaccggtgtcgtttcaacaccgttaatccgaaacggggattggacttttcaaatcttagtaatgctggagatgactccacaacacggagatgtctacacatgtcatgtggagcacccttccctgcaaaatccgattaccgttgagtggcgcgctcaatctgagtctgcccagtcaaaaatgctctcaggcattggaggctttgtgctgggcctaattttcctaggcctgggactcattatacatcaccggagccagaaaggcccccaaggcccccctccagctggactgctccattag

SEQ ID NO: 86959 - DNA, 810 bp, Artificial Sequence
  derived and/or modified sequence
atgagctggaagaaggccctgcggatccccggcggcctgcgggtggctacagttaccctcatgcttgccatgctgtccactccagtggccgagggtcgggactccccagaagactttgtgtatcagttcaagggaatgtgctatttcactaacggcacagagagagtaagattggtgacacgatacatttataacagagaagaatacgcacggtttgacagcgacgtgggcgtataccgggccgtgacccctttagggccccccgatgccgagtattggaacagtcaaaaggaagttctcgagagaacacgggccgagctcgacacagtatgtaggcataattatcagctcgagctgcgcaccaccctgcagaggcgggtggaacccactgttacaatttctccgagtcgaacagaggcgctaaaccatcacaacctgctggtctgctccgtgacggacttctatcccgctcaaatcaaagtccgctggttccgaaacgatcaggaggagaccaccggagtcgtgagcactccactgataaggaacggggactggacgttccagattctggtcatgttggagatgacccctcagcggggagacgtctatacgtgtcacgtggagcacccaagtcttcaaaaccctattattgtcgaatggagggcccagtcagagtcagcacaatcaaagatgctttcaggcatcggaggatttgtgctgggactcatttttctgggattggggttaatcattcaccacagaagtcagaaaggaccccaaggcccacctccagccggactcttgcattag

SEQ ID NO: 86960 - DNA, 744 bp, Artificial Sequence
  derived and/or modified sequence
atgctgagcacccccgtggccgagggccgggacagccccgaggactttgtgtatcagtttaaagggatgtgttactttacgaacggtaccgaacgcgttagaggcgtgacccggtatatttacaatcgcgaggagtatgctagattcgacagcgacgtaggcgtgtacagggcagtgacgcccctagggccccccgccgctgagtattggaatagccagaaggaagtattggagagaacgcgagcagaactcgacactgtgtgcagacataactaccaactcgagttgcggaccactttacagcgcagagtggaacccaccgtgacaattagcccgtcgcgcaccgaggcgctgaatcatcacaatcttcttgtgtgtagcgtcacagacttctatccggctcaaatcaaggtccggtggtttagaaacgatcaggaggagacgacaggagtggtatctacaccgctgattaggaacggcgactggacttttcagattctcgtgatgctggagatgacaccacagaggggtgatgtctacacatgtcatgtggaacacccctccctgcagaaccccattattgtggagtggcgtgcacaatctgagagtgcccagtcaaagatgctcagcggcattggaggctttgtactcggactgattttcctgggcttgggtctgatcatccatcacagatctcagaaagcccttccccagggacctcctccagctggcgatataagttag

SEQ ID NO: 86961 - DNA, 810 bp, Artificial Sequence
  derived and/or modified sequence
atgagctggaagaaggccctgcggatccccggcggcctgcgggtggccacagtcacactgatgctggctatgttgagtaccccagttgcagaagggcgtgactctccagaggattttgtgtaccaatttaaaggaatgtgctatttcaccaatgggacagagcgtgtgaggggggtgactagatacatatataacagagaggagtatgctcgattcgactccgatgtgggtgtttatagagctgttacccctctgggcccccctgctgccgagtattggaactctcagaaagaggtgttggaaagaacaagggctgaactggacacagtttgtcggcacaactatcagctcgagctgcgcacaacactacaacgccgggtgtatccagaggtcacagtgtatccggcgaagactcaacctctgcaacaccataacctgctggtgtgctctgtgaatggcttctatcctggatccatcgaagttcgctggttccggaacggacaggaggaaaaaaccggagtggtgtctacaggcctgatccagaatggtgattggacctttcagacgctggtgatgttggagactgtgcctcgctctggcgaagtgtacacatgtcaggtggaacacccctcacttaccagcccattgactgtggaatggagggcacgtagcgagtcagcccagtctaagatgctcagcggtgttggtggttttgtgttgggacttcttttcctgggagccggtctttttatatacttccggaatcagaaaggccatagcggactacagcccaccggatttctgtcctag

SEQ ID NO: 86962 - DNA, 810 bp, Artificial Sequence
  derived and/or modified sequence
atgtcctggaagaaagcgttgaggatccccggtgatctgcgcgtggctacagtcacactgatgctcgcaatgctgtctagcctgctggccgaaggcagagatagccctgaagatttcgtctttcagtttaaaggcatgtgctattttactaatggaacagagagggttcgactggtgaccaggtatatttacaatagagaggagtatgctaggttcgactccgatgtgggtgtctatcgggctgtgacaccgcagggccgacccgacgcagaatattggaattcccagaaggaggtgctagaaggaactcgagccgaactggatactgtatgtagacacaattacgaagtggcttttcggggtatccttcagaggagggtcgagcctaccgtgactatctccccctcacgtactgaggctctgaaccaccacaacctccttgtgtgttccgtgacggacttttaccctggacaaatcaaggtccgatggtttagaaacgatcaagaagagacagccggagtagtgtccacccctctcatccggaacggtgattggacgtttcagatcctggtgatgctcgagatgacaccccagaggggagacgtttacacatgccatgtggaacaccccagcctccagtcccctattaccgtggagtggagggcccagtctgaatccgcccaatctaaaatgctcagcggtgttggcggttttgtcctcggcctgattttcctcggcttggggctcataattcggcagagaagccagaaggggccacagggtccaccaccagccggtctgctccattag

SEQ ID NO: 86963 - DNA, 810 bp, Artificial Sequence
  derived and/or modified sequence
atgtcatggaaaaaggccctgcggataccaggaggactgcgcgctgccaccgtgactctgatgttagccatgctgagtactcccgtggctgaggggagagactcccccgaagatttcgtctatcagttcaaagccatgtgctatttcacaaacgggacggagagggtccgttacgtgactcgttacatttacaatcgggaagagtatgcccgtttcgactcagacgtcgaagtttacagggctgtcacacccctaggcccaccagacgccgagtattggaattctcagaaagaggtgttggaacgcaccagagccgagttggatacagtctgcaggcataactatcagttagaactgaggacaacattacagcgcagggtcgagcctaccgtgacaatcagcccctcccggacagaagcccttaatcatcacaacctattggtatgcagcgtgacagacttctaccccgctcaaattaaggtcagatggtttaggaacgatcaggaggaaacaacgggcgtcgtgtccacccccctaatccgcaacggagactggacgttccaaatcctggttatgctggaaatgacgccccagcacggcgacgtgtacacatgccacgtggaacaccccagcctacagaaccccattacagtggaatggagggcgcagtcagaatcggcccagtctaaaatgctgtccgggattggtggttttgtcctgggactcatctttctgggcctgggtttgatcattcaccaccgctctcagaaaggcccacagggcccacctccagcaggtctgcttcactag

SEQ ID NO: 86964 - DNA, 810 bp, Artificial Sequence
  derived and/or modified sequence
atgagttggaagaaagctctaaggatcccgggtggactaagagttgctactgtaactctgatgctggccatgctgagtacccccgtcgctgaaggcagagactcccctgaggactttgtctaccagttcaaaggtatgtgctatttcactaacgggacagagcgtgtcagactggttaccaggtacatctacaaccgggaagagtacgctagattcgactccgatgtaggcgtctatagagctgtgaccccgctggggccacccgacgccgagtattggaacagccagaaagaagtcctggagcggacccgggcagagctcgacaccgtgtgccgacataattatcagttggagctgcgcaccacgctgcagagacgagttgaacccactgtgactatcagtccatcaagaacggaggcacttaaccaccataacctgcttgtgtgttctgtcaccgatttctatccggcacaaatcaaggttcggtggtttaggaatgaccaggaggagaccacaggtgttgtttccacacccctaatccgcaatggagactggaccttccaaatactggtcatgctcgagatgacaccgcaacgcggtgatgtttacacatgtcacgtggagcacccgagcctccagaaccccatcattgtggaatggagggcgcagagtgaaagtgctcaatcaaagatgctttccggaatcggcggattcgtcctgggcttaatctttttaggactgggtttgatcatacaccaccgatcgcagaagggtcctcaggggccaccgccagcgggtctgctgcattag

SEQ ID NO: 86965 - DNA, 744 bp, Artificial Sequence
  derived and/or modified sequence
atgttgtccactccagtggcagaaggcagggattcgccagaagacttcgtctaccaattcaaggggatgtgctacttcaccaacgggacagagagagtgagaggcgtaactaggtacatttacaaccgggaggaatacgctcgatttgactcagatgtcggggtgtaccgggcagttaccccccttgggcctccagctgctgaatactggaatagtcaaaaggaggtcttggaacgaacccgggcagagctagatacagtgtgtcggcataattaccaattggagcttagaactacccttcaacggcgagttgagcccactgtcactatcagccctagtagaacggaagcactcaaccaccataatctgctggtatgctcagtgaccgacttttatccggcacagatcaaggtgcgatggtttagaaacgatcaagaagagacaaccggagtggtgagtactcctttgatccgtaatggcgattggacatttcaaattctggtaatgctggagatgaccccccagaggggcgatgtatatacttgccatgttgaacatcccagcctgcaaaatcccatcatcgtggagtggagggcccaatcagaatcagcgcagtctaagatgcttagtggcatcggtggtttcgtccttgggctcatttttttgggcttgggcctgatcattcatcaccgtagccagaaggccctaccccagggaccccctccggctggagatatcagctag

SEQ ID NO: 86966 - DNA, 810 bp, Artificial Sequence
  derived and/or modified sequence
atgagttggaagaaagcattacggatccctggcggactgcgagtggcgaccgtcaccctgatgcttgctatgctgagcaccccggtggcggaggggagagactctcctgaggatttcgtttatcagtttaaggggatgtgttacttcaccaacggaaccgagcgcgtaaggggcgtgacccgctacatttacaaccgcgaggaatacgctcggtttgacagcgatgtgggtgtgtacagagccgtcacacccctggggccaccagcggctgaatattggaactctcaaaaagaggtcctcgaacgaacacgcgcagaactggacaccgtgtgtaggcataactaccaattggaacttcgcactacactgcaacggagagtctacccagaggtcacagtttaccctgctaagacccagcctttacagcatcacaacctgctcgtctgtagtgtgaatggcttctatcccggaagcatcgaagttcggtggtttaggaacggccaagaggaaaaaacaggagtcgtgagcaccgggctgattcagaacggcgattggacctttcagactcttgtgatgctggagaccgtgccacgctctggcgaggtgtatacatgtcaagtcgaacacccctccctgacctctcctcttaccgtcgagtggagggcccgatccgagagcgcccagagtaagatgttgtctggcgtcgggggatttgtacttggccttcttttcctgggagccggtcttttcatttatttcagaaaccagaagggtcattctggtcttcagcctacaggttttctctcctag

SEQ ID NO: 86967 - DNA, 810 bp, Artificial Sequence
  derived and/or modified sequence
atgagctggaagaaggccctgagaatccccggcgacctgagagtggccaccgtgaccctgatgctggccatgctgagcagcctgctggccgagggcagagacagccccgaggacttcgtgttccagttcaagggcatgtgctacttcaccaacggcaccgagagagtgagactggtgaccagatacatctacaacagagaggagtacgccagattcgacagcgacgtgggcgtgtacagagccgtgaccccccagggcagacccgacgccgagtactggaacagccagaaggaggtgctggagggcaccagagccgagctggacaccgtgtgcagacacaactacgaggtggccttcagaggcatcctgcagagaagagtggagcccaccgtgaccatcagccccagcagaaccgaggccctgaaccaccacaacctgctggtgtgcagcgtgaccgacttctaccccggccagatcaaggtgagatggttcagaaacgaccaggaggagaccgccggcgtggtgagcacccccctgatcagaaacggcgactggaccttccagatcctggtgatgctggagatgaccccccagagaggcgacgtgtacacctgccacgtggagcaccccagcctgcagagccccatcaccgtggagtggagagcccagagcgagagcgcccagagcaagatgctgagcggcgtgggcggcttcgtgctgggcctgatcttcctgggcctgggcctgatcatcagacagagaagccagaagggcccccagggccccccccccgccggcctgctgcactag

SEQ ID NO: 86968 - DNA, 810 bp, Artificial Sequence
  derived and/or modified sequence
atgagctggaagaaggccctgagaatccccggcggcctgagagccgccaccgtgaccctgatgctggccatgctgagcacccccgtggccgagggcagagacagccccgaggacttcgtgtaccagttcaaggccatgtgctacttcaccaacggcaccgagagagtgagatacgtgaccagatacatctacaacagagaggagtacgccagattcgacagcgacgtggaggtgtacagagccgtgacccccctgggcccccccgacgccgagtactggaacagccagaaggaggtgctggagagaaccagagccgagctggacaccgtgtgcagacacaactaccagctggagctgagaaccaccctgcagagaagagtggagcccaccgtgaccatcagccccagcagaaccgaggccctgaaccaccacaacctgctggtgtgcagcgtgaccgacttctaccccgcccagatcaaggtgagatggttcagaaacgaccaggaggagaccaccggcgtggtgagcacccccctgatcagaaacggcgactggaccttccagatcctggtgatgctggagatgaccccccagcacggcgacgtgtacacctgccacgtggagcaccccagcctgcagaaccccatcaccgtggagtggagagcccagagcgagagcgcccagagcaagatgctgagcggcatcggcggcttcgtgctgggcctgatcttcctgggcctgggcctgatcatccaccacagaagccagaagggcccccagggccccccccccgccggcctgctgcactag

SEQ ID NO: 86969 - DNA, 810 bp, Artificial Sequence
  derived and/or modified sequence
atgagctggaagaaggccctgagaatccccggcggcctgagagtggccaccgtgaccctgatgctggccatgctgagcacccccgtggccgagggcagagacagccccgaggacttcgtgtaccagttcaagggcatgtgctacttcaccaacggcaccgagagagtgagactggtgaccagatacatctacaacagagaggagtacgccagattcgacagcgacgtgggcgtgtacagagccgtgacccccctgggcccccccgacgccgagtactggaacagccagaaggaggtgctggagagaaccagagccgagctggacaccgtgtgcagacacaactaccagctggagctgagaaccaccctgcagagaagagtggagcccaccgtgaccatcagccccagcagaaccgaggccctgaaccaccacaacctgctggtgtgcagcgtgaccgacttctaccccgcccagatcaaggtgagatggttcagaaacgaccaggaggagaccaccggcgtggtgagcacccccctgatcagaaacggcgactggaccttccagatcctggtgatgctggagatgaccccccagagaggcgacgtgtacacctgccacgtggagcaccccagcctgcagaaccccatcatcgtggagtggagagcccagagcgagagcgcccagagcaagatgctgagcggcatcggcggcttcgtgctgggcctgatcttcctgggcctgggcctgatcatccaccacagaagccagaagggcccccagggccccccccccgccggcctgctgcactag

SEQ ID NO: 86970 - DNA, 744 bp, Artificial Sequence
  derived and/or modified sequence
atgctgagcacccccgtggccgagggcagagacagccccgaggacttcgtgtaccagttcaagggcatgtgctacttcaccaacggcaccgagagagtgagaggcgtgaccagatacatctacaacagagaggagtacgccagattcgacagcgacgtgggcgtgtacagagccgtgacccccctgggcccccccgccgccgagtactggaacagccagaaggaggtgctggagagaaccagagccgagctggacaccgtgtgcagacacaactaccagctggagctgagaaccaccctgcagagaagagtggagcccaccgtgaccatcagccccagcagaaccgaggccctgaaccaccacaacctgctggtgtgcagcgtgaccgacttctaccccgcccagatcaaggtgagatggttcagaaacgaccaggaggagaccaccggcgtggtgagcacccccctgatcagaaacggcgactggaccttccagatcctggtgatgctggagatgaccccccagagaggcgacgtgtacacctgccacgtggagcaccccagcctgcagaaccccatcatcgtggagtggagagcccagagcgagagcgcccagagcaagatgctgagcggcatcggcggcttcgtgctgggcctgatcttcctgggcctgggcctgatcatccaccacagaagccagaaggccctgccccagggccccccccccgccggcgacatcagctag

SEQ ID NO: 86971 - DNA, 810 bp, Artificial Sequence
  derived and/or modified sequence
atgagctggaagaaggccctgagaatccccggcggcctgagagtggccaccgtgaccctgatgctggccatgctgagcacccccgtggccgagggcagagacagccccgaggacttcgtgtaccagttcaagggcatgtgctacttcaccaacggcaccgagagagtgagaggcgtgaccagatacatctacaacagagaggagtacgccagattcgacagcgacgtgggcgtgtacagagccgtgacccccctgggcccccccgccgccgagtactggaacagccagaaggaggtgctggagagaaccagagccgagctggacaccgtgtgcagacacaactaccagctggagctgagaaccaccctgcagagaagagtgtaccccgaggtgaccgtgtaccccgccaagacccagcccctgcagcaccacaacctgctggtgtgcagcgtgaacggcttctaccccggcagcatcgaggtgagatggttcagaaacggccaggaggagaagaccggcgtggtgagcaccggcctgatccagaacggcgactggaccttccagaccctggtgatgctggagaccgtgcccagaagcggcgaggtgtacacctgccaggtggagcaccccagcctgaccagccccctgaccgtggagtggagagccagaagcgagagcgcccagagcaagatgctgagcggcgtgggcggcttcgtgctgggcctgctgttcctgggcgccggcctgttcatctacttcagaaaccagaagggccacagcggcctgcagcccaccggcttcctgagctag

SEQ ID NO: 86972 - protein, 136 aa, Artificial Sequence
  derived and/or modified sequence
MSWKKALRIPGGLRVATVTLMLAMLSTPVAEGRDSPEDFVYQFKGMCYFTNGTERVRLVTRYIYNREEYARFDSDVGVYRAVTPLGPPDAEYWNSQKEVLERTRAELDTVCRHNYQLELRTTLQRRGTVTGPSRSW

SEQ ID NO: 86973 - protein, 261 aa, Artificial Sequence
  derived and/or modified sequence
MSWKKALRIPGGLRAATVTLMLSMLSTPVAEGRDSPEDFVYQFKGMCYFTNGTERVRLVSRSIYNREEIVRFDSDVGEFRAVTLLGLPAAEYWNSQKDILERKRAAVDRVCRHNYQLELRTTLQRRVEPTVTISPSRTEALNHHNLLVCSVTDFYPAQIKVRWFRNDQEETAGVVSTPLIRNGDWTFQILVMLEMTPQRGDVYTCHVEHPSLQSPITVEWRAQSESAQSKMLSGIGGFVLGLIFLGLGLIIHHRSQKGLLH

SEQ ID NO: 86974 - protein, 269 aa, Artificial Sequence
  derived and/or modified sequence
MSWKKALRIPGGLRAATVTLMLAMLSTPVAEGRDSPEDFVYQFKAMCYFTNGTERVRYVTRYIYNREEYARFDSDVEVYRAVTPLGPPDAEYWNSQKEVLERTRAELDTVCRHNYQLELRTTLQRRVEPTVTISPSRTEALNHHNLLVCSVTDFYPAQIKVRWFRNDQEETTGVVSTPLIRNGDWTFQILVMLEMTPQHGDVYTCHVEHPSLQNPITVEWRAQSESAQSKMLSGIGGFVLGLIFLGLGLIIHHRSQKGPQGPPPAGLLH

SEQ ID NO: 86975 - protein, 261 aa, Artificial Sequence
  derived and/or modified sequence
MSWKKALRIPGGLRAATVTLMLAMLSTPVAEGRDSPEDFVYQFKAMCYFTNGTERVRYVTRYIYNREEYARFDSDVEVYRAVTPLGPPDAEYWNSQKEVLERTRAELDTVCRHNYQLELRTTLQRRVEPTVTISPSRTEALNHHNLLVCSVTDFYPAQIKVRWFRNDQEETTGVVSTPLIRNGDWTFQILVMLEMTPQHGDVYTCHVEHPSLQNPITVEWRAQSESAQSKMLSGIGGFVLGLIFLGLGLIIHHRSQKGLLH

SEQ ID NO: 86976 - protein, 224 aa, Artificial Sequence
  derived and/or modified sequence
MSWKKALRIPGGLRAATVTLMLSMLSTPVAEGRDSPEDFVYQFKGMCYFTNGTERVRLVSRSIYNREEIVRFDSDVGEFRAVTLLGLPAAEYWNSQKDILERKRAAVDRVCRHNYQLELRTTLQRRVEPTVTISPSRTEALNHHNLLVCSVTDFYPAQIKVRWFRNDQEETAGVVSTPLIRNGDWTFQILVMLEMTPQRGDVYTCHVEHPSLQSPITVEWRLLH

SEQ ID NO: 86977 - protein, 261 aa, Artificial Sequence
  derived and/or modified sequence
MSWKKALRIPGGLRVATVTLMLAMLSTPVAEGRDSPEDFVYQFKGMCYFTNGTERVRGVTRYIYNREEYARFDSDVGVYRAVTPLGPPAAEYWNSQKEVLERTRAELDTVCRHNYQLELRTTLQRRVEPTVTISPSRTEALNHHNLLVCSVTDFYPAQIKVRWFRNDQEETTGVVSTPLIRNGDWTFQILVMLEMTPQRGDVYTCHVEHPSLQNPIIVEWRAQSESAQSKMLSGIGGFVLGLIFLGLGLIIHHRSQKGLLH

SEQ ID NO: 86978 - protein, 224 aa, Artificial Sequence
  derived and/or modified sequence
MSWKKALRIPGGLRAATVTLMLSMLSTPVAEGRDSPEDFVYQFKGMCYFTNGTERVRLVSRSIYNREEIVRFDSDVGEFRAVTLLGLPAAEYWNSQKDILERKRAAVDRVCRHNYQLELRTTLQRRVEPTVTISPSRTEALNHHNLLVCSVTDFYPAQIKVRWFRNGQEETAGVVSTPLIRNGDWTFQILVMLEMTPQRGDVYTCHVEHPSLQSPITVEWRLLH

SEQ ID NO: 86979 - protein, 261 aa, Artificial Sequence [sequence omitted]

SEQ ID NO: 86980 - protein, 261 aa, Artificial Sequence
  derived and/or modified sequence
MSWKKALRIPGGLRAATVTLMLSMLSTPVAEGRDSPEDFVYQFKGMCYFTNGTERVRLVSRSIYNREEIVRFDSDVGEFRAVTLLGLPAAEYWNSQKDILERKRAAVDRVCRHNYQLELRTTLQRRVEPTVTISPSRTEALNHHNLLVCSVTDFYPAQIKVRWFRNGQEETAGVVSTPLIRNGDWTFQILVMLEMTPQRGDVYTCHVEHPSLQSPITVEWRAQSESAQSKMLSGIGGFVLGLIFLGLGLIIHHRSQKGLLH

SEQ ID NO: 86981 - protein, 269 aa, Artificial Sequence
  derived and/or modified sequence
MSWKKALRIPGGLRAATVTLMLSMLSTPVAEGRDSPEDFVYQFKGMCYFTNGTERVRLVSRSIYNREEIVRFDSDVGEFRAVTLLGLPAAEYWNSQKDILERKRAAVDRVCRHNYQLELRTTLQRRVEPTVTISPSRTEALNHHNLLVCSVTDFYPAQIKVRWFRNGQEETAGVVSTPLIRNGDWTFQILVMLEMTPQRGDVYTCHVEHPSLQSPITVEWRAQSESAQSKMLSGIGGFVLGLIFLGLGLIIHHRSQKGPQGPPPAGLLH

SEQ ID NO: 86982 - protein, 224 aa, Artificial Sequence
  derived and/or modified sequence
MSWKKALRIPGGLRAATVTLMLAMLSTPVAEGRDSPEDFVYQFKAMCYFTNGTERVRYVTRYIYNREEYARFDSDVEVYRAVTPLGPPDAEYWNSQKEVLERTRAELDTVCRHNYQLELRTTLQRRVEPTVTISPSRTEALNHHNLLVCSVTDFYPAQIKVRWFRNDQEETTGVVSTPLIRNGDWTFQILVMLEMTPQHGDVYTCHVEHPSLQNPITVEWRLLH

SEQ ID NO: 86983 - protein, 134 aa, Artificial Sequence
  derived and/or modified sequence
MSWKKALRIPGGLRAATVTLMLSMLSTPVAEGRDSPVEPTVTISPSRTEALNHHNLLVCSVTDFYPAQIKVRWFRNGQEETAGVVSTPLIRNGDWTFQILVMLEMTPQRGDVYTCHVEHPSLQSPITVEWRLLH

SEQ ID NO: 86984 - protein, 134 aa, Artificial Sequence
  derived and/or modified sequence
MSWKKALRIPGGLRVATVTLMLAMLSTPVAEGRDSPVEPTVTISPSRTEALNHHNLLVCSVTDFYPAQIKVRWFRNDQEETTGVVSTPLIRNGDWTFQILVMLEMTPQRGDVYTCHVEHPSLQNPIIVEWRLLH

SEQ ID NO: 86985 - protein, 144 aa, Artificial Sequence
  derived and/or modified sequence
MSWKKALRIPGGLRVATVTPLGPPDAEYWNSQKEVLERTRAELDTVCRHNYQLELRTTLQRRVEPTVTISPSRTEALNHHNLLVCSVTDFYPAQIKVRWFRNDQEETTGVVSTPLIRNGDWTFQILVMLEMTPQRGDVYTCHVE

SEQ ID NO: 86986 - protein, 134 aa, Artificial Sequence
  derived and/or modified sequence
MSWKKALRIPGGLRAATVTLMLAMLSTPVAEGRDSPVEPTVTISPSRTEALNHHNLLVCSVTDFYPAQIKVRWFRNDQEETTGVVSTPLIRNGDWTFQILVMLEMTPQHGDVYTCHVEHPSLQNPITVEWRLLH

SEQ ID NO: 86987 - protein, 224 aa, Artificial Sequence
  derived and/or modified sequence
MSWKKALRIPGGLRVATVTLMLAMLSTPVAEGRDSPEDFVYQFKGMCYFTNGTERVRLVTRYIYNREEYARFDSDVGVYRAVTPLGPPDAEYWNSQKEVLERTRAELDTVCRHNYQLELRTTLQRRVEPTVTISPSRTEALNHHNLLVCSVTDFYPAQIKVRWFRNDQEETTGVVSTPLIRNGDWTFQILVMLEMTPQRGDVYTCHVEHPSLQNPIIVEWRLLH

SEQ ID NO: 86988 - protein, 144 aa, Artificial Sequence
  derived and/or modified sequence
MSWKKALRIPGGLRAATVTLLGLPAAEYWNSQKDILERKRAAVDRVCRHNYQLELRTTLQRRVEPTVTISPSRTEALNHHNLLVCSVTDFYPAQIKVRWFRNGQEETAGVVSTPLIRNGDWTFQILVMLEMTPQRGDVYTCHVE

SEQ ID NO: 86989 - protein, 144 aa, Artificial Sequence
  derived and/or modified sequence
MSWKKALRIPGGLRAATVTPLGPPDAEYWNSQKEVLERTRAELDTVCRHNYQLELRTTLQRRVEPTVTISPSRTEALNHHNLLVCSVTDFYPAQIKVRWFRNDQEETTGVVSTPLIRNGDWTFQILVMLEMTPQHGDVYTCHVE

SEQ ID NO: 86990 - protein, 136 aa, Artificial Sequence
  derived and/or modified sequence
MSWKKALRIPGGLRAATVTLMLSMLSTPVAEGRDSPEDFVYQFKGMCYFTNGTERVRLVSRSIYNREEIVRFDSDVGEFRAVTLLGLPAAEYWNSQKDILERKRAAVDRVCRHNYQLELRTTLQRRGMVTGPSRSW

SEQ ID NO: 86991 - protein, 136 aa, Artificial Sequence
  derived and/or modified sequence
MSWKKALRIPGGLRAATVTLMLAMLSTPVAEGRDSPEDFVYQFKAMCYFTNGTERVRYVTRYIYNREEYARFDSDVEVYRAVTPLGPPDAEYWNSQKEVLERTRAELDTVCRHNYQLELRTTLQRRGTVTGPSRSW

SEQ ID NO: 86992 - protein, 238 aa, Artificial Sequence
  derived and/or modified sequence
MLSTPVAEGRDSPEDFVYQFKGMCYFTNGTERVRLVSRSIYNREEIVRFDSDVGEFRAVTLLGLPAAEYWNSQKDILERKRAAVDRVCRHNYQLELRTTLQRRVEPTVTISPSRTEALNHHNLLVCSVTDFYPAQIKVRWFRNGQEETAGVVSTPLIRNGDWTFQILVMLEMTPQRGDVYTCHVEHPSLQSPITVEWRAQSESAQSKMLSGIGGFVLGLIFLGLGLIIHHRSQKGLLH

SEQ ID NO: 86993 - protein, 238 aa, Artificial Sequence
  derived and/or modified sequence
MLSTPVAEGRDSPEDFVYQFKGMCYFTNGTERVRLVSRSIYNREEIVRFDSDVGEFRAVTLLGLPAAEYWNSQKDILERKRAAVDRVCRHNYQLELRTTLQRRVEPTVTISPSRTEALNHHNLLVCSVTDFYPAQIKVRWFRNDQEETAGVVSTPLIRNGDWTFQILVMLEMTPQRGDVYTCHVEHPSLQSPITVEWRAQSESAQSKMLSGIGGFVLGLIFLGLGLIIHHRSQKGLLH

SEQ ID NO: 86994 - protein, 247 aa, Artificial Sequence
  derived and/or modified sequence
MLSTPVAEGRDSPEDFVYQFKGMCYFTNGTERVRGVTRYIYNREEYARFDSDVGVYRAVTPLGPPAAEYWNSQKEVLERTRAELDTVCRHNYQLELRTTLQRRVEPTVTISPSRTEALNHHNLLVCSVTDFYPAQIKVRWFRNDQEETTGVVSTPLIRNGDWTFQILVMLEMTPQRGDVYTCHVEHPSLQNPIIVEWRAQSESAQSKMLSGIGGFVLGLIFLGLGLIIHHRSQKALPQGPPPAGDIS

SEQ ID NO: 86995 - protein, 269 aa, Artificial Sequence
  derived and/or modified sequence
MSWKKALRIPGGLRVATVTLMLAMLSTPVAEGRDSPEDFVYQFKGMCYFTNGTERVRGVTRYIYNREEYARFDSDVGVYRAVTPLGPPAAEYWNSQKEVLERTRAELDTVCRHNYQLELRTTLQRRVYPEVTVYPAKTQPLQHHNLLVCSVNGFYPGSIEVRWFRNGQEEKTGVVSTGLIQNGDWTFQTLVMLETVPRSGEVYTCQVEHPSLTSPLTVEWRARSESAQSKMLSGVGGFVLGLLFLGAGLFIYFRNQKGHSGLQPTGFLS

SEQ ID NO: 86996 - DNA, 786 bp, Artificial Sequence
  derived and/or modified sequence
atgtcatggaaaaaagctttgcgtattcccggaggtcttagagctgctaccgtaactctcatgctgtcaatgctttcaaccccagtggctgagggtagagactcaccggaggattttgtgtatcaattcaaggggatgtgttattttactaacggcacggagcgggtacgactcgtttctcgctcaatctacaacagggaagagattgtgcggttcgactccgacgtaggcgaattcagggctgtcacactgctcggcttgcctgcggctgagtactggaattcccagaaggacattctcgaacgcaagcgcgcagctgttgaccgcgtctgtcggcacaactaccaactggaactcagaactacacttcagcggagagtggagcccaccgttacaatttcgccctcaagaacggaggcactgaaccatcataacctgttggtgtgctcggtgactgacttctacccagcacaaatcaaggtaaggtggttccgcaatgaccaagaggagacagcgggagtcgtgagcacccctctgattcgcaacggcgactggactttccaaatcctggtgatgttagagatgacccctcaaagaggagatgtctacacttgccacgtagagcacccatcgttacagtctcccatcacagtggagtggagagcccaatctgagagcgcccagtccaagatgctgagcggtattggggggtttgtactggggctgatattccttggcctgggcttgattatacatcaccgttcacagaaaggtcttcttcattag

SEQ ID NO: 86997 - DNA, 786 bp, Artificial Sequence
  derived and/or modified sequence
atgagttggaagaaggcattgaggattcccggcggtttgagagccgcaaccgtcacattgatgctttcaatgctgagcacgcccgtggcggagggcagagactctcctgaggatttcgtctaccagttcaagggcatgtgctatttcacaaatggcactgaacgggtgaggttggtatcccgctccatctataatcgggaggagatcgtgagatttgactccgacgtaggagagtttcgcgccgtgaccctgctggggcttccagctgccgagtactggaacagccaaaaagatattctggagcgaaagcgcgcggccgtggaccgtgtgtgcaggcacaattatcaactcgaactgagaaccacactccagcggcgtgtagagcctaccgtaaccatctctccctcccgcaccgaggctctgaaccaccacaatctcctcgtgtgctccgtaacagacttctacccggcacagattaaggtaagatggttccgaaatgaccaggaggaaacagccggtgttgtgtccaccccactgattaggaatggcgactggacattccaaattctggtgatgctggagatgacccctcagcggggagacgtgtatacatgccacgtggagcacccaagcctgcagtcaccgataacagttgaatggcgagcacagtcggaatctgctcagagtaaaatgctctctggtattggaggcttcgtactgggactgatttttcttggcctcgggttgatcattcaccacagaagtcagaagggcctgctgcactag

SEQ ID NO: 86998 - DNA, 786 bp, Artificial Sequence
  derived and/or modified sequence
atgtcatggaaaaaggccttgcggattcctggagggctgagagctgctaccgtgacgctgatgttagctatgttgtctactcccgtagccgaaggcagggactcaccagaggattttgtgtaccagttcaaggcgatgtgctattttacaaacggaactgaacgtgtacggtatgtcacacggtatatctacaaccgcgaggagtacgcacggttcgattcagatgtcgaggtctatcgggccgtgaccccactgggaccacctgacgctgaatactggaactcacaaaaagaagtgttggagagaacaagagccgaactggacacagtctgtcgtcacaattatcagctggagctgagaaccaccctgcaacggcgcgtggaaccgaccgtgaccatatcaccgagcaggacagaggcactgaaccatcacaacctccttgtgtgttcggtgacggacttctacccagctcaaataaaagttcgttggtttcgtaacgatcaggaggagacaacaggcgttgtctctactcccctaattagaaacggggactggacattccagatactcgttatgctcgagatgaccccacagcatggcgacgtgtacacctgtcacgtggaacacccatcattgcagaatccaatcactgtcgagtggcgtgcccagtccgaatccgcccagagcaagatgctttcaggaatcgggggttttgtgttaggactgatatttttaggactgggcttgattatccatcacagatctcagaaggggctgttacactag

SEQ ID NO: 86999 - DNA, 675 bp, Artificial Sequence
  derived and/or modified sequence
atgtcttggaaaaaagccctgaggatccccggaggactgagagcggcaaccgtcactctgatgctaagcatgctgtccactcctgtggccgaaggaagggatagcccagaggattttgtgtaccagttcaaagggatgtgctatttcaccaacggtacagaacgggttagacttgtgagcaggtctatttataaccgggaagagatcgtgaggtttgactccgacgtaggcgagttccgagcggtgacactgctggggcttccggctgcggagtactggaattcccagaaggacattctagaacgaaaacgagctgctgtagaccgtgtgtgtagacacaattaccaactggaactaaggacaacacttcaacgcagagttgagcccaccgttaccattagcccaagccgcaccgaggctctgaatcaccataacctgctcgtgtgctctgtcaccgatttctatcctgcccagattaaggtgcgttggttccgcaatgaccaggaggagactgcaggggtggtgagcacgccactgattcgaaacggggactggacttttcagatactggtgatgctggaaatgactccccagaggggggacgtgtacacctgccacgtggaacacccctcattgcagagcccgattactgtcgagtggagactgcttcattag

SEQ ID NO: 87000 - DNA, 786 bp, Artificial Sequence
  derived and/or modified sequence
atgtcatggaagaaagccctccggataccagggggacttcgtgccgctactgtaaccctgatgctggccatgctgagcacgcctgtggccgaaggccgcgatagccctgaagattttgtatatcagtttaaggctatgtgctatttcacgaacggtacagagcgggtgcgatacgtgacaagatacatctacaatcgggaagaatacgctaggtttgattccgacgttgaagtctacagggccgtcactcctcttggtccacccgatgccgagtattggaattctcaaaaggaggtactggagagaacccgtgcagaactggatactgtatgccgccacaactaccagctggagttgcggacaaccctccagagaagagtggagcccaccgtgaccatctctccctcccgcacggaagcactgaaccatcacaaccttctggtgtgttcggtgacagacttctatccagctcagattaaggtgaggtggttccgtaatgaccaggaggagacaactggagtcgtgagtactcctcttatcagaaatggtgattggactttccagatcttagtgatgttggagatgaccccgcagcatggggatgtctacacctgccatgtagaacatccatctctgcagaatcctatcactgtggaatggagagcccagtctgagtctgcgcagtcaaaaatgctttctggaatcggcggctttgtactgggtctgatctttctcgggctcgggctcattattcatcatcggagccagaaaggtcttttgcactag

SEQ ID NO: 87001 - DNA, 786 bp, Artificial Sequence
  derived and/or modified sequence
atgagctggaaaaaggctttacgcatcccagggggacttagagtggccactgtcactctgatgctagctatgctttctacccctgtagctgaaggaagagactcccctgaggactttgtgtaccaatttaaggggatgtgttattttacaaacggtaccgagagagtaagaggagtgactcggtacatctataatagggaagaatacgcgcgctttgattccgacgtgggggtatatcgggccgtgacacccctggggcccccggctgccgagtattggaatagccagaaggaagtgcttgaaagaaccagggccgagctggacacagtgtgccgacataattatcagctggagctgagaactacactgcagcgtcgagtagaacccactgtgacaatttcaccttcccgtactgaagcacttaatcaccataacctgttggtgtgttccgtcactgacttctatcccgcacaaatcaaagttagatggtttcgcaacgaccaggaggaaacgacgggagtggtgtcaacacctttgatcaggaatggtgactggacattccagatcctagtcatgctcgaaatgacgccccaacggggggatgtgtacacttgtcatgttgagcatcccagtctccaaaaccctatcattgtggaatggagagctcagtctgagagcgcacagagcaagatgctatctgggataggtggcttcgtgctgggtctcatcttcctggggttgggcctgattatccatcatcgcagtcagaaggggttgctccactag

SEQ ID NO: 87002 - DNA, 675 bp, Artificial Sequence
  derived and/or modified sequence
atgtcctggaagaaggcccttagaataccaggcggcttgcgagcggcgaccgtgacgcttatgctgagtatgctgagtactcccgtggccgaggggcgtgattcacctgaagattttgtttaccagtttaaaggaatgtgctacttcactaatgggactgaaagggtccgcctcgtttcaagaagtatttataaccgtgaagaaatcgtgcggttcgattctgacgtgggagagtttagagctgtcaccctcctcggtctgccggcggcagaatactggaacagccagaaggatatccttgaaaggaagagggccgctgtcgatcgtgtttgcagacataactaccagctcgagttgaggacaaccctccaacggcgcgtggaaccgacagtcaccatctccccctcacgcaccgaagccctgaaccatcacaatctcctggtgtgttccgtgacagatttttaccctgcccagattaaggtgcgatggttccgcaatggccaggaggaaaccgcaggggtcgtgtctacgcccctaattcggaacggcgactggaccttccagattttggttatgcttgaaatgacccctcagaggggtgacgtctacacctgccacgtggagcacccatctttgcagtccccaattactgtagaatggaggctccttcattag

SEQ ID NO: 87003 - DNA, 786 bp, Artificial Sequence
  derived and/or modified sequence
atgagttggaaaaaggcgttgaggatccccggtggcttacgcgtcgctacagtcaccttaatgttagcaatgctttctacacccgtcgctgagggtagagactccccagaggacttcgtataccagtttaagggcatgtgctattttaccaacggaacagagcgcgttagactcgtcacaagatacatctataatcgggaggaatatgctcggttcgacagtgatgttggagtttacagagcggtcacaccgttaggtccgcctgatgctgaatactggaactctcagaaggaagtactggagcgtactagggccgaactcgacaccgtgtgcagacataactatcagctggagctgcgcacaacactccagcgacgggtggagcctaccgtgactatttccccctccagaaccgaggccctcaaccatcacaacctgttggtctgtagtgtgacggacttctatccggcccaaatcaaagtgcgatggttcagaaacgaccaagaggaaacgacaggtgtggtgtccacccccctaattcgaaatggcgactggaccttccagatactcgttatgctcgaaatgacgcctcagcggggagacgtctacacctgccacgtggagcatccttctcttcagaacccaataatcgtggagtggagggcccagagcgaatctgcccagagtaagatgctgtccgggatcggaggttttgtcttgggacttatcttcctaggactcggacttattatccatcaccgctcacagaagggactgctgcactag

SEQ ID NO: 87004 - DNA, 786 bp, Artificial Sequence
  derived and/or modified sequence
atgtcctggaagaaggccttgcgtattcctggcggtttgcgagctgctaccgtcaccctgatgctgagtatgctgtccacacctgtggccgagggcagagattccccagaggatttcgtgtaccagtttaaggggatgtgttactttacaaacggcacagaaagagtgcgcctggtgtctcgatccatttataatagggaagaaattgttcgttttgactctgacgtcggggaattcagggcagtgaccctgctgggattgccggcagctgaatattggaactctcagaaagatatcttagagcgaaagcgggccgccgtggaccgggtttgccggcataattatcagctggagctccgtacgactctgcagagaagagtcgagcccacagtcactatctcccccagcagaaccgaggccctgaaccaccacaacctgttggtgtgcagtgtgacagatttttaccctgcccagatcaaggtgaggtggtttagaaatggacaagaggaaactgctggagtcgtgtccacaccgctgatccggaatggtgactggacgttccagatattggttatgctagaaatgaccccccagcgtggagatgtatacacttgtcatgtggagcacccctcactgcaaagccccataaccgtagaatggcgggcacagtccgagagtgcccagagcaaaatgctgagcggcattggggggttcgtcctcggtctgattttcctcgggctggggctcattatccaccatcggtctcaaaagggattgctccattag

SEQ ID NO: 87005 - DNA, 810 bp, Artificial Sequence
  derived and/or modified sequence
atgtcctggaagaaagccctccgcattcccggtggcctgagggctgcgacggtgaccctgatgttatctatgctctctacgcccgtggcagaagggagggactcgcctgaagactttgtttaccaatttaaggggatgtgttactttacaaacggaaccgaaagagtcagactggttagcaggtctatctacaatagagaagagattgtgcgattcgactccgatgtgggtgagttccgggcagtaactctattgggacttcctgcagctgagtactggaattcacagaaggatatcctcgagcgaaagagagcagctgttgatagagtttgtcggcacaactatcagcttgaactgaggaccactctgcagaggagggtggagcccacggtgaccatctcaccatcgcgaacagaagcattgaaccatcataacctccttgtgtgtagcgtgaccgatttctatcctgcacagattaaggtccggtggttccgcaacgggcaggaggaaaccgcaggagtagtttccacacccctcatcagaaatggagattggacattccagattctggtgatgttggagatgaccccacagagaggcgatgtgtatacttgccacgtcgaacatccttcacttcagtccccaattacagtcgagtggcgcgctcagtctgaatcagcccagtccaaaatgctgtctggtatcggggggttcgtgctgggactgatatttctcggtctgggcctcatcattcaccaccgttctcaaaagggaccacagggcccgccccctgctggtctcctccattag

SEQ ID NO: 87006 - DNA, 786 bp, Artificial Sequence
  derived and/or modified sequence
atgagttggaagaaggcccttcggattcctggcgggctaagagtcgccactgtcacgcttatgctggctatgctctctacccccgtggcagaggggcgtgactctcctgaagacttcgtgtatcagtttaagggtatgtgttacttcacgaacggcacggagagagtgaggttggtgacccgttatatttataacagagaagagtacgccagattcgattcagacgtgggagtctacagggccgtaacacctctcggtccaccagatgcagaatactggaactcccaaaaagaggtcctggagaggacccgagccgaactagacactgtctgccggcacaattaccaactcgagctgaggacaacactccagagaagagtggaaccgactgttacaatctcaccctcacgcaccgaggctctgaaccaccacaatctcctggtttgctcggtaactgatttctacccagcacagattaaggtacggtggtttaggaatgaccaggaggagaccaccggtgtggtttcgacacccttaatccggaacggcgactggacatttcagatcttggtcatgctggaaatgacgcctcagcgcggagatgtttacacatgccacgtggagcatccttctctccagaatcctattatcgtggaatggagggcccaatccgaaagtgctcagtccaagatgctgagcggtataggcgggtttgtcctgggcctaatcttcctcggtctgggtcttatcattcaccacaggtcacagaagggcttgttgcattag

SEQ ID NO: 87007 - DNA, 786 bp, Artificial Sequence
  derived and/or modified sequence
atgagttggaagaaagcccttcgcattcccggggggctgagagcagcgacagtgacattaatgctgtctatgctgtctactccagtagcggaaggcagagatagtcccgaggattttgtgtatcagtttaagggcatgtgctacttcaccaatgggaccgagagagttagacttgtgagtcgctctatctacaaccgggaggaaatcgttaggtttgacagtgacgtgggagagttcagagccgtgacgctgctgggactaccagccgcagagtattggaatagtcagaaggacatcctggagcgaaagcgcgcagcagtggaccgcgtctgcagacataactaccaacttgaacttaggactaccttgcagaggagggtggaaccaacagtgaccatttcaccgagccgaacagaggccctcaaccaccataatctgctggtgtgcagcgttactgacttctaccccgcacagatcaaggtgcgctggtttcgaaacggacaggaagaaaccgctggagtcgtgagcaccccactcatccgaaatggggattggacctttcaaatccttgtaatgttagagatgacaccccaaaggggggacgtctatacttgtcacgtagaacacccttctcttcaatctcctattacggtagagtggagagctcagtcagagtccgcacagtcaaaaatgcttagtggcatcggtggatttgtgctcggactgatcttcctcggactcggtcttatcatacatcacaggagccagaagggactgctgcattag

SEQ ID NO: 87008 - DNA, 405 bp, Artificial Sequence
  derived and/or modified sequence
atgtcctggaaaaaagccttgaggatccctggggggctgcgagccgctaccgtgacgctaatgctgagtatgctgtccactcccgtcgcagagggcagggactctcctgttgagccaactgtcacaatttctcctagccggaccgaggcccttaatcatcacaatctgctggtgtgcagcgttactgacttctaccccgctcagatcaaagttagatggtttaggaacggtcaagaggaaacagccggtgtcgtaagtactccactcattaggaacggcgactggaccttccagattcttgtgatgttggaaatgacacctcagagaggagacgtgtacacatgtcatgtcgaacaccccagccttcagtctcccattactgtcgagtggcgtttgctgcactag

SEQ ID NO: 87009 - DNA, 405 bp, Artificial Sequence
  derived and/or modified sequence
atgagctggaaaaaagccttgagaattcctggaggcctcagggtcgcgactgtgacccttatgctagccatgttatccacaccagtggctgagggacgcgacagtcccgtcgagcctaccgtgactatttctccttccaggactgaagcacttaatcaccacaacctgctggtgtgttcggttaccgacttctatccagctcagatcaaggttagatggttcaggaacgaccaggaagagactacaggagtggtctccactcccctgatccgaaacggggactggacctttcagatccttgtgatgttagaaatgactccacaacggggcgacgtgtatacgtgccacgtggagcacccttccctgcagaatcctataattgtagaatggcggctgctccactag

SEQ ID NO: 87010 - DNA, 435 bp, Artificial Sequence
  derived and/or modified sequence
atgagctggaagaaggccctcaggatcccagggggcctgagagtggctactgtgacaccattaggcccgcctgacgcagagtattggaactcccaaaaggaggtgctcgaaaggacaagggctgagctggataccgtgtgccggcacaattatcagctggagctccgcacgaccttgcagagacgtgtggagccaaccgtgaccataagcccctcaaggacagaggccctgaaccaccacaacctcttggtatgcagcgtgaccgacttttaccctgcccagatcaaagtcaggtggttcagaaacgatcaggaggaaactacgggggtggtctccactccccttataagaaacggggactggaccttccagatacttgtcatgcttgagatgacacctcagcgaggcgacgtgtacacctgccatgtggaatag

SEQ ID NO: 87011 - DNA, 405 bp, Artificial Sequence
  derived and/or modified sequence
atgtcttggaagaaagctctacgcattcccggaggactcagagctgccacggttacccttatgctcgctatgttgtcaactccggtagcagagggtagggatagccccgtggagcccacagtcactatcagtccctccaggacagaggctctcaatcatcataatcttcttgtgtgctctgtcactgatttttatcctgcccaaatcaaggttagatggttcagaaatgaccaggaggagacaacaggggtcgtgagcacccctctgatcaggaatggcgactggacatttcagattcttgttatgctggaaatgaccccgcagcacggagatgtgtatacttgccacgttgaacacccttcactgcaaaatcctatcactgttgaatggcggctactgcattag

SEQ ID NO: 87012 - DNA, 435 bp, Artificial Sequence
  derived and/or modified sequence
atgtcatggaagaaagccctgcggatccccggggggttacgcgccgccaccgtcacattgctgggtctgcctgcggcagaatattggaacagccagaaagatatcctggaacgaaagagggctgccgtcgatagagtgtgcagacataactaccagctggaacttcggaccacgttacaaagacgggtggaacctactgttacaatcagcccttcccgaaccgaagcactgaatcaccataatctgttggtctgcagtgttaccgacttctacccggctcagatcaaggtccgctggtttcgtaacggccaggaagaaacagctggcgtggtctcgacaccactcatccggaatggagactggactttccagatccttgtcatgctggaaatgaccccccagagaggcgacgtgtacacctgccatgttgagtag

SEQ ID NO: 87013 - DNA, 435 bp, Artificial Sequence
  derived and/or modified sequence
atgtcatggaagaaggcattacggattccaggcggccttcgggcagccacagtcactcccctcggccccccggatgccgagtattggaactcccagaaggaggtactggaaagaacaagagctgagctggataccgtttgccgacacaactaccaacttgaactgaggacgactctccagcgtagggtagaaccaactgtcaccatttcacctagcagaaccgaggctttaaaccatcacaaccttctcgtttgctctgtcaccgatttctatccagcccagatcaaggtgcgctggtttcgcaatgatcaggaagaaaccacgggcgtcgtaagcacgccgctcatcaggaatggcgactggacgttccagatactggtgatgctggagatgacacctcagcacggcgatgtgtacacctgccacgtcgagtag

SEQ ID NO: 87014 - DNA, 411 bp, Artificial Sequence
  derived and/or modified sequence
atgagctggaaaaaggcgcttcggataccagggggtctgcgggctgccacggttacactgatgctttccatgctgtccacgcccgtcgccgagggccgcgattccccggaagacttcgtgtaccaatttaagggaatgtgttacttcacaaacggcacagagcgagtgcggttggtgtctagatctatctataatagggaggagatcgtgagatttgactcagatgtaggggaatttcgtgccgtcaccctgctgggtctcccagctgcggagtactggaacagccagaaagacatccttgaacgaaagcgcgccgctgtggaccgcgtctgcaggcacaattaccagctcgagctccgcaccacactgcaacggcggggaatggtgacagggccaagtcggagttggtag

SEQ ID NO: 87015 - DNA, 717 bp, Artificial Sequence
  derived and/or modified sequence
atgctgagcaccccagttgcggagggaagggacagccccgaagattttgtataccagtttaagggcatgtgttacttcacaaatggcacagaacgcgtgcggctggtgtctagatccatctacaatagggaagagatagtgaggttcgacagcgacgtgggcgagttccgcgccgtaactctcctggggctgcccgccgccgagtattggaacagtcagaaagatatcctggagaggaagcgcgccgctgtcgatcgggtgtgccgccacaattatcagctcgagctcaggactacattgcagagacgagtggagccaactgttacaatctccccgagcaggacggaagccctgaaccatcacaacttactggtgtgttccgtgacagatttttatcctgcccaaattaaagtgagatggttcaggaatgggcaggaggagaccgccggcgtcgtaagcacaccgctgattagaaacggcgattggacattccagattctggtgatgctggagatgaccccgcagaggggcgatgtgtatacctgtcatgtcgaacacccttccctgcagagcccgatcaccgtggaatggcgggctcagtctgaatccgctcagagtaagatgttgtctggcataggaggcttcgtgctggggctgatcttcctcggcttaggcctgatcattcaccacagaagtcagaaaggattactgcactag

SEQ ID NO: 87016 - DNA, 717 bp, Artificial Sequence
  derived and/or modified sequence
atgctgagcacccccgtagccgagggtagggactctcccgaagacttcgtgtatcaatttaaaggaatgtgttatttcaccaatggcacagaacgggtccggttagtgagtagatccatctacaaccgagaggagatcgttcgctttgattccgatgtgggcgagttcagggctgtgaccctgttgggcctgccagccgctgaatattggaacagccagaaagacatactggaaagaaaacgggcagctgtggatcgcgtttgtcggcataactaccagcttgaactccggactactctgcagaggcgggttgagcctacagtgacaatctctcctagcaggaccgaggcgctgaaccatcacaatttgctggtatgttcagtgacagacttttaccccgctcagatcaaagttcgttggttcaggaacgaccaagaagaaacagctggcgtggttagtacacctctgatcagaaatggagattggacttttcagattttagtaatgttagaaatgaccccccagcgaggagacgtttacacctgccatgtagaacacccaagcctgcagtctcccatcacagtagagtggagggcacagagcgagtcggctcagagcaaaatgctttcaggtatcggtggcttcgtgctgggattgattttcctgggcttgggcctcatcatccatcataggagtcagaagggcctcctgcactag

SEQ ID NO: 87017 - DNA, 717 bp, Artificial Sequence
  derived and/or modified sequence
atgttgtctactccggtggccgaaggacgcgactcaccggaagatttcgtctaccaattcaaaggaatgtgctactttacaaacggcactgagcgcgtgcgattggtttctagatctatttacaatagagaagaaattgtgcgctttgactccgatgtgggagagtttagagctgtcaccctgctaggtttacctgcagcagaatactggaatagtcagaaggacattttagagcgcaagagggcagccgtggaccgcgtctgccggcacaattaccagttggaactgaggacaactctgcaaagacgagtggaacctaccgtgactatctccccgtcaaggactgaggccctgaaccaccataatctgctagtttgtagcgttaccgacttttatcccgcacagattaaggttcggtggttccgaaacgatcaggaggaaactgccggtgttgtttctacacctctcattagaaatggggactggaccttccagatcctggtcatgctagagatgacccctcaacgaggagacgtgtacacctgccacgtcgagcacccgagcctgcagtcacctattacggttgaatggcgcgcccagtccgagagcgctcagagcaagatgctttccggtatcggcggattcgtacttggcctcatcttcctagggctcggcctcataatccaccaccgaagccagaaagggctgcttcactag

SEQ ID NO: 87018 - DNA, 786 bp, Artificial Sequence
  derived and/or modified sequence
atgtcctggaagaaggccctgcgcatccctgggggcctgcgggccgccaccgtgaccctgatgctgtccatgctgagcacccctgtggccgagggccgggacagcccagaagattttgtgtaccagttcaagggcatgtgctacttcaccaatggaacagagcgggtgcggctggtgagccgcagcatctacaaccgggaggagatcgtgcgctttgacagtgatgtgggggagttccgggctgtgaccctgctgggcctgcctgctgctgagtactggaacagccagaaggacatcctggagaggaagagagctgctgtggacagagtgtgccgccacaactaccagctggagctgcggaccaccctgcagaggagagtggagcccaccgtgaccatcagccccagcaggacagaggccctgaaccaccacaacctgctggtgtgcagcgtgacagacttctacccagcccagatcaaggtgcgctggttcagaaatgaccaggaggagacagctggggtggtgtccacccccctcatcagaaatggagactggaccttccagatcctggtgatgctggagatgaccccccagagaggagatgtgtacacctgccacgtggagcaccccagcctgcagagccccatcaccgtggagtggagggcccagagcgagagcgcccagagcaagatgctgtctggaattggaggctttgtgctgggcctcatcttcctgggcctgggcctcatcatccaccacaggagccagaagggcctgctgcactag

SEQ ID NO: 87019 - DNA, 786 bp, Artificial Sequence
  derived and/or modified sequence
atgtcctggaagaaggccctgcgcatccctgggggcctgcgggccgccaccgtgaccctgatgctggccatgctgagcacccctgtggccgagggccgggacagcccagaagattttgtgtaccagttcaaggccatgtgctacttcaccaatggaacagagcgggtgcgctacgtgacccgctacatctacaaccgggaggagtatgccaggtttgacagtgatgtggaggtgtacagagctgtgacccccctgggccccccagatgctgagtactggaacagccagaaggaggtgctggagaggaccagggctgagctggacacagtgtgccgccacaactaccagctggagctgcggaccaccctgcagaggagagtggagcccaccgtgaccatcagccccagcaggacagaggccctgaaccaccacaacctgctggtgtgcagcgtgacagacttctacccagcccagatcaaggtgcgctggttcagaaatgaccaggaggagaccaccggggtggtgtccacccccctcatcagaaatggagactggaccttccagatcctggtgatgctggagatgaccccccagcacggagatgtgtacacctgccacgtggagcaccccagcctgcagaaccccatcaccgtggagtggagggcccagagcgagagcgcccagagcaagatgctgtctggaattggaggctttgtgctgggcctcatcttcctgggcctgggcctcatcatccaccacaggagccagaagggcctgctgcactag

SEQ ID NO: 87020 - DNA, 675 bp, Artificial Sequence
  derived and/or modified sequence
atgtcctggaagaaggccctgcgcatccctgggggcctgcgggccgccaccgtgaccctgatgctgtccatgctgagcacccctgtggccgagggccgggacagcccagaagattttgtgtaccagttcaagggcatgtgctacttcaccaatggaacagagcgggtgcggctggtgagccgcagcatctacaaccgggaggagatcgtgcgctttgacagtgatgtgggggagttccgggctgtgaccctgctgggcctgcctgctgctgagtactggaacagccagaaggacatcctggagaggaagagagctgctgtggacagagtgtgccgccacaactaccagctggagctgcggaccaccctgcagaggagagtggagcccaccgtgaccatcagccccagcaggacagaggccctgaaccaccacaacctgctggtgtgcagcgtgacagacttctacccagcccagatcaaggtgcgctggttcagaaatgaccaggaggagacagctggggtggtgtccacccccctcatcagaaatggagactggaccttccagatcctggtgatgctggagatgaccccccagagaggagatgtgtacacctgccacgtggagcaccccagcctgcagagccccatcaccgtggagtggaggctgctgcactag

SEQ ID NO: 87021 - DNA, 786 bp, Artificial Sequence
  derived and/or modified sequence
atgtcctggaagaaggccctgcgcatccctgggggcctgcgggtggccaccgtgaccctgatgctggccatgctgagcacccctgtggccgagggccgggacagcccagaagattttgtgtaccagttcaagggcatgtgctacttcaccaatggaacagagcgggtgcggggcgtgacccgctacatctacaaccgggaggagtatgccaggtttgacagtgatgtgggcgtgtacagagctgtgacccccctgggccccccagctgctgagtactggaacagccagaaggaggtgctggagaggaccagggctgagctggacacagtgtgccgccacaactaccagctggagctgcggaccaccctgcagaggagagtggagcccaccgtgaccatcagccccagcaggacagaggccctgaaccaccacaacctgctggtgtgcagcgtgacagacttctacccagcccagatcaaggtgcgctggttcagaaatgaccaggaggagaccaccggggtggtgtccacccccctcatcagaaatggagactggaccttccagatcctggtgatgctggagatgaccccccagagaggagatgtgtacacctgccacgtggagcaccccagcctgcagaaccccatcatcgtggagtggagggcccagagcgagagcgcccagagcaagatgctgtctggaattggaggctttgtgctgggcctcatcttcctgggcctgggcctcatcatccaccacaggagccagaagggcctgctgcactag

SEQ ID NO: 87022 - DNA, 675 bp, Artificial Sequence
  derived and/or modified sequence
atgtcctggaagaaggccctgcgcatccctgggggcctgcgggccgccaccgtgaccctgatgctgtccatgctgagcacccctgtggccgagggccgggacagcccagaagattttgtgtaccagttcaagggcatgtgctacttcaccaatggaacagagcgggtgcggctggtgagccgcagcatctacaaccgggaggagatcgtgcgctttgacagtgatgtgggggagttccgggctgtgaccctgctgggcctgcctgctgctgagtactggaacagccagaaggacatcctggagaggaagagagctgctgtggacagagtgtgccgccacaactaccagctggagctgcggaccaccctgcagaggagagtggagcccaccgtgaccatcagccccagcaggacagaggccctgaaccaccacaacctgctggtgtgcagcgtgacagacttctacccagcccagatcaaggtgcgctggttcagaaatggccaggaggagacagctggggtggtgtccacccccctcatcagaaatggagactggaccttccagatcctggtgatgctggagatgaccccccagagaggagatgtgtacacctgccacgtggagcaccccagcctgcagagccccatcaccgtggagtggaggctgctgcactag

SEQ ID NO: 87023 - DNA, 786 bp, Artificial Sequence
  derived and/or modified sequence
atgtcctggaagaaggccctgcgcatccctgggggcctgcgggtggccaccgtgaccctgatgctggccatgctgagcacccctgtggccgagggccgggacagcccagaagattttgtgtaccagttcaagggcatgtgctacttcaccaatggaacagagcgggtgcggctggtgacccgctacatctacaaccgggaggagtatgccaggtttgacagtgatgtgggcgtgtacagagctgtgacccccctgggccccccagatgctgagtactggaacagccagaaggaggtgctggagaggaccagggctgagctggacacagtgtgccgccacaactaccagctggagctgcggaccaccctgcagaggagagtggagcccaccgtgaccatcagccccagcaggacagaggccctgaaccaccacaacctgctggtgtgcagcgtgacagacttctacccagcccagatcaaggtgcgctggttcagaaatgaccaggaggagaccaccggggtggtgtccacccccctcatcagaaatggagactggaccttccagatcctggtgatgctggagatgaccccccagagaggagatgtgtacacctgccacgtggagcaccccagcctgcagaaccccatcatcgtggagtggagggcccagagcgagagcgcccagagcaagatgctgtctggaattggaggctttgtgctgggcctcatcttcctgggcctgggcctcatcatccaccacaggagccagaagggcctgctgcactag

SEQ ID NO: 87024 - DNA, 786 bp, Artificial Sequence
  derived and/or modified sequence
atgtcctggaagaaggccctgcgcatccctgggggcctgcgggccgccaccgtgaccctgatgctgtccatgctgagcacccctgtggccgagggccgggacagcccagaagattttgtgtaccagttcaagggcatgtgctacttcaccaatggaacagagcgggtgcggctggtgagccgcagcatctacaaccgggaggagatcgtgcgctttgacagtgatgtgggggagttccgggctgtgaccctgctgggcctgcctgctgctgagtactggaacagccagaaggacatcctggagaggaagagagctgctgtggacagagtgtgccgccacaactaccagctggagctgcggaccaccctgcagaggagagtggagcccaccgtgaccatcagccccagcaggacagaggccctgaaccaccacaacctgctggtgtgcagcgtgacagacttctacccagcccagatcaaggtgcgctggttcagaaatggccaggaggagacagctggggtggtgtccacccccctcatcagaaatggagactggaccttccagatcctggtgatgctggagatgaccccccagagaggagatgtgtacacctgccacgtggagcaccccagcctgcagagccccatcaccgtggagtggagggcccagagcgagagcgcccagagcaagatgctgtctggaattggaggctttgtgctgggcctcatcttcctgggcctgggcctcatcatccaccacaggagccagaagggcctgctgcactag

SEQ ID NO: 87025 - DNA, 810 bp, Artificial Sequence
  derived and/or modified sequence
atgtcctggaagaaggccctgcgcatccctgggggcctgcgggccgccaccgtgaccctgatgctgtccatgctgagcacccctgtggccgagggccgggacagcccagaagattttgtgtaccagttcaagggcatgtgctacttcaccaatggaacagagcgggtgcggctggtgagccgcagcatctacaaccgggaggagatcgtgcgctttgacagtgatgtgggggagttccgggctgtgaccctgctgggcctgcctgctgctgagtactggaacagccagaaggacatcctggagaggaagagagctgctgtggacagagtgtgccgccacaactaccagctggagctgcggaccaccctgcagaggagagtggagcccaccgtgaccatcagccccagcaggacagaggccctgaaccaccacaacctgctggtgtgcagcgtgacagacttctacccagcccagatcaaggtgcgctggttcagaaatggccaggaggagacagctggggtggtgtccacccccctcatcagaaatggagactggaccttccagatcctggtgatgctggagatgaccccccagagaggagatgtgtacacctgccacgtggagcaccccagcctgcagagccccatcaccgtggagtggagggcccagagcgagagcgcccagagcaagatgctgtctggaattggaggctttgtgctgggcctcatcttcctgggcctgggcctcatcatccaccacaggagccagaagggcccccagggccccccacctgctggcctgctgcactag

SEQ ID NO: 87026 - DNA, 405 bp, Artificial Sequence
  derived and/or modified sequence
atgtcctggaagaaggccctgcgcatccctgggggcctgcgggccgccaccgtgaccctgatgctgtccatgctgagcacccctgtggccgagggccgggacagccctgtggagcccaccgtgaccatcagccccagcaggacagaggccctgaaccaccacaacctgctggtgtgcagcgtgacagacttctacccagcccagatcaaggtgcgctggttcagaaatggccaggaggagacagctggggtggtgtccacccccctcatcagaaatggagactggaccttccagatcctggtgatgctggagatgaccccccagagaggagatgtgtacacctgccacgtggagcaccccagcctgcagagccccatcaccgtggagtggaggctgctgcactag

SEQ ID NO: 87027 - DNA, 405 bp, Artificial Sequence
  derived and/or modified sequence
atgtcctggaagaaggccctgcgcatccctgggggcctgcgggtggccaccgtgaccctgatgctggccatgctgagcacccctgtggccgagggccgggacagccctgtggagcccaccgtgaccatcagccccagcaggacagaggccctgaaccaccacaacctgctggtgtgcagcgtgacagacttctacccagcccagatcaaggtgcgctggttcagaaatgaccaggaggagaccaccggggtggtgtccacccccctcatcagaaatggagactggaccttccagatcctggtgatgctggagatgaccccccagagaggagatgtgtacacctgccacgtggagcaccccagcctgcagaaccccatcatcgtggagtggaggctgctgcactag

SEQ ID NO: 87028 - DNA, 435 bp, Artificial Sequence
  derived and/or modified sequence
atgtcctggaagaaggccctgcgcatccctgggggcctgcgggtggccaccgtgacccccctgggccccccagatgctgagtactggaacagccagaaggaggtgctggagaggaccagggctgagctggacacagtgtgccgccacaactaccagctggagctgcggaccaccctgcagaggagagtggagcccaccgtgaccatcagccccagcaggacagaggccctgaaccaccacaacctgctggtgtgcagcgtgacagacttctacccagcccagatcaaggtgcgctggttcagaaatgaccaggaggagaccaccggggtggtgtccacccccctcatcagaaatggagactggaccttccagatcctggtgatgctggagatgaccccccagagaggagatgtgtacacctgccacgtggagtag

SEQ ID NO: 87029 - DNA, 405 bp, Artificial Sequence
  derived and/or modified sequence
atgtcctggaagaaggccctgcgcatccctgggggcctgcgggccgccaccgtgaccctgatgctggccatgctgagcacccctgtggccgagggccgggacagccctgtggagcccaccgtgaccatcagccccagcaggacagaggccctgaaccaccacaacctgctggtgtgcagcgtgacagacttctacccagcccagatcaaggtgcgctggttcagaaatgaccaggaggagaccaccggggtggtgtccacccccctcatcagaaatggagactggaccttccagatcctggtgatgctggagatgaccccccagcacggagatgtgtacacctgccacgtggagcaccccagcctgcagaaccccatcaccgtggagtggaggctgctgcactag

SEQ ID NO: 87030 - DNA, 435 bp, Artificial Sequence
  derived and/or modified sequence
atgtcctggaagaaggccctgcgcatccctgggggcctgcgggccgccaccgtgaccctgctgggcctgcctgctgctgagtactggaacagccagaaggacatcctggagaggaagagagctgctgtggacagagtgtgccgccacaactaccagctggagctgcggaccaccctgcagaggagagtggagcccaccgtgaccatcagccccagcaggacagaggccctgaaccaccacaacctgctggtgtgcagcgtgacagacttctacccagcccagatcaaggtgcgctggttcagaaatggccaggaggagacagctggggtggtgtccacccccctcatcagaaatggagactggaccttccagatcctggtgatgctggagatgaccccccagagaggagatgtgtacacctgccacgtggagtag

SEQ ID NO: 87031 - DNA, 435 bp, Artificial Sequence
  derived and/or modified sequence
atgtcctggaagaaggccctgcgcatccctgggggcctgcgggccgccaccgtgacccccctgggccccccagatgctgagtactggaacagccagaaggaggtgctggagaggaccagggctgagctggacacagtgtgccgccacaactaccagctggagctgcggaccaccctgcagaggagagtggagcccaccgtgaccatcagccccagcaggacagaggccctgaaccaccacaacctgctggtgtgcagcgtgacagacttctacccagcccagatcaaggtgcgctggttcagaaatgaccaggaggagaccaccggggtggtgtccacccccctcatcagaaatggagactggaccttccagatcctggtgatgctggagatgaccccccagcacggagatgtgtacacctgccacgtggagtag

SEQ ID NO: 87032 - DNA, 411 bp, Artificial Sequence
  derived and/or modified sequence
atgtcctggaagaaggccctgcgcatccctgggggcctgcgggccgccaccgtgaccctgatgctgtccatgctgagcacccctgtggccgagggccgggacagcccagaagattttgtgtaccagttcaagggcatgtgctacttcaccaatggaacagagcgggtgcggctggtgagccgcagcatctacaaccgggaggagatcgtgcgctttgacagtgatgtgggggagttccgggctgtgaccctgctgggcctgcctgctgctgagtactggaacagccagaaggacatcctggagaggaagagagctgctgtggacagagtgtgccgccacaactaccagctggagctgcggaccaccctgcagaggcggggcatggtgacaggccccagccgctcctggtag

SEQ ID NO: 87033 - DNA, 717 bp, Artificial Sequence
  derived and/or modified sequence
atgctgagcacccctgtggccgagggccgggacagccctgaggactttgtgtaccagttcaagggcatgtgctacttcaccaacggcacagagcgggtgcggctggtgagccgcagcatctacaaccgggaggagatcgtgcgctttgacagtgatgtgggggagttccgggctgtgaccctgctgggcctgcctgctgctgagtactggaacagccagaaggacatcctggagaggaagagagctgctgtggacagagtgtgccgccacaactaccagctggagctgcggaccaccctgcagaggagagtggagcccaccgtgaccatcagccccagcaggacagaggccctgaaccaccacaacctgctggtgtgcagcgtgacagacttctacccagcccagatcaaggtgcgctggttcagaaatggccaggaggagacagctggggtggtgtccacccccctcatcagaaatggagactggaccttccagatcctggtgatgctggagatgaccccccagagaggagatgtgtacacctgccacgtggagcaccccagcctgcagagccccatcaccgtggagtggagggcccagagcgagagcgcccagagcaagatgctgagcggcatcggcggctttgtgctgggcctcatcttcctgggcctgggcctcatcatccaccacaggagccagaagggcctgctgcactag

SEQ ID NO: 87034 - DNA, 717 bp, Artificial Sequence
  derived and/or modified sequence
atgctgagcacccctgtggccgagggccgggacagccctgaggactttgtgtaccagttcaagggcatgtgctacttcaccaacggcacagagcgggtgcggctggtgagccgcagcatctacaaccgggaggagatcgtgcgctttgacagtgatgtgggggagttccgggctgtgaccctgctgggcctgcctgctgctgagtactggaacagccagaaggacatcctggagaggaagagagctgctgtggacagagtgtgccgccacaactaccagctggagctgcggaccaccctgcagaggagagtggagcccaccgtgaccatcagccccagcaggacagaggccctgaaccaccacaacctgctggtgtgcagcgtgacagacttctacccagcccagatcaaggtgcgctggttcagaaatgaccaggaggagacagctggggtggtgtccacccccctcatcagaaatggagactggaccttccagatcctggtgatgctggagatgaccccccagagaggagatgtgtacacctgccacgtggagcaccccagcctgcagagccccatcaccgtggagtggagggcccagagcgagagcgcccagagcaagatgctgagcggcatcggcggctttgtgctgggcctcatcttcctgggcctgggcctcatcatccaccacaggagccagaagggcctgctgcactag

SEQ ID NO: 87035 - DNA, 1649 bp, Artificial Sequence
  derived and/or modified sequence
atcagatccatcaggtccgagctgtgttgactaccacttttcccttcgtctcaattatgtcttggaaaaaggctttgcggatccccggaggccttcgggcagcaactgtgaccttgatgctgtcgatgctgagcaccccagtggctgagggcagagactctcccgaggatttcgtgtaccagtttaagggcatgtgctacttcaccaacgggacagagcgcgtgcgtcttgtgagcagaagcatctataaccgagaagagatcgtgcgcttcgacagcgacgtgggggagttccgggcggtgacgctgctggggctgcctgccgccgagtactggaacagccagaaggacatcctggagaggaaacgggcggcggtggacagggtgtgcagacacaactaccagttggagctccgcacgaccttgcagcggcgagtggagcccacagtgaccatctccccatccaggacagaggccctcaaccaccacaacctgctggtctgctcggtgacagatttctatccagcccagatcaaagtccggtggtttcggaatgaccaggaggagacagctggcgttgtgtccaccccccttattaggaatggtgactggaccttccagatcctggtgatgctggaaatgactccccagcgtggagacgtctacacctgccacgtggagcaccccagcctccagagccccatcaccgtggagtggcgggctcaatctgaatctgcccagagcaagatgctgagtggcattggaggcttcgtgctggggctgatcttcctcgggctgggccttatcatccatcacaggagtcagaaagggctcctgcactgactcctgagactattttaactgggattggttatcacttttctgtaacgcctgcttgtccctgcccagaattcccagctgtctgtgtcagcctgtccccctgagatcagagtcctacagtggctgtcacgcagccaccaggtcatctcctttcatccccaccttgaggcggatggctgtgaccctacttcctgcactgacccacagcctctgcctgtgcacggccagctgcatctactcaggccccaaggggtttctgtttctattctctcctcagactgctcaagagaagcacatgaaaaccattacctgactttagagcttttttacataattaaacatgatcctgagttatctgtattctgaacttccttaattgagcagaggcaggaaatcactgcagaatgaaggaacataccttgaggtgacccagccaacctgtgcccagaaggagggttgtaccttgaaaagacactgaaagaatttggggtgcaaagtcatggtgggcagaggaggtagaaaatcaactcagttgttgcatcattcatggttctttcatattgatgttcagtgcagtggcctgagaatatcccagcctctcttctggtttggtgagtgctatataagtaaacatggtggaattgtttgggggcagatatagtgacccttggtcactggtgtttcaaacattctggcaagtcacatcaatcaagaataatttttacttttaagaaagcataaccagcaataaaagtattatttttgattctaaatgatagaaacccaaatatattttgttcatggtgcaaa

SEQ ID NO: 87036 - DNA, 1788 bp, Artificial Sequence
  derived and/or modified sequence
gcactggattgagaaccttcacaaaaaaaaatctgcccagagacagatgaggtccttcagctccagtgctgattggttcctttccaagggaccatccaatcctaccacgcatggaaacatccacaggtttttattctttctgccaggtacatcagatccatcaggtccgagctgtgttgactaccactacttttcccttcgtctcaattatgtcttggaaaaaggctttgcggatccccggaggccttcgggcagcaactgttaccttgatgctggcgatgctgagcaccccagtggctgagggcagagactctcccgaggatttcgtgtaccagtttaaggccatgtgctacttcaccaacgggacggagcgcgtgcgttatgtgaccagatacatctataaccgagaggagtacgcacgcttcgacagcgacgtggaggtgtaccgggcggtgacgccgctggggccgcctgacgccgagtactggaacagccagaaggaagtcctggagaggacccgggcggagttggacacggtgtgcagacacaactaccagttggagctccgcacgaccttgcagcggcgagtggagcccacagtgaccatctccccatccaggacagaggccctcaaccaccacaacctgctggtctgctcagtgacagatttctatccagcccagatcaaagtccggtggtttcggaatgaccaggaggagacaaccggcgttgtgtccaccccccttattaggaacggtgactggaccttccagatcctggtgatgctggaaatgactccccagcatggagacgtctacacctgccacgtggagcaccccagcctccagaaccccatcaccgtggagtggcgggctcagtctgaatctgcccagagcaagatgctgagtggcattggaggcttcgtgctggggctcatcttcctcgggctgggccttattatccatcacaggagtcagaaaggacctcaagggcctccaccagcagggctcctgcactgactcctgagactattttaactgggattggttatcacttttctgtaacgcctgcttgtccctgcccagaattcccaactgcctgtgtcagcctgtccccctgagatcagagtcctacagtggctgtcacgcagccaccaggtcatctcctttcatccccaccccaaggcgctggctgtgactctgcttcctgcactgacccagagcctctgcctgtgcatggccagctgcgtctactcaggccccaaggggtttctgtttctattctctcctcagactgctcaagagaagcacatgaaaaccattacctgactttagagcttttttacataattaaacatgatcctgagttatctgtattctcaacttccttaattgagcagaggcaggaaatcactgcagaatgaaggaacataccttgaggtgacccagccaacctgtgcccagaaggagggttgtaccttgaaaagacactgaaagaatttggggtgcaaagtcatggtgggcagaggaggtagaaaatcaactcagttgtcgcatcattcatggttctttcatattgatgttcagtgcagtggcctgagaatatcccagcctctcttctggtttggtgagtgctatataagtaaacatggtggaattgtttgggggcagatatagtgacccttggtcactggtgtttcaaacattctggcaagtcacatcaatcaagaataatttttacttttaagaaagcataaccagcaataaaagtattatttttgattctaaa

SEQ ID NO: 87037 - DNA, 1789 bp, Artificial Sequence
  derived and/or modified sequence
actggattgagaaccttcacaaaaaaaaaatgtctgcctagagacagattaggtccttcagctccagtgctgattggttcctttccaaaggaccatccaatcctgccacgcagggaaacatccacaggtttttattctttctgccaggtacatcagatccatcaggtccaagctgtgttgactaccactacttttcccttcgtctcaattatgtcttggaagaaggctttgcggatccctggaggccttcgggtagcaactgtgaccttgatgctggcgatgctgagcaccccggtggctgagggcagagactctcccgaggatttcgtgtaccagtttaagggcatgtgctacttcaccaacgggacggagcgcgtgcgtcttgtgaccagatacatctataaccgagaggagtacgcacgcttcgacagcgacgtgggggtgtatcgggcggtgacgccgctggggccgcctgacgccgagtactggaacagccagaaggaagtcctggagaggacccgggcggagttggacacggtgtgcagacacaactaccagttggagctccgcacgaccttgcagcggcgagtggagcccacagtgaccatctccccatccaggacagaggccctcaaccaccacaacctgctggtctgctcagtgacagatttctatccagcccagatcaaagtccggtggtttcggaatgaccaggaggagacaactggcgttgtgtccaccccccttattaggaacggtgactggaccttccagatcctggtgatgctggaaatgactccccagcgtggagacgtctacacctgccacgtggagcaccccagcctccagaaccccatcatcgtggagtggcgggctcagtctgaatctgcccagagcaagatgctgagtggcattggaggcttcgtgctggggctgatcttcctcgggctgggccttattatccatcacaggagtcagaaaggacctcaagggcctccaccagcagggctcctgcactgactcctgagactattttaactgggattggttatcacttttctgtaacgcctgcttgtccctgcccagaattcccagctgcctgtgtcagcctgtcccccgagatcagagtcctacagtggctgtcacgcagccaccaggtcatctcctttcatccccacctcaaggctgatggctgtgaccctgcttcctgcactgacccagagcctctgcctgtgcacggccagctgcgtctactgaggccccaaggggtttctgtttctattctctcctcagactgctcaagagaagcacatgaaaaccattacctgactttagagcttttttacataattaaacatgatcctgagttatctgtattctcaacttccttaattgagcagaggcaggaaatcactgcagaatgaaggaacataccttgaggtgacccagccaacctgtgcccagaaggagggttgtaccttgaaaagacactgaaagaattttgggtgcaaagtcagggtgggcagaggaggtagaagatcaactcagttgtcgcatcattcatggttctttcatattgatgttcaatgcagtggcctgagaatatcccagcctctcttctggtttggtgagtgctatataagtaagcatggtggaattgtttgggggcagatatagtgacccttggtcactggtgtttcaaacattctggcaagtcacatcaatcaagaataatttttacttttaagaaagcataaccagcaataaaagtattatttttgagtctaaa

SEQ ID NO: 87038 - DNA, 1642 bp, Artificial Sequence
  derived and/or modified sequence
acaggtttttattctttctgccaggtacatcagatccatcaggtccgagctgtgttgactaccactacttttcccttcgtctcaattatgtcttggaaaaaggctttgcggatccccggaggccttcgggcagcaactgttaccttgatgctggcgatgctgagcaccccagtggctgagggcagagactctcccgaggatttcgtgtaccagtttaaggccatgtgctacttcaccaacgggacggagcgcgtgcgttatgtgaccagatacatctataaccgagaggagtacgcacgcttcgacagcgacgtggaggtgtaccgggcggtgacgccgctggggccgcctgacgccgagtactggaacagccagaaggaagtcctggagaggacccgggcggagttggacacggtgtgcagacacaactaccagttggagctccgcacgaccttgcagcggcgagtggagcccacagtgaccatctccccatccaggacagaggccctcaaccaccacaacctgctggtctgctcagtgacagatttctatccagcccagatcaaagtccggtggtttcggaatgaccaggaggagacaaccggcgttgtgtccaccccccttattaggaacggtgactggaccttccagatcctggtgatgctggaaatgactccccagcatggagacgtctacacctgccacgtggagcaccccagcctccagaaccccatcaccgtggagtggcgggctcagtctgaatctgcccagagcaagatgctgagtggcattggaggcttcgtgctggggctcatcttcctcgggctgggccttattatccatcacaggagtcagaaagggctcctgcactgactcctgagactattttaactgggattggttatcacttttctgtaacgcctgcttgtccctgcccagaattcccaactgcctgtgtcagcctgtccccctgagatcagagtcctacagtggctgtcacgcagccaccaggtcatctcctttcatccccaccccaaggcgctggctgtgactctgcttcctgcactgacccagagcctctgcctgtgcatggccagctgcgtctactcaggccccaaggggtttctgtttctattctctcctcagactgctcaagagaagcacatgaaaaccattacctgactttagagcttttttacataattaaacatgatcctgagttatctgtattctcaacttccttaattgagcagaggcaggaaatcactgcagaatgaaggaacataccttgaggtgacccagccaacctgtgcccagaaggagggttgtaccttgaaaagacactgaaagaatttggggtgcaaagtcatggtgggcagaggaggtagaaaatcaactcagttgtcgcatcattcatggttctttcatattgatgttcagtgcagtggcctgagaatatcccagcctctcttctggtttggtgagtgctatataagtaaacatggtggaattgtttgggggcagatatagtgacccttggtcactggtgtttcaaacattctggcaagtcacatcaatcaagaataatttttacttttaagaaagcataaccagcaataaaagtattatttttgattctaaa

SEQ ID NO: 87039 - DNA, 1473 bp, Artificial Sequence
  derived and/or modified sequence
ctgtgttgactaccacttttcccttcgtctcaattatgtcttggaaaaaggctttgcggatccccggaggccttcgggcagcaactgtgaccttgatgctgtcgatgctgagcaccccagtggctgagggcagagactctcccgaggatttcgtgtaccagtttaagggcatgtgctacttcaccaacgggacagagcgcgtgcgtcttgtgagcagaagcatctataaccgagaagagatcgtgcgcttcgacagcgacgtgggggagttccgggcggtgacgctgctggggctgcctgccgccgagtactggaacagccagaaggacatcctggagaggaaacgggcggcggtggacagggtgtgcagacacaactaccagttggagctccgcacgaccttgcagcggcgagtggagcccacagtgaccatctccccatccaggacagaggccctcaaccaccacaacctgctggtctgctcggtgacagatttctatccagcccagatcaaagtccggtggtttcggaatgaccaggaggagacagctggcgttgtgtccaccccccttattaggaatggtgactggaccttccagatcctggtgatgctggaaatgactccccagcgtggagacgtctacacctgccacgtggagcaccccagcctccagagccccatcaccgtggagtggcggctcctgcactgactcctgagactattttaactgggattggttatcacttttctgtaacgcctgcttgtccctgcccagaattcccagctgtctgtgtcagcctgtccccctgagatcagagtcctacagtggctgtcacgcagccaccaggtcatctcctttcatccccaccttgaggcggatggctgtgaccctacttcctgcactgacccacagcctctgcctgtgcacggccagctgcatctactcaggccccaaggggtttctgtttctattctctcctcagactgctcaagagaagcacatgaaaaccattacctgactttagagcttttttacataattaaacatgatcctgagttatctgtattctgaacttccttaattgagcagaggcaggaaatcactgcagaatgaaggaacataccttgaggtgacccagccaacctgtgcccagaaggagggttgtaccttgaaaagacactgaaagaatttggggtgcaaagtcatggtgggcagaggaggtagaaaatcaactcagttgttgcatcattcatggttctttcatattgatgttcagtgcagtggcctgagaatatcccagcctctcttctggtttggtgagtgctatataagtaaacatggtggaattgtttgggggcagatatagtgacccttggtcactggtgtttcaaacattctggcaagtcacatcaatcaagaataatttttacttttaagaaagcataaccagcaataaaagtattatttttga

SEQ ID NO: 87040 - DNA, 1734 bp, Artificial Sequence
  derived and/or modified sequence
aggatggattagaggcctctattctgagggacactgaggtgggggctgaggaaggacattgagggcagcttcaggtctctctgcctactcttccttgccccaactccattccaggtgtacatcagatccatcaggtccgagctgtgttgactaccactacttttcccttcgtctcaattatgtcttggaaaaaggctttgcggatccccggaggccttcgggcagcaactgttaccttgatgctggcgatgctgagcaccccagtggctgagggcagagactctcccgaggatttcgtgtaccagtttaaggccatgtgctacttcaccaacgggacggagcgcgtgcgttatgtgaccagatacatctataaccgagaggagtacgcacgcttcgacagcgacgtggaggtgtaccgggcggtgacgccgctggggccgcctgacgccgagtactggaacagccagaaggaagtcctggagaggacccgggcggagttggacacggtgtgcagacacaactaccagttggagctccgcacgaccttgcagcggcgagtggagcccacagtgaccatctccccatccaggacagaggccctcaaccaccacaacctgctggtctgctcagtgacagatttctatccagcccagatcaaagtccggtggtttcggaatgaccaggaggagacaaccggcgttgtgtccaccccccttattaggaacggtgactggaccttccagatcctggtgatgctggaaatgactccccagcatggagacgtctacacctgccacgtggagcaccccagcctccagaaccccatcaccgtggagtggcgggctcagtctgaatctgcccagagcaagatgctgagtggcattggaggcttcgtgctggggctcatcttcctcgggctgggccttattatccatcacaggagtcagaaagggctcctgcactgactcctgagactattttaactgggattggttatcacttttctgtaacgcctgcttgtccctgcccagaattcccaactgcctgtgtcagcctgtccccctgagatcagagtcctacagtggctgtcacgcagccaccaggtcatctcctttcatccccaccccaaggcgctggctgtgactctgcttcctgcactgacccagagcctctgcctgtgcatggccagctgcgtctactcaggccccaaggggtttctgtttctattctctcctcagactgctcaagagaagcacatgaaaaccattacctgactttagagcttttttacataattaaacatgatcctgagttatctgtattctcaacttccttaattgagcagaggcaggaaatcactgcagaatgaaggaacataccttgaggtgacccagccaacctgtgcccagaaggagggttgtaccttgaaaagacactgaaagaatttggggtgcaaagtcatggtgggcagaggaggtagaaaatcaactcagttgtcgcatcattcatggttctttcatattgatgttcagtgcagtggcctgagaatatcccagcctctcttctggtttggtgagtgctatataagtaaacatggtggaattgtttgggggcagatatagtgacccttggtcactggtgtttcaaacattctggcaagtcacatcaatcaagaataatttttacttttaagaaagcataaccagcaataaaagtattatttttgattctaaa

SEQ ID NO: 87041 - DNA, 1643 bp, Artificial Sequence
  derived and/or modified sequence
acaggtttttattctttctgccaggtacatcagatccatcaggtccaagctgtgttgactaccactacttttcccttcgtctcaattatgtcttggaagaaggctttgcggatccctggaggccttcgggtagcaactgtgaccttgatgctggcgatgctgagcaccccggtggctgagggcagagactctcccgaggatttcgtgtaccagtttaagggcatgtgctacttcaccaacgggaccgagcgcgtgcggggtgtgaccagatacatctataaccgagaggagtacgcgcgcttcgacagcgacgtgggggtgtatcgggcggtgacgccgctggggccgcctgccgccgagtactggaacagccagaaggaagtcctggagaggacccgggcggagttggacacggtgtgcagacacaactaccagttggagctccgcacgaccttgcagcggcgagtggagcccacagtgaccatctccccatccaggacagaggccctcaaccaccacaacctgctggtctgctcagtgacagatttctatccagcccagatcaaagtccggtggtttcggaatgaccaggaggagacaactggcgttgtgtccaccccccttattaggaacggtgactggaccttccagatcctggtgatgctggaaatgactccccagcgtggagacgtctacacctgccacgtggagcaccccagcctccagaaccccatcatcgtggagtggcgggctcagtctgaatctgcccagagcaagatgctgagtggcattggaggcttcgtgctggggctgatcttcctcgggctgggccttattatccatcacaggagtcagaaagggctcctgcactgactcctgagactattttaactgggattggttatcacttttctgtaacgcctgcttgtccctgcccagaattcccagctgcctgtgtcagcctgtccccctgagatcagagtcctacagtggctgtcacgcagccaccaggtcatctcctttcatccccacctcgaggctgatggctgtgaccctgcttcctgcacttacccagagcctctgcctgtgcacggccagctgcgtctactgaggccccaaggggtttctgtttctattctctcctcagactgctcaagagaagcacatgaaaaccattacctgactttagagcttttttacataattaaacatgatcctgagttatctgtattctcaacttccttaattgagcagaggcaggaaatcactgcagaatgaaggaacataccttgaggtgacccagccaacctgtgcccagaaggagggttgtaccttgaaaagacactgaaagaatttggggtgcaaagtcagggtgggcagaggaggtagaagatcaactcagttgttgcatcattcatggttctttcatattgatgctcagtgcagtggcctgagaatatcccagcctctcttctggtttggtgagtgctatataagtaagcatggtggaattgtttgggggcagatatagtgacccttggtcactggtgtttcaaacattctggcaagtcacatcaatcaagaataatttttacttttaagaaagcataaccagcaataaaagtactatttttgattctaaa

SEQ ID NO: 87042 - DNA, 1483 bp, Artificial Sequence
  derived and/or modified sequence
gagctgtgttgactaccacttttcccttcgtctcaattatgtcttggaaaaaggctttgcggatccccggaggccttcgggcagcaactgtgaccttgatgctgtcgatgctgagcaccccagtggctgagggcagagactctcccgaggatttcgtgtaccagtttaagggcatgtgctacttcaccaacgggacagagcgcgtgcgtcttgtgagcagaagcatctataaccgagaagagatcgtgcgcttcgacagcgacgtgggggagttccgggcggtgacgctgctggggctgcctgccgccgagtactggaacagccagaaggacatcctggagaggaaacgggcggcggtggacagggtgtgcagacacaactaccagttggagctccgcacgaccttgcagcggcgagtggagcccacagtgaccatctccccatccaggacagaggccctcaaccaccacaacctgctggtctgctcggtgacagatttctatccagcccagatcaaagtccggtggtttcggaatggccaggaggagacagctggcgttgtgtccaccccccttattaggaatggtgactggaccttccagatcctggtgatgctggaaatgactccccagcgtggagacgtctacacctgccacgtggagcaccccagcctccagagccccatcaccgtggagtggcggctcctgcactgactcctgagactattttaactgggattggttatcacttttctgtaacgcctgcttgtccctgcccagaattcccagctgtctgtgtcagcctgtccccctgagatcagagtcctacagtggctgtcacgcagccaccaggtcatctcctttcatccccaccttgaggcggatggctgtgaccctacttcctgcactgacccacagcccctgcctgtgcacagccagctgcatctactcaggccccaaggggtttctgtttctattctctcctcagactgctcaagagaagcacatgaaaactattacctgactttagagcttttttacataattaaacatgatcctgagttatctgtattctgaacttccttaattgagcagaggcaggaaatcactgcagaatgaaggaacataccttgaggtgacccagccaacctgtgcccagaaggagggttgtaccttgaaaagacactgaaagaatttggggtgcaaagtcagggtgggcagaggaggtagaaaatcaactcagttgtcgcatcattcatggttctttcatattgatgttcagtgcagtggcctgagaatatcccagcctctcttctggtttggtgagtgctatataagtaaacatggtggaattgtttgggggcagatatagtgacccttggtcactggtgtttcaaacattctggcaagtcacatcaatcaagaataatttttacttttaagaaagcataaccagcaataaaagtattatttttgattctaaa

SEQ ID NO: 87043 - DNA, 1642 bp, Artificial Sequence
  derived and/or modified sequence
acaggtttttattctttctgccaggtacatcagatccatcaggtccaagctgtgttgactaccactacttttcccttcgtctcaattatgtcttggaagaaggctttgcggatccctggaggccttcgggtagcaactgtgaccttgatgctggcgatgctgagcaccccggtggctgagggcagagactctcccgaggatttcgtgtaccagtttaagggcatgtgctacttcaccaacgggacggagcgcgtgcgtcttgtgaccagatacatctataaccgagaggagtacgcacgcttcgacagcgacgtgggggtgtatcgggcggtgacgccgctggggccgcctgacgccgagtactggaacagccagaaggaagtcctggagaggacccgggcggagttggacacggtgtgcagacacaactaccagttggagctccgcacgaccttgcagcggcgagtggagcccacagtgaccatctccccatccaggacagaggccctcaaccaccacaacctgctggtctgctcagtgacagatttctatccagcccagatcaaagtccggtggtttcggaatgaccaggaggagacaactggcgttgtgtccaccccccttattaggaacggtgactggaccttccagatcctggtgatgctggaaatgactccccagcgtggagacgtctacacctgccacgtggagcaccccagcctccagaaccccatcatcgtggagtggcgggctcagtctgaatctgcccagagcaagatgctgagtggcattggaggcttcgtgctggggctgatcttcctcgggctgggccttattatccatcacaggagtcagaaagggctcctgcactgactcctgagactattttaactgggattggttatcacttttctgtaacgcctgcttgtccctgcccagaattcccagctgcctgtgtcagcctgtcccccgagatcagagtcctacagtggctgtcacgcagccaccaggtcatctcctttcatccccacctcaaggctgatggctgtgaccctgcttcctgcactgacccagagcctctgcctgtgcacggccagctgcgtctactgaggccccaaggggtttctgtttctattctctcctcagactgctcaagagaagcacatgaaaaccattacctgactttagagcttttttacataattaaacatgatcctgagttatctgtattctcaacttccttaattgagcagaggcaggaaatcactgcagaatgaaggaacataccttgaggtgacccagccaacctgtgcccagaaggagggttgtaccttgaaaagacactgaaagaattttgggtgcaaagtcagggtgggcagaggaggtagaagatcaactcagttgtcgcatcattcatggttctttcatattgatgttcaatgcagtggcctgagaatatcccagcctctcttctggtttggtgagtgctatataagtaagcatggtggaattgtttgggggcagatatagtgacccttggtcactggtgtttcaaacattctggcaagtcacatcaatcaagaataatttttacttttaagaaagcataaccagcaataaaagtattatttttgagtctaaa

SEQ ID NO: 87044 - DNA, 1640 bp, Artificial Sequence
  derived and/or modified sequence
acagatttttattctttctgccaggtacatcagatccatcaggtccgagctgtgttgactaccacttttcccttcgtctcaattatgtcttggaaaaaggctttgcggatccccggaggccttcgggcagcaactgtgaccttgatgctgtcgatgctgagcaccccagtggctgagggcagagactctcccgaggatttcgtgtaccagtttaagggcatgtgctacttcaccaacgggacagagcgcgtgcgtcttgtgagcagaagcatctataaccgagaagagatcgtgcgcttcgacagcgacgtgggggagttccgggcggtgacgctgctggggctgcctgccgccgagtactggaacagccagaaggacatcctggagaggaaacgggcggcggtggacagggtgtgcagacacaactaccagttggagctccgcacgaccttgcagcggcgagtggagcccacagtgaccatctccccatccaggacagaggccctcaaccaccacaacctgctggtctgctcggtgacagatttctatccagcccagatcaaagtccggtggtttcggaatggccaggaggagacagctggcgttgtgtccaccccccttattaggaatggtgactggaccttccagatcctggtgatgctggaaatgactccccagcgtggagacgtctacacctgccacgtggagcaccccagcctccagagccccatcaccgtggagtggcgggctcaatctgaatctgcccagagcaagatgctgagtggcattggaggcttcgtgctggggctgatcttcctcgggctgggccttatcatccatcacaggagtcagaaagggctcctgcactgactcctgagactattttaactgggattggttatcacttttctgtaacgcctgcttgtccctgcccagaattcccagctgtctgtgtcagcctgtccccctgagatcagagtcctacagtggctgtcacgcagccaccaggtcatctcctttcatccccaccttgaggcggatggctgtgaccctacttcctgcactgacccacagcccctgcctgtgcacagccagctgcatctactcaggccccaaggggtttctgtttctattctctcctcagactgctcaagagaagcacatgaaaactattacctgactttagagcttttttacataattaaacatgatcctgagttatctgtattctgaacttccttaattgagcagaggcaggaaatcactgcagaatgaaggaacataccttgaggtgacccagccaacctgtgcccagaaggagggttgtaccttgaaaagacactgaaagaatttggggtgcaaagtcagggtgggcagaggaggtagaaaatcaactcagttgtcgcatcattcatggttctttcatattgatgttcagtgcagtggcctgagaatatcccagcctctcttctggtttggtgagtgctatataagtaaacatggtggaattgtttgggggcagatatagtgacccttggtcactggtgtttcaaacattctggcaagtcacatcaatcaagaataatttttacttttaagaaagcataaccagcaataaaagtattatttttgattctaaa

SEQ ID NO: 87045 - DNA, 1787 bp, Artificial Sequence
  derived and/or modified sequence
gcactggattcagaaccttcacacaaaaaaaatctgcccagagacagatgaggtccttcagctccagtgctgattggttcctttccaagggaccatccaatcctaccacgcatggaaacatccacagatttttattctttctgccaggtacatcagatccatcaggtccgagctgtgttgactaccacttttcccttcgtctcaattatgtcttggaaaaaggctttgcggatccccggaggccttcgggcagcaactgtgaccttgatgctgtcgatgctgagcaccccagtggctgagggcagagactctcccgaggatttcgtgtaccagtttaagggcatgtgctacttcaccaacgggacagagcgcgtgcgtcttgtgagcagaagcatctataaccgagaagagatcgtgcgcttcgacagcgacgtgggggagttccgggcggtgacgctgctggggctgcctgccgccgagtactggaacagccagaaggacatcctggagaggaaacgggcggcggtggacagggtgtgcagacacaactaccagttggagctccgcacgaccttgcagcggcgagtggagcccacagtgaccatctccccatccaggacagaggccctcaaccaccacaacctgctggtctgctcggtgacagatttctatccagcccagatcaaagtccggtggtttcggaatggccaggaggagacagctggcgttgtgtccaccccccttattaggaatggtgactggaccttccagatcctggtgatgctggaaatgactccccagcgtggagacgtctacacctgccacgtggagcaccccagcctccagagccccatcaccgtggagtggcgggctcaatctgaatctgcccagagcaagatgctgagtggcattggaggcttcgtgctggggctgatcttcctcgggctgggccttatcatccatcacaggagtcagaaaggacctcaagggcctccaccagcagggctcctgcactgactcctgagactattttaactgggattggttatcacttttctgtaacgcctgcttgtccctgcccagaattcccagctgtctgtgtcagcctgtccccctgagatcagagtcctacagtggctgtcacgcagccaccaggtcatctcctttcatccccaccttgaggcggatggctgtgaccctacttcctgcactgacccacagcccctgcctgtgcacagccagctgcatctactcaggccccaaggggtttctgtttctattctctcctcagactgctcaagagaagcacatgaaaactattacctgactttagagcttttttacataattaaacatgatcctgagttatctgtattctgaacttccttaattgagcagaggcaggaaatcactgcagaatgaaggaacataccttgaggtgacccagccaacctgtgcccagaaggagggttgtaccttgaaaagacactgaaagaatttggggtgcaaagtcagggtgggcagaggaggtagaaaatcaactcagttgtcgcatcattcatggttctttcatattgatgttcagtgcagtggcctgagaatatcccagcctctcttctggtttggtgagtgctatataagtaaacatggtggaattgtttgggggcagatatagtgacccttggtcactggtgtttcaaacattctggcaagtcacatcaatcaagaataatttttacttttaagaaagcataaccagcaataaaagtattatttttgattctaaa

SEQ ID NO: 87046 - DNA, 1734 bp, Artificial Sequence
  derived and/or modified sequence
aggatgcattagaggcctctatcctgagggacactgatgtgggggctgaggaaggacattgagggcaccttcaggtctctctgcctattattccttgtgccaactccattccaggtgtacatcagatccatcaggtccaagctgtgttgactaccactacttttcccttcgtctcaattatgtcttggaagaaggctttgcggatccctggaggccttcgggtagcaactgtgaccttgatgctggcgatgctgagcaccccggtggctgagggcagagactctcccgaggatttcgtgtaccagtttaagggcatgtgctacttcaccaacgggacggagcgcgtgcgtcttgtgaccagatacatctataaccgagaggagtacgcacgcttcgacagcgacgtgggggtgtatcgggcggtgacgccgctggggccgcctgacgccgagtactggaacagccagaaggaagtcctggagaggacccgggcggagttggacacggtgtgcagacacaactaccagttggagctccgcacgaccttgcagcggcgagtggagcccacagtgaccatctccccatccaggacagaggccctcaaccaccacaacctgctggtctgctcagtgacagatttctatccagcccagatcaaagtccggtggtttcggaatgaccaggaggagacaactggcgttgtgtccaccccccttattaggaacggtgactggaccttccagatcctggtgatgctggaaatgactccccagcgtggagacgtctacacctgccacgtggagcaccccagcctccagaaccccatcatcgtggagtggcgggctcagtctgaatctgcccagagcaagatgctgagtggcattggaggcttcgtgctggggctgatcttcctcgggctgggccttattatccatcacaggagtcagaaagggctcctgcactgactcctgagactattttaactgggattggttatcacttttctgtaacgcctgcttgtccctgcccagaattcccagctgcctgtgtcagcctgtcccccgagatcagagtcctacagtggctgtcacgcagccaccaggtcatctcctttcatccccacctcaaggctgatggctgtgaccctgcttcctgcactgacccagagcctctgcctgtgcacggccagctgcgtctactgaggccccaaggggtttctgtttctattctctcctcagactgctcaagagaagcacatgaaaaccattacctgactttagagcttttttacataattaaacatgatcctgagttatctgtattctcaacttccttaattgagcagaggcaggaaatcactgcagaatgaaggaacataccttgaggtgacccagccaacctgtgcccagaaggagggttgtaccttgaaaagacactgaaagaattttgggtgcaaagtcagggtgggcagaggaggtagaagatcaactcagttgtcgcatcattcatggttctttcatattgatgttcaatgcagtggcctgagaatatcccagcctctcttctggtttggtgagtgctatataagtaagcatggtggaattgtttgggggcagatatagtgacccttggtcactggtgtttcaaacattctggcaagtcacatcaatcaagaataatttttacttttaagaaagcataaccagcaataaaagtattatttttgagtctaaa

SEQ ID NO: 87047 - DNA, 1732 bp, Artificial Sequence
  derived and/or modified sequence
aggatggattagaggcctctattctgagggacactgaggtgggggctgaggaaggacattgagggcagcttcaggtctctctgcctactcttccttgccccaactccattccaggtgtacatcagatccatcaggtccgagctgtgttgactaccacttttcccttcgtctcaattatgtcttggaaaaaggctttgcggatccccggaggccttcgggcagcaactgtgaccttgatgctgtcgatgctgagcaccccagtggctgagggcagagactctcccgaggatttcgtgtaccagtttaagggcatgtgctacttcaccaacgggacagagcgcgtgcgtcttgtgagcagaagcatctataaccgagaagagatcgtgcgcttcgacagcgacgtgggggagttccgggcggtgacgctgctggggctgcctgccgccgagtactggaacagccagaaggacatcctggagaggaaacgggcggcggtggacagggtgtgcagacacaactaccagttggagctccgcacgaccttgcagcggcgagtggagcccacagtgaccatctccccatccaggacagaggccctcaaccaccacaacctgctggtctgctcggtgacagatttctatccagcccagatcaaagtccggtggtttcggaatggccaggaggagacagctggcgttgtgtccaccccccttattaggaatggtgactggaccttccagatcctggtgatgctggaaatgactccccagcgtggagacgtctacacctgccacgtggagcaccccagcctccagagccccatcaccgtggagtggcgggctcaatctgaatctgcccagagcaagatgctgagtggcattggaggcttcgtgctggggctgatcttcctcgggctgggccttatcatccatcacaggagtcagaaagggctcctgcactgactcctgagactattttaactgggattggttatcacttttctgtaacgcctgcttgtccctgcccagaattcccagctgtctgtgtcagcctgtccccctgagatcagagtcctacagtggctgtcacgcagccaccaggtcatctcctttcatccccaccttgaggcggatggctgtgaccctacttcctgcactgacccacagcccctgcctgtgcacagccagctgcatctactcaggccccaaggggtttctgtttctattctctcctcagactgctcaagagaagcacatgaaaactattacctgactttagagcttttttacataattaaacatgatcctgagttatctgtattctgaacttccttaattgagcagaggcaggaaatcactgcagaatgaaggaacataccttgaggtgacccagccaacctgtgcccagaaggagggttgtaccttgaaaagacactgaaagaatttggggtgcaaagtcagggtgggcagaggaggtagaaaatcaactcagttgtcgcatcattcatggttctttcatattgatgttcagtgcagtggcctgagaatatcccagcctctcttctggtttggtgagtgctatataagtaaacatggtggaattgtttgggggcagatatagtgacccttggtcactggtgtttcaaacattctggcaagtcacatcaatcaagaataatttttacttttaagaaagcataaccagcaataaaagtattatttttgattctaaa

SEQ ID NO: 87048 - DNA, 1217 bp, Artificial Sequence
  derived and/or modified sequence
gtccgagctgtgttgactaccacttttcccttcgtctcaattatgtcttggaaaaaggctttgcggatccccggaggccttcgggcagcaactgtgaccttgatgctgtcgatgctgagcaccccagtggctgagggcagagactctcccgtggagcccacagtgaccatctccccatccaggacagaggccctcaaccaccacaacctgctggtctgctcggtgacagatttctatccagcccagatcaaagtccggtggtttcggaatggccaggaggagacagctggcgttgtgtccaccccccttattaggaatggtgactggaccttccagatcctggtgatgctggaaatgactccccagcgtggagacgtctacacctgccacgtggagcaccccagcctccagagccccatcaccgtggagtggcggctcctgcactgactcctgagactattttaactgggattggttatcacttttctgtaacgcctgcttgtccctgcccagaattcccagctgtctgtgtcagcctgtccccctgagatcagagtcctacagtggctgtcacgcagccaccaggtcatctcctttcatccccaccttgaggcggatggctgtgaccctacttcctgcactgacccacagcccctgcctgtgcacagccagctgcatctactcaggccccaaggggtttctgtttctattctctcctcagactgctcaagagaagcacatgaaaactattacctgactttagagcttttttacataattaaacatgatcctgagttatctgtattctgaacttccttaattgagcagaggcaggaaatcactgcagaatgaaggaacataccttgaggtgacccagccaacctgtgcccagaaggagggttgtaccttgaaaagacactgaaagaatttggggtgcaaagtcagggtgggcagaggaggtagaaaatcaactcagttgtcgcatcattcatggttctttcatattgatgttcagtgcagtggcctgagaatatcccagcctctcttctggtttggtgagtgctatataagtaaacatggtggaattgtttgggggcagatatagtgacccttggtcactggtgtttcaaacattctggcaagtcacatcaatcaagaataatttttacttttaagaaagcataaccagcaataaaagtattatttttgattctaaa

SEQ ID NO: 87049 - DNA, 1219 bp, Artificial Sequence
  derived and/or modified sequence
gtccaagctgtgttgactaccactacttttcccttcgtctcaattatgtcttggaagaaggctttgcggatccctggaggccttcgggtagcaactgtgaccttgatgctggcgatgctgagcaccccggtggctgagggcagagactctcccgtggagcccacagtgaccatctccccatccaggacagaggccctcaaccaccacaacctgctggtctgctcagtgacagatttctatccagcccagatcaaagtccggtggtttcggaatgaccaggaggagacaactggcgttgtgtccaccccccttattaggaacggtgactggaccttccagatcctggtgatgctggaaatgactccccagcgtggagacgtctacacctgccacgtggagcaccccagcctccagaaccccatcatcgtggagtggcggctcctgcactgactcctgagactattttaactgggattggttatcacttttctgtaacgcctgcttgtccctgcccagaattcccagctgcctgtgtcagcctgtcccccgagatcagagtcctacagtggctgtcacgcagccaccaggtcatctcctttcatccccacctcaaggctgatggctgtgaccctgcttcctgcactgacccagagcctctgcctgtgcacggccagctgcgtctactgaggccccaaggggtttctgtttctattctctcctcagactgctcaagagaagcacatgaaaaccattacctgactttagagcttttttacataattaaacatgatcctgagttatctgtattctcaacttccttaattgagcagaggcaggaaatcactgcagaatgaaggaacataccttgaggtgacccagccaacctgtgcccagaaggagggttgtaccttgaaaagacactgaaagaattttgggtgcaaagtcagggtgggcagaggaggtagaagatcaactcagttgtcgcatcattcatggttctttcatattgatgttcaatgcagtggcctgagaatatcccagcctctcttctggtttggtgagtgctatataagtaagcatggtggaattgtttgggggcagatatagtgacccttggtcactggtgtttcaaacattctggcaagtcacatcaatcaagaataatttttacttttaagaaagcataaccagcaataaaagtattatttttgagtctaaa

SEQ ID NO: 87050 - DNA, 484 bp, Artificial Sequence
  derived and/or modified sequence
atcaggtccaagctgtgttgactaccactacttttcccttcgtctcaattatgtcttggaagaaggctttgcggatccctggaggccttcgggtagcaactgtgacgccgctggggccgcctgacgccgagtactggaacagccagaaggaagtcctggagaggacccgggcggagttggacacggtgtgcagacacaactaccagttggagctccgcacgaccttgcagcggcgagtggagcccacagtgaccatctccccatccaggacagaggccctcaaccaccacaacctgctggtctgctcagtgacagatttctatccagcccagatcaaagtccggtggtttcggaatgaccaggaggagacaactggcgttgtgtccaccccccttattaggaacggtgactggaccttccagatcctggtgatgctggaaatgactccccagcgtggagacgtctacacctgccacgtggagca

SEQ ID NO: 87051 - DNA, 1219 bp, Artificial Sequence
  derived and/or modified sequence
gtccgagctgtgttgactaccactacttttcccttcgtctcaattatgtcttggaaaaaggctttgcggatccccggaggccttcgggcagcaactgttaccttgatgctggcgatgctgagcaccccagtggctgagggcagagactctcccgtggagcccacagtgaccatctccccatccaggacagaggccctcaaccaccacaacctgctggtctgctcagtgacagatttctatccagcccagatcaaagtccggtggtttcggaatgaccaggaggagacaaccggcgttgtgtccaccccccttattaggaacggtgactggaccttccagatcctggtgatgctggaaatgactccccagcatggagacgtctacacctgccacgtggagcaccccagcctccagaaccccatcaccgtggagtggcggctcctgcactgactcctgagactattttaactgggattggttatcacttttctgtaacgcctgcttgtccctgcccagaattcccaactgcctgtgtcagcctgtccccctgagatcagagtcctacagtggctgtcacgcagccaccaggtcatctcctttcatccccaccccaaggcgctggctgtgactctgcttcctgcactgacccagagcctctgcctgtgcatggccagctgcgtctactcaggccccaaggggtttctgtttctattctctcctcagactgctcaagagaagcacatgaaaaccattacctgactttagagcttttttacataattaaacatgatcctgagttatctgtattctcaacttccttaattgagcagaggcaggaaatcactgcagaatgaaggaacataccttgaggtgacccagccaacctgtgcccagaaggagggttgtaccttgaaaagacactgaaagaatttggggtgcaaagtcatggtgggcagaggaggtagaaaatcaactcagttgtcgcatcattcatggttctttcatattgatgttcagtgcagtggcctgagaatatcccagcctctcttctggtttggtgagtgctatataagtaaacatggtggaattgtttgggggcagatatagtgacccttggtcactggtgtttcaaacattctggcaagtcacatcaatcaagaataatttttacttttaagaaagcataaccagcaataaaagtattatttttgattctaaa

SEQ ID NO: 87052 - DNA, 481 bp, Artificial Sequence
  derived and/or modified sequence
atcaggtccgagctgtgttgactaccacttttcccttcgtctcaattatgtcttggaaaaaggctttgcggatccccggaggccttcgggcagcaactgtgacgctgctggggctgcctgccgccgagtactggaacagccagaaggacatcctggagaggaaacgggcggcggtggacagggtgtgcagacacaactaccagttggagctccgcacgaccttgcagcggcgagtggagcccacagtgaccatctccccatccaggacagaggccctcaaccaccacaacctgctggtctgctcggtgacagatttctatccagcccagatcaaagtccggtggtttcggaatggccaggaggagacagctggcgttgtgtccaccccccttattaggaatggtgactggaccttccagatcctggtgatgctggaaatgactccccagcgtggagacgtctacacctgccacgtggagca

SEQ ID NO: 87053 - DNA, 484 bp, Artificial Sequence
  derived and/or modified sequence
atcaggtccgagctgtgttgactaccactacttttcccttcgtctcaattatgtcttggaaaaaggctttgcggatccccggaggccttcgggcagcaactgtgacgccgctggggccgcctgacgccgagtactggaacagccagaaggaagtcctggagaggacccgggcggagttggacacggtgtgcagacacaactaccagttggagctccgcacgaccttgcagcggcgagtggagcccacagtgaccatctccccatccaggacagaggccctcaaccaccacaacctgctggtctgctcagtgacagatttctatccagcccagatcaaagtccggtggtttcggaatgaccaggaggagacaaccggcgttgtgtccaccccccttattaggaacggtgactggaccttccagatcctggtgatgctggaaatgactccccagcatggagacgtctacacctgccacgtggagca

SEQ ID NO: 87054 - DNA, 1421 bp, Artificial Sequence
  derived and/or modified sequence
gactaccacttttcccttcgtctcaattatgtcttggaaaaaggctttgcggatccccggaggccttcgggcagcaactgtgaccttgatgctgtcgatgctgagcaccccagtggctgagggcagagactctcccgaggatttcgtgtaccagtttaagggcatgtgctacttcaccaacgggacagagcgcgtgcgtcttgtgagcagaagcatctataaccgagaagagatcgtgcgcttcgacagcgacgtgggggagttccgggcggtgacgctgctggggctgcctgccgccgagtactggaacagccagaaggacatcctggagaggaaacgggcggcggtggacagggtgtgcagacacaactaccagttggagctccgcacgaccttgcagcggcgaggaatggtgactggaccttccagatcctggtgatgctggaaatgactccccagcgtggagacgtctacacctgccacgtggagcaccccagcctccagagccccatcaccgtggagtggcgggctcaatctgaatctgcccagagcaagatgctgagtggcattggaggcttcgtgctggggctgatcttcctcgggctgggccttatcatccatcacaggagtcagaaagggctcctgcactgactcctgagactattttaactgggattggttatcacttttctgtaacgcctgcttgtccctgcccagaattcccagctgtctgtgtcagcctgtccccctgagatcagagtcctacagtggctgtcacgcagccaccaggtcatctcctttcatccccaccttgaggcggatggctgtgaccctacttcctgcactgacccacagcccctgcctgtgcacagccagctgcatctactcaggccccaaggggtttctgtttctattctctcctcagactgctcaagagaagcacatgaaaactattacctgactttagagcttttttacataattaaacatgatcctgagttatctgtattctgaacttccttaattgagcagaggcaggaaatcactgcagaatgaaggaacataccttgaggtgacccagccaacctgtgcccagaaggagggttgtaccttgaaaagacactgaaagaatttggggtgcaaagtcagggtgggcagaggaggtagaaaatcaactcagttgtcgcatcattcatggttctttcatattgatgttcagtgcagtggcctgagaatatcccagcctctcttctggtttggtgagtgctatataagtaaacatggtggaattgtttgggggcagatatagtgacccttggtcactggtgtttcaaacattctggcaagtcacatcaatcaagaataatttttacttttaagaaagcataaccagcaataaaagtattatttttgattctaaa

SEQ ID NO: 87055 - DNA, 1455 bp, Artificial Sequence
  derived and/or modified sequence
tgttgactaccacttttcccttcgtctcaattatgtcttggaaaaaggctttgcggatccccggaggccttcgggcagcaactgtgaccttgatgctgtcgatgctgagcaccccagtggctgagggcagagactctcccgaggatttcgtgtaccagtttaagggcatgtgctacttcaccaacgggacagagcgcgtgcgtcttgtgagcagaagcatctataaccgagaagagatcgtgcgcttcgacagcgacgtgggggagttccgggcggtgacgctgctggggctgcctgccgccgagtactggaacagccagaaggacatcctggagaggaaacgggcggcggtggacagggtgtgcagacacaactaccagttggagctccgcacgaccttgcagcggcgagtggagcccacagtgaccatctccccatccaggacagaggccctcaaccaccacaacctgctggtctgctcggtgacagatttctatccagcccagatcaaagtccggtggtttcggaatggccaggaggagacagctggcgttgtgtccaccccccttattaggaatggtgactggaccttccagatcctggtgatgctggaaatgactccccagcgtggagacgtctacacctgccacgtggagcaccccagcctccagagccccatcaccgtggagtggcgggctcaatctgaatctgcccagagcaagatgctgagtggcattggaggcttcgtgctggggctgatcttcctcgggctgggccttatcatccatcacaggagtcagaaagggctcctgcactgactcctgagactattttaactgggattggttatcacttttctgtaacgcctgcttgtccctgcccagaattcccagctgtctgtgtcagcctgtccccctgagatcagagtcctacagtggctgtcacgcagccaccaggtcatctcctttcatccccaccttgaggcggatggctgtgaccctacttcctgcactgacccacagcccctgcctgtgcacagccagctgcatctactcaggccccaaggggtttctgtttctattctctcctcagactgctcaagagaagcacatgaaaactattacctgactttagagcttttttacataattaaacatgatcctgagttatctgtattctgaacttccttaattgagcagaggcaggaaatcactgcagaatgaaggaacataccttgaggtgacccagccaacctgtgcccagaaggagggttgtaccttgaaaagacactgaaagaatttggggtgcaaagtcagggtgggcagaggaggtagaaaatcaactcagttgtcgcatcattcatggttctttcatattgatgttcagtgcagtggcctgagaatatcccagcctctcttctggtttggtgagtgctatataagtaaacatggtgga

SEQ ID NO: 87056 - DNA, 729 bp, Artificial Sequence
  derived and/or modified sequence
atccatcaggtccaagctgtgttgactaccactacttttcccttcgtctcaattatgtcttggaagaaggctttgcggatccctggaggccttcgggtagcaactgtgaccttgatgctggcgatgctgagcaccccggtggctgagggcagagactctcccgaggatttcgtgtaccagtttaagggcatgtgctacttcaccaacgggaccgagcgcgtgcggggtgtgaccagatacatctataaccgagaggagtacgcgcgcttcgacagcgacgtgggggtgtatcgggcggtgacgccgctggggccgcctgccgccgagtactggaacagccagaaggaagtcctggagaggacccgggcggagttggacacggtgtgcagacacaactaccagttggagctccgcacgaccttgcagcggcgagtggagcccacagtgaccatctccccatccaggacagaggccctcaaccaccacaacctgctggtctgctcagtgacagatttctatccagcccagatcaaagtccggtggtttcggaatgaccaggaggagacaactggcgttgtgtccaccccccttattaggaacggtgactggaccttccagatcctggtgatgctggaaatgactccccagcgtggagacgtctacacctgccacgtggagcaccccagcctccagaaccccatcatcgtggagtggcgtatggatgagttc

SEQ ID NO: 87057 - DNA, 1455 bp, Artificial Sequence
  derived and/or modified sequence
tgttgactaccacttttcccttcgtctcaattatgtcttggaaaaaggctttgcggatccccggaggccttcgggcagcaactgtgaccttgatgctgtcgatgctgagcaccccagtggctgagggcagagactctcccgaggatttcgtgtaccagtttaagggcatgtgctacttcaccaacgggacagagcgcgtgcgtcttgtgagcagaagcatctataaccgagaagagatcgtgcgcttcgacagcgacgtgggggagttccgggcggtgacgctgctggggctgcctgccgccgagtactggaacagccagaaggacatcctggagaggaaacgggcggcggtggacagggtgtgcagacacaactaccagttggagctccgcacgaccttgcagcggcgagtggagcccacagtgaccatctccccatccaggacagaggccctcaaccaccacaacctgctggtctgctcggtgacagatttctatccagcccagatcaaagtccggtggtttcggaatgaccaggaggagacagctggcgttgtgtccaccccccttattaggaatggtgactggaccttccagatcctggtgatgctggaaatgactccccagcgtggagacgtctacacctgccacgtggagcaccccagcctccagagccccatcaccgtggagtggcgggctcaatctgaatctgcccagagcaagatgctgagtggcattggaggcttcgtgctggggctgatcttcctcgggctgggccttatcatccatcacaggagtcagaaagggctcctgcactgactcctgagactattttaactgggattggttatcacttttctgtaacgcctgcttgtccctgcccagaattcccagctgtctgtgtcagcctgtccccctgagatcagagtcctacagtggctgtcacgcagccaccaggtcatctcctttcatccccaccttgaggcggatggctgtgaccctacttcctgcactgacccacagcctctgcctgtgcacggccagctgcatctactcaggccccaaggggtttctgtttctattctctcctcagactgctcaagagaagcacatgaaaaccattacctgactttagagcttttttacataattaaacatgatcctgagttatctgtattctgaacttccttaattgagcagaggcaggaaatcactgcagaatgaaggaacataccttgaggtgacccagccaacctgtgcccagaaggagggttgtaccttgaaaagacactgaaagaatttggggtgcaaagtcatggtgggcagaggaggtagaaaatcaactcagttgttgcatcattcatggttctttcatattgatgttcagtgcagtggcctgagaatatcccagcctctcttctggtttggtgagtgctatataagtaaacatggtgga

SEQ ID NO: 87058 - DNA, 786 bp, Artificial Sequence
  derived and/or modified sequence
atgagctggaagaaggccctgcggatccccggcggcctgcgggccgcaaccgtgactttgatgttaagtatgctatctacccctgtggcagaaggaagggatagtcccgaggatttcgtctatcagttcaagggaatgtgttactttactaacggcacagagcgcgtgaggctggtctcgcgttccatctataacagagaggagatcgtgagattcgatagcgatgtgggcgagttcagagcggtaacgttgctcgggctgcccgccgcggaatactggaattcccagaaagatatccttgagcggaaaagggccgcagtggaccgcgtgtgcagacacaattaccaactggagctccggacaacgctgcagaggagggtggagcctactgtgacgattagtccaagtcgcaccgaagccttgaatcaccacaacctcttggtgtgttcggtaaccgacttttatcccgcgcagataaaggtacggtggtttaggaatgaccaggaagaaaccgccggcgtggtatcgacacccctgatcaggaacggagattggaccttccaaatcctggttatgctggagatgactcctcagcgtggcgatgtgtatacttgtcacgtggagcacccgagcctgcagtcgccaatcacggtggaatggagagcccaatctgagagtgcccaaagcaaaatgctgtccggcattggcggttttgtgttgggcttgattttcctcgggctaggtctcatcatacaccatagaagtcagaaagggttgctgcactag

SEQ ID NO: 87059 - DNA, 786 bp, Artificial Sequence
  derived and/or modified sequence
atgagctggaagaaggccctgcggatccccggcggcctgcgggccgcaactgttacgctgatgcttagtatgctctcaacgcccgttgccgagggaagagacagcccagaggatttcgtttaccagttcaaggggatgtgctatttcacaaacggcacagaaagggtgcggctcgtgagccgctccatatacaacagggaggagatcgtgagattcgacagtgatgtcggggaatttagagctgtgaccttgttgggactgcctgccgccgagtattggaatagccagaaggatatcctggaacgcaagcgagctgccgttgatcgggtttgccggcataattaccaattagaattaaggacgacgctccagaggcgggttgagcctactgtcaccatcagccccagcaggacagaagcactgaaccaccataacttgctggtctgctctgttaccgatttttatcctgcacagattaaagtgcggtggttcaggaacgatcaggaggagactgcgggcgttgttagtacccctctgatccgtaacggcgactggacatttcaaattctggtgatgttagaaatgacaccccagcgtggagatgtgtacacctgccacgtcgaacaccccagtctgcaatcgcctattacagtggaatggcgtgcccagtccgaatctgcccagtctaagatgctgtccggtattgggggctttgtgctgggcctgattttcctgggcctcgggctcattattcaccacagatcgcagaagggtctgctacattag

SEQ ID NO: 87060 - DNA, 786 bp, Artificial Sequence
  derived and/or modified sequence
atgagctggaagaaggccctgcggatccccggcggcctgcgggccgccacggtcacactcatgctggcaatgttgagtactccagtcgctgaaggccgggacagtcccgaagatttcgtctaccagtttaaggccatgtgctatttcacaaatggtacggagcgggtccggtatgtcaccagatacatttacaaccgagaggaatatgcacgtttcgatagcgacgtcgaagtgtatcgtgcggtgaccccattggggcctccagatgctgagtactggaactcccagaaggaggtattagaacgtactagggccgagttagatacagtgtgccgtcacaattatcagctcgaactgaggaccacactgcagaggcgggtagaaccaaccgttacgatctcccctagccgcaccgaggcattgaaccaccacaacctgttagtatgcagcgttaccgacttctatccagcacaaatcaaagtgaggtggttccgcaacgatcaggaggaaacaacaggcgttgtttccactcccctgattcgaaatggagactggactttccagatcctggtgatgctggagatgacaccccagcacggtgacgtgtacacctgtcacgttgaacatccatcgctgcagaatcccatcacagtggaatggagggcacagagcgaatcagcacagagtaaaatgctctctggtatcggcggctttgtgttgggcttgatattcctaggacttggattaattattcatcatcgctcacaaaagggcctcttgcattag

SEQ ID NO: 87061 - DNA, 675 bp, Artificial Sequence
  derived and/or modified sequence
atgagctggaagaaggccctgcggatccccggcggcctgcgggccgccacagtaaccctcatgctcagcatgctctctacccctgtcgctgagggcagagattctcctgaggattttgtctaccagtttaaaggcatgtgttattttacaaatggcaccgagcgtgtcaggctcgtgtcccggtctatctacaaccgtgaagaaatagtcagattcgactccgacgtcggcgaattccgcgccgtgactctgctggggctgcctgccgccgagtactggaacagccagaaggatatcctcgagcgaaagcgggctgcagtggaccgggtttgcagacacaattatcagttagagcttaggactacattacagcgccgtgtggagcccaccgtaaccatctctccatcccgcacagaggccctgaatcaccacaacctgctcgtttgctctgttaccgatttctaccccgctcagataaaggtccggtggttccggaacgatcaggaggaaaccgccggagtggtgtcaacccctctgatcagaaatggcgactggactttccagattctggtgatgctggagatgaccccccagcggggtgatgtctacacctgtcacgtggaacaccccagtttgcagagcccaatcacagttgagtggcgcctgttgcactag

SEQ ID NO: 87062 - DNA, 786 bp, Artificial Sequence
  derived and/or modified sequence
atgagctggaagaaggccctgcggatccccggcggcctgcgggccgccactgtgaccttgatgctagccatgctcagtaccccagtagcggaaggtcgcgacagtccggaggatttcgtctatcagtttaaagctatgtgttatttcacaaatggaaccgagagggtgagatatgtcacgagatatatctataatagggaagaatacgctcgcttcgattctgatgtagaagtatacagagccgttaccccactgggccccccagacgctgaatactggaacagccagaaggaagttctcgaacggacccgggctgaactggacacggtgtgccggcacaactaccagttagaactgcggacgactctgcagcgacgtgtggagccgaccgtgaccattagcccctcacggacggaagccctgaaccaccataatttgctggtgtgctctgtgaccgatttttatcccgcgcagatcaaagtgaggtggtttagaaatgatcaggaggaaaccaccggggtcgtgagcactcctctgatccggaatggggattggacattccaaatactggtcatgctcgagatgacgccacagcacggagatgtctacacctgccacgtcgagcaccctagcctccagaatcccattacagtggagtggcgggcacagtccgagagcgcacaaagtaagatgctaagcggcatcggcgggttcgtgctcggattaattttccttggactgggcctgattattcaccaccggtctcagaaggggctactgcattag

SEQ ID NO: 87063 - DNA, 786 bp, Artificial Sequence
  derived and/or modified sequence
atgagctggaagaaggccctgcggatccccggcggcctgcgggtggccaccgtgactctgatgctggcgatgctgtccaccccggtggctgagggacgcgattcgccagaggatttcgtgtaccagttcaaggggatgtgctactttacgaatgggacagaacgagtccggggagtgacccggtacatatacaaccgtgaagagtacgcgaggtttgacagtgacgtgggggtgtatagagctgtgactcctttgggaccacctgccgccgaatactggaactcacagaaagaagtgctcgagcgcacccgagcagaactcgatactgtctgcaggcataattatcagttagagctcaggactacactacagagacgggttgagcccacagttactattagcccaagccggactgaagctctaaaccaccataatctcctggtatgtagcgttaccgatttctatcctgcacagatcaaggtgagatggttcaggaacgaccaggaagaaacgaccggggtggtgtccacacctctgatccgcaatggtgattggaccttccagattctggttatgctggagatgaccccccagcgcggtgatgtgtatacgtgccacgtggagcatccatccctgcagaatccaatcattgtagaatggagggcccaatcggagagcgcccagtccaaaatgcttagtggaatcgggggattcgtcctgggactcatcttccttggactgggtctaataatccaccaccgtagccagaaaggactgttgcattag

SEQ ID NO: 87064 - DNA, 675 bp, Artificial Sequence
  derived and/or modified sequence
atgagctggaagaaggccctgcggatccccggcggcctgcgggccgctactgtcaccctcatgctgtctatgctcagtacacctgtggcagagggaagagatagtcctgaggattttgtgtaccagttcaaaggtatgtgttactttactaatggcaccgaaagggtgcggctcgtgtctagaagcatctacaacagagaagaaatagtcaggttcgactctgatgtcggtgaattccgagctgtcacgctgctcggcctgcctgctgcagaatactggaactcgcaaaaggacatcctggaacgtaagcgcgccgccgtcgaccgggtgtgcagacataactatcaactggaattgcgtaccaccctgcaaaggcgagtggaaccgacagttacaatctcccctagcagaactgaagctcttaatcatcacaacctgctcgtatgctctgtaacagatttctaccccgctcagataaaagtccgttggttccgtaacgggcaggaggagaccgccggagtggtgtccaccccgcttatacgcaacggcgactggactttccagattctagtgatgctggaaatgactccccagaggggcgatgtctatacctgtcatgtggagcacccgagcctccagagccctatcactgtggaatggcgtctcttacattag

SEQ ID NO: 87065 - DNA, 786 bp, Artificial Sequence
  derived and/or modified sequence
atgagctggaagaaggccctgcggatccccggcggcctgcgggtggccacggtcactctgatgctcgcaatgctcagcacaccagttgccgagggacgggacagcccagaggatttcgtttatcaattcaaaggcatgtgttacttcacgaacggcaccgaacgcgtccgcctggtcaccagatacatctataatcgcgaggagtacgcccggttcgatagcgatgtaggggtgtatagagccgttacaccgctaggtccacccgacgcagagtactggaacagtcagaaagaggtattggagagaactagagctgaactggatactgtttgtcgacacaattatcagctggaactgcggaccacccttcaaaggcgagtggagcctacggtcaccatctccccttccaggactgaggctttaaaccatcacaatcttctcgtgtgttctgttacagacttttacccagcccagatcaaggtccgatggttcagaaacgaccaagaagagacaaccggtgttgtgagcactccattgatccggaacggagactggactttccagatcctcgttatgttggaaatgacaccacaacgcggagacgtctacacatgccacgtcgagcacccctcccttcagaatcccatcatcgtcgaatggcgagctcagtctgagagtgcccagtccaagatgcttagcggcatagggggctttgtcctgggtcttatttttctcggtctcggcctgatcatccatcataggagccaaaagggcctactccattag

SEQ ID NO: 87066 - DNA, 786 bp, Artificial Sequence
  derived and/or modified sequence
atgagctggaagaaggccctgcggatccccggcggcctgcgggccgccaccgtcactttgatgctttcaatgctatccactcccgtggctgagggacgcgacagtcccgaggattttgtgtatcagttcaaggggatgtgctattttactaatggcacggaacgcgttagactagttagtagatccatttacaatcgcgaagagatcgtcaggttcgattctgatgtaggggagttccgggcagtgacactcctgggcctcccagcagcggagtattggaattcccagaaagatattctcgagcgaaagcgggcagccgttgatagagtgtgccgccacaattatcagctggagctgcggacaacactgcagaggagagtcgaacccacggtgaccattagtccatccagaaccgaagccctgaatcaccacaatctgctggtgtgttccgtgactgatttctatcccgcacagatcaaggtccggtggttccgcaatgggcaggaggagacagccggcgttgttagcactcccctgatacgtaacggcgattggacatttcagatcctggtcatgctcgagatgaccccgcagcggggtgatgtctacacatgccatgttgaacacccctcactgcagagtcctattacagtcgagtggcgggcccagtcggagtcagctcagagtaagatgttatctggaatcgggggtttcgtgctggggttgatcttcctgggccttgggcttattattcaccacagaagccagaagggcttgctacactag

SEQ ID NO: 87067 - DNA, 810 bp, Artificial Sequence
  derived and/or modified sequence
atgagctggaagaaggccctgcggatccccggcggcctgcgggccgcgaccgtgacgctgatgctgtctatgctgtccactccagttgctgagggccgggactcacccgaggacttcgtctaccaatttaaaggcatgtgttatttcacaaatggaacggagcgcgtgagactggtgagcaggtcaatttacaatagagaggaaatcgtaagattcgattcagatgtcggggagtttcgagccgtcacactgctgggtctgcctgctgccgaatactggaactctcagaaggatattctggagcgtaaaagggcagctgttgacagggtgtgccggcacaattatcagctcgagctccgcacaacattacagcgcagagtagaacccacagtgacaatctcccctagtagaaccgaggctctcaatcaccataacctgctggtgtgctccgtgaccgatttctacccggctcagattaaggtccggtggttcagaaacggtcaagaggagaccgccggggtggtgtccacccctctgatccgtaacggagattggacctttcaaattcttgtgatgctggaaatgacaccacaaagaggagatgtgtatacctgccacgtggaacacccgagcttacagagcccaattacagtggaatggagggcccagtcggaatcggcccaaagcaagatgctgagcggaataggaggcttcgtcctgggtttaatcttccttgggctgggattaatcatccatcaccgctcacaaaagggaccccagggacccccacccgcaggactgctgcactag

SEQ ID NO: 87068 - DNA, 786 bp, Artificial Sequence
  derived and/or modified sequence
atgagctggaagaaggccctgcggatccccggcggcctgcgggtggcaacagtcacccttatgctggcaatgctctcaacccccgtggcggagggccgggacagcccagaggatttcgtctatcagtttaagggcatgtgttatttcacaaatggaactgagcgtgtgcgtctggtcactaggtacatttacaatagagaggaatacgccagatttgattcagatgttggggtttacagagcggtgactccgttgggtcctccggatgcagagtattggaactcccaaaaggaggtcctggaaaggaccagggcagaactcgatacagtgtgtagacataattaccagcttgaattgcgcacgactctccagagaagggtcgagcccaccgtgaccatctccccttcaaggactgaggcgctgaaccatcataacctgctcgtttgcagcgtgaccgatttttacccagctcagattaaggtccggtggttcagaaatgaccaggaggaaaccaccggagtggtctctacgcccttgatccggaatggcgactggacatttcagattctggttatgcttgagatgactcctcagaggggggacgtgtacacttgccatgtggagcatccctccttgcagaatcccatcattgtcgagtggagggctcagagcgagagcgcacagagtaaaatgctgtccggcatcggcggtttcgtcttagggcttatcttcctgggcctggggctgataatccaccaccgcagccaaaagggtttattacactag

SEQ ID NO: 87069 - DNA, 786 bp, Artificial Sequence
  derived and/or modified sequence
atgagctggaagaaggccctgcggatccccggcggcctgcgggccgccacagtaactctgatgctgagcatgttgtctacgccagtggctgagggacgggattctcctgaggatttcgtgtaccagtttaaaggaatgtgttactttaccaacggtactgagcgggtgcggctggtgtccagaagtatttataatagagaagagatcgtgcgcttcgactcagacgttggcgagtttagggccgtcaccctcctgggcctcccggctgcggaatactggaatagccagaaggatatactggaacgaaagagagctgccgtcgatcgggtctgtcggcacaattatcaactagaactacggacaaccctccagcggcgggtggagcccacagtcaccatctctcccagcaggaccgaagctcttaaccaccataatctgttggtttgctcagtgactgacttttatccagcacaaatcaaggtgcggtggtttagaaatggccaggaagagacagctggcgtcgtcagcacgcccctgattagaaacggggactggacatttcagatcctagtgatgttagaaatgacgcctcaacgaggcgatgtgtacacttgtcatgtggagcatccttcactgcagagccctattacggtggagtggagggcacagtccgagagcgcccaatccaaaatgttaagcggaatcggaggattcgtgctcggcctgatttttctaggtttgggactgatcattcaccatagatcacaaaaaggcctgctccactag

SEQ ID NO: 87070 - DNA, 405 bp, Artificial Sequence
  derived and/or modified sequence
atgagctggaagaaggccctgcggatccccggcggcctgcgggccgcaacggtaactctcatgctcagcatgctgagtacgccagtagctgagggacgtgacagccctgtggagcccaccgtgaccatttcgccatctcgcacggaggccctgaatcaccacaatctgctggtgtgttccgtgacggacttttaccccgcccaaattaaggttcgttggtttagaaacggccaggaagaaacggcaggcgtggtgtcgacccccctgatcaggaatggagattggacattccagatcctggttatgcttgagatgaccccccagaggggagatgtttacacttgtcacgtcgaacacccctcgcttcagagccccattacagtggaatggagacttctccactag

SEQ ID NO: 87071 - DNA, 405 bp, Artificial Sequence
  derived and/or modified sequence
atgagctggaagaaggccctgcggatccccggcggcctgcgggtggcaaccgttaccttaatgctcgccatgctgtctacacccgtcgctgagggccgggactctccagtcgagccgactgttacaatcagtccttcacgcacagaagctctgaaccaccacaatctactggtgtgctctgtgaccgacttctatcctgctcagataaaggtgagatggtttaggaacgaccaggaggagacgactggcgtcgtgagtaccccactcatacgcaacggcgactggacgttccagattcttgtaatgctggagatgaccccccaaaggggtgacgtgtacacctgtcatgttgagcatccgtcattacagaatccgatcattgtggagtggcgattgctgcattag

SEQ ID NO: 87072 - DNA, 435 bp, Artificial Sequence
  derived and/or modified sequence
atgagctggaagaaggccctgcggatccccggcggcctgcgggtggctaccgttacacctcttggacccccagatgccgaatattggaactcccagaaggaggtgttagaacggacaagagccgaactagatacggtctgccgtcataattaccagcttgagttgagaactactcttcagaggcgcgtggaacccacagtgacaatctcccctagcaggactgaggccctgaatcaccacaaccttttggtctgttccgtgacagatttctatcccgctcaaataaaagtcaggtggttccggaacgaccaggaagaaactacaggggtcgtgagtacacctcttatccgcaacggggattggacgttccagattctcgtgatgctcgagatgacacctcaaagaggtgacgtgtatacctgccacgttgaatag

SEQ ID NO: 87073 - DNA, 405 bp, Artificial Sequence
  derived and/or modified sequence
atgagctggaagaaggccctgcggatccccggcggcctgcgggccgctacagttacactgatgctggcaatgctgtccactccagtggcagagggcagagatagtcctgtcgagcctactgtgactatctctccatcaagaacagaggctttgaatcaccacaacttgttggtctgttctgtcacggacttttatccagcccagatcaaggttcgttggtttcgtaacgaccaggaagaaaccaccggtgtcgtgtccaccccattgatccggaatggggattggaccttccagattctggtcatgttagaaatgacgccccagcacggcgacgtttatacctgtcacgttgaacatccaagccttcagaatcccattacagttgagtggcgattactgcattag

SEQ ID NO: 87074 - DNA, 435 bp, Artificial Sequence
  derived and/or modified sequence
atgagctggaagaaggccctgcggatccccggcggcctgcgggccgctacagttaccctgctcggcttaccagcagcagagtattggaacagtcagaaagatatcttagaacgcaaaagggcggctgtggacagggtctgccggcacaactatcaactggaattgcgtactaccctgcagagaagggtggagccaaccgtcactatctctccctccaggaccgaggccttgaatcatcataacctcctggtgtgctctgtcaccgatttctacccagcccagataaaggttcgatggttcagaaacggccaggaggagacagctggagtagtgagcacccctctgatccggaacggagattggacgttccaaattctggtcatgctggagatgacgccccagagaggcgatgtttatacctgccacgtggagtag

SEQ ID NO: 87075 - DNA, 435 bp, Artificial Sequence
  derived and/or modified sequence
atgagctggaagaaggccctgcggatccccggcggcctgcgggccgcaactgtcacccctctcggtccccccgacgcagagtactggaacagccaaaaggaggtgctcgaacgaaccagggcagaattagataccgtgtgtagacacaactatcagctggagctccgtacaactctacagcggcgtgtagagccgaccgtgaccatctccccaagccggacggaagctttgaatcatcacaatcttctcgtgtgttccgtgacagacttctacccagcccaaatcaaggtgcgctggtttaggaacgatcaagaagagacgacaggcgtcgtgtccacgccactgatccgaaatggtgattggacgtttcaaattctggtcatgctggagatgacaccccagcacggggatgtgtacacgtgtcacgtggaatag

SEQ ID NO: 87076 - DNA, 411 bp, Artificial Sequence
  derived and/or modified sequence
atgagctggaagaaggccctgcggatccccggcggcctgcgggccgcaacggtcaccctcatgctgtcaatgctgtctacccccgtggcagaggggcgggattcccccgaagactttgtgtaccaattcaaaggaatgtgctactttacgaatggtacagagcgcgttcggctggtgtcgagatccatttacaaccgggaagaaatcgtgcgttttgattcagacgtcggtgagtttagagctgtgacactcctggggctgcctgcagccgagtattggaactcccagaaggacatactcgagcgaaagagagctgctgtggatcgggtctgtcggcacaattaccagctggagctcaggacaacgctgcaaagaaggggtatggtaacaggcccctccagatcctggtag

SEQ ID NO: 87077 - DNA, 717 bp, Artificial Sequence
  derived and/or modified sequence
atgctgagcacccccgtggccgagggccgggacagccccgaggacttcgtctaccagttcaaaggaatgtgttacttcacaaatgggacagagcgagtgagacttgtgagccggtccatatacaacagggaagagatagtgaggttcgatagcgatgttggtgaattcagggccgtgacccttctcggattgcccgctgccgagtactggaattctcagaaagatatactcgagcgtaaacgcgccgctgtagaccgcgtctgtcgccacaactaccagcttgagttgagaaccacgctccagagacgggtggagcccacagtcacaatctccccctcacgaacggaagccctgaatcaccataatctccttgtgtgttctgtgacagatttctacccagcgcagattaaagtgcgttggtttcgcaatggacaagaagagacagccggtgtggtatctactccactcatccgtaacggtgactggacatttcagatcctcgtgatgctggagatgactccccagagaggcgacgtttatacctgtcatgttgaacaccccagtttgcaatctcccataacagtggagtggcgggcccagagcgagagtgctcagtctaagatgttatccggtatcgggggttttgttttaggactgatctttctcggcctcggcctaatcattcatcacagaagccagaagggactcctccactag

SEQ ID NO: 87078 - DNA, 717 bp, Artificial Sequence
  derived and/or modified sequence
atgctgagcacccccgtggccgagggccgggacagccccgaggacttcgtataccagtttaaggggatgtgctacttcacaaacggaacagagcgggtgcgcctggtgtcacgatcgatttacaaccgcgaggaaatagtccgttttgattctgacgtgggtgaattccgggccgttaccttgctcggacttccagccgctgaatactggaacagccagaaagacatccttgaacggaagcgggcagccgtggatagagtatgtaggcacaactaccagctcgaattgcggaccacactgcaaaggagagtggaacccaccgtcacaatctcaccaagccggaccgaagccctaaatcaccataatctgctggtttgcagcgtgacagatttttatcctgcacagataaaagtgcggtggtttagaaatgatcaagaagaaaccgccggagtggtgtctactcctttgatcaggaacggcgactggactttccagattctggttatgctcgagatgactcctcaacggggggatgtgtatacttgccacgtcgagcaccctagcctgcagtcaccaataactgtagaatggcgtgctcagagcgagagtgcccagtctaagatgctcagcggcataggcggatttgtgctcggactgatttttcttggtctggggttaatcattcaccatagaagccaaaagggattgctccattag

SEQ ID NO: 87079 - DNA, 717 bp, Artificial Sequence
  derived and/or modified sequence
atgctgagcacccccgtggccgagggccgggacagccccgaggacttcgtgtaccagtttaaagggatgtgttattttaccaatggcaccgagagggtgagactggtgtctcgcagcatctacaaccgagaggaaatcgtgaggtttgacagtgatgtaggcgaatttagagccgtaaccctactgggtctgcccgcggccgaatattggaatagccagaaggacattctagaacgtaagcgagccgccgtggatcgtgtgtgtaggcacaattatcaattggagctccggaccacactgcaaaggagagtagagcctaccgtaacaatatctccgtctcgaacagaggcactaaatcatcacaatctattggtttgctccgtgacggacttctaccccgcacaaattaaagtccgctggtttcgaaacgaccaggaagagaccgccggcgtggtttccacacctctaatccgcaatggtgactggacgtttcagattttagtgatgctcgaaatgaccccgcagcggggcgatgtgtacacatgtcatgtggaacacccttctttacagagcccaatcacagtggaatggcgcgcccagtcagaatctgcgcagagtaagatgttgtctggtatcggcggctttgtattggggctgatattcctgggtctggggctgattatccatcaccgcagtcagaagggactgctgcactag

SEQ ID NO: 87080 - DNA, 786 bp, Artificial Sequence
  derived and/or modified sequence
atgtcttggaagaaggccttgcgcatcccgggaggtctgcgcgctgctactgtcaccctaatgctgagcatgttaagcactcctgtcgccgaaggacgggacagtccagaagacttcgtgtaccagttcaaaggaatgtgctacttcactaatggcacagagcgggtgagactagtcagtaggtctatttacaatagggaggagatcgtccgcttcgactccgatgtaggcgagttccgcgctgtaacccttctcggcctgccggctgcagagtactggaacagccagaaggacattctggagcgtaagcgcgctgctgtagatagagtttgccgtcataactaccagctggagctgaggacaaccctccagcgtcgagtggagcccacagttaccatctccccctcacgcaccgaggctcttaaccatcacaatctgttggtctgctcagttaccgatttttacccagcccaaataaaggtgagatggtttcggaatgaccaagaagaaacagccggagtcgtctccaccccactgattcgcaatggggattggacatttcaaatactggtcatgctggagatgactccgcagcgcggagacgtgtacacctgtcacgttgaacaccctagcctccaatcgcccattactgtagagtggcgtgctcagagtgagtccgcacagagcaagatgctctccggtattggcggatttgtgcttggattgatttttttgggtctgggactgattattcaccatcgctcacagaagggacttctccattag

SEQ ID NO: 87081 - DNA, 786 bp, Artificial Sequence
  derived and/or modified sequence
atgtcttggaaaaaagctttacggattcccggaggactccgcgcagctacagttaccttgatgctgtcaatgctgagtacaccagtggcggagggtagagactcacccgaggatttcgtataccagttcaagggaatgtgttatttcacaaacgggactgaacgagtgagactcgtgtctcggagcatttataatcgtgaggaaattgtgcgttttgacagcgatgtgggggagttcagagcggtcacactgctgggcctgcccgcagctgagtactggaactcacagaaggatatattggagagaaagagagccgctgttgatagagtgtgtcgacacaattaccaactggaattgaggactactcttcagagacgtgtggagccgactgtgacaatctcaccaagcagaacggaggcgctgaatcatcacaatctccttgtctgtagcgttaccgatttctaccctgcgcaaattaaggtacgctggtttagaaacgaccaggaagagaccgcgggagtggtctcaacccctttgattcgaaacggcgactggaccttccagattctggtgatgcttgaaatgactccacaacggggagacgtttacacatgccacgtggagcatccatccctgcaatcgccaataacagtggaatggcgtgcacagagtgagtccgctcagtcaaagatgctgtcaggaattggcggatttgtgctaggactcatcttcttaggcttgggtctgatcattcaccaccgatcgcagaagggactgctgcactag

SEQ ID NO: 87082 - DNA, 786 bp, Artificial Sequence
  derived and/or modified sequence
atgtcctggaaaaaggccttgcgaatacccggaggactgcgcgctgccaccgtgacgctcatgctggcgatgctgtcaacaccagtagccgagggacgcgactctcccgaggactttgtgtaccagttcaaggcgatgtgctactttaccaatggcacagagcgggtgcgctacgtgactaggtacatctacaacagggaagaatacgcccgattcgatagtgacgtggaagtttatcgggcagtcactccactgggtcctcccgacgcggaatattggaactcgcagaaagaagtactagaacgaacaagagccgagctagatacggtgtgcagacataactaccagctagaactgcggacgaccctccaacgtcgtgtagaacctaccgtcaccatctcaccaagccggaccgaagccctgaaccatcacaacctgctggtctgctctgtgacagatttctaccccgctcagataaaagtcagatggtttaggaacgatcaggaagagacaaccggtgtggtcagtacccccttaatccggaacggtgactggacattccagatcctggtgatgcttgaaatgacccctcagcacggtgacgtttacacctgtcatgttgagcacccctcactccaaaatccaattacagtggaatggagggcccagtcggaaagcgcacagtccaagatgctgtctgggattggtggctttgtgctggggttaatcttcttgggcttgggcctaattatccaccatcgtagccagaaaggcctcctacactag

SEQ ID NO: 87083 - DNA, 675 bp, Artificial Sequence
  derived and/or modified sequence
atgagctggaaaaaggccctcaggattcccggtgggctgcgggcagccacggtcacactgatgctctcaatgctgtcaacccctgttgctgagggtagagactctcccgaggatttcgtatatcagttcaaaggtatgtgctatttcactaatggtaccgagcgtgttcgtttggtgtctcgatctatttataatcgcgaggagatcgtcaggttcgattccgacgtgggcgagttccgagctgtcactctgttgggcctgcccgcagcagagtattggaatagtcaaaaggacatcctggagcgaaagagggccgcagtcgacagagtctgcagacacaactaccaattggaactgaggacgactctgcagagaagagtagagcccacagtgaccatcagtccttctagaacagaggcactaaatcatcataatttactggtgtgcagcgttacagatttctatccagcccagatcaaggtgagatggttccggaatgatcaagaggagacagccggagtggtgtctacgccacttatccgaaatggcgattggacttttcaaatactcgtgatgctggagatgacgccccaacgaggcgacgtgtacacctgccatgtggagcacccctcgttgcaaagccctatcaccgtggagtggcgtcttctccactag

SEQ ID NO: 87084 - DNA, 786 bp, Artificial Sequence
  derived and/or modified sequence
atgtcttggaagaaggcactgcgtattcctgggggtctgcgggctgcaacagtcactcttatgttggctatgctttctacgcccgtggccgagggacgagattctccggaggactttgtttatcagtttaaggcgatgtgttacttcacaaatggcactgagcgggtgaggtacgtcactagatatatttacaatagagaggagtatgcgagatttgattctgacgtggaggtctacagggctgtcaccccactgggcccacctgatgccgaatactggaatagccagaaggaggtactggaacgcacccgggcagagctggacacagtgtgtagacacaattaccagctagaacttagaaccacgctgcagcgtcgcgtcgagcccactgtgaccatcagccctagccgaactgaggccctcaaccatcacaacctgctggtgtgctcggttacagatttttacccggctcagataaaagtgcgttggttccggaatgaccaagaggaaacaaccggagtagtgtccacgccattgatcagaaacggtgattggaccttccaaatactggtcatgctggagatgaccccgcagcacggagacgtgtatacatgtcatgtagaacatcccagccttcagaatccaataaccgttgaatggagggcccagtcagaaagcgcccagtccaagatgctaagcggaatcgggggatttgtgctgggactcatctttctggggctgggcctaatcattcatcacagatcacaaaaagggctgctgcactag

SEQ ID NO: 87085 - DNA, 786 bp, Artificial Sequence
  derived and/or modified sequence
atgtcttggaaaaaggctctaagaatccccggtggtttgcgggtcgccactgttacactcatgctcgctatgctgtctacacctgtggcagaaggcagagatagtcccgaggactttgtttaccagttcaaggggatgtgctacttcacaaatggcaccgaacgggtgcggggtgttacccggtacatctacaaccgcgaagaatatgcgagatttgacagcgacgtgggcgtgtaccgggctgtaacccctctgggtcctcccgctgccgagtattggaactcacaaaaagaggtgctggagagaaccagagcagagttagacacagtgtgtagacacaattatcaattggagctcagaactacactgcaacggcgtgttgaacctacggtgaccatttctcctagtcgcaccgaggctctcaatcaccacaatttgctggtgtgcagcgtcactgatttctatcccgcacagattaaagtccgatggtttcgtaacgatcaagaggaaactactggggtggtgagtaccccgttaattagaaatggcgactggactttccagatcctggtaatgctggagatgaccccacagagaggagacgtttatacttgtcatgtcgaacatccgtctctccagaatcctatcatcgtggagtggagggcacaatccgagagcgcacagagcaagatgctgagtggaattggtggctttgtgcttggcttgatctttctgggactcggcctcattattcaccatcggagtcagaaaggcctgctccactag

SEQ ID NO: 87086 - DNA, 675 bp, Artificial Sequence
  derived and/or modified sequence
atgtcttggaagaaagcgctccgtatacccggtgggctcagggcagctacggtcacgttaatgcttagtatgctatctacgccagtcgctgaaggcagagactctcctgaggatttcgtttaccagttcaaaggcatgtgttatttcactaacggaactgagcgcgtcagactcgtgtcaagatccatttataatcgagaggagatcgtgaggtttgactcagatgtgggggagtttcgtgccgttacactgctggggcttcctgctgcagagtactggaactctcagaaggatatcctggagagaaaacgcgctgccgtggaccgcgtgtgccggcataattaccaactggaattaaggactaccctgcagcgtcgggtcgaacctactgtgacaatcagccccagtagaaccgaagccctgaatcaccacaacctcctcgtctgcagcgtgactgacttctacccagcccaaattaaggtgagatggtttaggaacgggcaggaagagaccgccggagtagtcagcacgcctcttattcggaacggcgattggacttttcaaattcttgtgatgctggagatgacccctcaacgaggcgacgtttacacttgtcatgtggagcatccgagcctgcagtctccgatcacggtggagtggagactgcttcactag

SEQ ID NO: 87087 - DNA, 786 bp, Artificial Sequence
  derived and/or modified sequence
atgagctggaagaaggcccttaggattccgggaggtttgagggtggccaccgtgactcttatgctggccatgctcagtactcctgtggctgagggcagggactcccctgaggattttgtgtatcaatttaagggaatgtgttacttcactaacggaacagagcgggttaggttagtaacccggtacatttacaacagggaagagtatgcccgttttgacagcgacgtgggagtctaccgtgctgttaccccgctcgggccacctgacgctgaatactggaattctcagaaagaagttctggagcggaccagagcagaactcgataccgtctgtcgccacaactatcagcttgaattgaggacgactctgcagcgcagagttgaacccactgtgaccatctcccctagtcggacagaggcactcaatcaccacaaccttcttgtgtgtagtgttactgacttctatcctgcgcaaattaaggtcagatggtttaggaacgaccaggaggagaccaccggggtggtttcgactcccctgattagaaacggggattggacattccaaattctcgtcatgctggagatgactccacagcggggtgatgtctacacttgtcacgtggagcatccttccctgcaaaatcctataattgtggaatggcgtgcccagagcgaaagcgcccagagcaagatgctgtcagggatcgggggttttgttctggggcttatctttctggggctcggactgattatccatcaccgctcccagaaggggctgctgcattag

SEQ ID NO: 87088 - DNA, 786 bp, Artificial Sequence
  derived and/or modified sequence
atgtcgtggaaaaaggctctgcgcattcccggagggttgcgagcagccaccgtgactttgatgctcagtatgttgagcacaccggtggctgaggggagggactccccagaagacttcgtgtatcagttcaagggaatgtgttacttcaccaatggcacggagcgtgtgcgcctcgtaagccgcagcatttataatcgcgaagagattgtgcggttcgatagcgacgtgggggagtttcgcgcagtaaccctcctgggactccccgctgccgaatactggaactcgcagaaggacattctcgagcgcaagagagcagcagttgacagggtgtgtaggcacaattaccaactggagctgcgcaccacactgcagcggagggtagagcccaccgtaactatcagtccttccaggacagaggccctgaaccatcacaatctcctcgtttgctccgttacggacttctatccagctcagattaaggtcagatggtttagaaacgggcaggaagagaccgccggagtggtgtctaccccgcttatccgaaacggcgactggacattccagatcctcgtgatgttggaaatgactccccaacggggtgacgtgtatacatgccacgtcgagcatccatccctgcaaagcccaattactgtggaatggagagcccagtcagagagcgcgcagtccaaaatgttgagcggcattggcggtttcgttctcggcctcatttttctaggcctggggcttatcatccaccatcgtagccagaagggcctcctgcactag

SEQ ID NO: 87089 - DNA, 810 bp, Artificial Sequence
  derived and/or modified sequence
atgtcctggaaaaaggcactgagaattccgggtggactccgagccgctacagtaactctgatgctgagcatgctcagcacccccgttgccgaaggtagggacagtcccgaggatttcgtgtatcaattcaaaggtatgtgttactttaccaatggaacagaaagggtgaggcttgtgtctaggtccatttacaatagggaggaaatagtgcgctttgattctgacgtaggggaattccgagctgtgacactgctggggttacccgctgctgagtattggaattcgcagaaggatatattggagcgcaagcgcgcagcggttgaccgcgtgtgccgccacaactaccagctggagctccgaacaacgctacagagacgagtagagcctactgtgaccatctctccgagtcgcaccgaagctctgaaccaccacaatctgttagtgtgcagcgtgactgacttctaccccgcacagatcaaggtgaggtggtttagaaatggacaggaagaaaccgccggagttgttagcacacctctgattcggaacggcgactggactttccagattcttgtgatgctcgagatgactccgcaaagaggggatgtttacacctgccatgtcgagcacccttcgctgcagagtcctataaccgtggaatggcgcgctcagagtgaatccgcccagagcaaaatgttgagcggcattgggggattcgttctgggcctcatctttttgggtttgggcttaataatacatcaccggtctcagaaaggtccacagggtcctccaccggcaggccttctgcattag

SEQ ID NO: 87090 - DNA, 786 bp, Artificial Sequence
  derived and/or modified sequence
atgagttggaagaaggcacttagaattccgggtgggctcagagttgccacagttacattgatgctggctatgctgagcaccccggtggcggaagggagagactccccagaggacttcgtctaccaattcaagggaatgtgttacttcaccaacggaacagaaagggtgcgtctggtgacacggtatatctacaacagggaagaatacgccagattcgatagtgacgtcggagtatacagggcagtcactccactcggccctccggacgctgagtactggaatagccagaaggaagtgcttgagagaacaagggctgaactggataccgtatgtagacacaactaccagctcgaactgcgtaccaccctgcagaggcgagtggaaccaacagttactatatcgccgtctcgaaccgaggccttaaaccatcacaacctcctcgtgtgttcagttaccgatttctatcccgctcaaattaaggtgagatggtttcgtaatgatcaggaggagacaaccggagtcgtgagtacgccactcattcggaatggcgattggaccttccaaatcttagtgatgctggaaatgactccacagcgaggcgacgtatatacctgtcacgtagagcatccgtcactgcagaatcctatcattgtagaatggcgcgcacagtccgagagtgcacagagcaaaatgctgtctggcatcggaggcttcgttttgggtttaatcttcctgggccttgggctgataatccatcaccgatcccaaaaaggtcttttgcattag

SEQ ID NO: 87091 - DNA, 786 bp, Artificial Sequence
  derived and/or modified sequence
atgagctggaagaaagcgctgcgcattccaggtggattgagggcagccactgtcacccttatgttgtccatgttaagtacccccgtcgccgaaggcagggactctccggaggactttgtgtatcagtttaaggggatgtgctattttactaacgggactgagcgcgtccgcttggtgagccggtccatatataatagggaagaaatagtacggtttgatagtgatgtcggagaatttagggcagtaacccttctagggcttcccgctgccgagtactggaactcccagaaggacatcttggaacgtaagagggcggcagtggatagggtgtgtagacacaactatcaactcgaattgagaacaaccctgcagagacgggtagagcccacggtgacgatctcacccagtaggactgaggccctaaaccatcacaacctgcttgtatgctctgtgacagatttttatccagcccagataaaagttaggtggtttcgcaatggccaggaagagaccgccggagttgtctcgacacctctcattagaaacggggactggactttccaaatcctggttatgttagagatgactccccagagaggggatgtgtacacgtgtcacgtagagcatccctctctgcagtctccaatcaccgtggagtggcgggcacagagtgaaagcgcgcagagcaagatgctctctggtatcggtggattcgtgctcgggctgatatttctgggcctggggctgatcatacatcatcggtcgcaaaaggggctcctccactag

SEQ ID NO: 87092 - DNA, 405 bp, Artificial Sequence
  derived and/or modified sequence
atgagttggaagaaggcgctgaggatcccgggtggtctaagagctgccacggtgacgctgatgctgagtatgttatctactcctgttgccgaaggcagagatagtccggtggagcctaccgttacgatctcacctagtagaacagaggctctgaatcatcataatctgctggtctgttccgtgaccgatttctatccagcccaaatcaaagtccgctggtttaggaatgggcaagaggagaccgccggagtggtgtccaccccgttaattcgcaatggagattggacttttcagattctagtgatgctcgaaatgactcctcagaggggggacgtctacacctgtcacgtggaacatccttcactgcagtctccgattactgtggagtggagattgctgcactag

SEQ ID NO: 87093 - DNA, 405 bp, Artificial Sequence
  derived and/or modified sequence
atgagctggaaaaaggctctcagaatccccggaggccttcgcgtcgcgactgtgactttaatgttagcaatgttgagtacccccgtggccgaggggagagatagccccgttgagccaacagtcacaatctcgccctctaggactgaggctctgaatcaccataatctcctggtgtgtagtgtgaccgacttttacccggctcaaatcaaagtgaggtggtttcgtaacgaccaagaggagacaacaggcgttgtgtcaacacctctgattaggaatggtgactggacgtttcaaatcctcgtcatgctggagatgaccccccagagaggcgatgtgtatacctgtcatgttgagcatccttcccttcagaaccctattatagtagagtggagactcttgcactag

SEQ ID NO: 87094 - DNA, 435 bp, Artificial Sequence
  derived and/or modified sequence
atgtcttggaaaaaagcattgagaattcccggtggcctgcgcgtagcaaccgttacccctcttgggcctcctgatgctgagtactggaacagtcaaaaggaggtattggaaagaaccagggccgagctggacaccgtgtgcaggcacaactaccagttggaactgagaaccaccctccagagaagagtggagccaacggttaccatcagcccctccaggaccgaagccttgaaccatcataatttactcgtttgttctgtgactgatttttatcctgcccaaattaaagttcgctggtttagaaatgaccaggaggaaactactggggtagtgtccacccctctaattaggaacggggactggactttccaaattttagtgatgctcgagatgaccccacagagaggcgatgtgtacacttgtcacgtggaatag

SEQ ID NO: 87095 - DNA, 405 bp, Artificial Sequence
  derived and/or modified sequence
atgtcttggaagaaggccctgcgcattcctggaggcttgcgcgctgccaccgtgactctgatgctcgccatgctgtcaacacctgtggccgagggaagggatagtcctgtggagccaacagttactattagcccatccaggaccgaagcgcttaatcatcacaacctgctcgtgtgttccgtcactgacttttatccagcccagatcaaggtgcgatggtttcggaacgaccaggaagaaacgactggagtcgtgtcaaccccgctcatcagaaacggggactggacattccaaattctcgtcatgttagagatgaccccccagcacggagacgtttacacctgccatgtagaacatccctctctccagaaccccatcacggtggagtggcggcttctccattag

SEQ ID NO: 87096 - DNA, 435 bp, Artificial Sequence
  derived and/or modified sequence
atgtcctggaagaaggcactgcgaataccaggcggattgcgggctgcgactgtaactctgctgggactcccagctgccgaatattggaattcacagaaggacatcctggagcggaaacgtgcagctgtggatagggtttgtcggcacaattatcagctcgagctaagaactacactgcagaggcgcgtggaaccaacggtgactatcagcccatctaggaccgaagctctaaatcaccataatctcctcgtgtgctccgtaaccgatttctatccggcacaaatcaaggtcagatggtttcgaaatgggcaggaagaaacagccggagtggtatccactccgctcatcaggaacggggactggacctttcagatcctcgtgatgcttgagatgaccccccagagaggggacgtgtacacttgtcatgtcgagtag

SEQ ID NO: 87097 - DNA, 435 bp, Artificial Sequence
  derived and/or modified sequence
atgtcttggaagaaggcactccgaattcccggaggcttgagggccgctacggtcacacctctgggcccacccgacgcggagtactggaacagccagaaggaggttttggaacggactagggctgaattagacaccgtctgtagacataactatcagttagagttgcgaactaccttacaacgtcgggtggagcctactgttacgatttcgccgagtcggactgaggccttgaaccaccacaacctgctcgtgtgttcagtcacagacttctaccccgcacaaattaaagtacgttggttcaggaacgaccaggaggagactacaggagtggtcagcacccctctcatccggaacggcgattggacattccagattctggtgatgctggaaatgacgccccagcatggcgacgtctatacctgccacgtagagtag

SEQ ID NO: 87098 - DNA, 411 bp, Artificial Sequence
  derived and/or modified sequence
atgagctggaagaaggcccttaggatccccggtggtctgcgggctgccaccgttacgctcatgctgtctatgttgtctacacctgtggcagaggggagggacagcccagaggatttcgtctatcagtttaagggcatgtgttattttaccaacggcaccgagagagtcagattggtctcccggtccatctacaaccgtgaggagattgtgaggttcgactccgacgttggcgagttccgcgcagtcaccctgcttgggctccccgcagccgagtactggaacagccagaaggacatcctggagcggaaacgggctgctgtggacagagtttgccgccacaattaccagctcgagcttagaaccactctccagagaagaggcatggtcacaggcccatctcgcagttggtag

SEQ ID NO: 87099 - DNA, 717 bp, Artificial Sequence
  derived and/or modified sequence
atgctgtcgacccctgtcgccgagggtcgcgacagccccgaagacttcgtttaccagtttaaaggcatgtgctatttcaccaatggcacagaacgcgtgcggttggtcagcagatctatatataatagagaagagattgtgcgcttcgactctgacgtgggcgaatttagggcagtgactcttttgggactccctgccgcagagtattggaactcgcaaaaagacattcttgaaaggaaaagggctgctgtagacagagtttgtcggcataactatcaacttgagttgagaaccacactgcaacggcgagttgagccaacagttactatttcaccctctaggacagaagcattaaaccaccataatctgctggtatgctcagtcaccgacttctatcccgctcaaatcaaagtgcgttggttccgtaacggacaggaagagactgcaggcgtggtgagcacgccactcatcaggaatggggactggacattccagatcctggttatgctcgaaatgactccccagagaggtgatgtgtacacttgtcatgtggaacatccatcgctgcagagtcccattaccgttgagtggcgagctcagtccgagtccgcccagagcaagatgctaagcggtataggcggattcgtcctgggattgatcttcctgggcctgggcctgataatccaccatagatctcagaagggattactgcactag

SEQ ID NO: 87100 - DNA, 717 bp, Artificial Sequence
  derived and/or modified sequence
atgttgtcaacccctgtcgccgagggcagggacagccctgaggacttcgtgtaccaatttaaaggaatgtgttatttcacgaatggaaccgagcgcgtgagattggtgtcacgtagcatatataaccgcgaggaaatagtccgtttcgacagtgatgtgggtgaatttcgggcagtgactctactcgggctgccggctgcagagtactggaattcgcagaaagacatactggagcgtaagagggccgcagtcgatagggtttgtcgccataattatcaactggaattgcgaactacattacaaaggcgagtggaacctaccgtgaccatttccccatcaaggaccgaggccctgaatcatcacaatttattagtatgctctgtgactgacttttaccccgcacagatcaaagtgcggtggtttcgcaacgaccaggaggaaactgcaggcgtagtttcaacccccctcatccgaaatggtgactggactttccaaatcctggttatgctggaaatgactccccagcgtggagacgtctacacctgtcatgtcgagcatccctctctccagagcccaatcaccgttgagtggcgagcacagtccgaatcggcccagtcaaaaatgttgtcagggattgggggattcgtgctggggttgattttcctcggcctaggactcatcattcatcaccggtctcagaagggcttgctgcattag

SEQ ID NO: 87101 - DNA, 717 bp, Artificial Sequence
  derived and/or modified sequence
atgctgtcaacacctgtagccgaaggccgagactcccccgaagatttcgtctaccagtttaaaggcatgtgctattttaccaacggaacggagagggtaaggcttgtgagcagaagcatttataaccgtgaagaaatcgttcggtttgattctgatgtcggggaattccgggctgtgaccctgctgggactacccgctgcagaatactggaactcccagaaagatatcctggaacgcaaacgcgctgccgtggacagagtctgccgacacaactaccaactagaactgcgcactaccctccagcggagggttgaacccaccgtcactatttctccttccagaacagaggcccttaatcatcacaacctgctagtgtgtagtgtcactgacttctatcctgcccagattaaagttaggtggttccgtaatgatcaggaggaaaccgccggagtcgtctctactccactgatccgcaatggggactggacattccagatcctcgtgatgctagagatgacgccccagcggggagacgtttacacttgtcatgtcgagcatcctagtctgcagagtcccattacggtggagtggagagcgcagtcagaatctgcacaatccaagatgctctcagggatcggtggcttcgtactggggctgatattcttgggcttggggcttatcatccaccaccgtagtcaaaaaggcctgcttcactag

SEQ ID NO: 87102 - DNA, 786 bp, Artificial Sequence
  derived and/or modified sequence
atgagctggaagaaggccctgagaatccccggcggcctgagagccgccaccgtgaccctgatgctgagcatgctgagcacccccgtggccgagggcagagacagccccgaggacttcgtgtaccagttcaagggcatgtgctacttcaccaacggcaccgagagagtgagactggtgagcagaagcatctacaacagagaggagatcgtgagattcgacagcgacgtgggcgagttcagagccgtgaccctgctgggcctgcccgccgccgagtactggaacagccagaaggacatcctggagagaaagagagccgccgtggacagagtgtgcagacacaactaccagctggagctgagaaccaccctgcagagaagagtggagcccaccgtgaccatcagccccagcagaaccgaggccctgaaccaccacaacctgctggtgtgcagcgtgaccgacttctaccccgcccagatcaaggtgagatggttcagaaacgaccaggaggagaccgccggcgtggtgagcacccccctgatcagaaacggcgactggaccttccagatcctggtgatgctggagatgaccccccagagaggcgacgtgtacacctgccacgtggagcaccccagcctgcagagccccatcaccgtggagtggagagcccagagcgagagcgcccagagcaagatgctgagcggcatcggcggcttcgtgctgggcctgatcttcctgggcctgggcctgatcatccaccacagaagccagaagggcctgctgcactag

SEQ ID NO: 87103 - DNA, 786 bp, Artificial Sequence
  derived and/or modified sequence
atgagctggaagaaggccctgagaatccccggcggcctgagagccgccaccgtgaccctgatgctggccatgctgagcacccccgtggccgagggcagagacagccccgaggacttcgtgtaccagttcaaggccatgtgctacttcaccaacggcaccgagagagtgagatacgtgaccagatacatctacaacagagaggagtacgccagattcgacagcgacgtggaggtgtacagagccgtgacccccctgggcccccccgacgccgagtactggaacagccagaaggaggtgctggagagaaccagagccgagctggacaccgtgtgcagacacaactaccagctggagctgagaaccaccctgcagagaagagtggagcccaccgtgaccatcagccccagcagaaccgaggccctgaaccaccacaacctgctggtgtgcagcgtgaccgacttctaccccgcccagatcaaggtgagatggttcagaaacgaccaggaggagaccaccggcgtggtgagcacccccctgatcagaaacggcgactggaccttccagatcctggtgatgctggagatgaccccccagcacggcgacgtgtacacctgccacgtggagcaccccagcctgcagaaccccatcaccgtggagtggagagcccagagcgagagcgcccagagcaagatgctgagcggcatcggcggcttcgtgctgggcctgatcttcctgggcctgggcctgatcatccaccacagaagccagaagggcctgctgcactag

SEQ ID NO: 87104 - DNA, 675 bp, Artificial Sequence
  derived and/or modified sequence
atgagctggaagaaggccctgagaatccccggcggcctgagagccgccaccgtgaccctgatgctgagcatgctgagcacccccgtggccgagggcagagacagccccgaggacttcgtgtaccagttcaagggcatgtgctacttcaccaacggcaccgagagagtgagactggtgagcagaagcatctacaacagagaggagatcgtgagattcgacagcgacgtgggcgagttcagagccgtgaccctgctgggcctgcccgccgccgagtactggaacagccagaaggacatcctggagagaaagagagccgccgtggacagagtgtgcagacacaactaccagctggagctgagaaccaccctgcagagaagagtggagcccaccgtgaccatcagccccagcagaaccgaggccctgaaccaccacaacctgctggtgtgcagcgtgaccgacttctaccccgcccagatcaaggtgagatggttcagaaacgaccaggaggagaccgccggcgtggtgagcacccccctgatcagaaacggcgactggaccttccagatcctggtgatgctggagatgaccccccagagaggcgacgtgtacacctgccacgtggagcaccccagcctgcagagccccatcaccgtggagtggagactgctgcactag

SEQ ID NO: 87105 - DNA, 786 bp, Artificial Sequence
  derived and/or modified sequence
atgagctggaagaaggccctgagaatccccggcggcctgagagtggccaccgtgaccctgatgctggccatgctgagcacccccgtggccgagggcagagacagccccgaggacttcgtgtaccagttcaagggcatgtgctacttcaccaacggcaccgagagagtgagaggcgtgaccagatacatctacaacagagaggagtacgccagattcgacagcgacgtgggcgtgtacagagccgtgacccccctgggcccccccgccgccgagtactggaacagccagaaggaggtgctggagagaaccagagccgagctggacaccgtgtgcagacacaactaccagctggagctgagaaccaccctgcagagaagagtggagcccaccgtgaccatcagccccagcagaaccgaggccctgaaccaccacaacctgctggtgtgcagcgtgaccgacttctaccccgcccagatcaaggtgagatggttcagaaacgaccaggaggagaccaccggcgtggtgagcacccccctgatcagaaacggcgactggaccttccagatcctggtgatgctggagatgaccccccagagaggcgacgtgtacacctgccacgtggagcaccccagcctgcagaaccccatcatcgtggagtggagagcccagagcgagagcgcccagagcaagatgctgagcggcatcggcggcttcgtgctgggcctgatcttcctgggcctgggcctgatcatccaccacagaagccagaagggcctgctgcactag

SEQ ID NO: 87106 - DNA, 675 bp, Artificial Sequence
  derived and/or modified sequence
atgagctggaagaaggccctgagaatccccggcggcctgagagccgccaccgtgaccctgatgctgagcatgctgagcacccccgtggccgagggcagagacagccccgaggacttcgtgtaccagttcaagggcatgtgctacttcaccaacggcaccgagagagtgagactggtgagcagaagcatctacaacagagaggagatcgtgagattcgacagcgacgtgggcgagttcagagccgtgaccctgctgggcctgcccgccgccgagtactggaacagccagaaggacatcctggagagaaagagagccgccgtggacagagtgtgcagacacaactaccagctggagctgagaaccaccctgcagagaagagtggagcccaccgtgaccatcagccccagcagaaccgaggccctgaaccaccacaacctgctggtgtgcagcgtgaccgacttctaccccgcccagatcaaggtgagatggttcagaaacggccaggaggagaccgccggcgtggtgagcacccccctgatcagaaacggcgactggaccttccagatcctggtgatgctggagatgaccccccagagaggcgacgtgtacacctgccacgtggagcaccccagcctgcagagccccatcaccgtggagtggagactgctgcactag

SEQ ID NO: 87107 - DNA, 786 bp, Artificial Sequence
  derived and/or modified sequence
atgagctggaagaaggccctgagaatccccggcggcctgagagtggccaccgtgaccctgatgctggccatgctgagcacccccgtggccgagggcagagacagccccgaggacttcgtgtaccagttcaagggcatgtgctacttcaccaacggcaccgagagagtgagactggtgaccagatacatctacaacagagaggagtacgccagattcgacagcgacgtgggcgtgtacagagccgtgacccccctgggcccccccgacgccgagtactggaacagccagaaggaggtgctggagagaaccagagccgagctggacaccgtgtgcagacacaactaccagctggagctgagaaccaccctgcagagaagagtggagcccaccgtgaccatcagccccagcagaaccgaggccctgaaccaccacaacctgctggtgtgcagcgtgaccgacttctaccccgcccagatcaaggtgagatggttcagaaacgaccaggaggagaccaccggcgtggtgagcacccccctgatcagaaacggcgactggaccttccagatcctggtgatgctggagatgaccccccagagaggcgacgtgtacacctgccacgtggagcaccccagcctgcagaaccccatcatcgtggagtggagagcccagagcgagagcgcccagagcaagatgctgagcggcatcggcggcttcgtgctgggcctgatcttcctgggcctgggcctgatcatccaccacagaagccagaagggcctgctgcactag

SEQ ID NO: 87108 - DNA, 786 bp, Artificial Sequence
  derived and/or modified sequence
atgagctggaagaaggccctgagaatccccggcggcctgagagccgccaccgtgaccctgatgctgagcatgctgagcacccccgtggccgagggcagagacagccccgaggacttcgtgtaccagttcaagggcatgtgctacttcaccaacggcaccgagagagtgagactggtgagcagaagcatctacaacagagaggagatcgtgagattcgacagcgacgtgggcgagttcagagccgtgaccctgctgggcctgcccgccgccgagtactggaacagccagaaggacatcctggagagaaagagagccgccgtggacagagtgtgcagacacaactaccagctggagctgagaaccaccctgcagagaagagtggagcccaccgtgaccatcagccccagcagaaccgaggccctgaaccaccacaacctgctggtgtgcagcgtgaccgacttctaccccgcccagatcaaggtgagatggttcagaaacggccaggaggagaccgccggcgtggtgagcacccccctgatcagaaacggcgactggaccttccagatcctggtgatgctggagatgaccccccagagaggcgacgtgtacacctgccacgtggagcaccccagcctgcagagccccatcaccgtggagtggagagcccagagcgagagcgcccagagcaagatgctgagcggcatcggcggcttcgtgctgggcctgatcttcctgggcctgggcctgatcatccaccacagaagccagaagggcctgctgcactag

SEQ ID NO: 87109 - DNA, 810 bp, Artificial Sequence
  derived and/or modified sequence
atgagctggaagaaggccctgagaatccccggcggcctgagagccgccaccgtgaccctgatgctgagcatgctgagcacccccgtggccgagggcagagacagccccgaggacttcgtgtaccagttcaagggcatgtgctacttcaccaacggcaccgagagagtgagactggtgagcagaagcatctacaacagagaggagatcgtgagattcgacagcgacgtgggcgagttcagagccgtgaccctgctgggcctgcccgccgccgagtactggaacagccagaaggacatcctggagagaaagagagccgccgtggacagagtgtgcagacacaactaccagctggagctgagaaccaccctgcagagaagagtggagcccaccgtgaccatcagccccagcagaaccgaggccctgaaccaccacaacctgctggtgtgcagcgtgaccgacttctaccccgcccagatcaaggtgagatggttcagaaacggccaggaggagaccgccggcgtggtgagcacccccctgatcagaaacggcgactggaccttccagatcctggtgatgctggagatgaccccccagagaggcgacgtgtacacctgccacgtggagcaccccagcctgcagagccccatcaccgtggagtggagagcccagagcgagagcgcccagagcaagatgctgagcggcatcggcggcttcgtgctgggcctgatcttcctgggcctgggcctgatcatccaccacagaagccagaagggcccccagggccccccccccgccggcctgctgcactag

SEQ ID NO: 87110 - DNA, 405 bp, Artificial Sequence
  derived and/or modified sequence
atgagctggaagaaggccctgagaatccccggcggcctgagagccgccaccgtgaccctgatgctgagcatgctgagcacccccgtggccgagggcagagacagccccgtggagcccaccgtgaccatcagccccagcagaaccgaggccctgaaccaccacaacctgctggtgtgcagcgtgaccgacttctaccccgcccagatcaaggtgagatggttcagaaacggccaggaggagaccgccggcgtggtgagcacccccctgatcagaaacggcgactggaccttccagatcctggtgatgctggagatgaccccccagagaggcgacgtgtacacctgccacgtggagcaccccagcctgcagagccccatcaccgtggagtggagactgctgcactag

SEQ ID NO: 87111 - DNA, 405 bp, Artificial Sequence
  derived and/or modified sequence
atgagctggaagaaggccctgagaatccccggcggcctgagagtggccaccgtgaccctgatgctggccatgctgagcacccccgtggccgagggcagagacagccccgtggagcccaccgtgaccatcagccccagcagaaccgaggccctgaaccaccacaacctgctggtgtgcagcgtgaccgacttctaccccgcccagatcaaggtgagatggttcagaaacgaccaggaggagaccaccggcgtggtgagcacccccctgatcagaaacggcgactggaccttccagatcctggtgatgctggagatgaccccccagagaggcgacgtgtacacctgccacgtggagcaccccagcctgcagaaccccatcatcgtggagtggagactgctgcactag

SEQ ID NO: 87112 - DNA, 435 bp, Artificial Sequence
  derived and/or modified sequence
atgagctggaagaaggccctgagaatccccggcggcctgagagtggccaccgtgacccccctgggcccccccgacgccgagtactggaacagccagaaggaggtgctggagagaaccagagccgagctggacaccgtgtgcagacacaactaccagctggagctgagaaccaccctgcagagaagagtggagcccaccgtgaccatcagccccagcagaaccgaggccctgaaccaccacaacctgctggtgtgcagcgtgaccgacttctaccccgcccagatcaaggtgagatggttcagaaacgaccaggaggagaccaccggcgtggtgagcacccccctgatcagaaacggcgactggaccttccagatcctggtgatgctggagatgaccccccagagaggcgacgtgtacacctgccacgtggagtag

SEQ ID NO: 87113 - DNA, 405 bp, Artificial Sequence
  derived and/or modified sequence
atgagctggaagaaggccctgagaatccccggcggcctgagagccgccaccgtgaccctgatgctggccatgctgagcacccccgtggccgagggcagagacagccccgtggagcccaccgtgaccatcagccccagcagaaccgaggccctgaaccaccacaacctgctggtgtgcagcgtgaccgacttctaccccgcccagatcaaggtgagatggttcagaaacgaccaggaggagaccaccggcgtggtgagcacccccctgatcagaaacggcgactggaccttccagatcctggtgatgctggagatgaccccccagcacggcgacgtgtacacctgccacgtggagcaccccagcctgcagaaccccatcaccgtggagtggagactgctgcactag

SEQ ID NO: 87114 - DNA, 435 bp, Artificial Sequence
  derived and/or modified sequence
atgagctggaagaaggccctgagaatccccggcggcctgagagccgccaccgtgaccctgctgggcctgcccgccgccgagtactggaacagccagaaggacatcctggagagaaagagagccgccgtggacagagtgtgcagacacaactaccagctggagctgagaaccaccctgcagagaagagtggagcccaccgtgaccatcagccccagcagaaccgaggccctgaaccaccacaacctgctggtgtgcagcgtgaccgacttctaccccgcccagatcaaggtgagatggttcagaaacggccaggaggagaccgccggcgtggtgagcacccccctgatcagaaacggcgactggaccttccagatcctggtgatgctggagatgaccccccagagaggcgacgtgtacacctgccacgtggagtag

SEQ ID NO: 87115 - DNA, 435 bp, Artificial Sequence
  derived and/or modified sequence
atgagctggaagaaggccctgagaatccccggcggcctgagagccgccaccgtgacccccctgggcccccccgacgccgagtactggaacagccagaaggaggtgctggagagaaccagagccgagctggacaccgtgtgcagacacaactaccagctggagctgagaaccaccctgcagagaagagtggagcccaccgtgaccatcagccccagcagaaccgaggccctgaaccaccacaacctgctggtgtgcagcgtgaccgacttctaccccgcccagatcaaggtgagatggttcagaaacgaccaggaggagaccaccggcgtggtgagcacccccctgatcagaaacggcgactggaccttccagatcctggtgatgctggagatgaccccccagcacggcgacgtgtacacctgccacgtggagtag

SEQ ID NO: 87116 - DNA, 411 bp, Artificial Sequence
  derived and/or modified sequence
atgagctggaagaaggccctgagaatccccggcggcctgagagccgccaccgtgaccctgatgctgagcatgctgagcacccccgtggccgagggcagagacagccccgaggacttcgtgtaccagttcaagggcatgtgctacttcaccaacggcaccgagagagtgagactggtgagcagaagcatctacaacagagaggagatcgtgagattcgacagcgacgtgggcgagttcagagccgtgaccctgctgggcctgcccgccgccgagtactggaacagccagaaggacatcctggagagaaagagagccgccgtggacagagtgtgcagacacaactaccagctggagctgagaaccaccctgcagagaagaggcatggtgaccggccccagcagaagctggtag

SEQ ID NO: 87117 - DNA, 717 bp, Artificial Sequence
  derived and/or modified sequence
atgctgagcacccccgtggccgagggcagagacagccccgaggacttcgtgtaccagttcaagggcatgtgctacttcaccaacggcaccgagagagtgagactggtgagcagaagcatctacaacagagaggagatcgtgagattcgacagcgacgtgggcgagttcagagccgtgaccctgctgggcctgcccgccgccgagtactggaacagccagaaggacatcctggagagaaagagagccgccgtggacagagtgtgcagacacaactaccagctggagctgagaaccaccctgcagagaagagtggagcccaccgtgaccatcagccccagcagaaccgaggccctgaaccaccacaacctgctggtgtgcagcgtgaccgacttctaccccgcccagatcaaggtgagatggttcagaaacggccaggaggagaccgccggcgtggtgagcacccccctgatcagaaacggcgactggaccttccagatcctggtgatgctggagatgaccccccagagaggcgacgtgtacacctgccacgtggagcaccccagcctgcagagccccatcaccgtggagtggagagcccagagcgagagcgcccagagcaagatgctgagcggcatcggcggcttcgtgctgggcctgatcttcctgggcctgggcctgatcatccaccacagaagccagaagggcctgctgcactag

SEQ ID NO: 87118 - DNA, 717 bp, Artificial Sequence
  derived and/or modified sequence
atgctgagcacccccgtggccgagggcagagacagccccgaggacttcgtgtaccagttcaagggcatgtgctacttcaccaacggcaccgagagagtgagactggtgagcagaagcatctacaacagagaggagatcgtgagattcgacagcgacgtgggcgagttcagagccgtgaccctgctgggcctgcccgccgccgagtactggaacagccagaaggacatcctggagagaaagagagccgccgtggacagagtgtgcagacacaactaccagctggagctgagaaccaccctgcagagaagagtggagcccaccgtgaccatcagccccagcagaaccgaggccctgaaccaccacaacctgctggtgtgcagcgtgaccgacttctaccccgcccagatcaaggtgagatggttcagaaacgaccaggaggagaccgccggcgtggtgagcacccccctgatcagaaacggcgactggaccttccagatcctggtgatgctggagatgaccccccagagaggcgacgtgtacacctgccacgtggagcaccccagcctgcagagccccatcaccgtggagtggagagcccagagcgagagcgcccagagcaagatgctgagcggcatcggcggcttcgtgctgggcctgatcttcctgggcctgggcctgatcatccaccacagaagccagaagggcctgctgcactag

SEQ ID NO: 87119 - DNA, 1638 bp, Artificial Sequence
  derived and/or modified sequence
tttttattctttctgccaggtacatcagatccatcaggtccgagctgtgttgactaccacttttcccttcgtctcaattatgtcttggaaaaaggctttgcggatccccggaggccttcgggcagcaactgtgaccttgatgctgtcgatgctgagcaccccagtggctgagggcagagactctcccgaggatttcgtgtaccagtttaagggcatgtgctacttcaccaacgggacagagcgcgtgcgtcttgtgagcagaagcatctataaccgagaagagatcgtgcgcttcgacagcgacgtgggggagttccgggcggtgacgctgctggggctgcctgccgccgagtactggaacagccagaaggacatcctggagaggaaacgggcggcggtggacagggtgtgcagacacaactaccagttggagctccgcacgaccttgcagcggcgagtggagcccacagtgaccatctccccatccaggacagaggccctcaaccaccacaacctgctggtctgctcggtgacagatttctatccagcccagatcaaagtccggtggtttcggaatgaccaggaggagacagctggcgttgtgtccaccccccttattaggaatggtgactggaccttccagatcctggtgatgctggaaatgactccccagcgtggagacgtctacacctgccacgtggagcaccccagcctccagagccccatcaccgtggagtggcgggctcaatctgaatctgcccagagcaagatgctgagtggcattggaggcttcgtgctggggctgatcttcctcgggctgggccttatcatccatcacaggagtcagaaagggctcctgcactgactcctgagactattttaactgggattggttatcacttttctgtaacgcctgcttgtccctgcccagaattcccagctgtctgtgtcagcctgtccccctgagatcagagtcctacagtggctgtcacgcagccaccaggtcatctcctttcatccccaccttgaggcggatggctgtgaccctacttcctgcactgacccacagcctctgcctgtgcacggccagctgcatctactcaggccccaaggggtttctgtttctattctctcctcagactgctcaagagaagcacatgaaaaccattacctgactttagagcttttttacataattaaacatgatcctgagttatctgtattctgaacttccttaattgagcagaggcaggaaatcactgcagaatgaaggaacataccttgaggtgacccagccaacctgtgcccagaaggagggttgtaccttgaaaagacactgaaagaatttggggtgcaaagtcatggtgggcagaggaggtagaaaatcaactcagttgttgcatcattcatggttctttcatattgatgttcagtgcagtggcctgagaatatcccagcctctcttctggtttggtgagtgctatataagtaaacatggtggaattgtttgggggcagatatagtgacccttggtcactggtgtttcaaacattctggcaagtcacatcaatcaagaataatttttacttttaagaaagcataaccagcaataaaagtattatttttgattctaaatga

SEQ ID NO: 87120 - protein, 266 aa, Artificial Sequence
  derived and/or modified sequence
MVCLRLPGGSCMAVLTVTLMVLSSPLALAGDTRPRFLEYSTSECHFFNGTERVRYLDRYFHNQEENVRFDSDVGEFRAVTELGRPDAEYWNSQKDLLEQKRGRVDNYCRHNYGVVESFTVQRRVHPKVTVYPSKTQPLQHHNLLVCSVSGFYPGSIEVRWFRNGQEEKTGVVSTGLIHNGDWTFQTLVMLETVPRSGEVYTCQVEHPSVTSPLTVEWRARSESAQSKMLSGVGGFVLGLLFLGAGLFIYFRNQKGHSGLQPRGFLS

SEQ ID NO: 87121 - protein, 251 aa, Artificial Sequence
  derived and/or modified sequence
  misc_feature (1)..(1): Xaa can be any naturally occurring amino acid
XLLKLTRDFPQRHEKYQSWAGTFHLCLKKNKYPDSRSTFIKHAGSYLKRGEFLAIHTAITCFFRQISARFLEYSTSECHFFNGTERVRYLDRYFHNQEENVRFDSDVGEFRAVTELGRPDAEYWNSQKDLLEQKRGRVDNYCRHNYGVVESFTVQRRVHPKVTVYPSKTQPLQHHNLLVCSVSGFYPGSIEVRWFRNGQEEKTGVVSTGLIHNGDWTFQTLVMLETVPRSGEVYTCQVEHPSVTSPLTVEW

SEQ ID NO: 87122 - DNA, 801 bp, Artificial Sequence
  derived and/or modified sequence
atggtctgcttgcgcctccccggcgggtcctgcatggcagtactgacagtgacacttatggtgctgtcatcccccctagccctggctggggatacccgccctcgatttctagaatactccacatccgaatgccacttctttaacgggacagagagggttagatacctggaccggtatttccacaaccaagaggagaacgtgcggtttgatagtgacgtgggagagtttcgggccgttactgagttgggaagaccagacgctgagtactggaattctcagaaggatctactggaacaaaagagagggagagtggataactattgtagacataactacggagttgttgagtcttttaccgtccagaggcgagtgcaccctaaggtgacagtgtacccaagtaagacacagccactgcaacaccataatcttctagtctgctccgtttcagggttttatcccgggagcatcgaggtgcgatggttcaggaacggccaggaggagaaaactggcgtagtgagtacgggactgatccacaacggggactggaccttccagacgttagttatgctggagacagtgcctagatccggtgaggtttacacctgccaggtcgagcacccttctgtcacctcgcctcttaccgtggaatggagagcacgtagcgaatcagcccagtctaagatgctgtctggcgtggggggcttcgtcctgggactgctattcctcggcgccggtctgtttatatactttcgcaatcagaaagggcacagtggactgcagccccgaggatttcttagctag

SEQ ID NO: 87123 - DNA, 801 bp, Artificial Sequence
  derived and/or modified sequence
atggtgtgcctaaggctccctggggggtcttgcatggccgttcttaccgtgaccctgatggtgctgtcttcccctttggccctagcaggggacactcggcctcggtttcttgaatactccacaagcgagtgccacttcttcaatggtaccgaaagggtgagatacctggacaggtactttcataaccaagaggaaaatgtccgcttcgacagcgatgtgggggaattcagggcagtgacagaactgggcagaccagatgccgagtactggaatagtcagaaggatcttctcgaacagaagcggggtagagtggataactactgtaggcacaattacggagtagtggagtctttcaccgtgcaaagaagggtccaccccaaggtgacggtgtacccaagcaagactcagcccctccagcaccataacctgctggtatgctcggtcagcgggttctatccagggtctattgaggtgcgctggtttaggaatggacaggaggagaaaacaggcgtggtaagtacggggctgatccacaatggggattggacgttccagaccctcgtgatgctcgaaaccgtcccgcgatctggcgaggtgtatacctgccaggtggaacacccatccgtgacttctccgctcactgtggagtggcgcgcccgtagtgagagtgcccagtccaaaatgcttagcggagtgggcggttttgttctagggttattgttcttgggcgctgggctcttcatctacttcagaaaccagaagggacattccggcctgcagccaaggggttttctctcctag

SEQ ID NO: 87124 - DNA, 756 bp, Artificial Sequence
  derived and/or modified sequence
tagctgctcaaactgacacgggactttccccaacggcatgaaaagtatcagtcctgggccggcacctttcatttatgcctgaagaagaacaaatatcctgattcacggtccacctttataaaacacgctggtagctacctaaagagaggagagtttttggctatccacactgccatcacctgttttttccgccagatatctgctcgcttcctggaatattctacatccgaatgccatttctttaatggaaccgagcgggtaagatacctcgacaggtatttccataatcaagaagagaacgttaggttcgattccgatgtaggagagtttcgggccgtcaccgaattgggcagacctgatgccgaatactggaattcacagaaggacctactggagcagaagcgaggccgggtagacaactactgtcgccacaattacggtgtggttgagagcttcacagttcagcggagagttcaccccaaagttacagtgtatccttctaaaacgcagcccctccagcatcataacctccttgtctgtagcgtgagtggattttacccagggtccatcgaggtaagatggtttcggaatggacaggaagaaaagaccggagtggtttctaccgggctgattcacaatggcgattggacattccagacactggtgatgctggagacggttccaaggtccggcgaagtatacacctgccaagtagaacatcctagcgtgacatctccccttacagtcgaatggtag

SEQ ID NO: 87125 - DNA, 756 bp, Artificial Sequence
  derived and/or modified sequence
taactgcttaagctgacaagagatttcccccagcggcacgagaaatatcagagttgggctggaacttttcacctttgtctgaaaaagaacaaatatccagatagcagatccacttttattaagcacgcaggctcatacctcaagagaggagaatttctggccatccacacggcaatcacatgtttctttcgacaaatctcagctcgtttcctcgaatacagtacctctgagtgccatttcttcaacggaaccgagcgcgtcagataccttgatcggtatttccacaaccaggaggaaaatgtgcgctttgattccgatgtcggggaatttagagccgtcactgaactcggcagacccgatgccgagtattggaactcccagaaagatttactcgagcagaagcggggcagggttgataactactgtaggcacaactacggggtggtcgaatctttcactgtgcagcgcagggttcatcccaaggttaccgtttaccccagtaagacccagcccttacaacaccacaatctgctagtctgcagcgtttctggcttctaccccggctccattgaggtgcgctggtttaggaacggccaagaagagaagacaggtgttgtgtccaccgggctaattcacaacggtgattggactttccagaccttagtcatgctcgaaacagttcctcggtccggcgaggtctatacttgccaggttgagcatccctctgtcacatcacccttaactgtagagtggtag

SEQ ID NO: 87126 - DNA, 801 bp, Artificial Sequence
  derived and/or modified sequence
atggtgtgcctgcggctgcccggcggcagctgcatggctgtgctgactgtgaccctgatggtgctgagcagccccctggccctggccggggacacccggccccgcttcctggagtacagcaccagcgagtgccacttcttcaacggcacagagcgggtgcgctacctggaccgctacttccacaaccaggaggagaatgtgcgctttgacagtgatgtgggggagttccgggctgtgacagagctgggccgcccagatgctgagtactggaacagccagaaggacctgctggagcagaagaggggccgggtggacaactactgccgccacaactacggcgtggtggagagcttcaccgtgcagaggagagtgcaccccaaggtgacagtgtaccccagcaagacccagcccctgcagcaccacaacctgctggtgtgcagcgtgtctggcttctacccaggcagcattgaggtgcgctggttcagaaatggccaggaggagaagacaggagtggtgtccacaggcctcatccacaatggagactggaccttccagaccctggtgatgctggagaccgtgcccaggtctggagaggtgtacacctgccaggtggagcaccccagcgtgaccagccccctgactgtggagtggagggcccggtctgagagcgcccagagcaagatgctgagcggcgtgggcggctttgtgctgggcctgctcttcctgggcgccggcctcttcatctacttcaggaaccagaagggccacagcggcctgcagccccggggcttcctgtcctag

SEQ ID NO: 87127 - DNA, 756 bp, Artificial Sequence
  derived and/or modified sequence
tgactgctgaagctgacccgggacttcccccagagacatgagaagtaccagagctgggccggcaccttccacctgtgcctgaagaagaacaagtacccagacagccgcagcaccttcatcaagcatgctggcagctacctgaagagaggagagttcctggccatccacacagccatcacctgcttcttccggcagatcagcgcccgcttcctggagtacagcaccagcgagtgccacttcttcaacggcacagagcgggtgcgctacctggaccgctacttccacaaccaggaggagaatgtgcgctttgacagtgatgtgggggagttccgggctgtgacagagctgggccgcccagatgctgagtactggaacagccagaaggacctgctggagcagaagaggggccgggtggacaactactgccgccacaactacggcgtggtggagagcttcaccgtgcagaggagagtgcaccccaaggtgacagtgtaccccagcaagacccagcccctgcagcaccacaacctgctggtgtgcagcgtgtctggcttctacccaggcagcattgaggtgcgctggttcagaaatggccaggaggagaagacaggagtggtgtccacaggcctcatccacaatggagactggaccttccagaccctggtgatgctggagaccgtgcccaggtctggagaggtgtacacctgccaggtggagcaccccagcgtgaccagccccctgactgtggagtggtag

SEQ ID NO: 87128 - DNA, 1230 bp, Artificial Sequence
  derived and/or modified sequence
agtaacttactccctataacttggaatgtgggtggaggggttcatagttctccctgagtgagacttgcctgctgctctggcccctggtcctgtcctgttctccagcatggtgtgtctgaggctccctggaggctcctgcatggcagttctgacagtgacactgatggtgctgagctccccactggctttggctggggacaccagaccacgtttcttggagtactctacgtctgagtgtcatttcttcaatgggacggagcgggtgcggtacctggacagatacttccataaccaggaggagaacgtgcgcttcgacagcgacgtgggggagttccgggcggtgacggagctggggcggcctgatgccgagtactggaacagccagaaggacctcctggagcagaagcggggccgggtggacaactactgcagacacaactacggggttgtggagagcttcacagtgcagcggcgagtccatcctaaggtgactgtgtatccttcaaagacccagcccctgcagcaccataacctcctggtctgttctgtgagtggtttctatccaggcagcattgaagtcaggtggttccggaatggccaggaagagaagactggggtggtgtccacaggcctgatccacaatggagactggaccttccagaccctggtgatgctggaaacagttcctcggagtggagaggtttacacctgccaagtggagcacccaagcgtgacaagccctctcacagtggaatggagagcacggtctgaatctgcacagagcaagatgctgagtggagtcgggggctttgtgctgggcctgctcttccttggggccgggctgttcatctacttcaggaatcagaaaggacactctggacttcagccaagaggattcctgagctgaagtgcagatgacacattcaaagaagaactttctgccccagctttgcaggatgaaaagctttccctcctggctgttattcttccacaagagagggctttctcaggacctggttgctactggttcagcaactgcagaaaatgtcctcccttgtggcttcctcagctcctgttcttggcctgaagccccacagctttgatggcagtgcctcatcttcaacttttgtgctcccctttgcctaaaccctatggcctcctgtgcatctgtactcaccctgtaccacaaacacattacattattaaatgtttctcaaagatggagttaaa

SEQ ID NO: 87129 - DNA, 753 bp, Artificial Sequence
  derived and/or modified sequence
cccttttaaaactcaccagggacttcccacagaggcatgaaaaatatcagtcctgggcagggactttccacctatgtctgaaaaagaacaagtatcctgattcacgctctacattcattaagcatgctggatcttacttgaaaaggggagagttcttggcaatccacacagctatcacctgtttctttcgacaaatttcagcacgtttcttggagtactctacgtctgagtgtcatttcttcaatgggacggagcgggtgcggtacctggacagatacttccataaccaggaggagaacgtgcgcttcgacagcgacgtgggggagttccgggcggtgacggagctggggcggcctgatgccgagtactggaacagccagaaggacctcctggagcagaagcggggccgggtggacaactactgcagacacaactacggggttgtggagagcttcacagtgcagcggcgagtccatcctaaggtgactgtgtatccttcaaagacccagcccctgcagcaccataacctcctggtctgttctgtgagtggtttctatccaggcagcattgaagtcaggtggttccggaatggccaggaagagaagactggggtggtgtccacaggcctgatccacaatggagactggaccttccagaccctggtgatgctggaaacagttcctcggagtggagaggtttacacctgccaagtggagcacccaagcgtgacaagccctctcacagtggaatgga

SEQ ID NO: 87130 - DNA, 801 bp, Artificial Sequence
  derived and/or modified sequence
atggtgtgcctgcggctgcccggcggcagctgcatggccgtgctgaccgttactcttatggtcttgagttcaccactggccctcgccggagacaccaggccacggtttctcgagtacagcacgtccgagtgccactttttcaatgggacagagagggttaggtacttggatagatactttcacaaccaggaggaaaacgtccggtttgacagcgacgtaggtgagtttagagctgtaactgagctgggcagaccagatgcggaatattggaattcccaaaaagatctcctggagcagaaacgcggccgcgtggataactattgtcggcacaactacggagtagtggaatcttttaccgtacagcgaagggtgcacccgaaggttaccgtgtatcccagcaagacacaacccctgcagcatcataatctgcttgtctgttcagtgagcgggttttacccgggaagcatagaagtgagatggttccgcaatggacaggaggagaaaactggagtcgtgagcaccggccttatccacaacggcgactggacattccagacactggtgatgctggagaccgtgcctcgtagcggtgaagtgtatacgtgccaagtggagcatccgtccgttacgagcccactcaccgtcgagtggcgcgccaggtcagagtcagctcagtctaaaatgctcagtggagtgggcggcttcgtgctgggtcttctattcctgggcgccggcctatttatctactttagaaaccagaaggggcattcagggctgcagcctagaggcttcttgtcttag

SEQ ID NO: 87131 - DNA, 801 bp, Artificial Sequence
  derived and/or modified sequence
atggtgtgcctgcggctgcccggcggcagctgcatggccgtgctgactgttacacttatggtactatcttccccactcgctctagctggggatactaggccaagattcctcgagtattcaaccagtgaatgccacttttttaatggcacggagagagttaggtacctggacaggtactttcataaccaggaagaaaacgtcagatttgactccgatgtcggggagttccgcgctgttacggagctgggtcggcccgatgcagagtattggaacagtcagaaagatctgctcgaacagaaacgtggacgggtcgataactattgcaggcataactacggtgtagtcgagagttttacagtgcaaaggcgcgtgcacccaaaggttacagtgtacccctccaagacacaacctctgcaacaccacaatcttttggtctgttccgtgagcggcttttaccccggatccatcgaagttcgctggttcagaaatgggcaggaagagaagaccggggtggtctctacagggttgatccacaacggggattggacgttccagaccctggtgatgctcgagaccgtccctcggtctggcgaagtctacacttgccaggtagagcatcctagcgttacctctccactgactgtcgaatggcgagccagatctgagtcagctcagagcaagatgctgagtggagtcggaggcttcgtcctggggctgctctttctgggtgcgggactttttatatatttcaggaatcagaaggggcattcagggctgcagcctaggggcttcctatcatag

SEQ ID NO: 87132 - DNA, 756 bp, Artificial Sequence
  derived and/or modified sequence
tgactgctgaagctgacccgggacttcccccagcggcacgagaagtaccagtcttgggctggcactttccacctttgcttgaaaaaaaataagtatcctgactccaggagcacatttattaaacatgccggttcgtacctgaagcggggcgagttcttggcaatccatacagctatcacgtgcttcttccgacagatcagtgctcgtttccttgagtacagtacatctgaatgtcatttttttaatggcacagagagggtgcgctatttagaccgttatttccataatcaggaggaaaatgtaaggttcgactcagacgtcggtgaattcagggctgtgacagagctgggccgacccgacgccgaatattggaattcacaaaaagaccttcttgaacagaaaagaggtagagtggacaattattgtaggcataattatggggtcgttgaatccttcacagtgcagcgacgggtacaccccaaagtcacagtctacccgtccaagacacagcctcttcagcaccataacttgctggtgtgttcagtatctggtttctatcctggcagcattgaagtccgatggttccgcaatggtcaagaggagaagaccggggttgtctccactggactgatacacaacggcgattggacatttcaaacactggttatgttggagaccgtgccccggagtggagaagtgtacacctgccaggttgaacaccccagtgtcacctcaccattgaccgttgagtggtag

SEQ ID NO: 87133 - DNA, 756 bp, Artificial Sequence
  derived and/or modified sequence
tgactgctgaagctgacccgggacttcccccagcggcacgagaagtaccagtcttgggctggcactttccacctgtgcctgaaaaagaataagtatcctgatagccggagcacctttattaagcatgcagggtcttacttaaagcgcggcgaatttctggccattcatacggccataacatgcttctttcgtcaaatttcggcgagattcttagaatactcaaccagcgagtgccacttttttaatggcacggaaagagtccgatatctggaccgctacttccacaatcaggaagaaaatgtgcgctttgactcagatgtaggagaattccgggccgttactgagctgggccgtccagatgctgagtattggaactctcagaaagacttgcttgaacagaaaagagggagggtggataattattgtcggcacaattacggcgtcgtcgagtcttttacagtacagagaagggtccatccaaaggtgaccgtctatccaagtaagacacaacccctgcagcaccacaatctcttagtctgctctgtcagtggattctatcctggatcaatcgaggtcagatggttcagaaacggacaggaagaaaaaaccggcgtcgtgagcaccgggttaatccacaatggggactggacctttcagaccctggtgatgctggaaaccgtccctagatccggcgaagtatacacttgccaagttgaacatccatccgtgacctcacccttaaccgtggagtggtag

SEQ ID NO: 87134 - DNA, 801 bp, Artificial Sequence
  derived and/or modified sequence
atggtgtgtctccgccttcctggagggtcttgcatggctgtgctcacagtgacccttatggtgctgagttcccctctcgccctggcaggcgacaccaggccgagattccttgaatattccacctctgaatgccatttctttaatgggacagagcgggttcgctaccttgatcgttacttccataaccaggaggagaacgttcgcttcgactctgacgtgggtgaatttagggcggttacggaactaggtcggccagacgcagagtactggaactcccagaaggacctgttagaacaaaaacggggtagggtggataactactgtcggcacaactatggcgtggtagagagcttcactgtgcagcgcagagtgcacccaaaggtgaccgtttatccaagtaaaacgcaaccactgcaacaccacaatttgctggtatgtagcgtgagtggtttttaccccggttctatcgaggttaggtggtttcgtaatggacaggaagagaagacgggcgtggtaagcaccgggctgatacataatggtgattggacttttcagactctggtcatgctggagacagtgccaaggagcggggaggtatatacatgtcaggtcgagcatccctctgtgacttctccactgacggtagagtggcgcgcacgctcggagagcgcacagtcgaagatgctgtctggagttggcggattcgttctggggctgctgtttctaggggcaggccttttcatctacttccggaaccagaagggtcatagtggcttgcagccgcgaggattcctgtcctag

SEQ ID NO: 87135 - DNA, 801 bp, Artificial Sequence
  derived and/or modified sequence
atggtttgtttgcggcttcccggaggctcttgcatggcagttctcaccgtgacactgatggtcctgtctagccctcttgcgctggctggggacactagaccacgcttcctggagtattcaaccagtgaatgccacttcttcaacggcaccgagagggtgagatatctggacaggtatttccacaatcaagaggaaaacgtgcgattcgatagcgatgtgggtgaattcagagcagtaacggagctcggcaggccggacgcagagtattggaactcacagaaggaccttctggagcagaagcgaggcagagtagataactactgtagacacaactacggcgttgtggagagttttaccgtgcagcgtcgcgtgcaccccaaagtgactgtgtacccatccaagacccagcctttacagcaccacaacctcttggtatgctcagtctcaggcttctatcccggttctatagaggtgaggtggttccggaacgggcaagaagagaaaaccggagtggtgagcaccggcttaatccataacggcgattggacattccagactttggtgatgcttgagaccgtgcctagatccggcgaggtgtacacctgccaggtggagcacccttccgtgacatcacccctaaccgtcgagtggcgcgctcggagtgagtctgcccagtcaaagatgctgtccggggtgggcggtttcgtgctggggctgctcttcctgggagctgggctgttcatctacttcaggaatcagaaaggacattccggcctccagcctagaggatttttatcttag

SEQ ID NO: 87136 - DNA, 756 bp, Artificial Sequence
  derived and/or modified sequence
tgactcctgaagctgacgcgggatttccctcagagacacgaaaaataccaatcctgggctggcactttccacttgtgcttgaaaaagaacaagtaccccgattcgcggtctacctttatcaagcacgccggttcctatttaaagcggggtgaatttcttgccatccacacagccataacttgttttttccgccagattagcgcaaggttccttgaatatagcacatctgagtgccatttctttaatggaaccgaaagggtgcggtacctagacagatattttcacaatcaggaggagaacgtgcgcttcgattctgacgtgggggaattcagagctgtgacagagctcgggagaccagacgctgaatactggaactctcaaaaggacctgctggagcagaagcggggtcgggtggataattattgtcgacataattacggagttgtggagtcctttacagtgcagcgtcgcgtgcaccccaaggtaaccgtgtacccatctaaaactcagccactccaacatcacaaccttctggtctgcagcgtgagcgggttttatccaggctctatagaggtgagatggtttagaaacggccaggaggaaaaaactggggtcgtctctacgggtcttatccataatggagattggactttccagacactcgttatgttggaaactgtgcccagaagtggcgaggtgtatacctgccaggtcgagcacccgtctgtgacaagccccctgaccgtggagtggtag

SEQ ID NO: 87137 - DNA, 756 bp, Artificial Sequence
  derived and/or modified sequence
tgactccttaagctaacgagggactttccacaacgccatgagaaatatcagtcatgggccggaactttccatttatgtttgaagaaaaataagtatcctgatagtcgaagcacattcataaaacacgcagggagttacctcaaacggggagagttcctcgcgatacacacagccattacatgcttttttcgtcagattagcgcacgttttctggagtatagtacatccgagtgccacttttttaacggaacagaacgagttcgatatttggaccggtactttcataaccaggaagagaacgttcgcttcgatagcgacgtgggtgagtttagggccgtcacagagttaggacgccctgacgctgaatactggaacagccaaaaggacctgctggaacagaaaagaggcagggtggacaactactgccggcacaactatggcgtggtggaatccttcaccgttcagcgtcgtgttcatcctaaggttacagtctacccgagcaaaacccagcctttgcagcatcataatcttctggtgtgctccgtgtccggcttctatccaggatcaattgaggttcgttggtttcgcaatggtcaagaagaaaagacaggggtcgtgagcacggggctgattcacaacggggattggaccttccagactctagttatgctggagaccgtaccacgctctggcgaagtgtacacttgtcaggtggagcatccctccgtgaccagtcccctgactgtggagtggtag
